(19) United States
(12) Patent Application Publication
(10) Pub. No.: US 2023/0220115 A1
(43) Pub. Date: Jul. 13, 2023

(54) TETRAHEDRAL ANTIBODIES

(71) Applicant: Biomolecular Holdings LLC, Burlingame, CA (US)

(72) Inventor: Daniel J. Capon, Hillsborough, CA (US)

(73) Assignee: Biomolecular Holdings LLC, Burlingame, CA (US)

(21) Appl. No.: 18/153,769

(22) Filed: Jan. 12, 2023

Related U.S. Application Data
(60) Provisional application No. 63/299,003, filed on Jan. 12, 2022.

(51) Int. Cl. C07K 16/46; C07K 14/54; C12N 15/63; A61P 29/00; A61P 31/14

(52) U.S. Cl. CPC C07K 16/468; C07K 14/5443; C12N 15/63; A61P 29/00; A61P 31/14; C07K 2317/52; C07K 2317/55; C07K 2319/03; C07K 2317/35; C07K 2317/31

(57) ABSTRACT

This invention provides a tetrahedral antibody comprising a first, second, third, and fourth domain, wherein each of the first and second domains are selected from the group consisting of a Fab domain and an Fc domain, wherein each of the first and second domains comprise a first polypeptide chain comprising a first N-terminus and a first C-terminus of the domain, and a second polypeptide chain comprising a second N-terminus and a second C-terminus of the domain, and wherein the first domain and the second domain are joined to each other by a non-peptidyl linkage between the first N-terminus of the first domain and the first N-terminus of the second domain, between first C-terminus of the first domain and the first C-terminus of the second domain, between the first N-terminus of the first domain and the first C-terminus of the second domain, or between the first C-terminus of the first domain and the first N-terminus of the second domain.

[0001] This application claims the benefit of U.S. Provisional Application No. 63/299,003, filed Jan. 12, 2022, the contents of which is hereby incorporated by reference.

[0002] Throughout this application, various publications are referenced, including referenced in parenthesis. The disclosures of all publications mentioned in this application in their entireties are hereby incorporated by reference into this application in order to provide additional description of the art to which this invention pertains and of the features in the art which can be employed with this invention.

### REFERENCE TO SEQUENCE LISTING

[0003] This application incorporates-by-reference nucleotide sequences which are present in the file named “230112_91300-C_SequenceListing.xml”, which is 11.1 megabytes in size, and which was created on Jan. 9, 2022 in the IBM-PC machine format, having an operating system compatibility with MS-Windows, which is contained in the xml file filed Jan. 12, 2023 as part of this application.

### BACKGROUND OF THE INVENTION

[0004] Antibodies are a diverse family of vertebrate proteins comprising a Y-shaped structure consisting of two antigen binding (Fab) domains and one effector cell binding (Fc) domain. The arrangement of these three domains around a central hinge region bears a striking resemblance to trigonal molecular geometries in which a central atom is bonded to three peripheral atoms arranged at the corners of a triangle. Such a planar configuration of binding domains is sufficient for antibodies to carry out their normal functions. As such, efforts to-date to engineer antibodies and antibody-like molecules have also generally adopted the natural planar configuration of antibody binding domains. However, when the binding domains of an engineered antibody and antibody-like molecule are intended to engage multiple targets, a planar configuration of binding domains is not ideally suited to permit the simultaneous engaging of multiple targets by the binding domains.

### SUMMARY OF THE INVENTION

[0005] This invention provides a tetrahedral antibody comprising a first, second, third, and fourth domain, wherein:
[0006] a) each of the first and second domains are selected from the group consisting of a Fab domain and an Fc domain,
[0007] b) each of the first and second domains comprise:
   [0008] i) a first polypeptide chain comprising a first N-terminus and a first C-terminus of the domain, and
   [0009] ii) a second polypeptide chain comprising a second N-terminus and a second C-terminus of the domain,
[0010] c) the first domain and the second domain are joined to each other by a non-peptidyl linkage wherein the non-peptidyl linkage is:
   [0011] i) a covalent linkage
      [0012] (1) attached to the first N-terminus of the first domain and the first N-terminus of the second domain,
      [0013] (2) attached to the first C-terminus of the first domain and the first C-terminus of the second domain,
      [0014] (3) attached to the first N-terminus of the first domain and the first C-terminus of the second domain, or
      [0015] (4) attached to the first C-terminus of the first domain and the first N-terminus of the second domain, or
   [0016] ii) a non-covalent linkage
      [0017] (1) between a first dimerizing polypeptide attached by a peptide bond or via a peptide linker to the first N-terminus of the first domain, and a second dimerizing polypeptide attached by a peptide bond or via a peptide linker to the first N-terminus of the second domain,
      [0018] (2) between a first dimerizing polypeptide attached by a peptide bond or via a peptide linker to the first C-terminus of the first domain, and a second dimerizing polypeptide attached by a peptide bond or via a peptide linker to the first C-terminus of the second domain,
      [0019] (3) between a first dimerizing polypeptide attached by a peptide bond or via a peptide linker to the first N-terminus of the first domain, and a second dimerizing polypeptide attached by a peptide bond or via a peptide linker to the first C-terminus of the second domain, or
      [0020] (4) between a first dimerizing polypeptide attached by a peptide bond or via a peptide linker to the first C-terminus of the first domain, and a second dimerizing polypeptide attached by a peptide bond or via a peptide linker to the first N-terminus of the second domain,
      [0021] wherein the first and second dimerizing polypeptides are not immunoglobulin polypeptides,
[0022] d) if the first domain is joined to the second domain via a covalent linkage attached to the first N-terminus of the first domain, then the third domain is attached at its C-terminus to the second N-terminus of the first domain by a peptide bond or via a peptide linker,
[0023] e) if the first domain is joined to the second domain via a covalent linkage attached to the first C-terminus of the first domain then the third domain is attached at its N-terminus to the second C-terminus of the first domain by a peptide bond or via a peptide linker,
[0024] f) if the first domain is joined to the second domain via a first dimerizing polypeptide attached to the first N-terminus of the first domain, then the third domain is attached at its C-terminus by a peptide bond or via a peptide linker to
   [0025] i) the N-terminus of the first dimerizing polypeptide,
   [0026] ii) the second N-terminus of the first domain, or
   [0027] iii) the N-terminus of a third dimerizing polypeptide, wherein the third dimerizing polypeptide is attached at its C-terminus by a peptide bond or via a peptide linker to the second N-terminus of the first domain,
[0028] g) if the first domain is joined to the second domain via a first dimerizing polypeptide attached to the first C-terminus of the first domain, then the third domain is attached at its N-terminus by a peptide bond or via a peptide linker to
   [0029] i) the C-terminus of the first dimerizing polypeptide,
   [0030] ii) the second C-terminus of the first domain, or
   [0031] iii) the C-terminus of a third dimerizing polypeptide, wherein the third dimerizing polypeptide is attached at its N-terminus by a peptide bond or via a peptide linker to the second C-terminus of the first domain,
[0032] h) if the second domain is joined to the first domain via a covalent linkage attached to the first N-terminus of the second domain, then the fourth domain is attached at its C-terminus to the second N-terminus of the second domain by a peptide bond or via a peptide linker,
[0033] i) if the second domain is joined to the first domain via a covalent linkage attached to the first C-terminus of the second domain then the fourth domain is attached at its N-terminus to the second C-terminus of the second domain by a peptide bond or via a peptide linker,
[0034] j) if the second domain is joined to the first domain via a second dimerizing polypeptide attached to the first N-terminus of the second domain, then the fourth domain is attached at its C-terminus by a peptide bond or via a peptide linker to
   [0035] i) the N-terminus of the second dimerizing polypeptide,
   [0036] ii) the second N-terminus of the second domain, or
   [0037] iii) the N-terminus of a fourth dimerizing polypeptide, wherein the third dimerizing polypeptide is attached at its C-terminus by a peptide bond or via a peptide linker to the second N-terminus of the second domain,
[0038] k) if the second domain is joined to the first domain via a second dimerizing polypeptide attached to the first C-terminus of the second domain, then the fourth domain is attached at its N-terminus by a peptide bond or via a peptide linker to
   [0039] i) the C-terminus of the second dimerizing polypeptide,
   [0040] ii) the second C-terminus of the second domain, or
   [0041] iii) the C-terminus of a fourth dimerizing polypeptide, wherein the fourth dimerizing polypeptide is attached at its N-terminus by a peptide bond or via a peptide linker to the second C-terminus of the second domain.

[0042] This invention also provides a tetrahedral molecule comprising a first, second, third, and fourth domain, wherein:
[0043] a) the first and second domains each independently comprise:
   [0044] i) a first polypeptide chain comprising a first N-terminus and a first C-terminus of the domain, and
   [0045] ii) optionally a second polypeptide chain comprising a second N-terminus and a second C-terminus of the domain,
[0046] b) the first domain and the second domain are joined to each other by a non-covalent linkage
   (1) between a first dimerizing polypeptide attached by a peptide bond or via a peptide linker to the first N-terminus of the first domain, and a second dimerizing polypeptide attached by a peptide bond or via a peptide linker to the first N-terminus of the second domain,
      [0047] (2) between a first dimerizing polypeptide attached by a peptide bond or via a peptide linker to the first C-terminus of the first domain, and a second dimerizing polypeptide attached by a peptide bond or via a peptide linker to the first C-terminus of the second domain,
      [0048] (3) between a first dimerizing polypeptide attached by a peptide bond or via a peptide linker to the first N-terminus of the first domain, and a second dimerizing polypeptide attached by a peptide bond or via a peptide linker to the first C-terminus of the second domain, or
      [0049] (4) between a first dimerizing polypeptide attached by a peptide bond or via a peptide linker to the first C-terminus of the first domain, and a second dimerizing polypeptide attached by a peptide bond or via a peptide linker to the first N-terminus of the second domain,
   [0050] wherein the first and second dimerizing polypeptides are not immunoglobulin polypeptides,
[0051] c) if the first domain is joined to the second domain via a first dimerizing polypeptide attached to the first N-terminus of the first domain, then the third domain is attached at its C-terminus by a peptide bond or via a peptide linker to
   [0052] i) the N-terminus of the first dimerizing polypeptide,
   [0053] ii) the second N-terminus of the first domain if present, or
   [0054] iii) the N-terminus of a third dimerizing polypeptide, wherein the third dimerizing polypeptide is attached at its C-terminus by a peptide bond or via a peptide linker to the second N-terminus of the first domain if present,
[0055] d) if the first domain is joined to the second domain via a first dimerizing polypeptide attached to the first C-terminus of the first domain, then the third domain is attached at its N-terminus by a peptide bond or via a peptide linker to
   [0056] i) the C-terminus of the first dimerizing polypeptide,
   [0057] ii) the second C-terminus of the first domain if present, or
   [0058] iii) the C-terminus of a third dimerizing polypeptide, wherein the third dimerizing polypeptide is attached at its N-terminus by a peptide bond or via a peptide linker to the second C-terminus of the first domain if present,
[0059] e) if the second domain is joined to the first domain via a second dimerizing polypeptide attached to the first N-terminus of the second domain, then the fourth domain is attached at its C-terminus by a peptide bond or via a peptide linker to
   [0060] i) the N-terminus of the second dimerizing polypeptide,
   [0061] ii) the second N-terminus of the second domain if present, or
   [0062] iii) the N-terminus of a fourth dimerizing polypeptide, wherein the third dimerizing polypeptide is attached at its C-terminus by a peptide bond or via a peptide linker to the second N-terminus of the second domain if present,
[0063] f) if the second domain is joined to the first domain via a second dimerizing polypeptide attached to the first C-terminus of the second domain, then the fourth domain is attached at its N-terminus by a peptide bond or via a peptide linker to
   [0064] i) the C-terminus of the second dimerizing polypeptide,
   [0065] ii) the second C-terminus of the second domain if present, or
   [0066] iii) the C-terminus of a fourth dimerizing polypeptide, wherein the fourth dimerizing polypeptide is attached at its N-terminus by a peptide bond or via a peptide linker to the second C-terminus of the second domain if present.

[0067] This invention also provides a non-naturally occurring fusion protein dimer comprising a dimer of a first dimerizing polypeptide and a second dimerizing polypeptide, wherein:
[0068] a) the first dimerizing polypeptide is attached by a peptide bond or via a peptide linker at its N-terminus or C-terminus to a first domain,
[0069] b) the second dimerizing polypeptide is optionally attached by a peptide bond or via a peptide linker at its N-terminus or C-terminus to a second domain,
[0070] c) the first and second dimerizing polypeptides are selected from the group consisting of:
   [0071] i) a collectrin-like domain (CLD), and
   [0072] ii) a collectrin domain (CD),
[0073] d) the first dimerizing polypeptide is optionally attached by a peptide bond or via a peptide linker at its remaining free N-terminus or C-terminus to a third domain, and
[0074] e) the second dimerizing polypeptide is optionally attached by a peptide bond or via a peptide linker at its remaining free N-terminus or C-terminus to a fourth domain, and.

[0075] This invention also provides an octahedral antibody comprising a first, second, third, fourth, fifth and sixth domain, wherein:
[0076] a) each of the first, second and third domains are selected from the group consisting of a Fab domain and an Fc domain,
[0077] b) each of the first, second and third domains comprise:
   [0078] i) a first polypeptide chain comprising a first N-terminus and a first C-terminus of the domain, and
   [0079] ii) a second polypeptide chain comprising a second N-terminus and a second C-terminus of the domain,
[0080] c) the first N-terminus of the first domain, the first N-terminus of the second domain and the first N-terminus of the third domain are joined to each other by a non-peptidyl linkage wherein the non-peptidyl linkage is:
   [0081] i) a branched covalent linkage, or
   [0082] ii) a non-covalent linkage between
      [0083] (1) a first trimerizing polypeptide attached by a peptide bond or via a peptide linker to the first N-terminus of the first domain,
      [0084] (2) a second trimerizing polypeptide attached by a peptide bond or via a peptide linker to the first N-terminus of the second domain, and
      [0085] (3) a third trimerizing polypeptide attached by a peptide bond or via a peptide linker to the first N-terminus of the third domain,
      [0086] wherein the first, second, and third trimerizing polypeptides are not immunoglobulin polypeptides,
[0087] d) the fourth domain is attached at its C-terminus by a peptide bond or via a peptide linker to:
   [0088] i) the second N-terminus of the first domain, or
   [0089] ii) the N-terminus terminus of the first trimerizing polypeptide,
[0090] e) the fifth domain is attached at its C-terminus by a peptide bond or via a peptide linker to:
   [0091] i) the second N-terminus of the second domain, or
   [0092] ii) the N-terminus of the second trimerizing polypeptide, and
[0093] f) the sixth domain is attached at its C-terminus by a peptide bond or via a peptide linker to:
   [0094] i) the second N-terminus of the third domain, or
   [0095] ii) the N-terminus of the third trimerizing polypeptide.

### BRIEF DESCRIPTION OF THE DRAWINGS

[0096] FIG. 1: General schematic structure of tetrahedral antibodies showing the positions of domains D1, D2, D3, D4 (A-D), and D5 and D6 (D), and the positions of the covalent linkage (A) and non-covalent linkage (B-D).

[0097] FIG. 2: Schematic structure of tetrahedral antibodies with covalent linkages shown in FIG. 1, Panel A, wherein (A) D1, D2, D3 and D4 are all different; (B) D1 and D2 are different; D3 and D4 are the same; (C) D1 and D2 are the same; D3 and D4 are different; (D) D1 and D2 are the same; D3 and D4 are the same.

[0098] FIG. 3: Schematic structure of tetrahedral antibodies with non-covalent linkages shown in FIG. 1, Panel B, wherein (A) D1, D2, D3 and D4 are all different; (B) D1 and D2 are different; D3 and D4 are the same; (C) D1 and D2 are the same; D3 and D4 are different; (D) D1 and D2 are the same; D3 and D4 are the same. A single pair of dimerizing polypeptides form a heterodimeric pair in (A-C), and a homodimeric pair in (D).

[0099] FIG. 4: Schematic structure of tetrahedral antibodies with non-covalent linkages shown in FIG. 1, Panel C, wherein (A) D1, D2, D3 and D4 are all different; (B) D1 and D2 are different; D3 and D4 are the same; (C) D1 and D2 are the same; D3 and D4 are different; (D) D1 and D2 are the same; D3 and D4 are the same. A single pair of dimerizing polypeptides form a heterodimeric pair in (A-C), and a homodimeric pair in (D).

[0100] FIG. 5: Schematic structure of tetrahedral antibodies with non-covalent linkages shown in FIG. 1, Panel D, wherein D1 and D2 are different, and wherein among the D3-D6 domains (A) D3-D6 are all different; (B) D4 and D5 are the same and D3 and D6 are different; (C) D4 and D6 are the same and D3 and D5 are different; (D) D3 and D4 are the same and D5 and D6 are different. A single pair of dimerizing polypeptides form a heterodimeric pair in (A-D).

[0101] FIG. 6: Schematic structure of tetrahedral antibodies with non-covalent linkages shown in FIG. 1, Panel D, wherein D1 and D2 are different, and wherein among the D3-D6 domains (A) D3 and D6 are the same, and D4 and D6 are the same; (B) D3 and D5 are the same, and D4 and D5 are the same; (C) D3 and D4 are the same, and D5 and D6 are the same; (D) D3-D6 are the same. A single pair of dimerizing polypeptides form a heterodimeric pair in (A-D).

[0102] FIG. 7: Schematic structure of tetrahedral antibodies with non-covalent linkages shown in FIG. 1, Panel D, wherein D1 and D2 are different, there is no D6 domain, and wherein among the D3-D5 domains (A) D3-D5 are all different; (B) D4 and D5 are the same, and D3 is different; (C) D3 and D5 are the same, and D4 is different; (D) D3-D5 are all the same. A single pair of dimerizing polypeptides form a heterodimeric pair in (A-D).

[0103] FIG. 8A: Schematic structure of tetrahedral antibodies with non-covalent linkages shown in FIG. 1, Panel D, wherein D1 and D2 are the same, and wherein among the D3-D6 domains (A) D3-D6 are all the same of a first type; (B) D3-D6 are all the same of a second type; (C) D3 and D4 are of the first type and D5 and D6 are of the second type, (D) D3 and D5 are of the first type and D4 and D6 are of the second type. A single pair of dimerizing polypeptides form a homodimeric pair in (A-D).

[0104] FIG. 8B: Schematic structure of tetrahedral antibodies with non-covalent linkages shown in FIG. 1, Panel D, wherein D1 and D2 are the same, and wherein among the D3-D6 domains (A) D3-D6 are all the same of a first type; (B) D3-D6 are all the same of a second type; (C) D3 and D4 are of the first type and D5 and D6 are of the second type, (D) D3 and D4 are of the second type and D5 and D6 are of the first type. A single pair of dimerizing polypeptides form a homodimeric pair in (A-D).

[0105] FIG. 9: Schematic structure of tetrahedral antibodies with non-covalent linkages shown in FIG. 1, Panel D, wherein D1 and D2 are the same, and wherein among the D3-D5 domains (A) D3-D6 are all the same of a first type, and (B) D3-D6 are all the same of a second type; (C) D4 and D5 are of the first type and D3 and D6 are of the second type, (D) D3 and D6 are of the first type and D4 and D5 are of the second type. Each of two pairs of dimerizing polypeptides form a heterodimeric pair in (A-D).

[0106] FIG. 10: Schematic structure of tetrahedral antibodies with non-covalent linkages shown in FIG. 1, Panel D, (A-B) wherein D1 and D2 are the same, and wherein among the D3-D5 domains (A) D3-D6 are all the same of a first type, and (B) D3-D6 are all the same of a second type; (C-D) wherein D1 and D2 are different, and wherein among the D3-D5 domains (C) D3 and D4 are of the first type and D5 and D6 are of the second type, (D) D3 and D5 are of the first type and D4 and D6 are of the second type. Each of two pairs of dimerizing polypeptides form a homodimeric pair in (A-B). Each of two distinct pairs of dimerizing polypeptides form separate homodimeric pairs in (C-D).

[0107] FIG. 11: Schematic structures of tetrahedral antibodies (A) Rc6-P4-Rc6, (B) Rc66SIDE-P4-Rc66SIDE, (C) Rc66SIDE-P16-Rc66SIDE, (D) Rc66SIDE-P28-Rc66SIDE, (E) B19c66-P4-Rc6m (F) Soc66-P28-6Ec66, (G) HA9c66AAC9-P4-HA9c66AAC9, and (H) HA9c66AAC9-P4-IL15c6AAC9.

[0108] FIG. 12: Preparation of tetrahedral antibody Rc6-P4-Rc6.

[0109] FIG. 13: Preparation of tetrahedral antibodies with non-covalent linkages as shown in Panel B of FIG. 1.

[0110] FIG. 14: Preparation of tetrahedral antibody ACE2RQ740c60PG-ACE2RQ740c60PG.

[0111] FIG. 15: Analysis of tetrahedral antibody ACE2RQ740c60PG-ACE2RQ740c60PG by SE-HPLC.

[0112] FIG. 16: Analysis of tetrahedral antibodies by SE-HPLC with different peptide linkers (L-1) ACE2RQ740c60PGRF-ACE2RQ740c60PGRF, (L-185) ACE2RQ740c60PGRF185-ACE2RQ740c60PGRF185, (L-198) ACE2RQ740c60PGRF198-ACE2RQ740c60PGRF198, (L-208) ACE2RQ740c60PGRF208-ACE2RQ740c60PGRF208, (L-212) ACE2RQ740c60PGRF235-ACE2RQ740c60PGRF235, (L-235) ACE2RQ740c60PGRF235-ACE2RQ740c60PGRF235, (L-240) ACE2RQ740c60PGRF240-ACE2RQ740c60PGRF240.

[0113] FIG. 17: Analysis of tetrahedral antibody ACE2RQ740c60PG-ACE2RQ740c60PG by SE-HPLC/MALS.

[0114] FIG. 18: Stoichiometric binding analysis of a mixture of tetrahedral antibody ACE2RQ740c60PG-ACE2RQ740c60PG and ACE monomer ACE2RQ615c60PG.

[0115] FIG. 19: Preparation of tetrahedral antibody ACE2740FcG9-ACE2740FcG9.

[0116] FIG. 20: Analysis of tetrahedral antibody ACE2740FcG9-ACE2740FcG9 by SE-HPLC.

[0117] FIG. 21: Analysis of tetrahedral antibody ACE2740FcG9-ACE2740FcG9 by SE-HPLC/MALS.

[0118] FIG. 22: Analysis of tetrahedral antibody ACE2RQ740FcPG-ACE2RQ740FcPG by SE-HPLC/MALS.

[0119] FIG. 23: Stoichiometric binding analysis of an impure preparation of tetrahedral antibody ACE2740FcG9-ACE2740FcG9 and ACE2 dimer ACE2740FcG9.

[0120] FIG. 24: Stoichiometric binding analysis of a mixture of tetrahedral antibody ACE2740FcG9-ACE2740FcG9 and ACE2 dimer ACE2-740Fc-G9.

[0121] FIG. 25: Stoichiometric binding analysis of a mixture of tetrahedral antibody ACE2RQ740FcPG-ACE2RQ740FcPG and ACE2 dimer ACE2-740Fc-G9.

[0122] FIG. 26: Stoichiometric binding analysis of a mixture of tetrahedral antibody ACE2740FcG9-ACE2740FcG9 and ACE2 dimer ACE2-615Fc-G9.

[0123] FIG. 27: Inhibition of SARS-CoV-2-VSV pseudotype virus infection by ACE2 tetrahedral antibodies ACE2740FcG9-ACE2740FcG9 and ACE2RQ740FcPG-ACE2RQ740FcPG, and by ACE2 dimers ACE2-615Fc-G9 and ACE2RQ615FcPG.

[0124] FIG. 28: Inhibition of SARS-CoV-2-VSV pseudotype virus infection by ACE2 tetrahedral antibodies ACE2740FcG9-ACE2740FcG9 and ACE2RQ740FcPG-ACE2RQ740FcPG, and by ACE2 dimers ACE2-740Fc-G9 and ACE2RQ740FcPG.

[0125] FIG. 29A: Tetrahedral antibody comprising a first and second dimerizing polypeptide that form a homodimeric non-covalent linkage, wherein each of D1 and D2 is a heterodimeric Fc domain, and each of D3 and D4 is a Fab domain that specifically binds to a first target.

[0126] FIG. 29B: Tetrahedral antibody comprising a first and second dimerizing polypeptide that form a homodimeric non-covalent linkage, wherein each of D1 and D2 is a heterodimeric Fc domain, each of D3 and D4 is a Fab domain that specifically binds to a first target, and each of D5 and D6 is a variable region exchanged Fab domain that specifically binds to a second target.

[0127] FIG. 29C: Tetrahedral antibody comprising a first and second dimerizing polypeptide that form a homodimeric non-covalent linkage, wherein each of D1 and D2 is a heterodimeric Fc domain, each of D3 and D4 is a Fab domain that specifically binds to a first target, and each of D7 and D8 is a domain that specifically binds to a second target. D7 and D8 are each depicted as a single-chain TNFSF fusion polypeptide but may be any domain.

[0128] FIG. 29D: Tetrahedral antibody comprising a first and second dimerizing polypeptide that form a homodimeric non-covalent linkage, wherein each of D1 and D2 is a heterodimeric Fc domain, each of D3 and D4 is a Fab domain that specifically binds to a first target, each of D5 and D6 is a variable region exchanged Fab domain that specifically binds to a second target, and each of D7 and D8 is a domain that specifically binds to a third target. D7 and D8 are depicted as a single-chain TNFSF fusion polypeptide but may be any domain.

[0129] FIG. 30A: Octahedral antibody comprising a first, second and third trimerizing polypeptide that form a homotrimeric non-covalent linkage, wherein each of D1, D2 and D3 is a heterodimeric Fc domain, and each of D4, D5 and D5 is a Fab domain that specifically binds to a first target.

[0130] FIG. 30B: Octahedral antibody comprising a first, second and third trimerizing polypeptide that form a homotrimeric non-covalent linkage, wherein each of D1, D2 and D3 is a heterodimeric Fc domain, each of D4, D5 and D6 is a Fab domain that specifically binds to a first target, and each of D7, D8 and D9 is a variable region exchanged Fab domain that specifically binds to a second target.

[0131] FIG. 30C: Octahedral antibody comprising a first, second and third trimerizing polypeptide that form a homotrimeric non-covalent linkage, wherein each of D1, D2 and D3 is a heterodimeric Fc domain, each of D4, D5 and D6 is a Fab domain that specifically binds to a first target, and each of D10, D11 and D12 specifically binds to a second target. D10, D11 and D12 each are depicted as a single-chain TNFSF fusion polypeptide but may be any domain.

[0132] FIG. 30D: Octahedral antibody comprising a first, second and third trimerizing polypeptide that form a homotrimeric non-covalent linkage, wherein each of D1, D2 and D3 is a heterodimeric Fc domain, each of D4, D5 and D6 is a Fab domain that specifically binds to a first target, each of D7, D8 and D9 is a variable region exchanged Fab domain that specifically binds to a second target and each of D10, D11 and D12 specifically binds to a third target. D10, D11 and D12 are each depicted as a single-chain TNFSF fusion polypeptide but may be any domain.

[0133] FIG. 31: Tetrahedral antibody comprising a first and second dimerizing polypeptide that form a homodimeric non-covalent linkage, wherein each of D1 and D2 is a heterodimeric Fc domain, and wherein (A) D3, D4, D5 and D6 specifically bind to a first target (tetravalent, monospecific), (B) D3 and D4 specifically bind to a first target, and D5 and D6 are Fab domains that specifically bind to a second target (tetravalent, 2+2 bispecific), (C) D3 and D4 are Fab domains that specifically bind to a first target, and D5 and D6 specifically bind to a second target (tetravalent, 2+2 bispecific), and (D) D3, D4, D5 and D6 are Fab domains that specifically bind to a first target (tetravalent, monospecific). The tetrahedral antibodies of A-D comprise (A) four chains: a first H1 chain [D1/D3], a second H1 chain [D2/D4], a first H2 chain [D1/D5], and second H2 chain [D2/D6], (B) six chains: a first H1 chain [D1/D3], a second H1 chain [D2/D4], a first H2 chain [D1/D5], a second H2 chain [D2/D6], a first L2 chain [D5], and a second L2 chain [D6], (C) six chains: a first H1 chain [D1/D3], a second H1 chain [D2/D4], a first H2 chain [D1/D5], a second H2 chain [D2/D6], a first L1 chain [D3], and a second L1 chain [D4], and (D) eight chains: a first H1 chain [D1/D3], a second H1 chain [D2/D4], a first H2 chain [D1/D5], a second H2 chain [D2/D6], a first L1 chain [D3], a second L1 chain [D4], a first L2 chain [D5], and a second L2 chain [D6].

[0134] FIG. 32: Tetrahedral antibody comprising a first and second dimerizing polypeptide that form a homodimeric non-covalent linkage, wherein each of D1 and D2 is a heterodimeric Fc domain, and wherein (A) D3 and D4 specifically bind to a first target, and D5 and D6 specifically bind to a second target (tetravalent, 2+2 bispecific), (B) D5 and D6 specifically bind to a first target, and D3 and D4 specifically bind to a second target (tetravalent, 2+2 bispecific), (C) D3 and D4 are Fab domains that specifically bind to a first target, and D5 and D6 are variable region exchanged Fab domains that specifically bind to a second target (tetravalent, 2+2 bispecific), and (D) D5 and D6 are Fab domains that specifically bind to a first target, and D3 and D4 are variable region exchanged Fab domains that specifically bind to a second target (tetravalent, 2+2 bispecific). The tetrahedral antibodies of A-D comprise (A) four chains: a first H1 chain [D1/D3], a second H1 chain [D2/D4], a first H2 chain [D1/D5], and a second H2 chain [D2/D6], (B) four chains: a first H1 chain [D1/D3], a second H1 chain [D2/D4], a first H2 chain [D1/D5], and a second H2 chain [D2/D6], (C) eight chains: a first H1 chain [D1/D3], a second H1 chain [D2/D4], a first H2 chain [D1/D5], a second H2 chain [D2/D6], a first L1 chain [D3], a second L1 chain [D4], a first L2 chain [D5], and a second L2 chain [D6], and (D) eight chains: a first H1 chain [D1/D3], a second H1 chain [D2/D4], a first H2 chain [D1/D5], a second H2 chain [D2/D6], a first L1 chain [D3], a second L1 chain [D4], a first L2 chain [D5], and a second L2 chain [D6].

[0135] FIG. 33: Tetrahedral antibody comprising a first and second dimerizing polypeptide that form a homodimeric non-covalent linkage, wherein each of D1 and D2 is a heterodimeric Fc domain, and wherein (A) D3, D4 and D5 specifically bind to a first target, and D6 specifically binds to a second target (tetravalent, 3+1 bispecific), (B) D3, D4 and D5 specifically bind to a first target, and D6 is a Fab domain that specifically binds to a second target (tetravalent, 3+1 bispecific), (C) D3, D4 and D5 are Fab domains that specifically bind to a first target, and D6 specifically binds to a second target (tetravalent, 3+1 bispecific), and (D) D3, D4 and D5 are Fab domains that specifically bind to a first target, and D6 is a variable region exchanged Fab domain that specifically binds to a second target (tetravalent, 3+1 bispecific). The tetrahedral antibodies of A-D comprise (A) four chains: a first H1 chain [D1/D3], a second H1 chain [D2/D4], a first H2 chain [D1/D5], and a first H3 chain [D2/D6], (B) five chains: a first H1 chain [D1/D3], a second H1 chain [D2/D4], a first H2 chain [D1/D5], a first H3 chain [D2/D6], and a first L3 chain [D6], (C) seven chains: a first H1 chain [D1/D3], a second H1 chain [D2/D4], a first H2 chain [D1/D5], a first H3 chain [D2/D6], a first L1/L2 chain [D3], a second L1/L2 chain [D4], and a third L1/L2 chain [D5], and (D) eight chains: a first H1 chain [D1/D3], a second H1 chain [D2/D4], a first H2 chain [D1/D5], a first H3 chain [D2/D6], a first L1/L2 chain [D3], a second L1/L2 chain [D4], a third L1/L2 chain [D5], and a first L3 chain [D6].

[0136] FIG. 34: Tetrahedral antibody comprising a first and second dimerizing polypeptide that form a homodimeric non-covalent linkage, wherein each of D1 and D2 is a heterodimeric Fc domain, and wherein (A) D3 and D4 specifically bind to a first target, and D6 specifically binds to a second target (trivalent, 2+1 bispecific), (B) D3 and D4 specifically bind to a first target, and D6 is a Fab domain that specifically binds to a second target (trivalent, 2+1 bispecific), (C) D3 and D4 are Fab domains that specifically bind to a first target, and D6 specifically binds to a second target (trivalent, 2+1 bispecific), and (D) D3 and D4 are Fab domains that specifically bind to a first target, and D6 is a variable region exchanged Fab domain that specifically binds to a second target (trivalent, 2+1 bispecific). The tetrahedral antibodies of A-D comprise (A) four chains: a first H1 chain [D1/D3], a second H1 chain [D2/D4], a first H2 chain [D2/D6], and a first Fc chain [D1], (B) five chains: a first H1 chain [D1/D3], a second H1 chain [D2/D4], a first H2 chain [D2/D6], a first Fc chain [D1], and a first L2 chain [D6], (C) six chains: a first H1 chain [D1/D3], a second H1 chain [D2/D4], a first H2 chain [D2/D6], a first Fc chain [D1], a first L1 chain [D3], and a second L1 chain [D4], and (D) seven chains: a first H1 chain [D1/D3], a second H1 chain [D2/D4], a first H2 chain [D2/D6], a first Fc chain [D1], a first L1 chain [D3], a second L1 chain [D4], and a first L2 chain [D6].

[0137] FIG. 35: Tetrahedral antibody comprising a first and second dimerizing polypeptide that form a homodimeric non-covalent linkage, wherein each of D1 and D2 is a heterodimeric Fc domain, and wherein (A) D3 and D4 specifically bind to a first target, D5 specifically binds to a second target, and D6 specifically binds to a third target (tetravalent, 2+1+1 trispecific), (B) D3 and D4 specifically bind to a first target, D5 specifically binds to a second target, and D6 is a Fab domain that specifically binds to a third target (tetravalent, 2+1+1 trispecific), (C) D3 and D4 are Fab domains that specifically bind to a first target, D5 specifically binds to a second target, and D6 specifically binds to a third target (tetravalent, 2+1+1 trispecific), and (D) D3 and D4 are Fab domains that specifically bind to a first target, D5 specifically binds to a second target, and D6 is a variable region exchanged Fab domain that specifically binds to a third target (tetravalent, 2+1+1 trispecific). The tetrahedral antibodies of A-D comprise (A) four chains: a first H1 chain [D1/D3], a second H1 chain [D2/D4], a first H2 chain [D1/D5], and a first H3 chain [D2/D6], (B) five chains: a first H1 chain [D1/D3], a second H1 chain [D2/D4], a first H2 chain [D1/D5], a first H3 chain [D2/D6], and a first L3 chain [D6], (C) six chains: a first H1 chain [D1/D3], a second H1 chain [D2/D4], a first H2 chain [D1/D5], a first H3 chain [D2/D6], a first L1 chain [D3], and a second L1 chain [D4], and (D) seven chains: a first H1 chain [D1/D3], a second H1 chain [D2/D4], a first H2 chain [D1/D5], a first H3 chain [D2/D6], a first L1 chain [D3], a second L1 chain [D4], and a first L3 chain [D6].

[0138] FIG. 36: Tetrahedral antibody comprising a first and second dimerizing polypeptide that form a homodimeric non-covalent linkage, wherein D1 is a heterodimeric Fc domain and D2 is a Fab domain, and wherein (A) D2 is a Fab that binds to a first target, and D3, D4 and D5 specifically bind to a second target (tetravalent, 3+1 bispecific), (B) D2 is a Fab that binds to a first target, D3 and D4 specifically bind to a second target, and D5 is a variable region exchanged Fab that specifically bind to a third target (tetravalent, 2+1+1 trispecific), (C) D2 is a Fab that binds to a first target, D3 and D4 are variable region exchanged Fab domains that specifically bind to a second target, and D5 specifically binds to a third target (tetravalent, 2+1+1 trispecific), and (D) D2 is a Fab that binds to a first target, D3, D4 and D5 are variable region exchanged Fab domains that specifically bind to a second target (tetravalent, 4+1 bispecific). The tetrahedral antibodies of A-D comprise (A) four chains: a first H1 chain [D1/D3], a first H1Fab chain [D2/D4], a first H2 chain [D1/D5], and a first Fab chain [D2], (B) five chains: a first H1 chain [D1/D3], a first H1Fab chain [D2/D4], a first H2 chain [D1/D5], a first Fab chain [D2], and a first L2 chain [D5], (C) six chains: a first H1 chain [D1/D3], a first H1Fab chain [D2/D4], a first H2 chain [D1/D5], a first Fab chain [D2], a first L1 chain [D3], and a second L1 chain [D4], (D) seven chains: a first H1 chain [D1/D3], a first H1Fab chain [D2/D4], a first H2 chain [D1/D5], a first Fab chain [D2], a first L1/L2 chain [D3], a second L1/L2 chain [D4], and a third L1/L2 chain [D5].

[0139] FIG. 37: Tetrahedral antibody comprising a first and second dimerizing polypeptide that form a homodimeric non-covalent linkage, wherein D1 is a heterodimeric Fc domain and D2 is a Fab domain, and wherein (A) D2 is a variable region exchanged Fab that binds to a first target, and D3, D4 and D5 specifically bind to a second target (tetravalent, 3+1 bispecific), (B) D2 is a variable region exchanged Fab that binds to a first target, D3 and D4 specifically bind to a second target, and D5 is a Fab that specifically bind to a third target (tetravalent, 2+1+1 trispecific), (C) D2 is a variable region exchanged Fab that binds to a first target, D3 and D4 are Fab domains that specifically bind to a second target, and D5 specifically binds to a third target (tetravalent, 2+1+1 trispecific), and (D) D2 is a variable region exchanged Fab that binds to a first target, D3, D4, and D5 are Fab domains that specifically bind to a second target (tetravalent, 3+1 bispecific). The tetrahedral antibodies of A-D comprise (A) four chains: a first H1 chain [D1/D3], a first H1Fab chain [D2/D4], a first H2 chain [D1/D5], and a first Fab chain [D2], (B) five chains: a first H1 chain [D1/D3], a first H1Fab chain [D2/D4], a first H2 chain [D1/D5], a first Fab chain [D2], and a first L2 chain [D5], (C) six chains: a first H1 chain [D1/D3], a first H1Fab chain [D2/D4], a first H2 chain [D1/D5], a first Fab chain [D2], a first L1 chain [D3], and a second L1 chain [D4], and (D) seven chains: a first H1 chain [D1/D3], a first H1Fab chain [D2/D4], a first H2 chain [D1/D5], a first Fab chain [D2], a first L1/L2 chain [D3], a second L1/L2 chain [D4], and a third L1/L2 chain [D5].

[0140] FIG. 38: Tetrahedral antibody comprising a first and second dimerizing polypeptide that form a homodimeric non-covalent linkage, wherein D1 is a heterodimeric Fc domain and D2 is a Fab domain, and wherein (A) D2 is a Fab that binds to a first target, and D3 and D4 specifically bind to a second target (trivalent, 2+1 bispecific), (B) D2 is a variable region exchanged Fab that binds to a first target, and D3 and D4 specifically bind to a second target, (C) D2 is a Fab that binds to a first target, and D3 and D4 are variable region exchanged Fab domains that specifically bind to a second target (trivalent, 2+1 bispecific), and (D) D2 is a variable region exchanged Fab that binds to a first target, D3 and D4 are Fab domains that specifically bind to a second target (trivalent, 2+1 bispecific). The tetrahedral antibodies of A-D comprise (A) four chains: a first H1 chain [D1/D3], a first H1Fab chain [D2/D4], a first Fc chain [D1], and a first Fab chain [D2], (B) four chains: a first H1 chain [D1/D3], a first H1Fab chain [D2/D4], a first Fc chain [D1], and a first Fab chain [D2], (C) six chains: a first H1 chain [D1/D3], a first H1Fab chain [D2/D4], a first Fc chain [D1], a first Fab chain [D2], a first L1 chain [D3], and a second L1 chain [D4], and (D) six chains: a first H1 chain [D1/D3], a first H1Fab chain [D2/D4], a first Fc chain [D1], a first Fab chain [D2], a first L1 chain [D3], and a second L1 chain [D4].

[0141] FIG. 39: Tetrahedral antibody comprising a first and second dimerizing polypeptide that form a homodimeric non-covalent linkage, wherein each of D1 and D2 is a heterodimeric Fc domain, and wherein (A) D3, D4, D5 and D6 specifically bind to a first target, and D7 and D8 specifically bind to a second target (hexavalent, 4+2 bispecific), (B) D3 and D4 specifically bind to a first target, D5 and D6 are Fab domains that specifically bind to a second target, and D7 and D8 specifically bind to a third target (hexavalent, 2+2+2 trispecific), (C) D3 and D4 are Fab domains that specifically bind to a first target, D5 and D6 specifically bind to a second target, and D7 and D8 specifically bind to a third target (hexavalent, 2+2+2 trispecific), and (D) D3, D4, D5 and D6 are Fab domains that specifically bind to a first target, and D7 and D8 specifically bind to a second target (hexavalent, 4+2 bispecific). The tetrahedral antibodies of A-D comprise (A) four chains: a first H1 chain [D1/D3/D7], a second H1 chain [D2/D4/D8], a first H2 chain [D1/D5], and second H2 chain [D2/D6], (B) six chains: a first H1 chain [D1/D3/D7], a second H1 chain [D2/D4/D8], a first H2 chain [D1/D5], a second H2 chain [D2/D6], a first L2 chain [D5], and a second L2 chain [D6], (C) six chains: a first H1 chain [D1/D3/D7], a second H1 chain [D2/D4/D8], a first H2 chain [D1/D5], a second H2 chain [D2/D6], a first L1 chain [D3], and a second L1 chain [D4], and [D] eight chains: a first H1 chain [D1/D3/D7], a second H1 chain [D2/D4/D8], a first H2 chain [D1/D5], a second H2 chain [D2/D6], a first L1 chain [D3], a second L1 chain [D4], a first L2 chain [D5], and a second L2 chain [D6]. D7 and D8 may be attached at the C-termini of the first and second H1 chains (as shown), or the C-termini of the first and second H2 chains. D7 and D8 are depicted as a single-chain TNFSF ligand fusion polypeptides but may be any domain.

[0142] FIG. 40: Tetrahedral antibody comprising a first and second dimerizing polypeptide that form a homodimeric non-covalent linkage, wherein each of D1 and D2 is a heterodimeric Fc domain, and wherein (A) D3 and D4 specifically bind to a first target, D5 and D6 specifically bind to a second target, and D7 and D8 specifically bind to a third target (hexavalent, 2+2+2 trispecific), (B) D5 and D6 specifically bind to a first target, D3 and D4 specifically bind to a second target, and D7 and D8 specifically bind to a third target (hexavalent, 2+2+2 trispecific), (C) D3 and D4 are Fab domains that specifically bind to a first target, D5 and D6 are variable region exchanged Fab domains that specifically bind to a second target, and D7 and D8 specifically bind to a third target (hexavalent, 2+2+2 trispecific), and (D) D5 and D6 are Fab domains that specifically bind to a first target, D3 and D4 are variable region exchanged Fab domains that specifically bind to a second target, and D7 and D8 specifically bind to a third target (hexavalent, 2+2+2 trispecific). The tetrahedral antibodies of A-D comprise (A) four chains: a first H1 chain [D1/D3/D7], a second H1 chain [D2/D4/D8], a first H2 chain [D1/D5], and a second H2 chain [D2/D6], (B) four chains: a first H1 chain [D1/D3/D7], a second H1 chain [D2/D4/D8], a first H2 chain [D1/D5], and a second H2 chain [D2/D6], (C) eight chains: a first H1 chain [D1/D3/D7], a second H1 chain [D2/D4/D8], a first H2 chain [D1/D5], a second H2 chain [D2/D6], a first L1 chain [D3], a second L1 chain [D4], a first L2 chain [D5], and a second L2 chain [D6], and (D) eight chains: a first H1 chain [D1/D3/D7], a second H1 chain [D2/D4/D8], a first H2 chain [D1/D5], a second H2 chain [D2/D6], a first L1 chain [D3], a second L1 chain [D4], a first L2 chain [D5], and a second L2 chain [D6]. D7 and D8 may be attached at the C-termini of the first and second H1 chains (as shown), or the C-termini of the first and second H2 chains. D7 and D8 are depicted as a single-chain TNFSF ligand fusion polypeptides but may be any domain.

[0143] FIG. 41: Tetrahedral antibody comprising a first and second dimerizing polypeptide that form a homodimeric non-covalent linkage, wherein each of D1 and D2 is a heterodimeric Fc domain, and wherein (A) D3 and D4 specifically bind to a first target, D6 specifically binds to a second target, and D7 and D8 specifically bind to a third target (pentavalent, 2+2+1 trispecific), (B) D3 and D4 specifically bind to a first target, D6 is a Fab domain that specifically binds to a second target, and D7 and D8 specifically bind to a third target (pentavalent, 2+2+1 trispecific), (C) D3 and D4 are Fab domains that specifically bind to a first target, D6 specifically binds to a second target, and D7 and D8 specifically bind to a third target (pentavalent, 2+2+1 trispecific), and (D) D3 and D4 are Fab domains that specifically bind to a first target, D6 is a variable region exchanged Fab domain that specifically binds to a second target, and D7 and D8 specifically bind to a third target (pentavalent, 2+2+1 trispecific). The tetrahedral antibodies of A-D comprise (A) four chains: a first H1 chain [D1/D3/D7], a second H1 chain [D2/D4/D8], a first H2 chain [D2/D6], and a first Fc chain [D1], (B) five chains: a first H1 chain [D1/D3/D7], a second H1 chain [D2/D4/D8], a first H2 chain [D2/D6], an Fc chain [D1] and an L2 chain [D6], (C) six chains: a first H1 chain [D1/D3/D7], a second H1 chain [D2/D4/D8], a first H2 chain [D2/D6], a first Fc chain [D1], a first L1 chain [D3], and a second L1 chain [D4], and (D) seven chains: a first H1 chain [D1/D3/D7], a second H1 chain [D2/D4/D8], a first H2 chain [D2/D6], a first Fc chain [D1], a first L1 chain [D3], a second L1 chain [D4], and a first L2 chain [D6]. D7 and D8 may be attached at the C-termini of the first and second H1 chains (as shown), or the C-termini of the first and second H2 chains. D7 and D8 are depicted as a single-chain TNFSF ligand fusion polypeptides but may be any domain.

[0144] FIG. 42: Tetrahedral antibody comprising a first and second dimerizing polypeptide that form a homodimeric non-covalent linkage, wherein D1 is a heterodimeric Fc domain and D2 is a Fab domain, and wherein (A) D2 is a Fab domain that specifically binds to a first target, D3 and D4 specifically bind to a second target, and D7 and D8 specifically bind to a third target (pentavalent, 2+2+1 trispecific), (B) D2 is a variable region exchanged Fab domain that specifically binds to a first target, D3 and D4 specifically bind to a second target, and D7 and D8 specifically bind to a third target (pentavalent, 2+2+1 trispecific), (C) D2 is a Fab domain that specifically binds to a first target, D3 and D4 are variable region exchanged Fab domains that specifically bind to a second target, and D7 and D8 specifically bind to a third target (pentavalent, 2+2+1 trispecific), and (D) D2 is a variable region exchanged Fab domain that specifically binds to a first target, D3 and D4 are Fab domains that specifically bind to a second target, and D7 and D8 specifically bind to a third target (pentavalent, 2+2+1 trispecific). The tetrahedral antibodies of A-D comprise (A) four chains: a first H1 chain [D1/D3/D7], a second H1 chain [D2/D4/D8], a first Fc chain [D1], and a first Fab chain [D2]. (B) four chains: a first H1 chain [D1/D3/D7], a second H1 chain [D2/D4/D8], a first Fc chain [D1], and a first Fab chain [D2]. (C) six chains: a first H1 chain [D1/D3/D7], a second H1 chain [D2/D4/D8], a first Fc chain [D1], a first Fab chain [D2], a first L1 chain [D3], and a second L1 chain [D4], and (D) six chains: a first H1 chain [D1/D3/D7], a second H1 chain [D2/D4/D8], a first H2 chain [D2/D6], a first Fc chain [D1], a first Fab chain [D2], a first L1 chain [D3], and a second L1 chain [D4]. D7 and D8 may be attached at the C-termini of the first and second H1 chains (as shown), or the C-termini of the first and second H2 chains. D7 and D8 are depicted as a single-chain TNFSF ligand fusion polypeptides but may be any domain.

[0145] FIG. 43: ACE2 tetrahedral antibodies. Four forms of ACE2 tetrahedral antibodies are shown in panels c, d, e and f. Each comprises domains 1˜4 and a dimerizing polypeptide. The structures in panels a and b are standard Fc dimers.

[0146] FIG. 44: Relative neutralization activity of ACE2 tetrahedral antibody on live virus. Upper panel: demonstrates neutralization of live SARS-CoV-2 virus. Lower panel: demonstrates neutralization of NL63 (alpha coronavirus). ACE2 superdimer (6-05 SD) neutralizes viruses approximately 3 orders of magnitude better than standard Fc fusion protein (ACE2Fc615). Also show are purified dimer (6-05 D) and an impure mixture of dimer and superdimer (6-05 Impure).

[0147] FIG. 45: Pharmacokinetic curves for constructs 13-21 and 13-22. 13-21 corresponds to wt ACE2-B13 superheterodimer tetrahedral antibody. 13-22 corresponds to a mutant ACE2-B13 superheterodimer tetrahedral antibody which has the H378A mutation.

[0148] FIG. 46: Pharmacokinetic curves for constructs 10-05 and 13-21. 10-05 corresponds to the ACE2-ACE2 superheterodimer tetrahedral antibody. 13-21 corresponds to wt ACE2-B13 superheterodimer tetrahedral antibody.

[0149] FIG. 47: Relative neutralization activity of ACE2 core dimer (10-59), B-13 (12-09), and ACE2-B-13 superdimer (15-16).

[0150] FIG. 48A-FIG. 48P: Relative neutralization activity of various antibodies against 12 different variant viruses is compared to the ACE2-B13 silent version and ACE2-B13 active version (denoted by diamonds and circles).

[0151] FIG. 49: Body weight change of Hamsters infected with South African SARS-CoV-2 virus treated with PBS control (PBS), 25 mg/kg of REGN10933, and REG-CoV-2 cocktail (25 mg/kg each of Regeneron antibody REGN10933 and REG108987), and 25 mg/kg Fc silent ACE2-B13 (HB1516).

[0152] FIG. 50A-FIG. 50C: Relative of quantitation of correct pairing and mispairing in bispecific antibodies. Main peak represents correctly paired molecules. Arrows point to positions at which one would expect mispaired products. The main peak consists of two peaks owing to residual O-glycan remaining after de-glycosylation procedure.

[0153] FIG. 51A-FIG. 51C: Relative neutralization activity of various antibodies against N439K and South African variants. ACE2 superheterodimers (squares) are described in Tables 36, 37, and 38.

### DETAILED DESCRIPTION OF THE INVENTION

### Tetrahedral Antibodies

[0154] This invention provides a tetrahedral antibody comprising a first, second, third, and fourth domain, wherein:
[0155] a) each of the first and second domains are selected from the group consisting of a Fab domain and an Fc domain,
[0156] b) each of the first and second domains comprise:
   [0157] i) a first polypeptide chain comprising a first N-terminus and a first C-terminus of the domain, and
   [0158] ii) a second polypeptide chain comprising a second N-terminus and a second C-terminus of the domain,
[0159] c) the first domain and the second domain are joined to each other by a non-peptidyl linkage wherein the non-peptidyl linkage is:
   [0160] i) a covalent linkage
      [0161] (1) attached to the first N-terminus of the first domain and the first N-terminus of the second domain,
      [0162] (2) attached to the first C-terminus of the first domain and the first C-terminus of the second domain,
      [0163] (3) attached to the first N-terminus of the first domain and the first C-terminus of the second domain, or
      [0164] (4) attached to the first C-terminus of the first domain and the first N-terminus of the second domain, or
   [0165] ii) a non-covalent linkage
      [0166] (1) between a first dimerizing polypeptide attached by a peptide bond or via a peptide linker to the first N-terminus of the first domain, and a second dimerizing polypeptide attached by a peptide bond or via a peptide linker to the first N-terminus of the second domain,
      [0167] (2) between a first dimerizing polypeptide attached by a peptide bond or via a peptide linker to the first C-terminus of the first domain, and a second dimerizing polypeptide attached by a peptide bond or via a peptide linker to the first C-terminus of the second domain,
      [0168] (3) between a first dimerizing polypeptide attached by a peptide bond or via a peptide linker to the first N-terminus of the first domain, and a second dimerizing polypeptide attached by a peptide bond or via a peptide linker to the first C-terminus of the second domain, or
      [0169] (4) between a first dimerizing polypeptide attached by a peptide bond or via a peptide linker to the first C-terminus of the first domain, and a second dimerizing polypeptide attached by a peptide bond or via a peptide linker to the first N-terminus of the second domain,
      [0170] wherein the first and second dimerizing polypeptides are not immunoglobulin polypeptides,
[0171] d) if the first domain is joined to the second domain via a covalent linkage attached to the first N-terminus of the first domain, then the third domain is attached at its C-terminus to the second N-terminus of the first domain by a peptide bond or via a peptide linker,
[0172] e) if the first domain is joined to the second domain via a covalent linkage attached to the first C-terminus of the first domain then the third domain is attached at its N-terminus to the second C-terminus of the first domain by a peptide bond or via a peptide linker,
[0173] f) if the first domain is joined to the second domain via a first dimerizing polypeptide attached to the first N-terminus of the first domain, then the third domain is attached at its C-terminus by a peptide bond or via a peptide linker to
   [0174] i) the N-terminus of the first dimerizing polypeptide,
   [0175] ii) the second N-terminus of the first domain, or
   [0176] iii) the N-terminus of a third dimerizing polypeptide, wherein the third dimerizing polypeptide is attached at its C-terminus by a peptide bond or via a peptide linker to the second N-terminus of the first domain,
[0177] g) if the first domain is joined to the second domain via a first dimerizing polypeptide attached to the first C-terminus of the first domain, then the third domain is attached at its N-terminus by a peptide bond or via a peptide linker to
   [0178] i) the C-terminus of the first dimerizing polypeptide,
   [0179] ii) the second C-terminus of the first domain, or
   [0180] iii) the C-terminus of a third dimerizing polypeptide, wherein the third dimerizing polypeptide is attached at its N-terminus by a peptide bond or via a peptide linker to the second C-terminus of the first domain,
[0181] h) if the second domain is joined to the first domain via a covalent linkage attached to the first N-terminus of the second domain, then the fourth domain is attached at its C-terminus to the second N-terminus of the second domain by a peptide bond or via a peptide linker,
[0182] i) if the second domain is joined to the first domain via a covalent linkage attached to the first C-terminus of the second domain then the fourth domain is attached at its N-terminus to the second C-terminus of the second domain by a peptide bond or via a peptide linker,
[0183] j) if the second domain is joined to the first domain via a second dimerizing polypeptide attached to the first N-terminus of the second domain, then the fourth domain is attached at its C-terminus by a peptide bond or via a peptide linker to
   [0184] i) the N-terminus of the second dimerizing polypeptide,
   [0185] ii) the second N-terminus of the second domain, or
   [0186] iii) the N-terminus of a fourth dimerizing polypeptide, wherein the third dimerizing polypeptide is attached at its C-terminus by a peptide bond or via a peptide linker to the second N-terminus of the second domain,
[0187] k) if the second domain is joined to the first domain via a second dimerizing polypeptide attached to the first C-terminus of the second domain, then the fourth domain is attached at its N-terminus by a peptide bond or via a peptide linker to
   [0188] i) the C-terminus of the second dimerizing polypeptide,
   [0189] ii) the second C-terminus of the second domain, or
   [0190] iii) the C-terminus of a fourth dimerizing polypeptide, wherein the fourth dimerizing polypeptide is attached at its N-terminus by a peptide bond or via a peptide linker to the second C-terminus of the second domain.

[0191] In a preferred embodiment, the non-peptidyl linkage is a covalent linkage attached to the first N-terminus of the first domain and the first N-terminus of the second domain. In this preferred embodiment, the third domain is attached at its C-terminus to the second N-terminus of the first domain by a peptide bond or via a peptide linker. Further, in this preferred embodiment, the fourth domain is attached at its C-terminus to the second N-terminus of the second domain by a peptide bond or via a peptide linker.

[0192] In a preferred embodiment, the non-peptidyl linkage is a non-covalent linkage between a first dimerizing polypeptide attached by a peptide bond or via a peptide linker to the first N-terminus of the first domain, and a second dimerizing polypeptide attached by a peptide bond or via a peptide linker to the first N-terminus of the second domain. In this preferred embodiment, the third domain is attached at its N-terminus by a peptide bond or via a peptide linker to (a) the C-terminus of the first dimerizing polypeptide, or (b) the second C-terminus of the first domain. Further, in this preferred embodiment, the fourth domain is attached at its C-terminus by a peptide bond or via a peptide linker to (a) the N-terminus of the second dimerizing polypeptide, or (b) the second N-terminus of the second domain.

[0193] In an alternative embodiment, the non-peptidyl linkage is a covalent linkage:
[0194] a) attached to the first C-terminus of the first domain and the first C-terminus of the second domain,
[0195] b) attached to the first C-terminus of the first domain and the first C-terminus of the second domain, or
[0196] c) attached to the first N-terminus of the first domain and the first C-terminus of the second domain

[0197] In an alternative embodiment, the non-peptidyl linkage is a non-covalent linkage
[0198] a) between a first dimerizing polypeptide attached by a peptide bond or via a peptide linker to the first C-terminus of the first domain, and a second dimerizing polypeptide attached by a peptide bond or via a peptide linker to the first C-terminus of the second domain,
[0199] b) between a first dimerizing polypeptide attached by a peptide bond or via a peptide linker to the first N-terminus of the first domain, and a second dimerizing polypeptide attached by a peptide bond or via a peptide linker to the first C-terminus of the second domain, or
[0200] c) between a first dimerizing polypeptide attached by a peptide bond or via a peptide linker to the first C-terminus of the first domain, and a second dimerizing polypeptide attached by a peptide bond or via a peptide linker to the first N-terminus of the second domain.

[0201] In embodiments of the invention:
[0202] a) the first domain is an Fc domain and the second domain is a Fab domain,
[0203] b) the first and second domains are Fc domains,
[0204] c) the first and second domains are Fab domains,
[0205] d) the third and fourth domains are Fab domains,
[0206] e) the third and/or fourth domain are selected from the group consisting of (i) a secreted protein, and (ii) the extracellular domain of a transmembrane protein,
[0207] f) the third domain is selected from the group of (i) a secreted protein, and (ii) the extracellular domain of a transmembrane protein, and the fourth domain is a Fab,
[0208] g) the third domain is IL-15,
[0209] h) the third domain is IL-15 and the fourth domain is an IL-15Rα sushi domain,
[0210] i) the third domain is IL-15 and the fourth domain is a Fab,
[0211] j) the third and fourth domains are each the ACE2 peptidase domain (PD),
[0212] k) the first and second domains are Fc domains, and the third and fourth domains are selected from the group consisting of (i) a secreted protein, and (ii) the extracellular domain of a transmembrane protein,
[0213] l) the first and second domains are Fc domains, the third domain is selected from the group consisting of (i) a secreted protein, and (ii) the extracellular domain of a transmembrane protein, and the fourth domain is Fab,
[0214] m) the first and second domains are Fc domains and the third and fourth domains are Fab domains,
[0215] n) the first and second domains are Fc domains and the third and fourth domains are each the ACE2 peptidase domain (PD),
[0216] o) the first domain is an Fc domain and the second, third and fourth domains are Fab domains,
[0217] p) the first domain is an Fc domain, the second domain is a Fab domain, the third domain is IL-15, and the fourth domain is an IL-15Rα sushi domain, or
[0218] q) the first domain is an Fc domain, the second domain is a Fab domain, the third domain is IL-15, and the fourth domain is a Fab.

### Covalent Linkages

[0219] In embodiments of the invention, the non-peptidyl linkage between first domain and the second domain is a covalent linkage.

[0220] In embodiments of the invention, the covalent linkage comprises the structure:
[0221] a)

[chemical structure]

[0222] b)

[chemical structure]

or
[0223] c)

[chemical structure]

[0224] wherein R₂ represents an organic structure which connects to the first or second domain and R₄ represents an organic structure which connects to the other of the first or second domain, wherein R₁ is H or is part of an additional structure that is a cyclic structure, wherein the additional cyclic structure comprises R₁ or a portion of R₁, and may also comprise R₂ or a portion of R₂, and the carbon between R₂ and the alkene double bond.

[0225] In embodiments of the invention, R₁ and R₂ are linked via at least one direct bond so as to form a cyclic structure comprising
[0226] a) a portion of R₁,
[0227] b) a portion of R₂,
[0228] c) the carbon between R₂ and the alkene double bond, and
[0229] d) the alkene double bond.

[0230] In embodiments of the invention, R₁ is selected from the group consisting of:
[0231] a)

[chemical structure]

[0232] b)

[chemical structure]

and
[0233] c)

[chemical structure]

[0234] which is optionally substituted at any position.

[0235] In embodiments of the invention, the carbon between R₂ and the alkene double bond is directly bonded to R₂ via a double bond and a single bond.

[0236] In embodiments of the invention, R₂ is
[0237] a)

[chemical structure]

[0238] b)

[chemical structure]

or
[0239] c)

[chemical structure]

[0240] which is optionally substituted at any position,
[0241] wherein R₂ is attached to R₁ via the nitrogen atom of R₂, and
[0242] wherein J is a bond or an organic structure comprising or consisting of a chain of 2, 3, 4, 5, 6, 7, 8, 9, 10 or more moieties selected from the group consisting of [PEG(y)]z, polyalkylene glycol, polyoxyalkylated polyol, polyvinyl alcohol, polyvinyl alkyl ether, poly(lactic acid), poly(lactic-glycolic acid), polysaccharide, a branched residue, C₁-C₄ alkyl, amine, sulfur, oxygen, succinimide, maleimide, glycerol, triazole, isoxazolidine, C₁-C₄ acyl, succinyl, malonyl, glutaryl, phthalyl, adipoyl and an amino acid,
[0243] wherein [PEG(y)]z is:

[chemical structure]

[0244] wherein y=1-100 and z=1-10.

[0245] In embodiments of the invention, R₁ and R₂ taken together are:

[chemical structure]

[0246] which is optionally substituted at any position,
[0247] wherein J is a bond or an organic structure comprising or consisting of a chain of 2, 3, 4, 5, 6, 7, 8, 9, 10 or more moieties selected from the group consisting of [PEG(y)]z, polyalkylene glycol, polyoxyalkylated polyol, polyvinyl alcohol, polyvinyl alkyl ether, poly(lactic acid), poly(lactic-glycolic acid), polysaccharide, a branched residue, C₁-C₄ alkyl, amine, sulfur, oxygen, succinimide, maleimide, glycerol, triazole, isoxazolidine, C₁-C₄ acyl, succinyl, malonyl, glutaryl, phthalyl, adipoyl and an amino acid,
[0248] wherein [PEG(y)]z is:

[chemical structure]

[0249] wherein y=1-100 and z=1-10.

[0250] In embodiments of the invention, the covalent linkage comprises the structure:

[chemical structure]

[0251] which is optionally substituted at any position,
[0252] wherein J is a bond or an organic structure comprising or consisting of a chain of 2, 3, 4, 5, 6, 7, 8, 9, 10 or more moieties selected from the group consisting of [PEG(y)]z, polyalkylene glycol, polyoxyalkylated polyol, polyvinyl alcohol, polyvinyl alkyl ether, poly(lactic acid), poly(lactic-glycolic acid), polysaccharide, a branched residue, C₁-C₄ alkyl, amine, sulfur, oxygen, succinimide, maleimide, glycerol, triazole, isoxazolidine, C₁-C₄ acyl, succinyl, malonyl, glutaryl, phthalyl, adipoyl and an amino acid,
[0253] wherein [PEG(y)]z is:

[chemical structure]

[0254] wherein y=1-100 and z=1-10.

[0255] In embodiments of the invention, the covalent linkage comprises the structure:

[chemical structure]

[0256] wherein:
   [0257] a) Xₐ is a chemical structure selected from the group consisting of:
      [0258] i) a chemical structure which comprises a cyclooctane fused to a dihydropyridazine,
      [0259] ii) a chemical structure which comprises a cyclooctene fused to a pyridazine,
   [0260] b) Rₐ is a bond or a chemical structure which connects Xₐ to the first N-terminus of the first domain, and
   [0261] c) R_{b} is a bond or a chemical structure which connects Xₐ to the first N-terminus of the second domain.

[0262] In embodiments of the invention, Xₐ comprises the structure

[chemical structure]

wherein R_{c} is H, alkyl, or aryl, or a tautomer thereof.

[0263] In embodiments of the invention, the covalent linkage comprises the structure

[chemical structure]

wherein R_{c} is H, alkyl, or aryl, or a tautomer thereof.

[0264] In embodiments of the invention, Rₐ and R_{b} are, independently, a bond, or a chemical structure comprising or consisting of a chain of 1, 2, 3, 4, 5, 6, 7, 8, 9, 10 or more moieties, wherein each moiety is independently selected from the group consisting of [PEG(y)]z, polyalkylene glycol, polyoxyalkylated polyol, polyvinyl alcohol, polyvinyl alkyl ether, poly(lactic acid), poly(lactic-glycolic acid), polysaccharide, a branched residue, C₁-C₁₀ alkyl, C₃-C₁₀ cycloalkane, C₂-C₁₀ alkene, C₅-C₁₀ cycloalkene, amine, sulfur, oxygen, succinimide, maleimide, glycerol, triazole, isoxazolidine, C₂-C₅ acyl, C₂-C₅ acylamino, C₂-C₅ acyloxy, succinyl, malonyl, glutaryl, phthalyl, adipoyl, an amino acid, an aryl group, a heteroaryl group, a carbamate, a chemical structure containing a cyclooctane fused to a dihydropyridazine, a chemical structure containing a cyclooctene fused to a triazole, a chemical structure containing a cyclooctene fused to a isoxazolidine, a dibenzocyclooctene, a dibenzoazacyclooctene,

[chemical structure]

[chemical structure]

wherein X₁ is CH or N, X₂ is CH₂ or a carbonyl group, and R₅ is an aryl or alkyl group, wherein [PEG(y)]z is:

[chemical structure]

wherein y=1-100 and z=1-10.

[0265] In embodiments of the invention, Rₐ and/or R_{b} each independently:
[0266] a) comprise a [PEG(y)]z group;
[0267] b) comprise a polyalkylene glycol, polyoxyalkylated polyol, polyvinyl alcohol, polyvinyl alkyl ether, poly(lactic acid), poly(lactic-glycolic acid), or polysaccharide group;
[0268] c) comprise a C₁-C₄ alkyl group;
[0269] d) comprise a succinimide;
[0270] e) comprise an amine;
[0271] f) comprise a succinyl, malonyl, glutaryl, phthalyl or adipoyl;
[0272] g) comprise a malonyl;
[0273] h) comprise an amino acid;
[0274] i) comprise a cysteine;
[0275] j) comprise a lysine;
[0276] k) consist of a chain of 3 moieties selected from the group consisting of [PEG(y)]z, polyalkylene glycol, polyoxyalkylated polyol, polyvinyl alcohol, polyvinyl alkyl ether, poly(lactic acid), poly(lactic-glycolic acid), polysaccharide, a branched residue, C₁-C₁₀ alkyl, C₃-C₁₀ cycloalkane, C₂-C₁₀ alkene, C₅-C₁₀ cycloalkene, amine, sulfur, oxygen, succinimide, maleimide, glycerol, triazole, isoxazolidine, C₂-C₅ acyl, C₂-C₅ acylamino, C₂-C₅ acyloxy, succinyl, malonyl, glutaryl, phthalyl, adipoyl, an amino acid, an aryl group, a heteroaryl group, a carbamate, a chemical structure containing a cyclooctane fused to a dihydropyridazine, a chemical structure containing a cyclooctene fused to a triazole, a chemical structure containing a cyclooctene fused to a isoxazolidine, a dibenzocyclooctene, a dibenzoazacyclooctene,

[chemical structure]

[chemical structure]

[0277] l) consist of a chain of 4 moieties selected from the group consisting of [PEG(y)]z, polyalkylene glycol, polyoxyalkylated polyol, polyvinyl alcohol, polyvinyl alkyl ether, poly(lactic acid), poly(lactic-glycolic acid), polysaccharide, a branched residue, C₁-C₁₀ alkyl, C₃-C₁₀ cycloalkane, C₂-C₁₀ alkene, C₅-C₁₀ cycloalkene, amine, sulfur, oxygen, succinimide, maleimide, glycerol, triazole, isoxazolidine, C₂-C₅ acyl, C₂-C₅ acylamino, C₂-C₅ acyloxy, succinyl, malonyl, glutaryl, phthalyl, adipoyl, an amino acid, an aryl group, a heteroaryl group, a carbamate, a chemical structure containing a cyclooctane fused to a dihydropyridazine, a chemical structure containing a cyclooctene fused to a triazole, a chemical structure containing a cyclooctene fused to a isoxazolidine, a dibenzocyclooctene, a dibenzoazacyclooctene,

[chemical structure]

[chemical structure]

[0278] m) consist of a chain of 5 moieties selected from the group consisting of [PEG(y)]z, polyalkylene glycol, polyoxyalkylated polyol, polyvinyl alcohol, polyvinyl alkyl ether, poly(lactic acid), poly(lactic-glycolic acid), polysaccharide, a branched residue, C₁-C₁₀ alkyl, C₃-C₁₀ cycloalkane, C₂-C₁₀ alkene, C₅-C₁₀ cycloalkene, amine, sulfur, oxygen, succinimide, maleimide, glycerol, triazole, isoxazolidine, C₂-C₅ acyl, C₂-C₅ acylamino, C₂-C₅ acyloxy, succinyl, malonyl, glutaryl, phthalyl, adipoyl, an amino acid, an aryl group, a heteroaryl group, a carbamate, a chemical structure containing a cyclooctane fused to a dihydropyridazine, a chemical structure containing a cyclooctene fused to a triazole, a chemical structure containing a cyclooctene fused to a isoxazolidine, a dibenzocyclooctene, a dibenzoazacyclooctene,

[chemical structure]

[chemical structure]

[0279] n) comprise a [PEG(y)]z group bonded to a lysine;
[0280] o) comprise a C₁-C₄ acyl group bonded to a succinimide group;
[0281] p) comprise a lysine bonded to a C₁-C₄ acyl
[0282] q) comprise a [PEG(y)]z group, which is bonded to a glutaryl;
[0283] r) consist of a chain of three, four or five moieties selected from the group consisting of [PEG(y)]z, C₂-C₅ acyl, succinyl, malonyl, glutaryl, an amino acid, a chemical structure containing a cyclooctane fused to a dihydropyridazine, a chemical structure containing a cyclooctene fused to a triazole, a chemical structure containing a cyclooctene fused to a isoxazolidine, a dibenzocyclooctene, a dibenzoazacyclooctene,

[chemical structure]

[chemical structure]

wherein X₁ is CH or N, X₂ is CH₂ or a carbonyl group, and R₅ is an aryl or alkyl group, wherein [PEG(y)]z is:

[chemical structure]

wherein y=1-100 and z=1-10;
[0284] s) is a bond;
[0285] t) is a cysteine;
[0286] u) has a linear structure; or
[0287] v) has a branched structure;
[0288] w) has the structure

[chemical structure]

[0289] x) is:

[chemical structure]

wherein n is 1, 2, 3, 4, 5, 6, 7, 8, 9, 10, 11, 12, 13, 14, 15, 16, 17, 18, 19, 20, 1-30, 1-40, or 1-50;
[0290] y) is:

[chemical structure]

wherein n is 1, 2, 3, 4, 5, 6, 7, 8, 9, 10, 11, 12, 13, 14, 15, 16, 17, 18, 19, 20, 1-30, 1-40, or 1-50, x is 1, 2, 3, 4, 5, 6, 7, 8, 9, 10, 11, 12, 13, 14, 15, 16, 17, 18, 19, 20, 1-30, 1-40, or 1-50 and z is 1, 2, 3, 4, 5, 6, 7, 8, 9, 10, 11, 12, 13, 14, 15, 16, 17, 18, 19, 20, 1-30, 1-40, or 1-50;
[0291] z) is:

[chemical structure]

wherein x is 1, 2, 3, 4, 5, 6, 7, 8, 9, 10, 11, 12, 13, 14, 15, 16, 17, 18, 19, 20, 1-30, 1-40, or 1-50 and z is 1, 2, 3, 4, 5, 6, 7, 8, 9, 10, 11, 12, 13, 14, 15, 16, 17, 18, 19, 20, 1-30, 1-40, or 1-50; or
[0292] aa) is:

[chemical structure]

wherein n is 1, 2, 3, 4, 5, 6, 7, 8, 9, 10, 11, 12, 13, 14, 15, 16, 17, 18, 19, 20, 1-30, 1-40, or 1-50.

[0293] In embodiments of the invention, Rₐ and/or R_{b} comprise the moiety

[chemical structure]

wherein X₁ is CH or N and X₂ is CH₂ or a carbonyl group.

### Non-Covalent Linkages

[0294] In embodiments of the invention, the non-peptidyl linkage is a non-covalent linkage between a first dimerizing polypeptide attached to the first domain and a second dimerizing polypeptide attached to the second domain.

[0295] In embodiments of the invention, the first and second dimerizing polypeptides are selected from the group consisting of:
[0296] a) dimerizing domains of an extracellular protein dimer, and
[0297] b) dimerizing domains of an intracellular protein dimer.

[0298] In embodiments of the invention, the first and second dimerizing polypeptides are selected from the group consisting of:
[0299] a) a leucine zipper domain,
[0300] b) a collectrin-like domain (CLD),
[0301] c) a collectrin domain (CD),
[0302] d) a CD8 alpha extracellular domain, and
[0303] e) a CD8 beta extracellular domain.

[0304] In embodiments of the invention:
[0305] a) the first dimerizing polypeptide is the same as the second dimerizing polypeptide, and
[0306] b) the dimerizing polypeptides form a homodimer.

[0307] In embodiments of the invention:
[0308] a) the first dimerizing polypeptide is different than the second dimerizing polypeptide, and
[0309] b) the first and second dimerizing polypeptides form a heterodimer.

[0310] In some of these embodiments of the invention, the first and second dimerizing polypeptides, when in the presence of each other, form less than 30%, 20%, 10%, 5%, 4%, 3%, 2%, or 1% homodimers.

### Domains

[0311] In embodiments of the invention:
[0312] a) the third and fourth domains are each the ACE2 peptidase domain (PD), and
[0313] b) the first and second dimerizing polypeptides are each the ACE2 collectrin-like domain (CLD),

[0314] In an embodiment wherein the first and second domains are Fc domains, each polypeptide chain of the tetrahedral antibody comprises the amino acid sequence set forth in any one of SEQ ID NOs: 74-119, more preferably SEQ ID NO: 78.

[0315] In embodiments of the invention, the first and second domains are Fc domains.

[0316] In embodiments of the invention:
[0317] a) the first and second domains are Fc domains and the third domain is a first type of Fab domain,
[0318] b) the first and second domains are Fc domains and the third and fourth domains are independently selected from the group consisting of a first type of Fab domain and a second type of Fab domain,
[0319] c) the first domain is an Fc domain, and the second and third domains are independently selected from the group consisting of a first type of Fab domain and a second type of Fab domain, or
[0320] d) the first domain is an Fc domain, and the second, third, and fourth domains are independently selected from the group consisting of a first type of Fab domain, a second type of Fab domain, and a third type of Fab domain.

[0321] In embodiments of the invention the tetrahedral antibody of additionally comprises a fifth domain, wherein the fifth domain is attached at its C-terminus by a peptide bond or via a peptide linker to:
[0322] a) the N-terminus of the first dimerizing polypeptide,
[0323] b) the second N-terminus of the first domain, or
[0324] c) the N-terminus of a third dimerizing polypeptide, wherein the third dimerizing polypeptide is attached at its C-terminus by a peptide bond or via a peptide linker to the second N-terminus of the first domain.

[0325] In embodiments of the invention:
[0326] a) the first and second domains are Fc domains and the fifth domain is a first type of Fab domain,
[0327] b) the first and second domains are Fc domains, and the third and fifth domains are independently selected from the group consisting of a first type of Fab domain and a second type of Fab domain,
[0328] c) the first and second domains are Fc domains, and the fourth and fifth domains are independently selected from the group consisting of a first type of Fab domain and a second type of Fab domain,
[0329] d) the first and second domains are Fc domains, and the third, fourth, and fifth domains are independently selected from the group consisting of a first type of Fab domain, a second type of Fab domain, and a third type of Fab domain,
[0330] e) the first domain is an Fc domain, and the second and fifth domains are independently selected from the group consisting of a first type of Fab domain and a second type of Fab domain,
[0331] f) the first domain is an Fc domain, and the second, third, and fifth domains are independently selected from the group consisting of a first type of Fab domain, a second type of Fab domain, and a third type of Fab domain,
[0332] g) the first domain is an Fc domain, and the second, fourth, and fifth domains are independently selected from the group consisting of a first type of Fab domain, a second type of Fab domain, and a third type of Fab domain, or
[0333] h) the first domain is an Fc domain, and the second, third, fourth, and fifth domains are independently selected from the group consisting of a first type of Fab domain, a second type of Fab domain, a third type of Fab domain, and a fourth type of Fab domain.
   Tetrahedral Antibodies Comprising a Fifth and/or Sixth Domain

[0334] In embodiments of the invention, the tetrahedral antibody additionally comprises a fifth and/or sixth domain, wherein:
[0335] a) the first domain is joined to the second domain via a first dimerizing polypeptide attached to the first N-terminus of the first domain, and wherein
   [0336] i) the fifth domain is attached at its C-terminus by a peptide bond or via a peptide linker to:
      [0337] (1) the N-terminus of the first dimerizing polypeptide,
      [0338] (2) the second N-terminus of the first domain, or
      [0339] (3) the N-terminus of a third dimerizing polypeptide, wherein the third dimerizing polypeptide is attached at its C-terminus by a peptide bond or via a peptide linker to the second N-terminus of the first domain,
[0340] b) the first domain is joined to the second domain via a first dimerizing polypeptide attached to the first C-terminus of the first domain, and wherein
   [0341] i) the fifth domain is attached at its N-terminus by a peptide bond or via a peptide linker to:
      [0342] (1) the C-terminus of the first dimerizing polypeptide,
      [0343] (2) the second C-terminus of the first domain, or
      [0344] (3) the C-terminus of a third dimerizing polypeptide, wherein the third dimerizing polypeptide is attached at its N-terminus by a peptide bond or via a peptide linker to the second C-terminus of the first domain,
[0345] c) the second domain is joined to the first domain via a second dimerizing polypeptide attached to the first N-terminus of the second domain, and wherein
   [0346] i) the sixth domain is attached at its C-terminus by a peptide bond or via a peptide linker to:
      [0347] (1) the N-terminus of the second dimerizing polypeptide,
      [0348] (2) the second N-terminus of the second domain, or
      [0349] (3) the N-terminus of a fourth dimerizing polypeptide, wherein the fourth dimerizing polypeptide is attached at its C-terminus by a peptide bond or via a peptide linker to the second N-terminus of the second domain, or
[0350] d) the second domain is joined to the first domain via a second dimerizing polypeptide attached to the first C-terminus of the second domain, and wherein
   [0351] i) the sixth domain is attached at its N-terminus by a peptide bond or via a peptide linker to:
      [0352] (1) the C-terminus of the second dimerizing polypeptide,
      [0353] (2) the second C-terminus of the second domain, or
   [0354] ii) the C-terminus of a fourth dimerizing polypeptide, wherein the fourth dimerizing polypeptide is attached at its N-terminus by a peptide bond or via a peptide linker to the second C-terminus of the second domain.

[0355] In embodiments of the invention:
[0356] a) the first and second domains are Fc domains and the fifth domain is a first type of Fab domain,
[0357] b) the first and second domains are Fc domains, and the third and fifth domains are independently selected from the group consisting of a first type of Fab domain and a second type of Fab domain,
[0358] c) the first and second domains are Fc domains, and the fourth and fifth domains are independently selected from the group consisting of a first type of Fab domain and a second type of Fab domain,
[0359] d) the first and second domains are Fc domains, and the third, fourth, and fifth domains are independently selected from the group consisting of a first type of Fab domain, a second type of Fab domain, and a third type of Fab domain,
[0360] e) the first domain is an Fc domain, and the second and fifth domains are independently selected from the group consisting of a first type of Fab domain and a second type of Fab domain,
[0361] f) the first domain is an Fc domain, and the second, third, and fifth domains are independently selected from the group consisting of a first type of Fab domain, a second type of Fab domain, and a third type of Fab domain,
[0362] g) the first domain is an Fc domain, and the second, fourth, and fifth domains are independently selected from the group consisting of a first type of Fab domain, a second type of Fab domain, and a third type of Fab domain, or
[0363] h) the first domain is an Fc domain, and the second, third, fourth, and fifth domains are independently selected from the group consisting of a first type of Fab domain, a second type of Fab domain, a third type of Fab domain, and a fourth type of Fab domain.

### Tetrahedral Antibodies Containing the ACE2 PD

[0364] In embodiments of the invention:
[0365] a) the third, fourth, fifth and sixth domains are each the ACE2 PD and the dimerizing polypeptides are each the ACE2 CLD,
[0366] b) the first and second domains are Fc domains, the third, fourth, fifth and sixth domains are each the ACE2 PD and the dimerizing polypeptides are each the ACE2 CLD, preferably wherein the first and second domains are each connected to their respective dimerizing polypeptides via a peptide linker,
[0367] c) the third and fourth domains are each the ACE2 PD, the fifth and sixth domains are each Fab domains, and the dimerizing polypeptides are each the ACE2 CLD,
[0368] d) the first and second domains are Fc domains, the third and fourth domains are each the ACE2 PD, the fifth and sixth domains are each Fab domains, and the dimerizing polypeptides are each the ACE2 CLD, preferably wherein the first and second domains are each connected to their respective dimerizing polypeptides via a peptide linker,
[0369] e) the third and fourth domains are each Fab domains, the fifth and sixth domains are each the ACE2 PD, and the dimerizing polypeptides are each the ACE2 CLD, or
[0370] f) the first and second domains are Fc domains, the third and fourth domains are each Fab domains, the fifth and sixth domains are each the ACE2 PD, and the dimerizing polypeptides are each the ACE2 CLD, preferably wherein the first and second domains are each connected to their respective dimerizing polypeptides via a peptide linker, or
[0371] g) the first and second domains are Fc domains, the third and fourth domains are the ACE2 PD, the fifth and sixth domains are Fab domains, the dimerizing polypeptides are each the ACE2 CLD, and the first and second domains are each connected to their respective dimerizing polypeptides via a peptide linker,
[0372] preferably wherein such domains and linkers are characterized by one or more or all of the following features:
   [0373] i) the Fc domains are characterized by one or more or all of the following features:
      [0374] (1) are heterodimers,
      [0375] (2) are IgG1 Fc domains,
      [0376] (3) comprise a silencing mutation such that the Fc domain lacks Fc gamma receptor binding activity, preferably wherein such mutation one of the following combinations of mutations:
         [0377] a. P329G/L234A/L235A (PGLALA),
         [0378] b. L234A/L235A (LALA),
         [0379] c. P331S/L234A/L235A,
         [0380] d. L234F/L235E/P331S, and
         [0381] e. L234F/L235E/P329G,
      [0382] (4) comprise a mutation that enhances FcRn activity, preferably wherein such mutation extends the half-life of the tetrahedral antibody, preferably wherein the mutation:
         [0383] a. a combination the following mutations: L309D/Q311H/N434S (DHS),
         [0384] b. a combination of the following mutations: S239D/I298E,
         [0385] c. S239D, preferably wherein the other Fc domain of the tetrahedral antibody, if present, comprises the I298E mutation, or
         [0386] d. I298E, preferably wherein the other Fc domain of the tetrahedral antibody, if present, comprises the S239D mutation, and
         [0387] e.,
      [0388] (5) comprise a mutation that ablates their Protein A binding site, preferably wherein such mutation is H435R/Y436F (HY/RF),
   [0389] ii) the ACE2 peptidase domains comprise a mutation which blocks its angiotensin converting enzyme activity, preferably wherein such mutation is an H378A mutation,
   [0390] iii) the Fab domains are chimeric Fab domains comprising a murine variable region,
   [0391] iv) the peptide linkers each have a length of 23 amino acids and are derived from the stalk region of a TNF receptor, preferably wherein the TNF receptor is TNF receptor 1B, still more preferably wherein the peptide linker consists of the amino acid sequence set forth in SEQ ID NO: 4468,
   [0392] v) such domains and peptide linkers are formed by two or three different types of polypeptide chains.

[0393] In embodiments of the invention:
[0394] a) the third and fourth domains are each the ACE2 PD,
[0395] b) the fifth domain, if present, is attached at its C-terminus by a peptide bond or via a peptide linker to the N-terminus of a third dimerizing polypeptide, wherein the third dimerizing polypeptide is attached at its C-terminus by a peptide bond or via a peptide linker to the second N-terminus of the first domain,
[0396] c) the sixth domain, if present, is attached at its C-terminus by a peptide bond or via a peptide linker to the N-terminus of a fourth dimerizing polypeptide, wherein the fourth dimerizing polypeptide is attached at its C-terminus by a peptide bond or via a peptide linker to the second N-terminus of the second domain, and
[0397] d) the first, second, third, and fourth dimerizing polypeptides are each the ACE2 CLD.

[0398] In embodiments of the invention, the ACE2 PD comprises or consists of amino acids 18-615 of the ACE2 protein or a portion thereof.

[0399] In embodiments of the invention, the ACE2 CLD comprises or consists of amino acids 616-740 of the ACE2 protein or a portion thereof.

[0400] In embodiments of the invention, the ACE2 PD is catalytically active.

[0401] In embodiments of the invention, the ACE2 PD is catalytically inactive.

[0402] In embodiments of the invention, ACE2 PD comprises a R273Q, or a H378A mutation.

[0403] In embodiments of the invention, the Fc domains lack Fc gamma receptor binding activity.

[0404] In embodiments of the invention, the Fc domains comprise:
[0405] a) a P329G mutation, a L234A mutation and a L235A mutation (PGLALA);
[0406] b) a L234A mutation and a L235A mutation (LALA),
[0407] c) a P331S mutation, a L234A mutation, and a L235A mutation,
[0408] d) a L234F mutation, a L235E mutation, and a P331S mutation, or
[0409] e) a L234F mutation, a L235E mutation, and a P329G mutation.

[0410] In embodiments of the invention, the Fc domains comprise a mutation which enhances FcRn activity and/or half-life. In embodiments of the invention, such mutations are selected from any of the following combinations of mutations:
[0411] a) M252Y/S254T/T256E (YTE),
[0412] b) L309D/Q311H/N434S (DHS),
[0413] c) M428L/N434S (LS)

[0414] In embodiments of the invention, such mutations are selected from:
[0415] a) S239D/I298E,
[0416] b) S239D, preferably wherein the other Fc domain of the tetrahedral antibody, if present, comprises the I298E mutation, or
[0417] c) I298E, preferably wherein the other Fc domain of the tetrahedral antibody, if present, comprises the S239D mutation.

[0418] In embodiments of the invention, the Fc domains comprise a mutation that ablates their Protein A binding site, preferably wherein such mutation is H435R/Y436F (HY/RF).

[0419] In embodiments of the invention, the Fab domains are chimeric Fab domains comprising a murine variable region.

[0420] In embodiments of the invention, the tetrahedral antibody comprises one or more Fab domains and the one or more Fab domains comprise the complementarity-determining region (CDR) of the Fab domain of the B13A antibody.

[0421] In embodiments of the invention, the one or more Fab domains comprise the VH and VL regions from the B13A antibody, preferably wherein the VH and VL regions comprise the amino acid sequences set forth in SEQ ID NOs 463 and 464 or variants thereof with at least 90%, preferably at least 95%, more preferably at least 98% identity to said sequences.

[0422] In embodiments of the invention, the one or more Fab domains are humanized.

[0423] In embodiments of the invention, the first and second domains are Fc domains, the third and fourth domains are the ACE2 PD, the fifth and sixth domains are Fab domains, the dimerizing polypeptides are each the ACE2 CLD, and the first and second domains are each connected to their respective dimerizing polypeptides via a peptide linker, wherein the domains and peptide linkers of the tetrahedral antibody are formed by three different types of polypeptide chains. In a preferred embodiment the three different types of polypeptide chains are denoted H1, L2, and H2, and:
[0424] a) the H1 chain comprises the amino acid sequence set forth in SEQ ID NO: 524, the L2 chain comprises the amino acid sequence set forth in SEQ ID NO: 465, and the H2 chain comprises the amino acid sequence set forth in SEQ ID NO: 535, or the H1, L2 and H2 chains are variants with at least 90%, preferably at least 95%, more preferably at least 98% identity to said sequences;
[0425] b) the H1 chain comprises the amino acid sequence set forth in SEQ ID NO: 473, the L2 chain comprises the amino acid sequence set forth in SEQ ID NO: 465, and the H2 chain comprises the amino acid sequence set forth in SEQ ID NO: 485, or the H1, L2 and H2 chains are variants with at least 90%, preferably at least 95%, more preferably at least 98% identity to said sequences;
[0426] c) the H1 chain comprises the amino acid sequence set forth in SEQ ID NO: 526, the L2 chain comprises the amino acid sequence set forth in SEQ ID NO: 465, and the H2 chain comprises the amino acid sequence set forth in SEQ ID NO: 527, or the H1, L2 and H2 chains are variants with at least 90%, preferably at least 95%, more preferably at least 98% identity to said sequences;
[0427] d) the H1 chain comprises the amino acid sequence set forth in SEQ ID NO: 514, the L2 chain comprises the amino acid sequence set forth in SEQ ID NO: 465, and the H2 chain comprises the amino acid sequence set forth in SEQ ID NO: 528, or the H1, L2 and H2 chains are variants with at least 90%, preferably at least 95%, more preferably at least 98% identity to said sequences;
[0428] e) the H1 chain comprises the amino acid sequence set forth in SEQ ID NO: 529, the L2 chain comprises the amino acid sequence set forth in SEQ ID NO: 465, and the H2 chain comprises the amino acid sequence set forth in SEQ ID NO: 530, or the H1, L2 and H2 chains are variants with at least 90%, preferably at least 95%, more preferably at least 98% identity to said sequences;
[0429] f) the H1 chain comprises the amino acid sequence set forth in SEQ ID NO: 518, the L2 chain comprises the amino acid sequence set forth in SEQ ID NO: 465, and the H2 chain comprises the amino acid sequence set forth in SEQ ID NO: 531; or the H1, L2 and H2 chains are variants with at least 90%, preferably at least 95%, more preferably at least 98% identity to said sequences,
[0430] g) the H1 chain comprises the amino acid sequence set forth in SEQ ID NO: 532, the L2 chain comprises the amino acid sequence set forth in SEQ ID NO: 465, and the H2 chain comprises the amino acid sequence set forth in SEQ ID NO: 533, or the H1, L2 and H2 chains are variants with at least 90%, preferably at least 95%, more preferably at least 98% identity to said sequences; or
[0431] h) the H1 chain comprises the amino acid sequence set forth in SEQ ID NO: 522, the L2 chain comprises the amino acid sequence set forth in SEQ ID NO: 465, and the H2 chain comprises the amino acid sequence set forth in SEQ ID NO: 534, or the H1, L2 and H2 chains are variants with at least 90%, preferably at least 95%, more preferably at least 98% identity to said sequences.

[0432] In the above embodiment, the C-terminal portion of the H1 and H2 chains pair with one another to form each of domains 1 and 2, the N-terminal portion of the H1 chain is the ACE2 PD (domains 3 and 4), and the N-terminal portion of the H2 chain pairs with the L2 chain to form domains 5 and 6. Further, the H1 chain contains a CLD dimerizing domain between the portion that pairs with the H2 chain and the ACE2 PD. Panel B of FIG. 31 provides a schematic representation of the structure of such tetrahedral antibodies, where the chains in the schematic are, from left to right, L2, H2, H1, H1, H2, L2. This invention also provides a method of producing a tetrahedral antibody, the method comprising recombinantly expressing the three different types of polypeptide chains of this embodiment in a host cell.

[0433] In embodiments of the invention, the first and second domains are Fc domains, the third, fourth, fifth and sixth domains are each the ACE2 PD and the dimerizing polypeptides are each the ACE2 CLD, the first and second domains are each connected to their respective dimerizing polypeptides via a peptide linker, and the domains and peptide linkers of the tetrahedral antibody are formed by two different types of polypeptide chains. In a preferred embodiment, the two different types of polypeptide chains are denoted H1 and H2, and:
[0434] a) the H1 chain comprises the amino acid sequence set forth in SEQ ID NO: 509, and the H2 chain comprises the amino acid sequence set forth in SEQ ID NO: 510, or the H1 and H2 chains are variants with at least 90%, preferably at least 95%, more preferably at least 98% identity to said sequences;
[0435] b) the H1 chain comprises the amino acid sequence set forth in SEQ ID NO: 512, and the H2 chain comprises the amino acid sequence set forth in SEQ ID NO: 513 or the H1 and H2 chains are variants with at least 90%, preferably at least 95%, more preferably at least 98% identity to said sequences;
[0436] c) the H1 chain comprises the amino acid sequence set forth in SEQ ID NO: 516, and the H2 chain comprises the amino acid sequence set forth in SEQ ID NO: 517 or the H1 and H2 chains are variants with at least 90%, preferably at least 95%, more preferably at least 98% identity to said sequences;
[0437] d) the H1 chain comprises the amino acid sequence set forth in SEQ ID NO: 520, and the H2 chain comprises the amino acid sequence set forth in SEQ ID NO: 521 or the H1 and H2 chains are variants with at least 90%, preferably at least 95%, more preferably at least 98% identity to said sequences;
[0438] e) the H1 chain comprises the amino acid sequence set forth in SEQ ID NO: 542, and the H2 chain comprises the amino acid sequence set forth in SEQ ID NO: 543 or the H1 and H2 chains are variants with at least 90%, preferably at least 95%, more preferably at least 98% identity to said sequences;
[0439] f) the H1 chain comprises the amino acid sequence set forth in SEQ ID NO: 545, and the H2 chain comprises the amino acid sequence set forth in SEQ ID NO: 546 or the H1 and H2 chains are variants with at least 90%, preferably at least 95%, more preferably at least 98% identity to said sequences;
[0440] g) the H1 chain comprises the amino acid sequence set forth in SEQ ID NO: 548, and the H2 chain comprises the amino acid sequence set forth in SEQ ID NO: 549 or the H1 and H2 chains are variants with at least 90%, preferably at least 95%, more preferably at least 98% identity to said sequences; or
[0441] h) the H1 chain comprises the amino acid sequence set forth in SEQ ID NO: 551, and the H2 chain comprises the amino acid sequence set forth in SEQ ID NO: 552 or the H1 and H2 chains are variants with at least 90%, preferably at least 95%, more preferably at least 98% identity to said sequences.

[0442] In the above embodiment, the C-terminal portion of the H1 and H2 chains pair with one another to form each of domains 1 and 2 and the N-terminal portions of the H1 and H2 chains are the ACE2 PD (domains 3-6). Further, the H1 chain contains a CLD dimerizing domain between the portion that pairs with the H2 chain and the ACE2 PD. Panel A of FIG. 31 provides a schematic representation of the structure of such tetrahedral antibodies, where the chains in the schematic are, from left to right, H2, H1, H1, H2. This invention also provides a method of producing a tetrahedral antibody, the method comprising recombinantly expressing the two different types of polypeptide chains of this embodiment in a host cell.

[0443] In embodiments of the invention:
[0444] a) the third domain, first dimerizing polypeptide, and first polypeptide chain of the first domain are part of a first stretch of consecutive amino acids,
[0445] b) the fourth domain, second dimerizing polypeptide, and first polypeptide chain of the second domain are part of a second stretch of consecutive amino acids,
[0446] c) the fifth domain, third dimerizing polypeptide, and second polypeptide chain of the first domain are part of a third stretch of consecutive amino acids, and
[0447] d) the sixth domain, fourth dimerizing polypeptide, and second polypeptide chain of the second domain are part of a fourth stretch of consecutive amino acids,
[0448] and each stretch of consecutive amino acids consists of the sequence of amino acids selected from the group consisting of SEQ ID NOs: 74-119, or each such stretch of consecutive amino acids are variants with at least 90%, preferably at least 95%, more preferably at least 98% identity to said sequences.

[0449] Polynucleotides

[0450] This invention also provides a polynucleotide which encodes any one of the polypeptide chains of the invention. In a preferred embodiment, the encoded polypeptide comprises the amino acid sequence set forth in any one of SEQ ID NOs: 74-119. In a preferred embodiment, the polynucleotide encodes one of the H1, L2, or H2 polypeptide chains of the embodiments described above. In a preferred embodiment, the polynucleotide encodes a stretch of consecutive amino acids consisting of the sequence of amino acids selected from the group consisting of SEQ ID NOs: 74-119 or a variant with at least 90%, preferably at least 95%, more preferably at least 98% identity to said sequences.

[0451] Vectors

[0452] This invention also provides a vector comprising polynucleotides which encode polypeptides comprising any of the polypeptide chains of the invention. In a preferred embodiment, the vector encodes a polypeptide comprising the amino acid sequence set forth in any one of SEQ ID NOs: 74-119. In a preferred embodiment, the vector encodes polypeptides comprising the H1, L2 and H2 polypeptide chains of the embodiments of the invention comprising three different polypeptide chains as described above. In a preferred embodiment, the vector encodes polypeptides comprising the H1 and H2 polypeptide chains of the embodiments of the invention comprising two different polypeptide chains as described above. In these vectors, each polynucleotide is operably linked to a promoter which directs expression of the polynucleotide in a host cell. This invention also provides a method of producing a tetrahedral antibody, the method comprising recombinantly expressing any of these vectors in a host cell.

[0453] Host Cells

[0454] This invention also provides a host cell comprising any of the vectors of the invention. In a preferred embodiment, the host cell is for use in a method of producing a tetrahedral antibody. This invention also provides a method of producing a tetrahedral antibody comprising two, three, or four different types of polypeptide chains, the method comprising expressing the two, three, or four different types of polypeptide chains in a host cell of the invention.

[0455] Pharmaceutical Compositions

[0456] This invention also provides a pharmaceutical composition comprising any of the tetrahedral antibodies of the invention comprising one or more ACE2 PDs, and one or more pharmaceutically acceptable excipients.

[0457] In a preferred embodiment, the pharmaceutical composition comprises a tetrahedral antibody wherein the first and second domains are Fc domains, the third and fourth domains are the ACE2 PD, the fifth and sixth domains are Fab domains, the dimerizing polypeptides are each the ACE2 CLD, and the first and second domains are each connected to their respective dimerizing polypeptides via a peptide linker, wherein the domains and peptide linkers of the tetrahedral antibody are formed by three different types of polypeptide chains. In a preferred embodiment the three different types of polypeptide chains are denoted H1, L2, and H2, and:
[0458] a) the H1 chain comprises the amino acid sequence set forth in SEQ ID NO: 524, the L2 chain comprises the amino acid sequence set forth in SEQ ID NO: 465, and the H2 chain comprises the amino acid sequence set forth in SEQ ID NO: 535, or the H1, L2 and H2 chains are variants with at least 90%, preferably at least 95%, more preferably at least 98% identity to said sequences;
[0459] b) the H1 chain comprises the amino acid sequence set forth in SEQ ID NO: 473, the L2 chain comprises the amino acid sequence set forth in SEQ ID NO: 465, 485, or the H1, L2 and H2 chains are variants with at least 90%, preferably at least 95%, more preferably at least 98% identity to said sequences;
[0460] c) the H1 chain comprises the amino acid sequence set forth in SEQ ID NO: 526, the L2 chain comprises the amino acid sequence set forth in SEQ ID NO: 465, and the H2 chain comprises the amino acid sequence set forth in SEQ ID NO: 527, or the H1, L2 and H2 chains are variants with at least 90%, preferably at least 95%, more preferably at least 98% identity to said sequences;
[0461] d) the H1 chain comprises the amino acid sequence set forth in SEQ ID NO: 514, the L2 chain comprises the amino acid sequence set forth in SEQ ID NO: 465, and the H2 chain comprises the amino acid sequence set forth in SEQ ID NO: 528, or the H1, L2 and H2 chains are variants with at least 90%, preferably at least 95%, more preferably at least 98% identity to said sequences;
[0462] e) the H1 chain comprises the amino acid sequence set forth in SEQ ID NO: 529, the L2 chain comprises the amino acid sequence set forth in SEQ ID NO: 465, and the H2 chain comprises the amino acid sequence set forth in SEQ ID NO: 530, or the H1, L2 and H2 chains are variants with at least 90%, preferably at least 95%, more preferably at least 98% identity to said sequences;
[0463] f) the H1 chain comprises the amino acid sequence set forth in SEQ ID NO: 518, the L2 chain comprises the amino acid sequence set forth in SEQ ID NO: 465, and the H2 chain comprises the amino acid sequence set forth in SEQ ID NO: 531; or the H1, L2 and H2 chains are variants with at least 90%, preferably at least 95%, more preferably at least 98% identity to said sequences,
[0464] g) the H1 chain comprises the amino acid sequence set forth in SEQ ID NO: 532, the L2 chain comprises the amino acid sequence set forth in SEQ ID NO: 465, and the H2 chain comprises the amino acid sequence set forth in SEQ ID NO: 533, or the H1, L2 and H2 chains are variants with at least 90%, preferably at least 95%, more preferably at least 98% identity to said sequences; or
[0465] h) the H1 chain comprises the amino acid sequence set forth in SEQ ID NO: 522, the L2 chain comprises the amino acid sequence set forth in SEQ ID NO: 465, and the H2 chain comprises the amino acid sequence set forth in SEQ ID NO: 534, or the H1, L2 and H2 chains are variants with at least 90%, preferably at least 95%, more preferably at least 98% identity to said sequences.

[0466] In a preferred embodiment, the pharmaceutical composition comprises a tetrahedral antibody wherein the first and second domains are Fc domains, the third, fourth, fifth and sixth domains are each the ACE2 PD and the dimerizing polypeptides are each the ACE2 CLD, the first and second domains are each connected to their respective dimerizing polypeptides via a peptide linker, and the domains and peptide linkers of the tetrahedral antibody are formed by two different types of polypeptide chains. In a preferred embodiment, the two different types of polypeptide chains are denoted H1 and H2, and:
[0467] a) the H1 chain comprises the amino acid sequence set forth in SEQ ID NO: 509, and the H2 chain comprises the amino acid sequence set forth in SEQ ID NO: 510, or the H1 and H2 chains are variants with at least 90%, preferably at least 95%, more preferably at least 98% identity to said sequences;
[0468] b) the H1 chain comprises the amino acid sequence set forth in SEQ ID NO: 512, and the H2 chain comprises the amino acid sequence set forth in SEQ ID NO: 513 or the H1 and H2 chains are variants with at least 90%, preferably at least 95%, more preferably at least 98% identity to said sequences;
[0469] c) the H1 chain comprises the amino acid sequence set forth in SEQ ID NO: 516, and the H2 chain comprises the amino acid sequence set forth in SEQ ID NO: 517 or the H1 and H2 chains are variants with at least 90%, preferably at least 95%, more preferably at least 98% identity to said sequences;
[0470] d) the H1 chain comprises the amino acid sequence set forth in SEQ ID NO: 520, and the H2 chain comprises the amino acid sequence set forth in SEQ ID NO: 521 or the H1 and H2 chains are variants with at least 90%, preferably at least 95%, more preferably at least 98% identity to said sequences;
[0471] e) the H1 chain comprises the amino acid sequence set forth in SEQ ID NO: 542, and the H2 chain comprises the amino acid sequence set forth in SEQ ID NO: 543 or the H1 and H2 chains are variants with at least 90%, preferably at least 95%, more preferably at least 98% identity to said sequences;
[0472] f) the H1 chain comprises the amino acid sequence set forth in SEQ ID NO: 545, and the H2 chain comprises the amino acid sequence set forth in SEQ ID NO: 546 or the H1 and H2 chains are variants with at least 90%, preferably at least 95%, more preferably at least 98% identity to said sequences;
[0473] g) the H1 chain comprises the amino acid sequence set forth in SEQ ID NO: 548, and the H2 chain comprises the amino acid sequence set forth in SEQ ID NO: 549 or the H1 and H2 chains are variants with at least 90%, preferably at least 95%, more preferably at least 98% identity to said sequences; or
[0474] h) the H1 chain comprises the amino acid sequence set forth in SEQ ID NO: 551, and the H2 chain comprises the amino acid sequence set forth in SEQ ID NO: 552 or the H1 and H2 chains are variants with at least 90%, preferably at least 95%, more preferably at least 98% identity to said sequences.

[0475] Methods of Treating

[0476] This invention also provides a method of treating Covid-19 in a subject, the method comprising administering to the subject a therapeutically effective amount of the any of the above pharmaceutical compositions comprising a tetrahedral antibody comprising one or more ACE2 PD.

Tetrahedral Antibodies Comprising a Seventh and/or Eighth Domain

[0477] In embodiments of the invention, the tetrahedral antibody further comprises a seventh and/or eight domain, wherein:
[0478] a) the first domain is joined to the second domain via a covalent linkage attached to the first N-terminus of the first domain or via a first dimerizing polypeptide attached to the first N-terminus of the first domain, and wherein
   [0479] i) the seventh domain is attached at its N-terminus by a peptide bond or via a peptide linker to:
      [0480] (1) the first C-terminus of the first domain, or
      [0481] (2) the second C-terminus of the first domain,
[0482] b) the first domain is joined to the second domain via a covalent linkage attached to the first C-terminus of the first domain or via a first dimerizing polypeptide attached to the first C-terminus of the first domain, and wherein
   [0483] i) the seventh domain is attached at its C-terminus by a peptide bond or via a peptide linker to:
      [0484] (1) the first N-terminus of the first domain, or
      [0485] (2) the second N-terminus of the first domain,
[0486] c) the second domain is joined to the first domain via a covalent linkage attached to the first N-terminus of the second domain or via a second dimerizing polypeptide attached to the first N-terminus of the second domain, and wherein
   [0487] i) the eighth domain is attached at its N-terminus by a peptide bond or via a peptide linker to:
      [0488] (1) the first C-terminus of the second domain, or
      [0489] (2) the second C-terminus of the second domain, or
[0490] d) the second domain is joined to the first domain via a covalent linkage attached to the first C-terminus of the second domain or via a second dimerizing polypeptide attached to the first C-terminus of the second domain, and wherein
   [0491] i) the eighth domain is attached at its C-terminus by a peptide bond or via a peptide linker to:
      [0492] (1) the first N-terminus of the second domain, or
      [0493] (2) the second N-terminus of the second domain.

### Tetrahedral Antibodies for Cancer Treatment

[0494] In embodiments of the invention, the tetrahedral antibody comprises six domains, and:
[0495] a) the first and second domains are Fc domains, the third and fourth domains are anti-CD20 Fab domains and the fifth and sixth domains are anti-CD19 Fab domains;
[0496] b) the first and second domains are Fc domains, the third and fourth domains are anti-CD19 Fab domains and the fifth and sixth domains are anti-CD20 Fab domains;
[0497] c) the first and second domains are Fc domains, the third and fourth domains are anti-CD20 Fab domains, the fifth and sixth domains are anti-CD19 Fab domains, and each dimerizing polypeptide is an ACE2 CLD;
[0498] d) the first and second domains are Fc domains, the third and fourth domains are anti-CD19 Fab domains and the fifth and sixth domains are anti-CD20 Fab domains, and each dimerizing polypeptide is an ACE2 CLD;
[0499] e) the first and second domains are Fc domains, the third and fourth domains are anti-CD20 Fab domains, the fifth and sixth domains are anti-CD19 Fab domains, each dimerizing polypeptide is an ACE2 CLD, and the first and second domains are each connected to their respective dimerizing polypeptides via a peptide linker;
[0500] f) the first and second domains are Fc domains, the third and fourth domains are anti-CD19 Fab domains and the fifth and sixth domains are anti-CD20 Fab domains, each dimerizing polypeptide is an ACE2 CLD, and the first and second domains are each connected to their respective dimerizing polypeptides via a peptide linker.

[0501] In embodiments of the invention, the tetrahedral antibody comprises eight domains, and:
[0502] a) the first and second domains are Fc domains, the third and fourth domains are anti-CD20 Fab domains and the fifth and sixth domains are anti-CD19 Fab domains, and the seventh and eighth domains are single chain 4-1BB ligands;
[0503] b) the first and second domains are Fc domains, the third and fourth domains are anti-CD19 Fab domains, the fifth and sixth domains are anti-CD20 Fab domains, and the seventh and eighth domains are single chain 4-1BB ligands;
[0504] c) the first and second domains are Fc domains, the third and fourth domains are anti-CD20 Fab domains, the fifth and sixth domains are anti-CD19 Fab domains, the seventh and eighth domains are single chain 4-1BB ligands, and each dimerizing polypeptide is an ACE2 CLD;
[0505] d) the first and second domains are Fc domains, the third and fourth domains are anti-CD19 Fab domains and the fifth and sixth domains are anti-CD20 Fab domains, the seventh and eighth domains are single chain 4-1BB ligands, and each dimerizing polypeptide is an ACE2 CLD;
[0506] e) the first and second domains are Fc domains, the third and fourth domains are anti-CD20 Fab domains, the fifth and sixth domains are anti-CD19 Fab domains, the seventh and eighth domains are single chain 4-1BB ligands, each dimerizing polypeptide is an ACE2 CLD, and the first and second domains are each connected to their respective dimerizing polypeptides via a peptide linker; or
[0507] f) the first and second domains are Fc domains, the third and fourth domains are anti-CD19 Fab domains and the fifth and sixth domains are anti-CD20 Fab domains, the seventh and eighth domains are single chain 4-1BB ligands, each dimerizing polypeptide is an ACE2 CLD, and the first and second domains are each connected to their respective dimerizing polypeptides via a peptide linker.

[0508] In embodiments of the invention:
[0509] a) the anti-CD19 Fab domain comprises:
   [0510] i) the CDRs of each of the heavy and lights chains of FMC63, preferably wherein the anti-CD19 Fab is the Fab domain of FMC63;
   [0511] ii) the CDRs of each of the heavy and lights chains of FMC60, preferably wherein the anti-CD19 Fab is the Fab domain of FMC60; or
   [0512] iii) the CDRs of each of the heavy and lights chains of FMC59, preferably wherein the anti-CD19 Fab is the Fab domain of FMC59; and/or
[0513] b) the anti-CD20 Fab domain comprises the CDR of rituximab, preferably wherein the anti-CD20 Fab is the Fab domain of rituximab.

[0514] In embodiments of the invention the Fc domains are characterized by one or more or all of the following features:
[0515] a) are heterodimers,
[0516] b) are IgG1 Fc domains,
[0517] c) comprise a silencing mutation such that the Fc domain lacks Fc gamma receptor binding activity, preferably wherein such mutation is one of the following combinations of mutations:
   [0518] i) P329G/L234A/L235A (PGLALA),
   [0519] ii) L234A/L235A (LALA),
   [0520] iii) P331S/L234A/L235A,
   [0521] iv) L234F/L235E/P331S, and
   [0522] v) L234F/L235E/P329G,
[0523] d) comprise a mutation that enhances FcRn activity, preferably wherein such mutation extends the half-life of the tetrahedral antibody, preferably wherein the mutation is:
   [0524] i) a combination the following mutations: L309D/Q311H/N434S (DHS),
   [0525] ii) a combination of the following mutations: S239D/I298E,
   [0526] iii) S239D, preferably wherein the other Fc domain of the tetrahedral antibody, if present, comprises the I298E mutation, or
   [0527] iv) I298E, preferably wherein the other Fc domain of the tetrahedral antibody, if present, comprises the S239D mutation, and
[0528] e) comprise a mutation that ablates their Protein A binding site, preferably wherein such mutation is H435R/Y436F (HY/RF).

[0529] In embodiments of the invention, the peptide linkers each have a length of 23 amino acids and are derived from the stalk region of a TNF receptor, preferably wherein the TNF receptor is TNF receptor 1B, still more preferably wherein the peptide linker consists of the amino acid sequence set forth in SEQ ID NO: 4468, and

[0530] In embodiments of the invention, the dimerizing polypeptides are each an ACE2 CLD, and wherein each ACE2 CLD comprises or consists of amino acids 616-740 of the ACE2 protein.

[0531] In embodiments of the invention comprising six domains, wherein such domains and peptide linkers are formed by four different types of polypeptide chains, preferably the four different types of polypeptide chains are denoted L1, H1, L2, and H2, and:
[0532] a) the L1 chain comprises the amino acid sequence set forth in SEQ ID NO: 733, the H1 chain comprises the amino acid sequence set forth in SEQ ID NO: 707, the L2 chain comprises the amino acid sequence set forth in SEQ ID NO: 734, and the H2 chain comprises the amino acid sequence set forth in SEQ ID NO: 708, or wherein the L1, H1, L2, and H2 chains are variants with at least 90%, preferably at least 95%, more preferably at least 98% identity to said sequences;
[0533] b) the L1 chain comprises the amino acid sequence set forth in SEQ ID NO: 735, the H1 chain comprises the amino acid sequence set forth in SEQ ID NO: 709, the L2 chain comprises the amino acid sequence set forth in SEQ ID NO: 736, and the H2 chain comprises the amino acid sequence set forth in SEQ ID NO: 710, or wherein the L1, H1, L2, and H2 chains are variants with at least 90%, preferably at least 95%, more preferably at least 98% identity to said sequences;
[0534] c) the L1 chain comprises the amino acid sequence set forth in SEQ ID NO: 735, the H1 chain comprises the amino acid sequence set forth in SEQ ID NO: 709, the L2 chain comprises the amino acid sequence set forth in SEQ ID NO: 737, and the H2 chain comprises the amino acid sequence set forth in SEQ ID NO: 711, or wherein the L1, H1, L2, and H2 chains are variants with at least 90%, preferably at least 95%, more preferably at least 98% identity to said sequences;
[0535] d) the L1 chain comprises the amino acid sequence set forth in SEQ ID NO: 738, the H1 chain comprises the amino acid sequence set forth in SEQ ID NO: 712, the L2 chain comprises the amino acid sequence set forth in SEQ ID NO: 739, and the H2 chain comprises the amino acid sequence set forth in SEQ ID NO: 713, or wherein the L1, H1, L2, and H2 chains are variants with at least 90%, preferably at least 95%, more preferably at least 98% identity to said sequences;
[0536] e) the L1 chain comprises the amino acid sequence set forth in SEQ ID NO: 740, the H1 chain comprises the amino acid sequence set forth in SEQ ID NO: 714, the L2 chain comprises the amino acid sequence set forth in SEQ ID NO: 741, and the H2 chain comprises the amino acid sequence set forth in SEQ ID NO: 715, or wherein the L1, H1, L2, and H2 chains are variants with at least 90%, preferably at least 95%, more preferably at least 98% identity to said sequences;
[0537] f) the L1 chain comprises the amino acid sequence set forth in SEQ ID NO: 740, the H1 chain comprises the amino acid sequence set forth in SEQ ID NO: 714, the L2 chain comprises the amino acid sequence set forth in SEQ ID NO: 742, and the H2 chain comprises the amino acid sequence set forth in SEQ ID NO: 716, or wherein the L1, H1, L2, and H2 chains are variants with at least 90%, preferably at least 95%, more preferably at least 98% identity to said sequences;
[0538] g) the L1 chain comprises the amino acid sequence set forth in SEQ ID NO: 4801, the H1 chain comprises the amino acid sequence set forth in SEQ ID NO: 4721, the L2 chain comprises the amino acid sequence set forth in SEQ ID NO: 4802, and the H2 chain comprises the amino acid sequence set forth in SEQ ID NO: 4722, or wherein the L1, H1, L2, and H2 chains are variants with at least 90%, preferably at least 95%, more preferably at least 98% identity to said sequences;
[0539] h) the L1 chain comprises the amino acid sequence set forth in SEQ ID NO: 4803, the H1 chain comprises the amino acid sequence set forth in SEQ ID NO: 4723, the L2 chain comprises the amino acid sequence set forth in SEQ ID NO: 4804, 4724, or wherein the L1, H1, L2, and H2 chains are variants with at least 90%, preferably at least 95%, more preferably at least 98% identity to said sequences;
[0540] i) the L1 chain comprises the amino acid sequence set forth in SEQ ID NO: 4803, the H1 chain comprises the amino acid sequence set forth in SEQ ID NO: 4723, the L2 chain comprises the amino acid sequence set forth in SEQ ID NO: 4805, and the H2 chain comprises the amino acid sequence set forth in SEQ ID NO: 4725, or wherein the L1, H1, L2, and H2 chains are variants with at least 90%, preferably at least 95%, more preferably at least 98% identity to said sequences;
[0541] j) the L1 chain comprises the amino acid sequence set forth in SEQ ID NO: 4806, the H1 chain comprises the amino acid sequence set forth in SEQ ID NO: 4726, the L2 chain comprises the amino acid sequence set forth in SEQ ID NO: 4807, and the H2 chain comprises the amino acid sequence set forth in SEQ ID NO: 4727, or wherein the L1, H1, L2, and H2 chains are variants with at least 90%, preferably at least 95%, more preferably at least 98% identity to said sequences;
[0542] k) the L1 chain comprises the amino acid sequence set forth in SEQ ID NO: 4808, the H1 chain comprises the amino acid sequence set forth in SEQ ID NO: 4728, the L2 chain comprises the amino acid sequence set forth in SEQ ID NO: 4809, and the H2 chain comprises the amino acid sequence set forth in SEQ ID NO: 4729, or wherein the L1, H1, L2, and H2 chains are variants with at least 90%, preferably at least 95%, more preferably at least 98% identity to said sequences;
[0543] l) the L1 chain comprises the amino acid sequence set forth in SEQ ID NO: 4808, the H1 chain comprises the amino acid sequence set forth in SEQ ID NO: 4728, the L2 chain comprises the amino acid sequence set forth in SEQ ID NO: 4810, and the H2 chain comprises the amino acid sequence set forth in SEQ ID NO: 4730, or wherein the L1, H1, L2, and H2 chains are variants with at least 90%, preferably at least 95%, more preferably at least 98% identity to said sequences;
[0544] m) the L1 chain comprises the amino acid sequence set forth in SEQ ID NO: 4803, the H1 chain comprises the amino acid sequence set forth in SEQ ID NO: 4723, the L2 chain comprises the amino acid sequence set forth in SEQ ID NO: 4813, and the H2 chain comprises the amino acid sequence set forth in SEQ ID NO: 4772, or wherein the L1, H1, L2, and H2 chains are variants with at least 90%, preferably at least 95%, more preferably at least 98% identity to said sequences;
[0545] n) the L1 chain comprises the amino acid sequence set forth in SEQ ID NO: 4803, the H1 chain comprises the amino acid sequence set forth in SEQ ID NO: 4723, the L2 chain comprises the amino acid sequence set forth in SEQ ID NO: 4814, and the H2 chain comprises the amino acid sequence set forth in SEQ ID NO: 4773, or wherein the L1, H1, L2, and H2 chains are variants with at least 90%, preferably at least 95%, more preferably at least 98% identity to said sequences;
[0546] o) the L1 chain comprises the amino acid sequence set forth in SEQ ID NO: 4815, the H1 chain comprises the amino acid sequence set forth in SEQ ID NO: 4774, the L2 chain comprises the amino acid sequence set forth in SEQ ID NO: 4813, and the H2 chain comprises the amino acid sequence set forth in SEQ ID NO: 4772, or wherein the L1, H1, L2, and H2 chains are variants with at least 90%, preferably at least 95%, more preferably at least 98% identity to said sequences;
[0547] p) the L1 chain comprises the amino acid sequence set forth in SEQ ID NO: 4815, the H1 chain comprises the amino acid sequence set forth in SEQ ID NO: 4774, the L2 chain comprises the amino acid sequence set forth in SEQ ID NO: 4814, and the H2 chain comprises the amino acid sequence set forth in SEQ ID NO: 4773, or wherein the L1, H1, L2, and H2 chains are variants with at least 90%, preferably at least 95%, more preferably at least 98% identity to said sequences;
[0548] q) the L1 chain comprises the amino acid sequence set forth in SEQ ID NO: 4816, the H1 chain comprises the amino acid sequence set forth in SEQ ID NO: 4775, the L2 chain comprises the amino acid sequence set forth in SEQ ID NO: 4809, and the H2 chain comprises the amino acid sequence set forth in SEQ ID NO: 4729, or wherein the L1, H1, L2, and H2 chains are variants with at least 90%, preferably at least 95%, more preferably at least 98% identity to said sequences;
[0549] r) the L1 chain comprises the amino acid sequence set forth in SEQ ID NO: 4816, the H1 chain comprises the amino acid sequence set forth in SEQ ID NO: 4775, the L2 chain comprises the amino acid sequence set forth in SEQ ID NO: 4810, and the H2 chain comprises the amino acid sequence set forth in SEQ ID NO: 4730, or wherein the L1, H1, L2, and H2 chains are variants with at least 90%, preferably at least 95%, more preferably at least 98% identity to said sequences;
[0550] s) the L1 chain comprises the amino acid sequence set forth in SEQ ID NO: 4817, the H1 chain comprises the amino acid sequence set forth in SEQ ID NO: 4776, the L2 chain comprises the amino acid sequence set forth in SEQ ID NO: 4809, and the H2 chain comprises the amino acid sequence set forth in SEQ ID NO: 4729, or wherein the L1, H1, L2, and H2 chains are variants with at least 90%, preferably at least 95%, more preferably at least 98% identity to said sequences;
[0551] t) the L1 chain comprises the amino acid sequence set forth in SEQ ID NO: 4817, the H1 chain comprises the amino acid sequence set forth in SEQ ID NO: 4776, the L2 chain comprises the amino acid sequence set forth in SEQ ID NO: 4810, and the H2 chain comprises the amino acid sequence set forth in SEQ ID NO: 4730, or wherein the L1, H1, L2, and H2 chains are variants with at least 90%, preferably at least 95%, more preferably at least 98% identity to said sequences;
[0552] u) the L1 chain comprises the amino acid sequence set forth in SEQ ID NO: 4803, the H1 chain comprises the amino acid sequence set forth in SEQ ID NO: 4723, the L2 chain comprises the amino acid sequence set forth in SEQ ID NO: 4814, and the H2 chain comprises the amino acid sequence set forth in SEQ ID NO: 4794, or wherein the L1, H1, L2, and H2 chains are variants with at least 90%, preferably at least 95%, more preferably at least 98% identity to said sequences;
[0553] v) the L1 chain comprises the amino acid sequence set forth in SEQ ID NO: 4815, the H1 chain comprises the amino acid sequence set forth in SEQ ID NO: 4774, the L2 chain comprises the amino acid sequence set forth in SEQ ID NO: 4813, and the H2 chain comprises the amino acid sequence set forth in SEQ ID NO: 4793, or wherein the L1, H1, L2, and H2 chains are variants with at least 90%, preferably at least 95%, more preferably at least 98% identity to said sequences;
[0554] w) the L1 chain comprises the amino acid sequence set forth in SEQ ID NO: 4815, the H1 chain comprises the amino acid sequence set forth in SEQ ID NO: 4774, the L2 chain comprises the amino acid sequence set forth in SEQ ID NO: 4814, and the H2 chain comprises the amino acid sequence set forth in SEQ ID NO: 4794, or wherein the L1, H1, L2, and H2 chains are variants with at least 90%, preferably at least 95%, more preferably at least 98% identity to said sequences;
[0555] x) the L1 chain comprises the amino acid sequence set forth in SEQ ID NO: 4819, the H1 chain comprises the amino acid sequence set forth in SEQ ID NO: 4775, the L2 chain comprises the amino acid sequence set forth in SEQ ID NO: 4809, and the H2 chain comprises the amino acid sequence set forth in SEQ ID NO: 4729, or wherein the L1, H1, L2, and H2 chains are variants with at least 90%, preferably at least 95%, more preferably at least 98% identity to said sequences
[0556] y) the L1 chain comprises the amino acid sequence set forth in SEQ ID NO: 4819, the H1 chain comprises the amino acid sequence set forth in SEQ ID NO: 4775, the L2 chain comprises the amino acid sequence set forth in SEQ ID NO: 4810, and the H2 chain comprises the amino acid sequence set forth in SEQ ID NO: 4730, or wherein the L1, H1, L2, and H2 chains are variants with at least 90%, preferably at least 95%, more preferably at least 98% identity to said sequences;
[0557] z) the L1 chain comprises the amino acid sequence set forth in SEQ ID NO: 4820, the H1 chain comprises the amino acid sequence set forth in SEQ ID NO: 4776, the L2 chain comprises the amino acid sequence set forth in SEQ ID NO: 4809, and the H2 chain comprises the amino acid sequence set forth in SEQ ID NO: 4729, or wherein the L1, H1, L2, and H2 chains are variants with at least 90%, preferably at least 95%, more preferably at least 98% identity to said sequences; or
[0558] aa) the L1 chain comprises the amino acid sequence set forth in SEQ ID NO: 4820, the H1 chain comprises the amino acid sequence set forth in SEQ ID NO: 4776, the L2 chain comprises the amino acid sequence set forth in SEQ ID NO: 4810, and the H2 chain comprises the amino acid sequence set forth in SEQ ID NO: 4730, or wherein the L1, H1, L2, and H2 chains are variants with at least 90%, preferably at least 95%, more preferably at least 98% identity to said sequences.

[0559] In another embodiment of the invention comprising six domains, wherein such domains and peptide linkers are formed by four different types of polypeptide chains, the polypeptides are any of those listed in Table 54, preferably protein IDs 21-31 to 21-38 and 21-69 to 21-76.

[0560] In the above embodiment, the C-terminal portion of the H1 and H2 chains pair with one another to form each of domains 1 and 2, The N-terminal portion of the H1 chain pairs with L1 chains to form the third and fourth domains and the N-terminal portion of the H2 chain pairs with L2 to form the fifth and sixth domains Further, the H1 chain contains a CLD dimerizing domain between the portion that pairs with the H2 chain and the portion that pairs with the L1 chain. Panels C and D of FIG. 31 provide schematic representations of the structure of such tetrahedral antibodies, where the chains in the schematic are, from left to right, L2, H2, L1, H1, H1, L1, H2, L2. This invention provides a method of producing a tetrahedral antibody, the method comprising recombinantly expressing the four different types of polypeptide chains of this embodiment in a host cell.

[0561] In embodiments of the invention comprising eight domains, wherein such domains and peptide linkers are formed by four different types of polypeptide chains, preferably the four different types of polypeptide chains are denoted L1, H1, L2, and H2, and:
[0562] a) the L1 chain comprises the amino acid sequence set forth in SEQ ID NO: 733, the H1 chain comprises the amino acid sequence set forth in SEQ ID NO: 707, the L2 chain comprises the amino acid sequence set forth in SEQ ID NO: 734, and the H2 chain comprises the amino acid sequence set forth in SEQ ID NO: 717, or wherein the L1, H1, L2, and H2 chains are variants with at least 90%, preferably at least 95%, more preferably at least 98% identity to said sequences;
[0563] b) the L1 chain comprises the amino acid sequence set forth in SEQ ID NO: 735, the H1 chain comprises the amino acid sequence set forth in SEQ ID NO: 709, the L2 chain comprises the amino acid sequence set forth in SEQ ID NO: 736, and the H2 chain comprises the amino acid sequence set forth in SEQ ID NO: 718, or wherein the L1, H1, L2, and H2 chains are variants with at least 90%, preferably at least 95%, more preferably at least 98% identity to said sequences;
[0564] c) the L1 chain comprises the amino acid sequence set forth in SEQ ID NO: 735, the H1 chain comprises the amino acid sequence set forth in SEQ ID NO: 709, the L2 chain comprises the amino acid sequence set forth in SEQ ID NO: 737, and the H2 chain comprises the amino acid sequence set forth in SEQ ID NO: 719, or wherein the L1, H1, L2, and H2 chains are variants with at least 90%, preferably at least 95%, more preferably at least 98% identity to said sequences;
[0565] d) the L1 chain comprises the amino acid sequence set forth in SEQ ID NO: 738, the H1 chain comprises the amino acid sequence set forth in SEQ ID NO: 712, the L2 chain comprises the amino acid sequence set forth in SEQ ID NO: 739, and the H2 chain comprises the amino acid sequence set forth in SEQ ID NO: 720, or wherein the L1, H1, L2, and H2 chains are variants with at least 90%, preferably at least 95%, more preferably at least 98% identity to said sequences;
[0566] e) the L1 chain comprises the amino acid sequence set forth in SEQ ID NO: 740, the H1 chain comprises the amino acid sequence set forth in SEQ ID NO: 714, the L2 chain comprises the amino acid sequence set forth in SEQ ID NO: 741, and the H2 chain comprises the amino acid sequence set forth in SEQ ID NO: 721, or wherein the L1, H1, L2, and H2 chains are variants with at least 90%, preferably at least 95%, more preferably at least 98% identity to said sequences;
[0567] f) the L1 chain comprises the amino acid sequence set forth in SEQ ID NO: 740, the H1 chain comprises the amino acid sequence set forth in SEQ ID NO: 714, the L2 chain comprises the amino acid sequence set forth in SEQ ID NO: 742, and the H2 chain comprises the amino acid sequence set forth in SEQ ID NO: 722, or wherein the L1, H1, L2, and H2 chains are variants with at least 90%, preferably at least 95%, more preferably at least 98% identity to said sequences;
[0568] g) the L1 chain comprises the amino acid sequence set forth in SEQ ID NO: 733, the H1 chain comprises the amino acid sequence set forth in SEQ ID NO: 723, the L2 chain comprises the amino acid sequence set forth in SEQ ID NO: 734, and the H2 chain comprises the amino acid sequence set forth in SEQ ID NO: 724, or wherein the L1, H1, L2, and H2 chains are variants with at least 90%, preferably at least 95%, more preferably at least 98% identity to said sequences;
[0569] h) the L1 chain comprises the amino acid sequence set forth in SEQ ID NO: 735, the H1 chain comprises the amino acid sequence set forth in SEQ ID NO: 725, the L2 chain comprises the amino acid sequence set forth in SEQ ID NO: 736, and the H2 chain comprises the amino acid sequence set forth in SEQ ID NO: 726, or wherein the L1, H1, L2, and H2 chains are variants with at least 90%, preferably at least 95%, more preferably at least 98% identity to said sequences;
[0570] i) the L1 chain comprises the amino acid sequence set forth in SEQ ID NO: 735, the H1 chain comprises the amino acid sequence set forth in SEQ ID NO: 725, the L2 chain comprises the amino acid sequence set forth in SEQ ID NO: 737, and the H2 chain comprises the amino acid sequence set forth in SEQ ID NO: 727, or wherein the L1, H1, L2, and H2 chains are variants with at least 90%, preferably at least 95%, more preferably at least 98% identity to said sequences;
[0571] j) the L1 chain comprises the amino acid sequence set forth in SEQ ID NO: 738, the H1 chain comprises the amino acid sequence set forth in SEQ ID NO: 728, the L2 chain comprises the amino acid sequence set forth in SEQ ID NO: 739, and the H2 chain comprises the amino acid sequence set forth in SEQ ID NO: 729, or wherein the L1, H1, L2, and H2 chains are variants with at least 90%, preferably at least 95%, more preferably at least 98% identity to said sequences;
[0572] k) the L1 chain comprises the amino acid sequence set forth in SEQ ID NO: 740, the H1 chain comprises the amino acid sequence set forth in SEQ ID NO: 730, the L2 chain comprises the amino acid sequence set forth in SEQ ID NO: 741, and the H2 chain comprises the amino acid sequence set forth in SEQ ID NO: 731, or wherein the L1, H1, L2, and H2 chains are variants with at least 90%, preferably at least 95%, more preferably at least 98% identity to said sequences; or
[0573] l) the L1 chain comprises the amino acid sequence set forth in SEQ ID NO: 740, the H1 chain comprises the amino acid sequence set forth in SEQ ID NO: 730, the L2 chain comprises the amino acid sequence set forth in SEQ ID NO: 742, and the H2 chain comprises the amino acid sequence set forth in SEQ ID NO: 732, or wherein the L1, H1, L2, and H2 chains are variants with at least 90%, preferably at least 95%, more preferably at least 98% identity to said sequences.

[0574] In the above embodiment, the C-terminal portion of the H1 chain forms domains 7 and 8, while the C-terminal portion of the H2 chain pairs with part of the H1 chain to form each of domains 1 and 2, The N-terminal portion of the H1 chain pairs with L1 chains to form the third and fourth domains and the N-terminal portion of the H2 chain pairs with L2 to form the fifth and sixth domains Further, the H1 chain contains a CLD dimerizing domain between the portion that pairs with the H2 chain and the portion that pairs with the L1 chain. Panels D of FIG. 37 provides schematic representations of the structure of such tetrahedral antibodies, where the chains in the schematic are, from left to right, L2, H2, L1, H1, H1, L1, H2, L2. This invention provides a method of producing a tetrahedral antibody, the method comprising recombinantly expressing the four different types of polypeptide chains of this embodiment in a host cell.

[0575] Polynucleotides

[0576] This invention also provides a polynucleotide which encodes a polypeptide comprising any one of the polypeptide chains of the above embodiments. In a preferred embodiment, the polynucleotide encodes one of the L1, H1, L2, and H2 polypeptide chains of the embodiments described above.

[0577] Vectors

[0578] This invention also provides a vector comprising polynucleotides which encode polypeptides comprising any of the polypeptide chains of the invention. In a preferred embodiment, the vector encodes polypeptides comprising the L1, H1, L2, and H2 polypeptide chains of the embodiments of the invention comprising four different polypeptide chains as described above. In these vectors, each polynucleotide is operably linked to a promoter which directs expression of the polynucleotide in a host cell. This invention also provides a method of producing a tetrahedral antibody, the method comprising recombinantly expressing any of these vectors in a host cell.

[0579] Host Cells

[0580] This invention also provides a host cell comprising any of the vectors of the invention. In a preferred embodiment, the host cell is for use in a method of producing a tetrahedral antibody. This invention also provides a method of producing a tetrahedral antibody comprising four different types of polypeptide chains, the method comprising expressing four different types of polypeptide chains in a host cell of the invention as described in the above embodiments.

[0581] Pharmaceutical Compositions

[0582] This invention also provides a pharmaceutical composition comprising any of the tetrahedral antibodies of the invention comprising anti-CD20 and/or anti-CD19 Fab domains, and one or more pharmaceutically acceptable excipients.

[0583] In a preferred embodiment, the pharmaceutical composition comprises a tetrahedral antibody comprising six domains, wherein such domains and peptide linkers are formed by four different types of polypeptide chains, preferably the four different types of polypeptide chains are denoted L1, H1, L2, and H2, and:
[0584] a) the L1 chain comprises the amino acid sequence set forth in SEQ ID NO: 733, the H1 chain comprises the amino acid sequence set forth in SEQ ID NO: 707, the L2 chain comprises the amino acid sequence set forth in SEQ ID NO: 734, and the H2 chain comprises the amino acid sequence set forth in SEQ ID NO: 708, or wherein the L1, H1, L2, and H2 chains are variants with at least 90%, preferably at least 95%, more preferably at least 98% identity to said sequences;
[0585] b) the L1 chain comprises the amino acid sequence set forth in SEQ ID NO: 735, the H1 chain comprises the amino acid sequence set forth in SEQ ID NO: 709, the L2 chain comprises the amino acid sequence set forth in SEQ ID NO: 736, and the H2 chain comprises the amino acid sequence set forth in SEQ ID NO: 710, or wherein the L1, H1, L2, and H2 chains are variants with at least 90%, preferably at least 95%, more preferably at least 98% identity to said sequences;
[0586] c) the L1 chain comprises the amino acid sequence set forth in SEQ ID NO: 735, the H1 chain comprises the amino acid sequence set forth in SEQ ID NO: 709, the L2 chain comprises the amino acid sequence set forth in SEQ ID NO: 737, and the H2 chain comprises the amino acid sequence set forth in SEQ ID NO: 711, or wherein the L1, H1, L2, and H2 chains are variants with at least 90%, preferably at least 95%, more preferably at least 98% identity to said sequences;
[0587] d) the L1 chain comprises the amino acid sequence set forth in SEQ ID NO: 738, the H1 chain comprises the amino acid sequence set forth in SEQ ID NO: 712, the L2 chain comprises the amino acid sequence set forth in SEQ ID NO: 739, and the H2 chain comprises the amino acid sequence set forth in SEQ ID NO: 713, or wherein the L1, H1, L2, and H2 chains are variants with at least 90%, preferably at least 95%, more preferably at least 98% identity to said sequences;
[0588] e) the L1 chain comprises the amino acid sequence set forth in SEQ ID NO: 740, the H1 chain comprises the amino acid sequence set forth in SEQ ID NO: 714, the L2 chain comprises the amino acid sequence set forth in SEQ ID NO: 741, and the H2 chain comprises the amino acid sequence set forth in SEQ ID NO: 715, or wherein the L1, H1, L2, and H2 chains are variants with at least 90%, preferably at least 95%, more preferably at least 98% identity to said sequences; or
[0589] f) the L1 chain comprises the amino acid sequence set forth in SEQ ID NO: 740, the H1 chain comprises the amino acid sequence set forth in SEQ ID NO: 714, the L2 chain comprises the amino acid sequence set forth in SEQ ID NO: 742, and the H2 chain comprises the amino acid sequence set forth in SEQ ID NO: 716, or wherein the L1, H1, L2, and H2 chains are variants with at least 90%, preferably at least 95%, more preferably at least 98% identity to said sequences.

[0590] In a preferred embodiment, the pharmaceutical composition comprises a tetrahedral antibody comprising eight domains, wherein such domains and peptide linkers are formed by four different types of polypeptide chains, preferably the four different types of polypeptide chains are denoted L1, H1, L2, and H2, and:
[0591] a) the L1 chain comprises the amino acid sequence set forth in SEQ ID NO: 733, the H1 chain comprises the amino acid sequence set forth in SEQ ID NO: 707, the L2 chain comprises the amino acid sequence set forth in SEQ ID NO: 734, and the H2 chain comprises the amino acid sequence set forth in SEQ ID NO: 717, or wherein the L1, H1, L2, and H2 chains are variants with at least 90%, preferably at least 95%, more preferably at least 98% identity to said sequences;
[0592] b) the L1 chain comprises the amino acid sequence set forth in SEQ ID NO: 735, the H1 chain comprises the amino acid sequence set forth in SEQ ID NO: 709, the L2 chain comprises the amino acid sequence set forth in SEQ ID NO: 736, and the H2 chain comprises the amino acid sequence set forth in SEQ ID NO: 718, or wherein the L1, H1, L2, and H2 chains are variants with at least 90%, preferably at least 95%, more preferably at least 98% identity to said sequences;
[0593] c) the L1 chain comprises the amino acid sequence set forth in SEQ ID NO: 735, the H1 chain comprises the amino acid sequence set forth in SEQ ID NO: 709, the L2 chain comprises the amino acid sequence set forth in SEQ ID NO: 737, and the H2 chain comprises the amino acid sequence set forth in SEQ ID NO: 719, or wherein the L1, H1, L2, and H2 chains are variants with at least 90%, preferably at least 95%, more preferably at least 98% identity to said sequences;
[0594] d) the L1 chain comprises the amino acid sequence set forth in SEQ ID NO: 738, the H1 chain comprises the amino acid sequence set forth in SEQ ID NO: 712, the L2 chain comprises the amino acid sequence set forth in SEQ ID NO: 739, and the H2 chain comprises the amino acid sequence set forth in SEQ ID NO: 720, or wherein the L1, H1, L2, and H2 chains are variants with at least 90%, preferably at least 95%, more preferably at least 98% identity to said sequences;
[0595] e) the L1 chain comprises the amino acid sequence set forth in SEQ ID NO: 740, the H1 chain comprises the amino acid sequence set forth in SEQ ID NO: 714, the L2 chain comprises the amino acid sequence set forth in SEQ ID NO: 741, and the H2 chain comprises the amino acid sequence set forth in SEQ ID NO: 721, or wherein the L1, H1, L2, and H2 chains are variants with at least 90%, preferably at least 95%, more preferably at least 98% identity to said sequences;
[0596] f) the L1 chain comprises the amino acid sequence set forth in SEQ ID NO: 740, the H1 chain comprises the amino acid sequence set forth in SEQ ID NO: 714, the L2 chain comprises the amino acid sequence set forth in SEQ ID NO: 742, and the H2 chain comprises the amino acid sequence set forth in SEQ ID NO: 722, or wherein the L1, H1, L2, and H2 chains are variants with at least 90%, preferably at least 95%, more preferably at least 98% identity to said sequences;
[0597] g) the L1 chain comprises the amino acid sequence set forth in SEQ ID NO: 733, the H1 chain comprises the amino acid sequence set forth in SEQ ID NO: 723, the L2 chain comprises the amino acid sequence set forth in SEQ ID NO: 734, and the H2 chain comprises the amino acid sequence set forth in SEQ ID NO: 724, or wherein the L1, H1, L2, and H2 chains are variants with at least 90%, preferably at least 95%, more preferably at least 98% identity to said sequences;
[0598] h) the L1 chain comprises the amino acid sequence set forth in SEQ ID NO: 735, the H1 chain comprises the amino acid sequence set forth in SEQ ID NO: 725, the L2 chain comprises the amino acid sequence set forth in SEQ ID NO: 736, and the H2 chain comprises the amino acid sequence set forth in SEQ ID NO: 726, or wherein the L1, H1, L2, and H2 chains are variants with at least 90%, preferably at least 95%, more preferably at least 98% identity to said sequences;
[0599] i) the L1 chain comprises the amino acid sequence set forth in SEQ ID NO: 735, the H1 chain comprises the amino acid sequence set forth in SEQ ID NO: 725, the L2 chain comprises the amino acid sequence set forth in SEQ ID NO: 737, and the H2 chain comprises the amino acid sequence set forth in SEQ ID NO: 727, or wherein the L1, H1, L2, and H2 chains are variants with at least 90%, preferably at least 95%, more preferably at least 98% identity to said sequences;
[0600] j) the L1 chain comprises the amino acid sequence set forth in SEQ ID NO: 738, the H1 chain comprises the amino acid sequence set forth in SEQ ID NO: 728, the L2 chain comprises the amino acid sequence set forth in SEQ ID NO: 739, and the H2 chain comprises the amino acid sequence set forth in SEQ ID NO: 729, or wherein the L1, H1, L2, and H2 chains are variants with at least 90%, preferably at least 95%, more preferably at least 98% identity to said sequences;
[0601] k) the L1 chain comprises the amino acid sequence set forth in SEQ ID NO: 740, the H1 chain comprises the amino acid sequence set forth in SEQ ID NO: 730, the L2 chain comprises the amino acid sequence set forth in SEQ ID NO: 741, and the H2 chain comprises the amino acid sequence set forth in SEQ ID NO: 731, or wherein the L1, H1, L2, and H2 chains are variants with at least 90%, preferably at least 95%, more preferably at least 98% identity to said sequences; or
[0602] l) the L1 chain comprises the amino acid sequence set forth in SEQ ID NO: 740, the H1 chain comprises the amino acid sequence set forth in SEQ ID NO: 730, the L2 chain comprises the amino acid sequence set forth in SEQ ID NO: 742, and the H2 chain comprises the amino acid sequence set forth in SEQ ID NO: 732, or wherein the L1, H1, L2, and H2 chains are variants with at least 90%, preferably at least 95%, more preferably at least 98% identity to said sequences.

[0603] Method of Treating

[0604] This invention also provides a method of treating cancer or inflammatory disease in a subject, the method comprising administering to the subject a therapeutically effective amount of the any of the above pharmaceutical compositions comprising a tetrahedral antibody comprising anti-CD20 and/or anti-CD19 Fab domains, preferably wherein the cancer is B cell cancer.

### Tetrahedral Molecules

[0605] A tetrahedral molecule comprising a first, second, third, and fourth domain, wherein:
[0606] a) the first and second domains each independently comprise:
   [0607] i) a first polypeptide chain comprising a first N-terminus and a first C-terminus of the domain, and
   [0608] ii) optionally a second polypeptide chain comprising a second N-terminus and a second C-terminus of the domain,
[0609] b) the first domain and the second domain are joined to each other by a non-covalent linkage
   (1) between a first dimerizing polypeptide attached by a peptide bond or via a peptide linker to the first N-terminus of the first domain, and a second dimerizing polypeptide attached by a peptide bond or via a peptide linker to the first N-terminus of the second domain,
      [0610] (2) between a first dimerizing polypeptide attached by a peptide bond or via a peptide linker to the first C-terminus of the first domain, and a second dimerizing polypeptide attached by a peptide bond or via a peptide linker to the first C-terminus of the second domain,
      [0611] (3) between a first dimerizing polypeptide attached by a peptide bond or via a peptide linker to the first N-terminus of the first domain, and a second dimerizing polypeptide attached by a peptide bond or via a peptide linker to the first C-terminus of the second domain, or
      [0612] (4) between a first dimerizing polypeptide attached by a peptide bond or via a peptide linker to the first C-terminus of the first domain, and a second dimerizing polypeptide attached by a peptide bond or via a peptide linker to the first N-terminus of the second domain,
   [0613] wherein the first and second dimerizing polypeptides are not immunoglobulin polypeptides,
[0614] c) if the first domain is joined to the second domain via a first dimerizing polypeptide attached to the first N-terminus of the first domain, then the third domain is attached at its C-terminus by a peptide bond or via a peptide linker to
   [0615] i) the N-terminus of the first dimerizing polypeptide,
   [0616] ii) the second N-terminus of the first domain if present, or
   [0617] iii) the N-terminus of a third dimerizing polypeptide, wherein the third dimerizing polypeptide is attached at its C-terminus by a peptide bond or via a peptide linker to the second N-terminus of the first domain if present,
[0618] d) if the first domain is joined to the second domain via a first dimerizing polypeptide attached to the first C-terminus of the first domain, then the third domain is attached at its N-terminus by a peptide bond or via a peptide linker to
   [0619] i) the C-terminus of the first dimerizing polypeptide,
   [0620] ii) the second C-terminus of the first domain if present, or
   [0621] iii) the C-terminus of a third dimerizing polypeptide, wherein the third dimerizing polypeptide is attached at its N-terminus by a peptide bond or via a peptide linker to the second C-terminus of the first domain if present,
[0622] e) if the second domain is joined to the first domain via a second dimerizing polypeptide attached to the first N-terminus of the second domain, then the fourth domain is attached at its C-terminus by a peptide bond or via a peptide linker to
   [0623] i) the N-terminus of the second dimerizing polypeptide,
   [0624] ii) the second N-terminus of the second domain if present, or
   [0625] iii) the N-terminus of a fourth dimerizing polypeptide, wherein the third dimerizing polypeptide is attached at its C-terminus by a peptide bond or via a peptide linker to the second N-terminus of the second domain if present,
[0626] f) if the second domain is joined to the first domain via a second dimerizing polypeptide attached to the first C-terminus of the second domain, then the fourth domain is attached at its N-terminus by a peptide bond or via a peptide linker to
   [0627] i) the C-terminus of the second dimerizing polypeptide,
   [0628] ii) the second C-terminus of the second domain if present, or
   [0629] iii) the C-terminus of a fourth dimerizing polypeptide, wherein the fourth dimerizing polypeptide is attached at its N-terminus by a peptide bond or via a peptide linker to the second C-terminus of the second domain if present.

[0630] In embodiments of the invention, the non-peptidyl linkage is a non-covalent linkage between a first dimerizing polypeptide attached to the first domain and a second dimerizing polypeptide attached to the second domain.

[0631] In embodiments of the invention, the first and second dimerizing polypeptides are selected from the group consisting of:
[0632] a) dimerizing domains of an extracellular protein dimer, and
[0633] b) dimerizing domains of an intracellular protein dimer.

[0634] In embodiments of the invention, the first and second dimerizing polypeptides are selected from the group consisting of:
[0635] a) a leucine zipper domain,
[0636] b) a collectrin-like domain (CLD),
[0637] c) a collectrin domain (CD),
[0638] d) a CD8 alpha extracellular domain, and
[0639] e) a CD8 beta extracellular domain.

[0640] In embodiments of the invention:
[0641] a) the first dimerizing polypeptide is the same as the second dimerizing polypeptide, and
[0642] b) the dimerizing polypeptides form a homodimer.

[0643] In embodiments of the invention:
[0644] a) the first dimerizing polypeptide is different than the second dimerizing polypeptide, and
[0645] b) the first and second dimerizing polypeptides form a heterodimer.

[0646] In embodiments of the invention wherein the first and second dimerizing polypeptides form a heterodimer:
[0647] a) the first and second dimerizing polypeptides are selected from the group consisting of:
   [0648] i) a T cell receptor alpha and T cell receptor beta extracellular domain,
   [0649] ii) a T cell receptor gamma and T cell receptor extracellular domain,
   [0650] iii) an MHC class I alpha extracellular domain and beta-2 microglobulin
   [0651] iv) an MHC class II alpha and MHC class II beta extracellular domain, and
   [0652] v) a CD8 alpha and CD8 beta extracellular domain,
[0653] b) the first dimerizing polypeptide is different from the second dimerizing polypeptide, and
[0654] c) the first and second dimerizing polypeptides form a heterodimer.

[0655] In some of these embodiments of the invention, the first and second dimerizing polypeptides, when in the presence of each other, form less than 30%, 20%, 10%, 5%, 4%, 3%, 2%, or 1% homodimers.

### Dimeric Fusion Proteins

[0656] This invention also provides a non-naturally occurring fusion protein dimer comprising a dimer of a first dimerizing polypeptide and a second dimerizing polypeptide, wherein:
[0657] a) the first dimerizing polypeptide is attached by a peptide bond or via a peptide linker at its N-terminus or C-terminus to a first domain,
[0658] b) the second dimerizing polypeptide is optionally attached by a peptide bond or via a peptide linker at its N-terminus or C-terminus to a second domain,
[0659] c) the first and second dimerizing polypeptides are selected from the group consisting of:
   [0660] i) a collectrin-like domain (CLD), and
   [0661] ii) a collectrin domain (CD),
[0662] d) the first dimerizing polypeptide is optionally attached by a peptide bond or via a peptide linker at its remaining free N-terminus or C-terminus to a third domain, and
[0663] e) the second dimerizing polypeptide is optionally attached by a peptide bond or via a peptide linker at its remaining free N-terminus or C-terminus to a fourth domain, and.

[0664] In embodiments of the invention, the non-naturally occurring fusion protein dimer:
[0665] a) does not comprise an ACE2 PD at the N-terminal side of either dimerizing polypeptide; and/or
[0666] b) does not comprise an ACE2 transmembrane domain at the C-terminal side of either dimerizing polypeptide.

### Octahedral Antibodies

[0667] This invention also provides an octahedral antibody comprising a first, second, third, fourth, fifth and sixth domain, wherein:
[0668] a) each of the first, second and third domains are selected from the group consisting of a Fab domain and an Fc domain,
[0669] b) each of the first, second and third domains comprise:
   [0670] i) a first polypeptide chain comprising a first N-terminus of the domain, and
   [0671] ii) a second polypeptide chain comprising a second N-terminus of the domain,
[0672] c) the first N-terminus of the first domain, the first N-terminus of the second domain and the first N-terminus of the third domain are joined to each other by a non-peptidyl linkage wherein the non-peptidyl linkage is:
   [0673] i) a branched covalent linkage, or
   [0674] ii) a non-covalent linkage between
      [0675] (1) a first trimerizing polypeptide attached by a peptide bond or via a peptide linker to the first N-terminus of the first domain,
      [0676] (2) a second trimerizing polypeptide attached by a peptide bond or via a peptide linker to the first N-terminus of the second domain, and
      [0677] (3) a third trimerizing polypeptide attached by a peptide bond or via a peptide linker to the first N-terminus of the third domain,
      [0678] wherein the first, second, and third trimerizing polypeptides are not immunoglobulin polypeptides,
[0679] d) the fourth domain is attached at its C-terminus by a peptide bond or via a peptide linker to:
   [0680] i) the second N-terminus of the first domain, or
   [0681] ii) the N-terminus terminus of the first trimerizing polypeptide,
[0682] e) the fifth domain is attached at its C-terminus by a peptide bond or via a peptide linker to:
   [0683] i) the second N-terminus of the second domain, or
   [0684] ii) the N-terminus of the second trimerizing polypeptide, and
[0685] f) the sixth domain is attached at its C-terminus by a peptide bond or via a peptide linker to:
   [0686] i) the second N-terminus of the third domain, or
   [0687] ii) the N-terminus of the third trimerizing polypeptide.

[0688] In embodiments of the octahedral antibody of the invention, the non-peptidyl linkage is a non-covalent linkage between a first trimerizing polypeptide attached to the first N-terminus of the first domain, a second trimerizing polypeptide attached to the first N-terminus of the second domain, and a third trimerizing polypeptide attached to the first N-terminus of the third domain, wherein the first, second, and third trimerizing polypeptides are selected from the group consisting of TNF ligand superfamily members OX40L/TNFLSF4, CD40L/TNFLSF5, FASL/TNFLSF6, CD70L/TNFLSF7, CD30L/TNFLSF8, 4-1BBL/TNFLSF9, TRAIL/TNFLSF10, RANKL/TNFLSF11, TWEAK/TNFLSF12, APRIL/TNFLSF13, BAFF/TNFLSF13B, LIGHT/TNFLSF14, VEGI/TNFLSF15, GITRL/TNFLSF18, EctodyplasinATNFLSF19, TNF/TNFLSF2, lymphotoxin alpha/TNFLSF1, and lymphotoxin beta/TNFLSF3.

[0689] In embodiments of the invention, the octahedral antibody further comprises a seventh, eighth, and/or ninth domain, wherein:
[0690] a) the seventh domain is attached at its C-terminus by a peptide bond or via a peptide linker to the second N-terminus of the first domain,
[0691] b) the eighth domain is attached at its C-terminus by a peptide bond or via a peptide linker to the second N-terminus of the second domain, and/or
[0692] c) the ninth domain is attached at its C-terminus by a peptide bond or via a peptide linker to the second N-terminus of the third domain.

[0693] In embodiments of the invention, the octahedral antibody further comprises a tenth, eleventh, and/or twelfth domain, wherein:
[0694] a) the tenth domain is attached at its N-terminus by a peptide bond or via a peptide linker to:
   [0695] i) the first C-terminus of the first domain, or
   [0696] ii) the second C-terminus of the first domain,
[0697] b) the eleventh domain is attached at its N-terminus by a peptide bond or via a peptide linker to:
   [0698] i) the first C-terminus of the second domain, or
   [0699] ii) the second C-terminus of the second domain,
[0700] c) the twelfth domain is attached at its N-terminus by a peptide bond or via a peptide linker to:
   [0701] i) the first C-terminus of the third domain, or
   [0702] ii) the second C-terminus of the third domain.

[0703] In embodiments, the first, second, and third domains of octahedral antibodies of the invention may be any of the domains described herein as the first and second domains of a tetrahedral antibody of the invention. In embodiments, the fourth, fifth and sixth domains of octahedral antibodies of the invention may be any of the domains described herein as the third and fourth domains of a tetrahedral antibody of the invention. In embodiments, the seventh, eighth, and ninth domains of octahedral antibodies of the invention may be any of the domains described herein as the fifth and sixth domains of a tetrahedral antibody of the invention. In embodiments, the tenth, eleventh and twelfth domains of octahedral antibodies of the invention may be any of the domains described herein as the seventh and eighth domains of a tetrahedral antibody of the invention. Further, all such domains may comprise any of the features (such as mutations) described with respect to domains of tetrahedral antibodies of the invention.

### Tetrahedral and Octahedral Antibodies

[0704] In embodiments of the invention:
[0705] a) one or more of the first, second, third, fourth, fifth, sixth, seventh, and eighth domains of the tetrahedral antibody, or one or more of the first, second, third, fourth, fifth, sixth domains, seventh, eighth, ninth, tenth, eleventh, and twelfth domains of the octahedral antibody are Fc domains, wherein the one or more Fc domains are independently selected from any of the Fc domains disclosed herein,
[0706] b) one or more of the first, second, third, fourth, fifth, sixth, seventh and eighth domains of the tetrahedral antibody, or one or more of the first, second, third, fourth, fifth, sixth domains, seventh, eighth, ninth, tenth, eleventh, and twelfth domains of the octahedral antibody are Fab domains, wherein the one or more Fab domains are independently selected from any of the Fab domains disclosed herein,
[0707] c) one or more of the third, fourth, fifth, sixth, seventh, and eighth domains of the tetrahedral antibody, or one or more of the fourth, fifth, sixth, seventh, eighth, ninth, tenth, eleventh, and twelfth domains of the octahedral antibody are a secreted protein, wherein the one or more secreted protein are independently selected from any of the secreted proteins disclosed herein,
[0708] d) one or more of the third, fourth, fifth, sixth, seventh, and eighth domains of the tetrahedral antibody, or one or more of the fourth, fifth, sixth, seventh, eighth, ninth, tenth, eleventh, and twelfth domains of the octahedral antibody are extracellular domains of a transmembrane protein, wherein the one or more extracellular domains of a transmembrane protein are independently selected from any of the extracellular domains of a transmembrane protein disclosed herein,
[0709] e) one or more of the third, fourth, fifth, sixth, seventh, and eighth domains of the tetrahedral or one or more of the fourth, fifth, sixth, seventh, eighth, ninth, tenth, eleventh, and twelfth domains of the octahedral antibody:
   [0710] i) comprise the structure of a compound that is a drug approved for treating a subject afflicted with a disease;
   [0711] ii) comprise the structure of an organic compound having a molecular weight less than 1000 Daltons, a DNA aptamer, an RNA aptamer, an oligonucleotide, or a protein that is biologically active;
   [0712] iii) comprise a primary or a secondary amine;
   [0713] iv) are aripiprazole or oseltamivir;
   [0714] v) are a respiratory drug, an antiasthmatic agent, an analgesic agent, an antidepressant, an antianginal agent, an antiarrhythmic agent, an antihypertensive agent, an antidiabetic agent, an antihistamine, an anti-infective agent, an antibiotic, an antiinflammatory agent, an antiparkinsonism drug, an antipsychotics, an antipyretic agent, an antiulcer agent, an attention deficit hyperactivity disorder (ADHD) drug, a central nervous system stimulant, a decongestant, or a psychostimulant;
   [0715] vi) are alprenolol, acebutolol, amidephrine, amineptine, amosulalol, amoxapine, amphetaminil, atenolol, atomoxetine, balofloxacin, bamethan, befunolol, benazepril, benfluorex, benzoctamine, betahistine, betaxolol, bevantolol, bifemelane, bisoprolol, brinzolamide, bufeniode, butethamine, camylofine, carazolol, carticaine, carvedilol, cephaeline, ciprofloxacin, cloZapine, clobenZorex, clorprenaline, cyclopentamine, delapril, demexiptiline, denopamine, desipramine, desloratadine, diclofenac, dimetofrine, dioxadrol, dobutamine, dopexamine, doripenem, dorzolamide, droprenilamine, duloxetine, eltopraZine, enalapril, enoxacin, epinephrine, ertapenem, esapraZole, esmolol, etoxadrol, fasudil, fendiline, fenethylline, fenfluramine, fenoldopam, fenoterol, fenproporex, flecamide, fluoxetine, formoterol, frovatriptan, gaboxadol, garenoxacin, gatifloxacin, grepafloxacin, hexoprenaline, imidapril, indalpine, indecainide, indeloxazine hydrochloride, isoxsuprine, ispronicline, lab etalol, landiolol, lapatinib, levophacetoperane, lisinopril, lomefloxacin, lotrafiban, maprotiline, mecamylamine, mefloquine, mepindolol, meropenem, metapramine, metaproterenol, methoxyphenamine, dextrorotary methylphenidate, methylphenidate, metipranolol, metoprolol, mitoxantrone, mivazerol, moexipril, moprolol, moxifloxacin, nebivolol, nifenalol, nipradilol, norfloxacin, nortriptyline, nylidrin, olanZapine, oxamniquine, oxprenolol, oxyfedrine, paroxetine, perhexyline, phenmetrazine, phenylephrine, phenylpropylmethylamine, pholedrine, picilorex, pimethylline, pindolol, pipemidic acid, piridocaine, practolol, pradofloxacin, pramipexole, pramiverin, prenalterol, prenylamine, prilocalne, procaterol, pronethalol, propafenone, propranolol, propylhexedrine, protokylol, protriptyline, pseudoephedrine, reboxetine, rasagiline, (r)-rasagiline, repinotan, reproterol, rimiterol, ritodrine, safinamide, salbutamol/albuterol, salmeterol, sarizotan, sertraline, silodosin, sotalol, soterenol, sparfloxacin, spirapril, sulfinalol, synephrine, tamsulosin, tebanicline, tianeptine, tirofiban, tretoquinol, trimetazidine, troxipide, varenidine, vildagliptin,
   [0716] viloxazine, viquidil or xamoterol;
   [0717] vii) comprise a protein that is biologically active;
   [0718] viii) are biologically active such that it has target-binding activity;
   [0719] ix) are an independently-folding protein or a portion thereof;
   [0720] x) are a glycosylated protein;
   [0721] xi) comprise intra-chain disulfide bonds;
   [0722] xii) binds a cytokine;
   [0723] xiii) binds to a cytokine, wherein the cytokine is TNFα;
   [0724] xiv) comprise Atrial Natriuretic Peptide (ANP), Calcitonin, Corticotropin Releasing Hormone (CRH), Endothelin, Exenatide, Gastric Inhibitory Peptide (GIP), Glucagon-Like Peptide-1 (GLP-1), Glucagon-Like Peptide-2 (GLP-2), an analog of GLP-1 or GLP-2, Glucagon Vasoactive Intestinal Peptide (GVIP), Ghrelin, Peptide YY or Secretin, or a portion thereof;
   [0725] xv) comprise a stretch of consecutive amino acids in the sequence HGEGTFTSDVSSYLEEQAAKEFIAWLVKGRG (SEQ ID NO: 4657);
   [0726] xvi) comprise at least one stretch of consecutive amino acids which are identical to a stretch of consecutive amino acids present in the heavy chain of a Fab or a Fab′ of an antibody;
   [0727] xvii) comprise at least one at least one stretch of consecutive amino acids which are identical to a stretch of consecutive amino acids present in the light chain of a Fab or a Fab′ of an antibody;
   [0728] xviii) comprise at least one Fab or Fab′ of an antibody, or a portion of at least one Fab or Fab′;
   [0729] xix) comprise Fab-1 or Fab′1, or a portion thereof of an antibody;
   [0730] xx) comprise Fab-2 or Fab′2, or a portion thereof of an antibody;
   [0731] xxi) comprise two Fab or Fab′ hands of an antibody;
   [0732] xxii) comprise at least one stretch of consecutive amino acids which are identical to a stretch of consecutive amino acids present in a single chain antibody; or
   [0733] xxiii) comprise at least one stretch of consecutive amino acids which are identical to a stretch of consecutive amino acids present in a TNFα receptor.
[0734] f) the tetrahedral or octahedral antibody comprises a covalent linkage, wherein the covalent linkage is selected from any covalent linkage disclosed herein, or comprises any heterobifunctional crosslinker disclosed herein; and/or
[0735] g) the tetrahedral or octahedral antibody comprises one or more peptide linkers, wherein the one or more peptide linkers are independently selected from:
   [0736] i) a stretch of consecutive amino acids which is, or is present in, the sequence TSTSPTRSMAPGAVHLPQPVSTRSQHTQPTPEPSTAPS TSFLLPMGPSPPAEGSTGD (SEQ ID NO: 3227);
   [0737] ii) a stretch of consecutive amino acids which is, or is present in, the sequence GGGGAGGGGAGGGGAGGGGAGGGGAGGG (SEQ ID NO: 226), or
   [0738] iii) any peptide linker disclosed herein.

[0739] FIGS. 1-14 and 29A to 42 schematically describe various non-limiting examples of tetrahedral and octahedral antibodies of the invention. A description of the various types of domains of these tetrahedral and octahedral antibodies (as represented by ovals or groups of ovals in various colors and/or patterns) is provided in the Brief Description of the Drawings. Each figure represents an embodiment of the invention. Further, the Examples of this application provide specific tetrahedral antibodies, each of which is an embodiment of the invention. This invention contemplates producing variants of each of these specific tetrahedral antibodies. Specifically, where a tetrahedral antibody disclosed in the Examples includes a mutant or modified sequence, this invention specifically contemplates a variant which replaces the mutant or modified sequence with a wild type sequence. Conversely, this invention specifically contemplates modifying any of the tetrahedral antibody by replacing a wild-type sequence, if present, with a mutant counterpart sequence comprising any of the relevant mutations described herein.

[0740] This invention also provides a composition comprising at least 10%, at least 11%, at least 12%, at least 13%, at least 14%, at least 15%, at least 16%, at least 17%, at least 18%, at least 19%, at least 20%, at least 21%, at least 22%, at least 23%, at least 24%, at least 25%, at least 26%, at least 27%, at least 28%, at least 29%, at least 30%, at least 31%, at least 32%, at least 33%, at least 34%, at least 35%, at least 36%, at least 37%, at least 38%, at least 39%, at least 40%, at least 41%, at least 42%, at least 43%, at least 44%, at least 45%, at least 46%, at least 47%, at least 48%, at least 49%, at least 50%, at least 51%, at least 52%, at least 53%, at least 54%, at least 55%, at least 56%, at least 57%, at least 58%, at least 59%, at least 60%, at least 61%, at least 62%, at least 63%, at least 64%, at least 65%, at least 66%, at least 67%, at least 68%, at least 69%, at least 70%, at least 71%, at least 72%, at least 73%, at least 74%, at least 75%, at least 76%, at least 77%, at least 78%, at least 79%, at least 80%, at least 81%, at least 82%, at least 83%, at least 84%, at least 85%, at least 86%, at least 87%, at least 88%, at least 89%, at least 90%, at least 91%, at least 92%, at least 93%, at least 94%, at least 95%, at least 96%, at least 97%, at least 98%, or at least 99% of the tetrahedral or octahedral antibody of the invention, as a proportion (w/w) of peptide-containing molecules in the composition.

### Methods of Making

[0741] This invention also provides a method of making a tetrahedral antibody of the invention which comprises four domains, wherein the non-peptidyl linkage of the tetrahedral antibody is a non-covalent linkage between a first dimerizing polypeptide attached to the first N-terminus of first domain and a second dimerizing polypeptide attached to the first N-terminus of the second domain, the method comprising:
[0742] a) recombinantly expressing each of the following polypeptides in a host cell:
   [0743] i) a first polypeptide comprising, from its N-terminus to its C-terminus,
      [0744] (1) optionally, the third domain, which is attached at its C-terminus by a peptide bond or via a peptide linker to
      [0745] (2) the N-terminus of the first dimerizing polypeptide, which is attached at its C-terminus by a peptide bond or via a peptide linker to
      [0746] (3) the N-terminus of the first polypeptide chain of the first domain,
   [0747] ii) a second polypeptide comprising, from its N-terminus to its C-terminus,
      [0748] (1) optionally, the fourth domain, which is attached at its C-terminus by a peptide bond or via a peptide linker to
      [0749] (2) the N-terminus of the second dimerizing polypeptide, which is attached at its C-terminus by a peptide bond or via a peptide linker to
      [0750] (3) the N-terminus of the first polypeptide chain of the second domain,
   [0751] iii) a third polypeptide comprising, from its N-terminus to its C-terminus,
      [0752] (1) the third domain if not present on the first polypeptide, which is attached at its C-terminus by a peptide bond or via a peptide linker to
         [0753] a. the N-terminus of a third dimerizing polypeptide which is in turn attached at its C-terminus by a peptide bond or via a peptide linker to the N-terminus of the second polypeptide chain of the first domain, or
         [0754] b. the N-terminus of the second polypeptide chain of the first domain,
   [0755] iv) a fourth polypeptide comprising, from its N-terminus to its C-terminus,
      [0756] (1) the fourth domain if not present on the second polypeptide, which is attached at its C-terminus by a peptide bond or via a peptide linker to
         [0757] a. the N-terminus of a fourth dimerizing polypeptide which is in turn attached at its C-terminus by a peptide bond or via a peptide linker to the N-terminus of the second polypeptide chain of the first domain, or
         [0758] b. the N-terminus of the second polypeptide chain of the first domain, and
   [0759] v) optionally one or more additional polypeptides comprising a second polypeptide chain of the third and/or fourth domains, if present.

[0760] This invention also provides a method of making a tetrahedral antibody of the invention which comprises four domains, wherein the non-peptidyl linkage of the tetrahedral antibody is a non-covalent linkage between a first dimerizing polypeptide attached to the first C-terminus of first domain and a second dimerizing polypeptide attached to the first N-terminus of the second domain, the method comprising:
[0761] a) recombinantly expressing each of the following polypeptides in a host cell:
   [0762] i) a first polypeptide comprising, from its N-terminus to its C-terminus,
      [0763] (1) the first polypeptide chain of the first domain which is attached at its C-terminus by a peptide bond or via a peptide linker to
      [0764] (2) the N-terminus of the first dimerizing polypeptide, which is in turn optionally attached at its C-terminus by a peptide bond or via a peptide linker to
      [0765] (3) the N-terminus of the third domain,
   [0766] ii) a second polypeptide comprising, from its N-terminus to its C-terminus,
      [0767] (1) optionally, the fourth domain which is attached at its C-terminus by a peptide bond or via a peptide linker to
      [0768] (2) the N-terminus of the second dimerizing polypeptide which is attached at its C-terminus by a peptide bond or via a peptide linker to
      [0769] (3) the N-terminus of the first polypeptide chain of the second domain,
   [0770] iii) a third polypeptide comprising, from its N-terminus to its C-terminus,
      [0771] (1) the second polypeptide chain of the first domain, which is attached at its C-terminus by a peptide bond or via a peptide linker to
         [0772] a. the N-terminus of a third dimerizing polypeptide which is in turn attached at its C-terminus by a peptide bond or via a peptide linker to the N-terminus of the third domain if not present on the first polypeptide, or
         [0773] b. the N-terminus of the third domain if not present on the first polypeptide,
   [0774] iv) a fourth polypeptide comprising, from its N-terminus to its C-terminus,
      [0775] (1) the fourth domain if not present on the second polypeptide, which is attached at its C-terminus by a peptide bond or via a peptide linker to
         [0776] a. the N-terminus of a fourth dimerizing polypeptide which is in turn attached at its C-terminus by a peptide bond or via a peptide linker to the N-terminus of the second polypeptide chain of the first domain, or
         [0777] b. the N-terminus of the second polypeptide chain of the first domain, and
   [0778] v) optionally one or more additional polypeptides comprising a second polypeptide chain of the third and/or fourth domains, if present.

[0779] This invention also provides a method of making a tetrahedral antibody of the invention which comprises four domains, wherein the non-peptidyl linkage of the tetrahedral antibody is a non-covalent linkage between a first dimerizing polypeptide attached to the first N-terminus of first domain and a second dimerizing polypeptide attached to the first C-terminus of the second domain, the method comprising:
[0780] a) recombinantly expressing each of the following polypeptides in a host cell:
   [0781] i) a first polypeptide comprising, from its N-terminus to its C-terminus,
      [0782] (1) optionally, the third domain attached at its C-terminus by a peptide bond or via a peptide linker to
      [0783] (2) the N-terminus of the first dimerizing polypeptide attached at its C-terminus by a peptide bond or via a peptide linker to
      [0784] (3) the N-terminus of the first polypeptide chain of the first domain,
   [0785] ii) a second polypeptide comprising, from its N-terminus to its C-terminus,
      [0786] (1) the first polypeptide chain of the second domain attached at its C-terminus by a peptide bond or via a peptide linker to
      [0787] (2) the N-terminus of the second dimerizing polypeptide, which is in turn optionally attached at its C-terminus by a peptide bond or via a peptide linker to
      [0788] (3) the N-terminus of the third domain,
   [0789] iii) a third polypeptide comprising, from its N-terminus to its C-terminus,
      [0790] (1) the third domain if not present on the first polypeptide, attached at its C-terminus by a peptide bond or via a peptide linker to
         [0791] a. the N-terminus of a third dimerizing polypeptide which is in turn attached at its C-terminus by a peptide bond or via a peptide linker to the N-terminus of the second polypeptide chain of the first domain, or
         [0792] b. the N-terminus of the second polypeptide chain of the first domain,
   [0793] iv) a fourth polypeptide comprising, from its N-terminus to its C-terminus,
      [0794] (1) the second polypeptide chain of the first domain, which is attached at its C-terminus by a peptide bond or via a peptide linker to
         [0795] a. the N-terminus of a fourth dimerizing polypeptide which is in turn attached at its C-terminus by a peptide bond or via a peptide linker to the N-terminus of the fourth domain if not present on the second polypeptide, or
         [0796] b. the N-terminus of the fourth domain if not present on the second polypeptide, and
   [0797] v) optionally one or more additional polypeptides comprising a second polypeptide chain of the third and/or fourth domains, if present.

[0798] This invention also provides a method of making a tetrahedral antibody of the invention which comprises four domains, wherein the non-peptidyl linkage of the tetrahedral antibody is a non-covalent linkage between a first dimerizing polypeptide attached to the first C-terminus of first domain and a second dimerizing polypeptide attached to the first C-terminus of the second domain, the method comprising:
[0799] a) recombinantly expressing each of the following polypeptides in a host cell:
   [0800] i) a first polypeptide comprising, from its N-terminus to its C-terminus,
      [0801] (1) the first polypeptide chain of the first domain which is attached at its C-terminus by a peptide bond or via a peptide linker to
      [0802] (2) the N-terminus of the first dimerizing polypeptide, which is in turn optionally attached at its C-terminus by a peptide bond or via a peptide linker to
      [0803] (3) the N-terminus of the third domain,
   [0804] ii) a second polypeptide comprising, from its N-terminus to its C-terminus,
      [0805] (1) the first polypeptide chain of the second domain attached at its C-terminus by a peptide bond or via a peptide linker to
      [0806] (2) the N-terminus of the second dimerizing polypeptide, which is in turn optionally attached at its C-terminus by a peptide bond or via a peptide linker to
      [0807] (3) the N-terminus of the third domain,
   [0808] iii) a third polypeptide comprising, from its N-terminus to its C-terminus,
      [0809] (1) the second polypeptide chain of the first domain, which is attached at its C-terminus by a peptide bond or via a peptide linker to
         [0810] a. the N-terminus of a third dimerizing polypeptide which is in turn attached at its C-terminus by a peptide bond or via a peptide linker to the N-terminus of the third domain if not present on the first polypeptide, or
         [0811] b. the N-terminus of the third domain if not present on the first polypeptide,
   [0812] iv) a fourth polypeptide comprising, from its N-terminus to its C-terminus,
      [0813] (1) the second polypeptide chain of the first domain, which is attached at its C-terminus by a peptide bond or via a peptide linker to
         [0814] a. the N-terminus of a fourth dimerizing polypeptide which is in turn attached at its C-terminus by a peptide bond or via a peptide linker to the N-terminus of the fourth domain if not present on the second polypeptide, or
         [0815] b. the N-terminus of the fourth domain if not present on the second polypeptide, and
   [0816] v) optionally one or more additional polypeptides comprising a second polypeptide chain of the third and/or fourth domains, if present.

[0817] This invention also provides a method of making a tetrahedral antibody of the invention which comprises a fifth and/or sixth domain, wherein the non-peptidyl linkage of the tetrahedral antibody is a non-covalent linkage between a first dimerizing polypeptide attached to the first N-terminus of first domain and a second dimerizing polypeptide attached to the first N-terminus of the second domain, the method comprising:
[0818] a) recombinantly expressing each of the following polypeptides in a host cell:
   [0819] i) a first polypeptide comprising, from its N-terminus to its C-terminus,
      [0820] (1) the third domain, or fifth domain if present, which is attached at its C-terminus by a peptide bond or via a peptide linker to
      [0821] (2) the N-terminus of the first dimerizing polypeptide, which is attached at its C-terminus by a peptide bond or via a peptide linker to
      [0822] (3) the N-terminus of the first polypeptide chain of the first domain,
   [0823] ii) a second polypeptide comprising, from its N-terminus to its C-terminus,
      [0824] (1) the fourth domain, or sixth domain if present, which is attached at its C-terminus by a peptide bond or via a peptide linker to
      [0825] (2) the N-terminus of the second dimerizing polypeptide which is attached at its C-terminus by a peptide bond or via a peptide linker to
      [0826] (3) the N-terminus of the first polypeptide chain of the second domain,
   [0827] iii) a third polypeptide comprising, from its N-terminus to its C-terminus,
      [0828] (1) the third domain if not present on the first polypeptide, or the fifth domain if present, which is attached at its C-terminus by a peptide bond or via a peptide linker to
         [0829] a. the N-terminus of a third dimerizing polypeptide which is in turn attached at its C-terminus by a peptide bond or via a peptide linker to the N-terminus of the second polypeptide chain of the first domain, or
         [0830] b. the N-terminus of the second polypeptide chain of the first domain,
   [0831] iv) a fourth polypeptide comprising, from its N-terminus to its C-terminus,
      [0832] (1) the fourth domain if not present on the second polypeptide, or the sixth domain if present, which is attached at its C-terminus by a peptide bond or via a peptide linker to
         [0833] a. the N-terminus of a fourth dimerizing polypeptide which is in turn attached at its C-terminus by a peptide bond or via a peptide linker to the N-terminus of the second polypeptide chain of the first domain, or
         [0834] b. the N-terminus of the second polypeptide chain of the first domain, and
   [0835] v) optionally one or more additional polypeptides comprising a second polypeptide chain of the third, fourth, fifth, and/or sixth domains, if present.

[0836] This invention also provides a method of making a tetrahedral antibody of the invention which comprises a fifth and/or sixth domain, wherein the non-peptidyl linkage of the tetrahedral antibody is a non-covalent linkage between a first dimerizing polypeptide attached to the first C-terminus of first domain and a second dimerizing polypeptide attached to the first N-terminus of the second domain, the method comprising:
[0837] a) recombinantly expressing each of the following polypeptides in a host cell:
   [0838] i) a first polypeptide comprising, from its N-terminus to its C-terminus,
      [0839] (1) the first polypeptide chain of the first domain which is attached at its C-terminus by a peptide bond or via a peptide linker to
      [0840] (2) the N-terminus of the first dimerizing polypeptide which is attached at its C-terminus by a peptide bond or via a peptide linker to
      [0841] (3) the N-terminus of the third domain, or fifth domain if present,
   [0842] ii) a second polypeptide comprising, from its N-terminus to its C-terminus,
      [0843] (1) the fourth domain, or sixth domain if present, which is attached at its C-terminus by a peptide bond or via a peptide linker to
      [0844] (2) the N-terminus of the second dimerizing polypeptide which is attached at its C-terminus by a peptide bond or via a peptide linker to
      [0845] (3) the N-terminus of the first polypeptide chain of the second domain,
   [0846] iii) a third polypeptide comprising, from its N-terminus to its C-terminus,
      [0847] (1) the second polypeptide chain of the first domain which is attached at its C-terminus by a peptide bond or via a peptide linker to
         [0848] a. the N-terminus of a third dimerizing polypeptide which is in turn attached at its C-terminus by a peptide bond or via a peptide linker to the N-terminus of the third domain if not present on the first polypeptide, or the fifth domain if present, or
         [0849] b. the N-terminus of the third domain if not present on the first polypeptide, or the fifth domain if present,
   [0850] iv) a fourth polypeptide comprising, from its N-terminus to its C-terminus,
      [0851] (1) the fourth domain if not present on the second polypeptide, or the sixth domain if present, which is attached at its C-terminus by a peptide bond or via a peptide linker to
         [0852] a. the N-terminus of a fourth dimerizing polypeptide which is in turn attached at its C-terminus by a peptide bond or via a peptide linker to the N-terminus of the second polypeptide chain of the first domain, or
         [0853] b. the N-terminus of the second polypeptide chain of the first domain, and
   [0854] v) optionally one or more additional polypeptides comprising a second polypeptide chain of the third, fourth, fifth, and/or sixth domains, if present.

[0855] This invention also provides a method of making a tetrahedral antibody of the invention which comprises a fifth and/or sixth domain, wherein the non-peptidyl linkage of the tetrahedral antibody is a non-covalent linkage between a first dimerizing polypeptide attached to the first N-terminus of first domain and a second dimerizing polypeptide attached to the first C-terminus of the second domain, the method comprising:
[0856] a) recombinantly expressing each of the following polypeptides in a host cell:
   [0857] i) a first polypeptide comprising, from its N-terminus to its C-terminus,
      [0858] (1) the third domain, or fifth domain if present, which is attached at its C-terminus by a peptide bond or via a peptide linker to
      [0859] (2) the N-terminus of the first dimerizing polypeptide which is attached at its C-terminus by a peptide bond or via a peptide linker to
      [0860] (3) the N-terminus of the first polypeptide chain of the first domain,
   [0861] ii) a second polypeptide comprising, from its N-terminus to its C-terminus,
      [0862] (1) the first polypeptide chain of the second domain which is attached at its C-terminus by a peptide bond or via a peptide linker to
      [0863] (2) the N-terminus of the second dimerizing polypeptide which is attached at its C-terminus by a peptide bond or via a peptide linker to
      [0864] (3) the N-terminus of the fourth domain, or sixth domain if present,
   [0865] iii) a third polypeptide comprising, from its N-terminus to its C-terminus,
      [0866] (1) the third domain if not present on the first polypeptide, or the fifth domain if present, attached at its C-terminus by a peptide bond or via a peptide linker to
         [0867] a. the N-terminus of a third dimerizing polypeptide which is in turn attached at its C-terminus by a peptide bond or via a peptide linker to the N-terminus of the second polypeptide chain of the first domain, or
         [0868] b. the N-terminus of the second polypeptide chain of the first domain, and
   [0869] iv) a fourth polypeptide comprising, from its N-terminus to its C-terminus,
      [0870] (1) the second polypeptide chain of the first domain, which is attached at its C-terminus by a peptide bond or via a peptide linker to
         [0871] a. the N-terminus of a fourth dimerizing polypeptide which is in turn attached at its C-terminus by a peptide bond or via a peptide linker to the N-terminus of the fourth domain if not present on the second polypeptide, or the sixth domain if present, or
         [0872] b. the N-terminus of the fourth domain if not present on the second polypeptide, or the sixth domain if present, and
   [0873] v) optionally one or more additional polypeptides comprising a second polypeptide chain of the third, fourth, fifth, and/or sixth domains, if present.

[0874] This invention also provides a method of making a tetrahedral antibody of the invention which comprises a fifth and/or sixth domain, wherein the non-peptidyl linkage of the tetrahedral antibody is a non-covalent linkage between a first dimerizing polypeptide attached to the first C-terminus of first domain and a second dimerizing polypeptide attached to the first C-terminus of the second domain, the method comprising:
[0875] a) recombinantly expressing each of the following polypeptides in a host cell:
   [0876] i) a first polypeptide comprising, from its N-terminus to its C-terminus,
      [0877] (1) the first polypeptide chain of the first domain which is attached at its C-terminus by a peptide bond or via a peptide linker to
      [0878] (2) the N-terminus of the first dimerizing polypeptide which is attached at its C-terminus by a peptide bond or via a peptide linker to
      [0879] (3) the N-terminus of the third domain, or fifth domain if present,
   [0880] ii) a second polypeptide comprising, from its N-terminus to its C-terminus,
      [0881] (1) the first polypeptide chain of the second domain which is attached at its C-terminus by a peptide bond or via a peptide linker to
      [0882] (2) the N-terminus of the second dimerizing polypeptide which is attached at its C-terminus by a peptide bond or via a peptide linker to
      [0883] (3) the N-terminus of the fourth domain, or sixth domain if present,
   [0884] iii) a third polypeptide comprising, from its N-terminus to its C-terminus,
      [0885] (1) the second polypeptide chain of the first domain which is attached at its C-terminus by a peptide bond or via a peptide linker to
         [0886] a. the N-terminus of a third dimerizing polypeptide which is in turn attached at its C-terminus by a peptide bond or via a peptide linker to the N-terminus of the third domain if not present on the first polypeptide, or the fifth domain if present, or
         [0887] b. the N-terminus of the third domain if not present on the first polypeptide, or the fifth domain if present, and
   [0888] iv) a fourth polypeptide comprising, from its N-terminus to its C-terminus,
      [0889] (1) the second polypeptide chain of the first domain, which is attached at its C-terminus by a peptide bond or via a peptide linker to
         [0890] a. the N-terminus of a fourth dimerizing polypeptide which is in turn attached at its C-terminus by a peptide bond or via a peptide linker to the N-terminus of the fourth domain if not present on the second polypeptide, or the sixth domain if present, or
         [0891] b. the N-terminus of the fourth domain if not present on the second polypeptide, or the sixth domain if present, and
         [0892] c. optionally one or more additional polypeptides comprising a second polypeptide chain of the third, fourth, fifth, and/or sixth domains, if present.

### Domains

[0893] The domains of the tetrahedral and octahedral antibodies are numbered herein to facilitate description and identification of each domain. The first domain may be referred to herein as “D1,” or “domain 1.” The same principle applies to all other domains of the inventions (i.e. the second domain may be referred to herein as “D2” or “domain 2,” etc.). Further, unless specified otherwise, the tetrahedral antibodies of the invention may lack one or more domains without affecting the numbering of the other domains. For example, a tetrahedral antibody of the invention may comprise domains 1, 2, 3, 4, and 6 without comprising a domain 5. As another example, a tetrahedral antibody of the invention may comprise domains 1, 2, 3, 4, 7, and 8 without comprising domains 5 and 6 (see, e.g., FIG. 42).

[0894] In principle, the first and second domains of the tetrahedral antibodies of the invention are interchangeable, i.e. a feature that is described as applying to the first domain can equally apply to the second domain in some embodiments. Similarly, the third and fourth domains of the tetrahedral antibodies of the invention are interchangeable, the fifth and sixth domains of the invention are interchangeable and the seventh and eighth domains are interchangeable.

[0895] Similarly, with respect to octahedral antibodies of the invention, the first, second, and third domains of the invention are interchangeable, the fourth, fifth, and sixth domains are interchangeable, the seventh, eight, and ninth domains are interchangeable, and the tenth, eleventh and twelfth domains are interchangeable. As discussed above, in this context interchangeable means that any feature described herein as applying to one of the domains, may also apply to any of the other domains.

[0896] In the same way, a person of skill in the art will appreciate that domains 1 and 2 of the tetrahedral antibodies of the invention and domains 1, 2 and 3 of the octahedral antibodies of the invention serve a similar structural purpose and are therefore equivalent insofar as any description applying to domains 1 and 2 of tetrahedral antibodies of the invention may also apply to domains 1, 2, and 3 of octahedral antibodies of the invention. A similar equivalence applies as between domains 3 and 4 of the tetrahedral antibodies of the invention and domains 4, 5, and 6 of the octahedral antibodies of the invention. Further, a similar equivalence applies as between domains 5 and 6 of the tetrahedral antibodies of the invention and domains 7, 8 and 9 of the octahedral antibodies of the invention. Still further, a similar equivalence applies as between domains 7 and 8 of the tetrahedral antibodies of the invention and domains 10, 11 and 12 of the octahedral antibodies of the invention.

### Chains

[0897] Various embodiments of the invention comprise domains which are made up of “heavy chains” and “light chains.” Heavy chains of the invention may be referred to herein as “H Chain,” or “H1,” “H2,” “H3,” etc. Similarly, light chains of the invention may be referred to herein as “L Chain,” or “L1,” “L2,” “L3,” etc.

[0898] In embodiments of the tetrahedral antibody of the invention comprise a first heavy chain (“H1”) and a second heavy chain (“H2”). H1 and H2 chains may pair with one another to form domains 1 and 2. H1 may also pair with a light chain to form domains 3 and 4, while H2 may also pair with a light chain to form domains 5 and 6. H1 and H2 chains may also homodimerize. In such cases, a dimerizing polypeptide on the H1 chain heterodimerizes with a dimerizing polypeptide on the H2 chain. The H1 or H2 chains may also comprise additional domains 7 and 8 as described herein. The H1 and/or H2 chains may also comprise a dimerizing polypeptide between domains 1 and 3 and/or between domains 2 and 4. In each of the tetrahedral antibodies of the invention, the H1 and H2 chains may comprise one or more peptide linkers. If the H1 and/or H2 chains comprise a dimerizing polypeptide the peptide linker may be present between either domain 1 or 2 and the dimerizing polypeptide, between the dimerizing polypeptide and domain 3 or 4, or both. A peptide linker may also be present between either domain 1 or 2 and the dimerizing polypeptide, between the dimerizing polypeptide and domain 5 or 6, or both.

[0899] A similar principle applies to octahedral antibody of invention. H1 and H2 chains pair with one another to form domains 1, 2 and 3. H1 may also pair with a light chain to form domains 4, 5, and 6, while H2 may pair with a light chain to form domains 7, 8, and 9. The H1 or H2 chains may also comprise additional domains 10, 11 and 12 as described herein.

[0900] Various embodiments of the invention comprise Fc fusion proteins. In such embodiments, part of an “Fc fusion chain” may pair with an “Fc chain” to form an Fc domain. Fc domains of the invention are typically domains 1 and/or 2 of the tetrahedral antibodies of the invention and domains 1, 2, and/or 3 of the octahedral antibodies of the invention. The “Fc fusion chains” typically also comprise a portion which forms domains 3, 4, 5, and/or 6 of the tetrahedral antibodies of the invention and domains 4, 5, 6, 7, 8, 9, 10, 11, and/or 12 of the octahedral antibodies of the invention.

[0901] In tetrahedral antibodies of the invention, the “Fc fusion chain” may include a dimerizing polypeptide between the portions forming part of domains 1 and 2 and the portions forming domains 3 and 4. In an alternative embodiment, the “Fc fusion chain” can lack a dimerizing polypeptide because the “Fc chain” of domains 1 and 2 each include a dimerizing polypeptide at their respective N-termini. In an alternative of this embodiment, the “Fc chain” of domains 1 and 2 are linked at their respective N-termini by a covalent linkage.

[0902] This invention specifically contemplates tetrahedral and octahedral antibodies wherein (1) the “Fc fusion chain” includes a dimerizing polypeptide between the portions forming part of domains 1 and 2 and the portions forming domains 3 and 4 and (2) domains 3 and 4 are not an ACE2 peptidase domain.

[0903] In octahedral antibodies of the invention, the “Fc fusion chain” may comprise a trimerizing polypeptide between the portions forming part of domains 1, 2, and 3, and the portion forming domains 4, 5, and 6.

[0904] In each of the tetrahedral antibodies of the invention, the “Fc fusion chain” may comprise one or more peptide linkers between the portion forming part of domain 1 and the portion forming domains 3 or 5. If the “Fe fusion chain” comprises a dimerizing polypeptide the peptide linker may be present between either domain 1 and the dimerizing polypeptide, between the dimerizing polypeptide and domain 3 or 5, or both. Similarly, the “Fe fusion chain” may comprise a peptide linker between the portion forming part of domain 2 and the portion forming domain 4, or 6. If the “Fe fusion chain” comprises a dimerizing polypeptide the peptide linker may be present between either domain 2 and the dimerizing polypeptide, between the dimerizing polypeptide and domain 4 or 6, or both.

[0905] In each of the octahedral antibodies of the invention, the “Fe fusion chain” may comprise a peptide linker between the portion forming part of domain 1 and the portion forming domain 4 or 7, between the portion forming part of domain 2 and the portion forming domain 5 or 8, and between the portion forming part of domain 3 and the portion forming domain 6 or 9. In each such case, if the “Fc fusion chain” comprises a trimerizing polypeptide, then the “Fe fusion chain” may comprise a peptide linker either between the portion forming part of domains 1, 2, and 3 and the trimerizing polypeptide, between the trimerizing polypeptide and the portion forming domains 4, 5, and 6, or both.

### Terms

[0906] As used herein, and unless stated otherwise, each of the following terms shall have the definition set forth below.

[0907] Peptidyl linkage: the structure

[chemical structure]

A peptidyl linkage may be a peptide bond.

[0908] Stretch of consecutive amino acids: a plurality of amino acids arranged in a chain, each of which is joined to a preceding amino acid by a peptide bond, excepting that the first amino acid in the chain may optionally not be joined to a preceding amino acid. The amino acids of the chain may be naturally or non-naturally occurring, or may comprise a mixture thereof. The amino acids, unless otherwise indicated, may be genetically encoded, naturally-occurring but not genetically encoded, or non-naturally occurring, and any selection thereof.

[0909] N-terminal amino acid residue: the terminal residue of a stretch of two or more consecutive amino acids having a free α-amino (NH₂) functional group, or a derivative of an α-amino (NH₂) functional group.

[0910] N-terminus: the free α-amino (NH₂) group (or derivative thereof) of a N-terminal amino acid residue.

[0911] C-terminal amino acid residue: the terminal residue of a stretch of two or more consecutive amino acids having a free α-carboxyl (COOH) functional group, or a derivative of a α-carboxyl (COOH) functional group.

[0912] C-terminus: the free α-carboxyl (COOH) group (or derivative thereof) of a C-terminal amino acid residue.

[0913] A “biologically active structure”, as used herein, means a structure of a molecule or fragment thereof, capable of treating a disease or condition or localizing or targeting a compound of the invention to a site of a disease or condition in the body by performing a function or an action, or stimulating or responding to a function, an action or a reaction, in a biological context (e.g. in an organism, a cell, or an in vitro model thereof). Biologically active structures may comprise a structure of at least one of polypeptides, nucleic acids, small molecules such as small organic or inorganic molecules.

[0914] A “bond”, unless otherwise specified, or contrary to context, is understood to include a covalent bond, a dipole-dipole interaction such as a hydrogen bond, and intermolecular interactions such as van der Waals forces.

[0915] A “Signal Sequence” is a short (3-60 amino acids long) peptide chain that directs the post-translational transport of a polypeptide.

[0916] “Amino acid” as used herein, in one embodiment, means a L or D isomer of the genetically encoded amino acids, i.e. isoleucine, alanine, leucine, asparagine, lysine, aspartate, methionine, cysteine, phenylalanine, glutamate, threonine, glutamine, tryptophan, glycine, valine, proline, arginine, serine, histidine, tyrosine, selenocysteine, pyrrolysine and also includes homocysteine and homoselenocysteine.

[0917] Other examples of amino acids include an L or D isomer of taurine, gaba, dopamine, lanthionine, 2-aminoisobutyric acid, dehydroalanine, ornithine and citrulline, as well as non-natural homologues and synthetically modified forms thereof including amino acids having alkylene chains shortened or lengthened by up to two carbon atoms, amino acids comprising optionally substituted aryl groups, and amino acids comprising halogenated groups, including halogenated alkyl and aryl groups as well as beta or gamma amino acids, and cyclic analogs.

[0918] Due to the presence of ionizable amino and carboxyl groups, the amino acids in these embodiments may be in the form of acidic or basic salts, or may be in neutral forms. Individual amino acid residues may also be modified by oxidation or reduction. Other contemplated modifications include hydroxylation of proline and lysine, phosphorylation of hydroxyl groups of seryl or threonyl residues, and methylation of the alpha-amino groups of lysine, arginine, and histidine side chains.

[0919] Covalent derivatives may be prepared by linking particular functional groups to the amino acid side chains or at the N- or C-termini.

[0920] Compounds comprising amino acids with R-group substitutions are within the scope of the invention. It is understood that substituents and substitution patterns on the compounds of the instant invention can be selected by one of ordinary skill in the art to provide compounds that are chemically stable from readily available starting materials.

[0921] “Natural amino acid” as used herein means a L or D isomer of the genetically encoded amino acids, i.e. isoleucine, alanine, leucine, asparagine, lysine, aspartate, methionine, cysteine, phenylalanine, glutamate, threonine, glutamine, tryptophan, glycine, valine, proline, arginine, serine, histidine, tyrosine, selenocysteine, pyrrolysine and homocysteine and homoselenocysteine.

[0922] “Non-natural amino acid” as used herein means a chemically modified L or D isomer of isoleucine, alanine, leucine, asparagine, lysine, aspartate, methionine, cysteine, phenylalanine, glutamate, threonine, glutamine, tryptophan, glycine, valine, proline, arginine, serine, histidine, tyrosine, selenocysteine, pyrrolysine, homocysteine, homoselenocysteine, taurine, gaba, dopamine, lanthionine, 2-aminoisobutyric acid, dehydroalanine, ornithine or citrulline, including cysteine and selenocysteine derivatives having C3-C10 aliphatic side chains between the alpha carbon and the S or Se. In one embodiment the aliphatic side chain is an alkylene. In another embodiment, the aliphatic side chain is an alkenylene or alkynylene.

[0923] In addition to the stretches of consecutive amino acid sequences described herein, it is contemplated that variants thereof can be prepared by introducing appropriate nucleotide changes into the encoding DNA, and/or by synthesis of the desired consecutive amino acid sequences. Those skilled in the art will appreciate that amino acid changes may alter post-translational processes of the stretches of consecutive amino acids described herein when expression is the chosen method of synthesis (rather than chemical synthesis for example), such as changing the number or position of glycosylation sites or altering the membrane anchoring characteristics.

[0924] Variations in the sequences described herein, can be made, for example, using any of the techniques and guidelines for conservative and non-conservative mutations set forth, for instance, in U.S. Pat. No. 5,364,934. Variations may be a substitution, deletion or insertion of one or more codons encoding the consecutive amino acid sequence of interest that results in a change in the amino acid sequence as compared with the native sequence. Optionally the variation is by substitution of at least one amino acid with any other amino acid in one or more of the domains. Guidance in determining which amino acid residue may be inserted, substituted or deleted without adversely affecting the desired activity may be found by comparing the sequence with that of homologous known protein molecules and minimizing the number of amino acid sequence changes made in regions of high homology. Amino acid substitutions can be the result of replacing one amino acid with another amino acid having similar structural and/or chemical properties, such as the replacement of a leucine with a serine, i.e., conservative amino acid replacements. Insertions or deletions may optionally be in the range of about 1 to 5 amino acids. The variation allowed may be determined by systematically making insertions, deletions or substitutions of amino acids in the sequence and testing the resulting variants for activity exhibited by the full-length or mature native sequence. It is understood that any terminal variations are made within the context of the invention disclosed herein.

[0925] Amino acid sequence variants of the binding partner are prepared with various objectives in mind, including increasing the affinity of the binding partner for its ligand, facilitating the stability, purification and preparation of the binding partner, modifying its plasma half life, improving therapeutic efficacy, and lessening the severity or occurrence of side effects during therapeutic use of the binding partner.

[0926] Amino acid sequence variants of these sequences are also contemplated herein including insertional, substitutional, or deletional variants. Such variants ordinarily can prepared by site-specific mutagenesis of nucleotides in the DNA encoding the target-binding monomer, by which DNA encoding the variant is obtained, and thereafter expressing the DNA in recombinant cell culture. Fragments having up to about 100-150 amino acid residues can also be prepared conveniently by in vitro synthesis. Such amino acid sequence variants are predetermined variants and are not found in nature. The variants exhibit the qualitative biological activity (including target-binding) of the nonvariant form, though not necessarily of the same quantitative value. While the site for introducing an amino acid sequence variation is predetermined, the mutation per se need not be predetermined. For example, in order to optimize the performance of a mutation at a given site, random or saturation mutagenesis (where all 20 possible residues are inserted) is conducted at the target codon and the expressed variant is screened for the optimal combination of desired activities. Such screening is within the ordinary skill in the art.

[0927] Amino acid insertions usually will be on the order of about from 1 to 10 amino acid residues; substitutions are typically introduced for single residues; and deletions will range about from 1 to 30 residues. Deletions or insertions preferably are made in adjacent pairs, i.e. a deletion of 2 residues or insertion of 2 residues. It will be amply apparent from the following discussion that substitutions, deletions, insertions or any combination thereof are introduced or combined to arrive at a final construct.

[0928] As used herein, “modification” means an amino acid substitution, insertion, and/or deletion in a polypeptide sequence or an alteration to a moiety chemically linked to a protein. For example, a modification may be an altered carbohydrate or PEG structure attached to a protein. As used herein, “amino acid modification” means an amino acid substitution, insertion, and/or deletion in a polypeptide sequence. For clarity, unless otherwise noted, the amino acid modification is always to an amino acid coded for by DNA, e.g. the 20 amino acids that have codons in DNA and RNA.

[0929] As used herein, “amino acid substitution” or “substitution” means the replacement of an amino acid at a particular position in a parent polypeptide sequence with a different amino acid. In particular, in some embodiments, the substitution is to an amino acid that is not naturally occurring at the particular position, either not naturally occurring within the organism or in any organism. For example, the substitution E272Y refers to a variant polypeptide, in this case an Fc variant, in which the glutamic acid at position 272 is replaced with tyrosine. For clarity, a protein which has been engineered to change the nucleic acid coding sequence but not change the starting amino acid (for example exchanging CGG (encoding arginine) to CGA (still encoding arginine) to increase host organism expression levels) is not an “amino acid substitution”; that is, despite the creation of a new gene encoding the same protein, if the protein has the same amino acid at the particular position that it started with, it is not an amino acid substitution.

[0930] As used herein, “amino acid insertion” or “insertion” means the addition of an amino acid sequence at a particular position in a parent polypeptide sequence. For example, -233E or 233E designates an insertion of glutamic acid after position 233 and before position 234. Additionally, -233ADE or A233ADE designates an insertion of AlaAspGlu after position 233 and before position 234.

[0931] As used herein, “amino acid deletion” or “deletion” means the removal of an amino acid sequence at a particular position in a parent polypeptide sequence. For example, E233- or E233 # or E233( ) designates a deletion of glutamic acid at position 233. Additionally, EDA233- or EDA233 # designates a deletion of the sequence GluAspAla that begins at position 233.

[0932] The terms “variant protein” or “protein variant”, or “variant” as used herein mean a protein that differs from that of a parent protein by virtue of at least one amino acid modification. Protein variant may refer to the protein itself, a composition comprising the protein, or the amino sequence that encodes it. Preferably, the protein variant has at least one amino acid modification compared to the parent protein, e.g. from about one to about seventy amino acid modifications, and preferably from about one to about five amino acid modifications compared to the parent. As described below, in some embodiments the parent polypeptide, for example an Fc parent polypeptide, is a human wild type sequence, such as the Fc region from IgG1, IgG2, IgG3 or IgG4, although human sequences with variants can also serve as “parent polypeptides”, for example the IgG1/2 hybrid of FIG. 13. The protein variant sequence herein will preferably possess at least about 80% identity with a parent protein sequence, and most preferably at least about 90% identity, more preferably at least about 95-98-99% identity. Variant protein can refer to the variant protein itself, compositions comprising the protein variant, or the DNA sequence that encodes it. Accordingly, the terms “antibody variant” or “variant antibody” as used herein mean an antibody that differs from a parent antibody by virtue of at least one amino acid modification, “IgG variant” or “variant IgG” as used herein is meant an antibody that differs from a parent IgG (again, in many cases, from a human IgG sequence) by virtue of at least one amino acid modification, and “immunoglobulin variant” or “variant immunoglobulin” as used herein mean an immunoglobulin sequence that differs from that of a parent immunoglobulin sequence by virtue of at least one amino acid modification. “Fc variant” or “variant Fc” as used herein means a protein comprising an amino acid modification in an Fc domain. The Fc variants of the present invention are defined according to the amino acid modifications that compose them. Thus, for example, N434S or 434S is an Fc variant with the substitution serine at position 434 relative to the parent Fc polypeptide, wherein the numbering is according to the EU index. Likewise, M428L/N434S defines an Fc variant with the substitutions M428L and N434S relative to the parent Fc polypeptide. The identity of the WT amino acid may be unspecified, in which case the aforementioned variant is referred to as 428L/434S. It is noted that the order in which substitutions are provided is arbitrary, that is to say that, for example, 428L/434S is the same Fc variant as M428L/N434S, and so on. For all positions discussed in the present invention that relate to antibodies, unless otherwise noted, amino acid position numbering is according to the EU index. The EU index or EU index as in Kabat or EU numbering scheme refers to the numbering of the EU antibody (Edelman et al., 1969, Proc Natl Acad Sci USA 63:78-85, hereby entirely incorporated by reference.) The modification can be an addition, deletion, or substitution. Substitutions can include naturally occurring amino acids and, in some cases, synthetic amino acids. Examples include U.S. Pat. No. 6,586,207; WO 98/48032; WO 03/073238; U52004-0214988A1; WO 05/35727A2; WO 05/74524A2; J. W. Chin et al., (2002), Journal of the American Chemical Society 124:9026-9027; J. W. Chin, & P. G. Schultz, (2002), ChemBioChem 11:1135-1137; J. W. Chin, et al., (2002), PICAS United States of America 99:11020-11024; and, L. Wang, & P. G. Schultz, (2002), Chem. 1-10, all entirely incorporated by reference.

[0933] As used herein, “protein” means at least two covalently attached amino acids, which includes proteins, polypeptides, oligopeptides and peptides. The terms “protein” and “stretch of consecutive amino acids” are used interchangeably herein. The peptidyl group may comprise naturally occurring amino acids and peptide bonds, or synthetic peptidomimetic structures, i.e. “analogs”, such as peptoids (see Simon et al., PNAS USA 89(20):9367 (1992), entirely incorporated by reference). The amino acids may either be naturally occurring or synthetic (e.g. not an amino acid that is coded for by DNA); as will be appreciated by those in the art. For example, homo-phenylalanine, citrulline, ornithine and noreleucine are considered synthetic amino acids for the purposes of the invention, and both D- and L-(R or S) configured amino acids may be utilized. The variants of the present invention may comprise modifications that include the use of synthetic amino acids incorporated using, for example, the technologies developed by Schultz and colleagues, including but not limited to methods described by Cropp & Shultz, 2004, Trends Genet. 20(12):625-30, Anderson et al., 2004, Proc Natl Acad Sci USA 101 (2):7566-71, Zhang et al., 2003, 303(5656):371-3, and Chin et al., 2003, Science 301(5635):964-7, all entirely incorporated by reference. In addition, polypeptides may include synthetic derivatization of one or more side chains or termini, glycosylation, PEGylation, circular permutation, cyclization, linkers to other molecules, fusion to proteins or protein domains, and addition of peptide tags or labels.

[0934] The term “residue” as used herein means a position in a protein and its associated amino acid identity. For example, Asparagine 297 (also referred to as Asn297 or N297) is a residue at position 297 in the human antibody IgG1.

[0935] As used herein “Fab” or “Fab region” means the polypeptide that comprises the VH, CH1, VL, and CL immunoglobulin domains. Fab may refer to this region in isolation, or this region in the context of a full length antibody, antibody fragment or Fab fusion protein. “Fv” or “Fv fragment” or “Fv region” as used herein mean a polypeptide that comprises the VL and VH domains of a single antibody.

[0936] “IgG subclass modification” or “isotype modification” as used herein mean an amino acid modification that converts one amino acid of one IgG isotype to the corresponding amino acid in a different, aligned IgG isotype. For example, because IgG1 comprises a tyrosine and IgG2 a phenylalanine at EU position 296, a F296Y substitution in IgG2 is considered an IgG subclass modification.

[0937] The term “non-naturally occurring modification” means an amino acid modification that is not isotypic. For example, because none of the IgGs comprise a serine at position 434, the substitution 434S in IgG1, IgG2, IgG3, or IgG4 (or hybrids thereof) is considered a non-naturally occurring modification.

[0938] The term “effector function” as used herein means a biochemical event that results from the interaction of an antibody Fc region with an Fc receptor or ligand. Effector functions include but are not limited to ADCC, ADCP, and CDC.

[0939] The term “IgG Fc ligand” as used herein means a molecule, preferably a polypeptide, from any organism that binds to the Fc region of an IgG antibody to form an Fc/Fc ligand complex. Fc ligands include but are not limited to FcγRIs, FcγRIIs, FcγRIIIs, FcRn, C1q, C3, mannan binding lectin, mannose receptor, staphylococcal protein A, streptococcal protein G, and viral FcγR. Fc ligands also include Fc receptor homologs (FcRH), which are a family of Fc receptors that are homologous to the FcγRs (Davis et al., 2002, Immunological Reviews 190:123-136, entirely incorporated by reference). Fc ligands may include undiscovered molecules that bind Fc. Particular IgG Fc ligands are FcRn and Fc gamma receptors. “Fc ligand” as used herein means a molecule, preferably a polypeptide, from any organism that binds to the Fc region of an antibody to form an Fc/Fc ligand complex.

[0940] The terms “Fc gamma receptor”, “FcγR”, “FcgammaR” or “FcgR” as used herein mean any member of the family of proteins that bind the IgG antibody Fc region and is encoded by an FcγR gene. In humans this family includes but is not limited to FcγRI (CD64), including isoforms FcγRIa, FcγRIb, and FcγRIc; FcγRII (CD32), including isoforms FcγRIIa (including allotypes H131 and R131), FcγRIIb (including FcγRIIb-1 and FcγRIIb-2), and FcγRIIc; and FcγRIII (CD16), including isoforms FcγRIIIa (including allotypes V158 and F158) and FcγRIIIb (including allotypes FcγRIIb-NA1 and FcγRIIb-NA2) (Jefferis et al., 2002, Immunol Lett 82:57-65, entirely incorporated by reference), as well as any undiscovered human FcγRs or FcγR isoforms or allotypes. An FcγR may be from any organism, including but not limited to humans, mice, rats, rabbits, and monkeys. Mouse FcγRs include but are not limited to FcγRI (CD64), FcγRII (CD32), FcγRIII (CD16), and FcγRIII-2 (CD16-2), as well as any undiscovered mouse FcγRs or FcγR isoforms or allotypes.

[0941] The terms “FcRn” or “neonatal Fc Receptor” as used herein is meant a protein that binds the IgG antibody Fc region and is encoded at least in part by an FcRn gene. The FcRn may be from any organism, including but not limited to humans, mice, rats, rabbits, and monkeys. As is known in the art, the functional FcRn protein comprises two polypeptides, often referred to as the heavy chain and light chain. The light chain is beta-2-microglobulin and the heavy chain is encoded by the FcRn gene. Unless otherwise noted herein, FcRn or an FcRn protein refers to the complex of FcRn heavy chain with beta-2-microglobulin. A variety of FcRn variants used to increase binding to the FcRn receptor, and in some cases, to increase serum half-life, are shown in the Figure Legend of FIG. 11.

[0942] The terms “parent polypeptide” as used herein mean a starting polypeptide that is subsequently modified to generate a variant. The parent polypeptide may be a naturally occurring polypeptide, or a variant or engineered version of a naturally occurring polypeptide. Parent polypeptide may refer to the polypeptide itself, compositions that comprise the parent polypeptide, or the amino acid sequence that encodes it. Accordingly, “parent immunoglobulin” as used herein means an unmodified immunoglobulin polypeptide that is modified to generate a variant, and “parent antibody” as used herein means an unmodified antibody that is modified to generate a variant antibody. It should be noted that “parent antibody” includes known commercial, recombinantly produced antibodies as outlined below.

[0943] The terms “Fc fusion protein” or “immunoadhesin” as used herein means a protein comprising an Fc region, generally linked (optionally through a linker moiety, as described herein) to a different protein, such as a binding moiety to a target protein, as described herein. In some cases, one monomer of the heterodimeric protein comprises an antibody heavy chain (either including an scFv or further including a light chain) and the other monomer is an Fc fusion, comprising a variant Fc domain and a ligand.

[0944] The term “position” as used herein is meant a location in the sequence of a protein. Positions may be numbered sequentially, or according to an established format, for example the EU index for antibody numbering.

[0945] The term “target antigen” as used herein means the molecule that is bound specifically by the variable region of a given antibody. A target antigen may be a protein, carbohydrate, lipid, or other chemical compound. A wide number of suitable target antigens are described below.

[0946] The term “target cell” as used herein means a cell that expresses a target antigen.

[0947] The term “variable region” as used herein means the region of an immunoglobulin that comprises one or more Ig domains substantially encoded by any of the Vκ, Vλ, and/or VH genes that make up the kappa, lambda, and heavy chain immunoglobulin genetic loci respectively.

[0948] The term “wild type or wt” as used herein means an amino acid sequence or a nucleotide sequence that is found in nature, including allelic variations. A WT protein has an amino acid sequence or a nucleotide sequence that has not been intentionally modified.

[0949] The antibodies of the present invention are generally isolated or recombinant. “Isolated,” when used to describe the various polypeptides disclosed herein, means a polypeptide that has been identified and separated and/or recovered from a cell or cell culture from which it was expressed. Ordinarily, an isolated polypeptide will be prepared by at least one purification step. An “isolated antibody,” refers to an antibody which is substantially free of other antibodies having different antigenic specificities.

[0950] “Specific binding” or “specifically binds to” or is “specific for” a particular antigen or an epitope means binding that is measurably different from a non-specific interaction. Specific binding can be measured, for example, by determining binding of a molecule compared to binding of a control molecule, which generally is a molecule of similar structure that does not have binding activity. For example, specific binding can be determined by competition with a control molecule that is similar to the target.

[0951] Specific binding for a particular antigen or an epitope can be exhibited, for example, by an antibody having a KD for an antigen or epitope of at least about 10-4 M, at least about 10-5 M, at least about 10-6 M, at least about 10-7 M, at least about 10-8 M, at least about 10-9 M, alternatively at least about 10-10 M, at least about 10-11 M, at least about 10-12 M, or greater, where KD refers to a dissociation rate of a particular antibody-antigen interaction. Typically, an antibody that specifically binds an antigen will have a KD that is 20-, 50-, 100-, 500-, 1000-, 5,000-, 10,000- or more times greater for a control molecule relative to the antigen or epitope.

[0952] Also, specific binding for a particular antigen or an epitope can be exhibited, for example, by an antibody having a KA or Ka for an antigen or epitope of at least 20-, 50-, 100-, 500-, 1000-, 5,000-, 10,000- or more times greater for the epitope relative to a control, where KA or Ka refers to an association rate of a particular antibody-antigen interaction.

[0953] As used herein “ablation” means a decrease or removal of activity. Thus, for example, “ablating FcγR binding” means the Fc region amino acid variant has less than 50% starting binding as compared to an Fc region not containing the specific variant, with less than 70-80-90-95-98% loss of activity being preferred, and in general, with the activity being below the level of detectable binding in a Carterra assay.

[0954] As used herein, “ADCC” or “antibody dependent cell-mediated cytotoxicity” means cell-mediated reaction wherein nonspecific cytotoxic cells that express FcγRs recognize bound antibody on a target cell and subsequently cause lysis of the target cell. ADCC is correlated with binding to FcγRIIIa; increased binding to FcγRIIIa leads to an increase in ADCC activity.

[0955] As used herein “ADCP” or antibody dependent cell-mediated phagocytosis mean the cell-mediated reaction wherein nonspecific cytotoxic cells that express FcγRs recognize bound antibody on a target cell and subsequently cause phagocytosis of the target cell.

[0956] In an aspect, the invention provides a stretch of consecutive amino acids (i.e. a protein) having at least about 80% sequence identity, preferably at least about 81% sequence identity, more preferably at least about 82% sequence identity, yet more preferably at least about 83% sequence identity, yet more preferably at least about 84% sequence identity, yet more preferably at least about 85% sequence identity, yet more preferably at least about 86% sequence identity, yet more preferably at least about 87% sequence identity, yet more preferably at least about 88% sequence identity, yet more preferably at least about 89% sequence identity, yet more preferably at least about 90% sequence identity, yet more preferably at least about 91% sequence identity, yet more preferably at least about 92% sequence identity, yet more preferably at least about 93% sequence identity, yet more preferably at least about 94% sequence identity, yet more preferably at least about 95% sequence identity, yet more preferably at least about 96% sequence identity, yet more preferably at least about 97% sequence identity, yet more preferably at least about 98% sequence identity and yet more preferably at least about 99% sequence identity to an amino acid sequence disclosed in the specification, a figure, a SEQ ID NO. or a sequence listing of the present application. Similarly, the invention provides dimers and trimers comprising such proteins, including those described in the Examples of the invention.

[0957] The % amino acid sequence identity values can be readily obtained using, for example, the WU-BLAST-2 computer program (Altschul et al., Methods in Enzymology 266:460-480 (1996)).

[0958] Fragments of native sequences are provided herein. Such fragments may be truncated at the N-terminus or C-terminus, or may lack internal residues, for example, when compared with a full-length native protein. Again, it is understood that any terminal variations are made within the context of the invention disclosed herein.

[0959] Certain fragments lack amino acid residues that are not essential for a desired biological activity of the sequence of interest.

[0960] Any of a number of conventional techniques may be used. Desired peptide fragments or fragments of stretches of consecutive amino acids may be chemically synthesized. An alternative approach involves generating fragments by enzymatic digestion, e.g. by treating the protein with an enzyme known to cleave proteins at sites defined by particular amino acid residues, or by digesting the DNA with suitable restriction enzymes and isolating the desired fragment. Yet another suitable technique involves isolating and amplifying a DNA fragment encoding a desired polypeptide/sequence fragment, by polymerase chain reaction (PCR). Oligonucleotides that define the desired termini of the DNA fragment are employed at the 5′ and 3′ primers in the PCR.

[0961] In particular embodiments, conservative substitutions of interest are shown in Table A under the heading of preferred substitutions. If such substitutions result in a change in biological activity, then more substantial changes, denominated exemplary substitutions in Table A, or as further described below in reference to amino acid classes, are introduced and the products screened.

TABLE A
Conservative amino acid substitutions

| Original | Exemplary | Preferred |
|---|---|---|
| Ala (A) | val; leu; ile | val |
| Arg (R) | lys; gln; asn | lys |
| Asn (N) | gln; his; lys; arg | gln |
| Asp (D) | glu | glu |
| Cys (C) | ser | ser |
| Gln (Q) | asn | asn |
| Glu (E) | asp | asp |
| Gly (G) | pro; ala | ala |
| His (H) | asn; gln; lys; arg | arg |
| Ile (I) | leu; val; met; ala; phe; norleucine | leu |
| Leu (L) | norleucine; ile; val; met; ala; phe | ile |
| Lys (K) | arg; gln; asn | arg |
| Met (M) | leu; phe; ile | leu |
| Phe (F) | leu; val; ile; ala; tyr | leu |
| Pro (P) | ala | ala |
| Ser (S) | thr | thr |
| Thr (T) | ser | ser |
| Trp (W) | tyr; phe | tyr |
| Tyr (Y) | trp; phe; thr; ser | phe |
| Val (V) | ile; leu; met; phe; ala; norleucine | leu |

[0962] Substantial modifications in function or immunological identity of the sequence are accomplished by selecting substitutions that differ significantly in their effect on maintaining (a) the structure of the polypeptide backbone in the area of the substitution, for example, as a sheet or helical conformation, (b) the charge or hydrophobicity of the molecule at the target site, or (c) the bulk of the side chain. Naturally occurring residues are divided into groups based on common side-chain properties:
[0963] a) hydrophobic: norleucine, met, ala, val, leu, ile;
[0964] b) neutral hydrophilic: cys, ser, thr;
[0965] c) acidic: asp, glu;
[0966] d) basic: asn, gln, his, lys, arg;
[0967] e) residues that influence chain orientation: gly, pro;
[0968] f) aromatic: trp, tyr, phe.

[0969] Non-conservative substitutions will entail exchanging a member of one of these classes for another class. Such substituted residues also may be introduced into the conservative substitution sites or, more preferably, into the remaining (non-conserved) sites.

[0970] The variations can be made using methods known in the art such as oligonucleotide-mediated (site-directed) mutagenesis, alanine scanning, and PCR mutagenesis. Site-directed mutagenesis (Carter et al., Nucl. Acids Res., 13:4331 (1986); Zoller et al., Nucl. Acids Res., 10:6487 (1987)), cassette mutagenesis (Wells et al., Gene, 34:315 (1985)), restriction selection mutagenesis (Wells et al., Philos. Trans. R. Soc. London SerA, 317:415 (1986)) or other known techniques can be performed on the cloned DNA to produce the variant DNA.

[0971] Scanning amino acid analysis can also be employed to identify one or more amino acids along a contiguous sequence. Among the preferred scanning amino acids are relatively small, neutral amino acids. Such amino acids include alanine, glycine, serine, and cysteine. Alanine is typically a preferred scanning amino acid among this group because it eliminates the side-chain beyond the beta-carbon and is less likely to alter the main-chain conformation of the variant (Cunningham and Wells, Science, 244:1081-1085 (1989)). Alanine is also typically preferred because it is the most common amino acid. Further, it is frequently found in both buried and exposed positions (Creighton, The Proteins, (W.H. Freeman & Co., N.Y.); Chothia, J. Mol. Biol., 150:1 (1976)). If alanine substitution does not yield adequate amounts of variant, an isoteric amino acid can be used.

[0972] Covalent modifications: The stretch of consecutive amino acids may be covalently modified. One type of covalent modification includes reacting targeted amino acid residues with an organic derivatizing agent that is capable of reacting with selected side chains or the N- or C-terminal residues that are not involved in an -x-x- bond. Derivatization with bifunctional agents is useful, for instance, for crosslinking to a water-insoluble support matrix or surface for use in the method for purifying anti-sequence of interest antibodies, and vice-versa. Commonly used crosslinking agents include, e.g., 1,1-bis(diazoacetyl)-2-phenylethane, glutaraldehyde, N-hydroxysuccinimide esters, for example, esters with 4-azidosalicylic acid, homobifunctional imidoesters, including disuccinimidyl esters such as 3,3′-dithiobis(succinimidylpropionate), bifunctional maleimides such as bis-N-maleimido-1,8-octane and agents such as methyl-3-((p-azidophenyl)dithio)propioimidate.

[0973] Other modifications include deamidation of glutaminyl and asparaginyl residues to the corresponding glutamyl and aspartyl residues, respectively, hydroxylation of proline and lysine, phosphorylation of hydroxyl groups of seryl or threonyl residues, methylation of the .alpha.-amino groups of lysine, arginine, and histidine side chains (T. E. Creighton, Proteins: Structure and Molecular Properties, W.H. Freeman & Co., San Francisco, pp. 79-86 (1983)), acetylation of the N-terminal amine, and amidation of any C-terminal carboxyl group.

[0974] Another type of covalent modification comprises altering the native glycosylation pattern of the stretch of consecutive amino acids. “Altering the native glycosylation pattern” is intended for purposes herein to mean deleting one or more carbohydrate moieties found in amino acid sequences (either by removing the underlying glycosylation site or by deleting the glycosylation by chemical and/or enzymatic means), and/or adding one or more glycosylation sites that are not present in the native sequence. In addition, the phrase includes qualitative changes in the glycosylation of the native proteins, involving a change in the nature and proportions of the various carbohydrate moieties present.

[0975] Addition of glycosylation sites to the amino acid sequence may be accomplished by altering the amino acid sequence. The alteration may be made, for example, by the addition of, or substitution by, one or more serine or threonine residues to the native sequence (for O-linked glycosylation sites). The amino acid sequence may optionally be altered through changes at the DNA level, particularly by mutating the DNA encoding the amino acid sequence at preselected bases such that codons are generated that will translate into the desired amino acids.

[0976] Another means of increasing the number of carbohydrate moieties on the amino acid sequence is by chemical or enzymatic coupling of glycosides to the polypeptide. Such methods are described in the art, e.g., in WO 87/05330 published Sep. 11, 1987, and in Aplin and Wriston, CRC Crit. Rev. Biochem., pp. 259-306 (1981).

[0977] Removal of carbohydrate moieties present on the amino acid sequence may be accomplished chemically or enzymatically or by mutational substitution of codons encoding for amino acid residues that serve as targets for glycosylation. Chemical deglycosylation techniques are known in the art and described, for instance, by Hakimuddin, et al., Arch. Biochem. Biophys., 259:52 (1987) and by Edge et al., Anal. Biochem., 118:131 (1981). Enzymatic cleavage of carbohydrate moieties on polypeptides can be achieved by the use of a variety of endo- and exo-glycosidases as described by Thotakura et al., Meth. Enzymol., 138:350 (1987).

[0978] Another type of covalent modification comprises linking the amino acid sequence to one of a variety of nonproteinaceous polymers, e.g., polyethylene glycol (PEG), polypropylene glycol, or polyoxyalkylenes, in the manner set forth in U.S. Pat. Nos. 4,640,835; 4,496,689; 4,301,144; 4,670,417; 4,791,192 or 4,179,337.

[0979] The term “substitution”, “substituted” and “substituent” refers to a functional group in which one or more bonds to a hydrogen atom contained therein are replaced by a bond to non-hydrogen atoms, provided that normal valencies are maintained and that the substitution results in a stable compound. Substituted groups also include groups in which one or more bonds to a carbon(s) or hydrogen(s) atom are replaced by one or more bonds, including double or triple bonds, to a heteroatom. Examples of substituent groups include halogens (i.e., F, Cl, Br, and I); alkyl groups, such as methyl, ethyl, n-propyl, isopropyl, n-butyl, tert-butyl, and trifluoromethyl; aryl groups, such as phenyl; heteroaryl groups, such as triazole, dihydropyridazine and tetrazole; hydroxyl; alkoxy groups, such as methoxy, ethoxy, n-propoxy, and isopropoxy; aryloxy groups, such as phenoxy; arylalkyloxy, such as benzyloxy (phenylmethoxy) and p-trifluoromethylbenzyloxy (4-trifluoromethylphenylmethoxy); heteroaryl oxy groups; sulfonyl groups, such as sulfonate, trifluoromethanesulfonyl, methanesulfonyl, and p-toluenesulfonyl; sulfnitro, nitrosyl; mercapto; sulfanyl groups, such as methylsulfanyl, ethylsulfanyl and propylsulfanyl; cyano; amino groups, such as amino, methylamino, dimethylamino, ethylamino, and diethylamino; and carboxyl. Where multiple substituent moieties are disclosed or claimed, the substituted compound can be independently substituted by one or more of the disclosed or claimed substituent moieties, singly or plurally. By independently substituted, it is meant that the (two or more) substituents can be the same or different. In the compounds used in the method of the present invention, alkyl, heteroalkyl, monocycle, bicycle, aryl, heteroaryl and heterocycle groups can be substituted by replacing one or more hydrogen atoms with alternative non-hydrogen groups. These include, but are not limited to, halo, hydroxy, mercapto, amino, carboxy, cyano and carbamoyl.

[0980] It is understood that substituents and substitution patterns on the compounds used in the method of the present invention can be selected by one of ordinary skill in the art to provide compounds that are chemically stable and that can be readily synthesized by techniques known in the art from readily available starting materials. If a substituent is itself substituted with more than one group, it is understood that these multiple groups may be on the same carbon or on different carbons, so long as a stable structure results.

[0981] In choosing the compounds used in the method of the present invention, one of ordinary skill in the art will recognize that the various substituents, i.e. R1, R2, etc. are to be chosen in conformity with well-known principles of chemical structure connectivity.

[0982] As used herein, “alkyl” includes both branched and straight-chain saturated aliphatic hydrocarbon groups having the specified number of carbon atoms and may be unsubstituted or substituted. Thus, C₁-Cₙ as in “C₁-Cₙ alkyl” is defined to include groups having 1, 2, . . . , n−1 or n carbons in a linear or branched arrangement. For example, C₁-C₆, as in “C₁-C₆ alkyl” is defined to include groups having 1, 2, 3, 4, 5, or 6 carbons in a linear or branched arrangement, and specifically includes methyl, ethyl, n-propyl, isopropyl, n-butyl, t-butyl, pentyl, and hexyl. Unless otherwise specified contains one to twelve carbons. Alkyl groups can be unsubstituted or substituted with one or more substituents, including but not limited to halogen, alkoxy, alkylthio, trifluoromethyl, difluoromethyl, methoxy, and hydroxyl. An embodiment can be C₁-C₁₂ alkyl, C₂-C₁₂ alkyl, C₃-C₁₂ alkyl, C₄-C₁₂ alkyl and so on. An embodiment can be C₁-C₈ alkyl, C₂-C₈ alkyl, C₃-C₈ alkyl, C₄-C₈ alkyl and so on. Alkyl is intended to include moieties that are monovalent, divalent, trivalent, etc.

[0983] As used herein, “C₁-C₄ alkyl” includes both branched and straight-chain C₁-C₄ alkyl.

[0984] As used herein, the term “cycloalkane” refers to a monocyclic or bicyclic ring system, which may be unsaturated or partially unsaturated, i.e. possesses one or more double bonds. Monocyclic ring systems are exemplified by a saturated cyclic hydrocarbon group containing from 3 to 8 carbon atoms. Examples of monocyclic ring systems include cyclopropyl, cyclobutyl, cyclopentyl, cyclopentenyl, cyclohexyl, cyclohexenyl, cycloheptyl and cyclooctyl. Bicyclic fused ring systems are exemplified by a cycloalkyl ring fused to another cycloalkyl ring. Examples of bicyclic fused ring systems include, but are not limited to, decalin, 1,2,3,7,8,8a-hexahydro-naphthalene, and the like. Thus, C₃-C₁₀ cycloalkane includes cyclic rings of alkanes of three to eight total carbon atoms, (e.g., cyclopropyl, cyclobutyl, cyclopentyl, cyclohexyl, cycloheptyl or cyclooctyl and so on). Cycloalkane groups can be unsubstituted or substituted with one or more substituents, including but not limited to halogen, alkoxy, alkylthio, trifluoromethyl, difluoromethyl, methoxy, and hydroxyl. Cycloalkane is intended to include moieties that are monovalent, divalent, trivalent, etc.

[0985] As used herein, the term “cycloalkene” refers to a cycloalkane which possesses one or more double bonds. Thus, C₅-C₁₀ cycloalkene includes cyclic rings of alkanes of five to ten total carbon atoms, (e.g., cyclopentenyl, cyclohexenyl, cycloheptenyl, cyclohexadienyl, cyclooctenyl or cyclooctadienyl and so on). Cycloalkene is intended to moieties that are monovalent, divalent, trivalent, etc. Cycloalkene is intended to include moieties that are monovalent, divalent, trivalent, etc.

[0986] As used herein, “alkene” includes both branched and straight-chain aliphatic hydrocarbon groups having one or more double bond and the specified number of carbon atoms and may be unsubstituted or substituted. Thus, C₂-Cₙ as in “C₂-Cₙ alkene” is defined to include groups having 2, 3, . . . , n−1 or n carbons in a linear or branched arrangement. For example, C₂-C₁₀, as in “C₂-C₁₀ alkene” is defined to include groups having 2, 3, 4, 5 . . . 10 carbons in a linear or branched arrangement, and specifically includes vinyl, allyl, 1-butene, 2-butene, iso-butene, 1-pentene, 2-pentene, etc. Alkylene groups can be unsubstituted or substituted with one or more substituents, including but not limited to halogen, alkoxy, alkylthio, trifluoromethyl, difluoromethyl, methoxy, and hydroxyl. An embodiment can be C₂-C₃ alkene, C₂-C₄ alkene, C₂-C₅ alkene, and so on. Alkene is intended to include moieties that are monovalent, divalent, trivalent, etc.

[0987] As used herein, an “acyl” refers to an alkyl group having a ketone at the first position. For example, an “acyl” embodiment can be acetyl, propionyl, butyryl and valeryl. As another example, an “acyl” embodiment can be:

[chemical structure]

wherein n is 1-10. In another embodiment, n is 1-4.

[0988] Thus, a “C₂-C₅ acyl” can be acetyl, propionyl, butyryl, or and valeryl. Acyl is intended to include moieties that are monovalent, divalent, trivalent, etc.

[0989] C₂-C₅ acylamino is an acyl group as defined above further substituted with an amine. The amine may be linked to the carbonyl portion of the acyl group so as to form an amide or the amine may linked to a non-carbonyl portion of the acyl group. For example, the amino group may be at the alpha-position, the beta-position, the gamma-position, the delta-position, etc. As further examples, acylamino includes both alpha-aminoacetyl and acetamido groups. Acylamino includes beta-aminopropionyl).

[0990] C₂-C₅ acyloxy is an acyl group as defined above further substituted with an oxygen. The oxygen may be linked to the carbonyl portion of the acyl group so as to form an amide or the oxygen may linked to a non-carbonyl portion of the acyl group. For example, the oxygen group may be at the alpha-position, the beta-position, the gamma-position, the delta-position, etc. As further examples, acyloxy includes both alpha-oxyacetyl and acetate groups. Acyloxy includes beta-oxypropionyl).

[0991] As used herein, “amino” includes primary, secondary, tertiary and quaternary amines. Thus, amino includes a —NH— group, a —NH₂ group, a —NR— group, a —NR₂⁺— group, a —NRH⁺— group, a —NH₂⁺— group, a —NH₃⁺ group and a —NR₃⁺ group, wherein R is alkyl or aryl. Amino is intended to include moieties that are monovalent, divalent, trivalent, etc.

[0992] As used herein, “sulfur” includes a —S— group and a —SH group. The term sulfur is intended to include moieties that are monovalent, divalent, trivalent, etc.

[0993] As used herein, “oxygen” includes a —O— group and a —OH group. The term sulfur is intended to moieties that are monovalent and divalent.

[0994] As used herein, “succinyl” is derived from succinic acid by removal of one or both hydroxyl groups. An embodiment can be —C(O)—CH₂—CH₂—C(O) Succinyl is intended to include moieties that are monovalent, divalent, trivalent, etc.

[0995] As used herein, a “malonyl” is derived from malonic acid by removal of one or both hydroxyl groups. An embodiment can be —C(O)—CH₂—C(O)—. Malonyl is intended to include moieties that are monovalent, divalent, trivalent, etc.

[0996] As used herein, a “glutaryl” is derived from glutaric acid by removal of one or both hydroxyl groups. An embodiment can be —C(O)—CH₂—CH₂—CH₂—C(O)—. Glutaryl is intended to include moieties that are monovalent, divalent, trivalent, etc.

[0997] As used herein, an “adipoyl” is derived from adipic acid by removal of one or both hydroxyl groups. An embodiment can be —C(O)—CH₂—CH₂—CH₂—CH₂—(O)—. Adipoyl is intended to include moieties that are monovalent, divalent, trivalent, etc.

[0998] A “polyalkylene glycol” is derived from polyalkylene glycol by removal of both hydrogens from the hydroxyl groups. An embodiment can be derived from polyethylene glycol, polypropylene glycol, or polybutylene glycol.

[0999] An “polyalkylene glycol” embodiment can be

[chemical structure]

wherein n is 1-10.

[1000] As used herein, “aryl” is intended to mean any stable monocyclic, bicyclic or polycyclic carbon ring of up to 10 atoms in each ring, wherein at least one ring is aromatic, and may be unsubstituted or substituted. Examples of such aryl elements include but are not limited to: phenyl, p-toluenyl (4-methylphenyl), naphthyl, tetrahydro-naphthyl, indanyl, phenanthryl, anthryl or acenaphthyl. In cases where the aryl substituent is bicyclic and one ring is non-aromatic, it is understood that attachment is via the aromatic ring.

[1001] The term “heteroaryl”, as used herein, represents a stable monocyclic, bicyclic or polycyclic ring of up to 10 atoms in each ring, wherein at least one ring is aromatic and contains from 1 to 4 heteroatoms selected from the group consisting of O, N and S. Bicyclic aromatic heteroaryl groups include phenyl, pyridine, pyrimidine or pyridizine rings that are (a) fused to a 6-membered aromatic (unsaturated) heterocyclic ring having one nitrogen atom; (b) fused to a 5- or 6-membered aromatic (unsaturated) heterocyclic ring having two nitrogen atoms; (c) fused to a 5-membered aromatic (unsaturated) heterocyclic ring having one nitrogen atom together with either one oxygen or one sulfur atom; or (d) fused to a 5-membered aromatic (unsaturated) heterocyclic ring having one heteroatom selected from O, N or S. Heteroaryl groups within the scope of this definition include but are not limited to: benzoimidazolyl, benzofuranyl, benzofurazanyl, benzopyrazolyl, benzotriazolyl, benzothiophenyl, benzoxazolyl, carbazolyl, carbolinyl, cinnolinyl, dihydropyridizine, furanyl, indolinyl, indolyl, indolazinyl, indazolyl, isobenzofuranyl, isoindolyl, isoquinolyl, isothiazolyl, isoxazolyl, naphthpyridinyl, oxadiazolyl, oxazolyl, oxazoline, isoxazoline, oxetanyl, pyranyl, pyrazinyl, pyrazolyl, pyridazinyl, pyridopyridinyl, pyridazinyl, pyridyl, pyrimidyl, pyrrolyl, quinazolinyl, quinolyl, quinoxalinyl, tetrazolyl, tetrazolopyridyl, thiadiazolyl, thiazolyl, thienyl, triazolyl, azetidinyl, aziridinyl, 1,4-dioxanyl, hexahydroazepinyl, dihydrobenzoimidazolyl, dihydrobenzofuranyl, dihydrobenzothiophenyl, dihydrobenzoxazolyl, dihydrofuranyl, dihydroimidazolyl, dihydroindolyl, dihydroisooxazolyl, dihydroisothiazolyl, dihydrooxadiazolyl, dihydrooxazolyl, dihydropyrazinyl, dihydropyrazolyl, dihydropyridinyl, dihydropyrimidinyl, dihydropyrrolyl, dihydroquinolinyl, dihydrotetrazolyl, dihydrothiadiazolyl, dihydrothiazolyl, dihydrothienyl, dihydrotriazolyl, dihydroazetidinyl, methylenedioxybenzoyl, tetrahydrofuranyl, tetrahydrothienyl, acridinyl, carbazolyl, cinnolinyl, quinoxalinyl, pyrazolyl, indolyl, benzotriazolyl, benzothiazolyl, benzoxazolyl, isoxazolyl, isothiazolyl, furanyl, thienyl, benzothienyl, benzofuranyl, quinolinyl, isoquinolinyl, oxazolyl, isoxazolyl, indolyl, pyrazinyl, pyridazinyl, pyridinyl, pyrimidinyl, pyrrolyl, tetra-hydroquinoline. In cases where the heteroaryl substituent is bicyclic and one ring is non-aromatic or contains no heteroatoms, it is understood that attachment is via the aromatic ring or via the heteroatom containing ring, respectively. If the heteroaryl contains nitrogen atoms, it is understood that the corresponding N-oxides thereof are also encompassed by this definition.

[1002] The term “phenyl” is intended to mean an aromatic six membered ring containing six carbons, and any substituted derivative thereof.

[1003] The term “benzyl” is intended to mean a methylene attached directly to a benzene ring. A benzyl group is a methyl group wherein a hydrogen is replaced with a phenyl group, and any substituted derivative thereof.

[1004] The term “triazole” is intended to mean a heteraryl having a five-membered ring containing two carbon atoms and three nitrogen atoms, and any substituted derivative thereof.

[1005] Dihydropyradizine is optionally substituted and includes 1,2-dihydropyridazines,

[chemical structure]

1,4-dihydropyridazines,

[chemical structure]

1,6-dihydropyridazines,

[chemical structure]

and 4,5-dihydropyridazines,

[chemical structure]

[1006] A chemical structure containing a cyclooctane fused to a dihydropyridazine includes, but is not limited to, a chemical structure which contains a cyclooctane fused to the 3rd and 4th position of a dihydropyridazine or a chemical structure which contains a saturated cycloocta[d]pyridazine, any of which are optionally substituted. For example, the chemical structure containing a cyclooctane fused to a dihydropyridazine includes, but is not limited to, a chemical structure which contains a 2,4a,5,6,7,8,9,10-octahydrocycloocta[d]pyridazine,

[chemical structure]

a 4a,5,6,7,8,9,10,10a-octahydrocycloocta[d]pyridazine,

[chemical structure]

a 2,3,5,6,7,8,9,10-octahydrocycloocta[d]pyridazine,

[chemical structure]

or a 1,2,5,6,7,8,9,10-octahydrocycloocta[d]pyridazine,

[chemical structure]

each of which may be optionally substituted.

[1007] Tautomers of

[chemical structure]

include, but are not limited to:

[chemical structure]

[1008] In some embodiments, the dihydropyridazine is oxidized to a pyridazine.

[1009] In some embodiments, the dihydropyridazine is reduced to result in an open ring structure having a 1,4-dicarbonyl compound.

[1010] The compounds used in the method of the present invention may be prepared by techniques well know in organic synthesis and familiar to a practitioner ordinarily skilled in the art. However, these may not be the only means by which to synthesize or obtain the desired compounds.

[1011] Compounds of the subject invention can be converted to prodrugs to optimize absorption and bioavailability. Formation of a prodrug include, but is not limited to, reaction of a free hydroxyl group with a carboxylic acid to form an ester, reaction of a free hydroxyl group with an phosphorus oxychloride followed by hydrolysis to form a phosphate, or reaction of a free hydroxyl group with an amino acid to form an amino acid ester, the process of which has been described previously by Chandran in WO 2005/046575. The substituents are chosen and resulting analogs are evaluated according to principles well known in the art of medicinal and pharmaceutical chemistry, such as quantification of structure-activity relationships, optimization of biological activity and ADMET (absorption, distribution, metabolism, excretion, and toxicity) properties.

[1012] The various R groups attached to the aromatic rings of the compounds disclosed herein may be added to the rings by standard procedures, for example those set forth in Advanced Organic Chemistry: Part B: Reaction and Synthesis, Francis Carey and Richard Sundberg, (Springer) 5th ed. Edition. (2007), the content of which is hereby incorporated by reference.

[1013] The compounds of present invention may be prepared by techniques described in Vogel's Textbook of Practical Organic Chemistry, A. I. Vogel, A. R. Tatchell, B. S. Furnis, A. J. Hannaford, P. W. G. Smith, (Prentice Hall) 5th Edition (1996), March's Advanced Organic Chemistry: Reactions, Mechanisms, and Structure, Michael B. Smith, Jerry March, (Wiley-Interscience) 5th Edition (2007), and references therein, which are incorporated by reference herein. However, these may not be the only means by which to synthesize or obtain the desired compounds.

[1014] A person having ordinary skill in the art will immediately understand that the definitions of the substituents and moieties provided herein are intended to obey the standard rules of chemical valency. For example, where a structure provided herein requires a particular substituent or moiety to be divalent, (e.g. a moiety in a linear chain of moieties) a person having ordinary skill in the art will immediately understand that the definitions of that substituent or moiety are divalent in order to obey the standard rules of chemical valency.

[1015] A person having ordinary skill in the art will immediately understand that some divalent moieties depicted in the present invention may be linked to other chemical structures in more than one way, e.g., the depicted structures may be linked to other chemical structures when rotated or flipped.

[1016] In some embodiments of the present invention, a compound comprises a nonproteinaceous polymer. In some embodiments, the nonproteinaceous polymer may be is a hydrophilic synthetic polymer, i.e., a polymer not otherwise found in nature. However, polymers which exist in nature and are produced by recombinant or in vitro methods are useful, as are polymers which are isolated from nature. Hydrophilic polyvinyl polymers fall within the scope of this invention, e.g. polyvinylalcohol and polyvinylpyrrolidone. Particularly useful are polyalkylene ethers such as polyethylene glycol, polypropylene glycol, polyoxyethylene esters or methoxy polyethylene glycol; polyoxyalkylenes such as polyoxyethylene, polyoxypropylene, and block copolymers of polyoxyethylene and polyoxypropylene (Pluronics); polymethacrylates; carbomers; branched or unbranched polysaccharides which comprise the saccharide monomers D-mannose, D- and L-galactose, fucose, fructose, D-xylose, L-arabinose, D-glucuronic acid, sialic acid, D-galacturontc acid, D-mannuronic acid (e.g. polymannuronic acid, or alginic acid), D-glucosamine, D-galactosamine, D-glucose and neuraminic acid including homopolysaccharides and heteropolysaccharides such as lactose, amylopectin, starch, hydroxyethyl starch, amylose, dextran sulfate, dextran, dextrins, glycogen, or the polysaccharide subunit of acid mucopolysaccharides, e.g. hyaluronic acid; polymers of sugar alcohols such as polysorbitol and polymannitol; and heparin or heparon.

### Salts

[1017] Salts of the compounds disclosed herein are within the scope of the invention. As used herein, a “salt” is salt of the instant compounds which has been modified by making acid or base salts of the compounds.

### Stretches of Consecutive Amino Acids

[1018] Examples of stretches of consecutive amino acids as referred to herein include, but are not limited to, consecutive amino acids including binding domains such as secreted or transmembrane proteins, intracellular binding domains and antibodies (whole or portions thereof) and modified versions thereof. The following are some non-limiting examples:

### Immunoglobulins

[1019] The term “antibody” is used in the broadest sense and specifically covers monoclonal antibodies (including full length monoclonal antibodies), polyclonal antibodies, multispecific antibodies (e.g., bispecific antibodies), monovalent antibodies, multivalent antibodies, and antibody fragments so long as they exhibit the desired biological activity (e.g., Fab and/or single-armed antibodies).

[1020] The “class” of an antibody refers to the type of constant domain or constant region possessed by its heavy chain. There are five major classes of antibodies: IgA, IgD, IgE, IgG, and IgM, and several of these may be further divided into subclasses (isotypes), e.g., IgG1, IgG2, IgG3, IgG4, IgA1, and IgA2. The heavy chain constant domains that correspond to the different classes of immunoglobulins are called α, δ, ε, γ, and μ, respectively.

[1021] An “antibody fragment” refers to a molecule other than an intact antibody that comprises a portion of an intact antibody that binds the antigen to which the intact antibody binds. Examples of antibody fragments include but are not limited to Fv, Fab, Fab′, Fab′-SH, F(ab′)2; diabodies; linear antibodies; single-chain antibody molecules (e.g., scFv); and multispecific antibodies formed from antibody fragments.

[1022] The terms “full length antibody,” “intact antibody,” and “whole antibody” are used herein interchangeably to refer to an antibody having a structure substantially similar to a native antibody structure or having heavy chains that contain an Fc region as defined herein.

[1023] A “blocking” antibody or an “antagonist” antibody is one which significantly inhibits (either partially or completely) a biological activity of the antigen it binds.

[1024] An “antibody that binds to the same epitope” as a reference antibody refers to an antibody that blocks binding of the reference antibody to its antigen in a competition assay by 50% or more, and conversely, the reference antibody blocks binding of the antibody to its antigen in a competition assay by 50% or more. An exemplary competition assay is provided herein.

[1025] The term “variable region” or “variable domain” refers to the domain of an antibody heavy or light chain that is involved in binding the antibody to antigen. The variable domains of the heavy chain and light chain (VH and VL, respectively) of a native antibody generally have similar structures, with each domain comprising four conserved framework regions (FRs) and three hypervariable regions (HVRs). (See, e.g., Kindt et al. Kuby Immunology, 6th ed., W.H. Freeman and Co., page 91 (2007).) A single VH or VL domain may be sufficient to confer antigen-binding specificity. Furthermore, antibodies that bind a particular antigen may be isolated using a VH or VL domain from an antibody that binds the antigen to screen a library of complementary VL or VH domains, respectively. See, e.g., Portolano et al., J. Immunol. 150:880-887 (1993); Clarkson et al., Nature 352:624-628 (1991).

[1026] The term “hypervariable region” or “HVR,” as used herein, refers to each of the regions of an antibody variable domain which are hypervariable in sequence and/or form structurally defined loops (“hypervariable loops”). Generally, native four-chain antibodies comprise six HVRs; three in the VH (H1, H2, H3), and three in the VL (L1, L2, L3). HVRs generally comprise amino acid residues from the hypervariable loops and/or from the “complementarity determining regions” (CDRs), the latter being of highest sequence variability and/or involved in antigen recognition. Exemplary hypervariable loops occur at amino acid residues 26-32 (L1), 50-52 (L2), 91-96 (L3), 26-32 (H1), 53-55 (H2), and 96-101 (H3). (Chothia and Lesk, J. Mol. Biol. 196:901-917 (1987).) Exemplary CDRs (CDR-L1, CDR-L2, CDR-L3, CDR-H1, CDR-H2, and CDR-H3) occur at amino acid residues 24-34 of L1, 50-56 of L2, 89-97 of L3, 31-35B of H1, 50-65 of H2, and 95-102 of H3. (Kabat et al., Sequences of Proteins of Immunological Interest, 5th Ed. Public Health Service, National Institutes of Health, Bethesda, Md. (1991).) With the exception of CDR1 in VH, CDRs generally comprise the amino acid residues that form the hypervariable loops. CDRs also comprise “specificity determining residues,” or “SDRs,” which are residues that contact antigen. SDRs are contained within regions of the CDRs called abbreviated-CDRs, or a-CDRs. Exemplary a-CDRs (a-CDR-L1, a-CDR-L2, a-CDR-L3, a-CDR-H1, a-CDR-H2, and a-CDR-H3) occur at amino acid residues 31-34 of L1, 50-55 of L2, 89-96 of L3, 31-35B of H1, 50-58 of H2, and 95-102 of H3. (See Almagro and Fransson, Front. Biosci. 13:1619-1633 (2008).) Unless otherwise indicated, HVR residues and other residues in the variable domain (e.g., FR residues) are numbered herein according to Kabat et al., supra.

[1027] “Framework” or “FR” refers to variable domain residues other than hypervariable region (HVR) residues. The FR of a variable domain generally consists of four FR domains: FR1, FR2, FR3, and FR4. Accordingly, the HVR and FR sequences generally appear in the following sequence in VH (or VL): FR1-H1(L1)-FR2-H2(L2)-FR3-H3(L3)-FR4.

[1028] The phrase “N-terminally truncated heavy chain”, as used herein, refers to a polypeptide comprising parts but not all of a full length immunoglobulin heavy chain, wherein the missing parts are those normally located on the N terminal region of the heavy chain. Missing parts may include, but are not limited to, the variable domain, CH1, and part or all of a hinge sequence. Generally, if the wild type hinge sequence is not present, the remaining constant domain(s) in the N-terminally truncated heavy chain would comprise a component that is capable of linkage to another Fc sequence (i.e., the “first” Fc polypeptide as described herein). For example, said component can be a modified residue or an added cysteine residue capable of forming a disulfide linkage.

[1029] “Fc receptor” or “FcR” describes a receptor that binds to the Fc region of an antibody. In some embodiments, an FcR is a native human FcR. In some embodiments, an FcR is one which binds an IgG antibody (a gamma receptor) and includes receptors of the FcγRI, FcγRII, and FcγRIII subclasses, including allelic variants and alternatively spliced forms of those receptors. FcγRII receptors include FcγRIIA (an “activating receptor”) and FcγRIIB (an “inhibiting receptor”), which have similar amino acid sequences that differ primarily in the cytoplasmic domains thereof. Activating receptor FcγRIIA contains an immunoreceptor tyrosine-based activation motif (ITAM) in its cytoplasmic domain Inhibiting receptor FcγRIIB contains an immunoreceptor tyrosine-based inhibition motif (ITIM) in its cytoplasmic domain. (see, e.g., Daeron, Annu. Rev. Immunol. 15:203-234 (1997)). FcRs are reviewed, for example, in Ravetch and Kinet, Annu. Rev. Immunol 9:457-92 (1991); Capel et al., Immunomethods 4:25-34 (1994); and de Haas et al., J. Lab. Clin. Med. 126:330-41 (1995). Other FcRs, including those to be identified in the future, are encompassed by the term “FcR” herein.

[1030] The term “Fc receptor” or “FcR” also includes the neonatal receptor, FcRn, which is responsible for the transfer of maternal IgGs to the fetus (Guyer et al., J. Immunol. 117:587 (1976) and Kim et al., J. Immunol. 24:249 (1994)) and regulation of homeostasis of immunoglobulins. Methods of measuring binding to FcRn are known (see, e.g., Ghetie and Ward., Immunol. Today 18(12):592-598 (1997); Ghetie et al., Nature Biotechnology, 15(7):637-640 (1997); Hinton et al., J. Biol. Chem. 279(8):6213-6216 (2004); WO 2004/92219 (Hinton et al.).

[1031] Binding to human FcRn in vivo and serum half life of human FcRn high affinity binding polypeptides can be assayed, e.g., in transgenic mice or transfected human cell lines expressing human FcRn, or in primates to which the polypeptides with a variant Fc region are administered. WO 2000/42072 (Presta) describes antibody variants with improved or diminished binding to FcRs. See also, e.g., Shields et al. J. Biol. Chem. 9(2):6591-6604 (2001).

[1032] The “hinge region,” “hinge sequence”, and variations thereof, as used herein, includes the meaning known in the art, which is illustrated in, for example, Janeway et al., Immuno Biology: the immune system in health and disease, (Elsevier Science Ltd., NY) (4th ed., 1999); Bloom et al., Protein Science (1997), 6:407-415; Humphreys et al., J. Immunol. Methods (1997), 209:193-202.

[1033] Unless indicated otherwise, the expression “multivalent antibody” is used throughout this specification to denote an antibody comprising three or more antigen binding sites. The multivalent antibody is preferably engineered to have the three or more antigen binding sites and is generally not a native sequence IgM or IgA antibody.

[1034] An “Fv” fragment is an antibody fragment which contains a complete antigen recognition and binding site. This region consists of a dimer of one heavy and one light chain variable domain in tight association, which can be covalent in nature, for example in scFv. It is in this configuration that the three HVRs of each variable domain interact to define an antigen binding site on the surface of the VH-VL dimer. Collectively, the six HVRs or a subset thereof confer antigen binding specificity to the antibody. However, even a single variable domain (or half of an Fv comprising only three HVRs specific for an antigen) has the ability to recognize and bind antigen, although usually at a lower affinity than the entire binding site.

[1035] The “Fab” fragment contains a variable and constant domain of the light chain and a variable domain and the first constant domain (CH1) of the heavy chain. F(ab′) 2 antibody fragments comprise a pair of Fab fragments which are generally covalently linked near their carboxy termini by hinge cysteines between them. Other chemical couplings of antibody fragments are also known in the art.

[1036] The phrase “antigen binding arm”, as used herein, refers to a component part of an antibody fragment that has an ability to specifically bind a target molecule of interest. Generally and preferably, the antigen binding arm is a complex of immunoglobulin polypeptide sequences, e.g., HVR and/or variable domain sequences of an immunoglobulin light and heavy chain.

[1037] “Single-chain Fv” or “scFv” antibody fragments comprise the VH and VL domains of antibody, wherein these domains are present in a single polypeptide chain. Generally the Fv polypeptide further comprises a polypeptide linker between the VH and VL domains, which enables the scFv to form the desired structure for antigen binding. For a review of scFv, see Pluckthun in The Pharmacology of Monoclonal Antibodies, Vol 113, Rosenburg and Moore eds. Springer-Verlag, New York, pp. 269-315 (1994).

[1038] The term “diabodies” refers to small antibody fragments with two antigen-binding sites, which fragments comprise a heavy chain variable domain (VH) connected to a light chain variable domain (VL) in the same polypeptide chain (VH and VL). By using a linker that is too short to allow pairing between the two domains on the same chain, the domains are forced to pair with the complementary domains of another chain and create two antigen-binding sites. Diabodies are described more fully in, for example, EP 404,097; WO 93/11161; and Hollinger et al., Proc. Natl. Acad. Sci. USA, 90:6444-6448 (1993).

[1039] The expression “linear antibodies” refers to the antibodies described in Zapata et al., Protein Eng., 8(10):1057-1062 (1995). Briefly, these antibodies comprise a pair of tandem Fd segments (V_{H}-C_{H1}-V_{H}-C_{H1}) which, together with complementary light chain polypeptides, form a pair of antigen binding regions. Linear antibodies can be bispecific or monospecific.

[1040] The term “monoclonal antibody” as used herein refers to an antibody obtained from a population of substantially homogeneous antibodies, i.e., the individual antibodies comprising the population are identical and/or bind the same epitope, except for possible variant antibodies, e.g., containing naturally occurring mutations or arising during production of a monoclonal antibody preparation, such variants generally being present in minor amounts. In contrast to polyclonal antibody preparations, which typically include different antibodies directed against different determinants (epitopes), each monoclonal antibody of a monoclonal antibody preparation is directed against a single determinant on an antigen. Thus, the modifier “monoclonal” indicates the character of the antibody as being obtained from a substantially homogeneous population of antibodies, and is not to be construed as requiring production of the antibody by any particular method. For example, the monoclonal antibodies to be used may be made by a variety of techniques, including but not limited to the hybridoma method, recombinant DNA methods, phage-display methods, and methods utilizing transgenic animals containing all or part of the human immunoglobulin loci, such methods and other exemplary methods for making monoclonal antibodies being described herein.

[1041] The term “chimeric” antibody refers to an antibody in which a portion of the heavy and/or light chain is derived from a particular source or species, while the remainder of the heavy and/or light chain is derived from a different source or species.

[1042] A “humanized” antibody refers to a chimeric antibody comprising amino acid residues from non-human HVRs and amino acid residues from human FRs. In certain embodiments, a humanized antibody will comprise substantially all of at least one, and typically two, variable domains, in which all or substantially all of the HVRs (e.g., CDRs) correspond to those of a non-human antibody, and all or substantially all of the FRs correspond to those of a human antibody. A humanized antibody optionally may comprise at least a portion of an antibody constant region derived from a human antibody. A “humanized form” of an antibody, e.g., a non-human antibody, refers to an antibody that has undergone humanization.

[1043] A “human antibody” is one which possesses an amino acid sequence which corresponds to that of an antibody produced by a human or a human cell or derived from a non-human source that utilizes human antibody repertoires or other human antibody-encoding sequences. This definition of a human antibody specifically excludes a humanized antibody comprising non-human antigen-binding residues.

[1044] A “naked antibody” refers to an antibody that is not conjugated to a heterologous moiety (e.g., a cytotoxic moiety) or radiolabel. The naked antibody may be present in a pharmaceutical formulation.

[1045] “Native antibodies” refer to naturally occurring immunoglobulin molecules with varying structures. For example, native IgG antibodies are heterotetrameric glycoproteins of about 150,000 Daltons, composed of two identical light chains and two identical heavy chains that are disulfide-bonded. From N- to C-terminus, each heavy chain has a variable region (VH), also called a variable heavy domain or a heavy chain variable domain, followed by three constant domains (CH1, CH2, and CH3). Similarly, from N- to C-terminus, each light chain has a variable region (VL), also called a variable light domain or a light chain variable domain, followed by a constant light (CL) domain. The light chain of an antibody may be assigned to one of two types, called kappa (κ) and lambda (λ), based on the amino acid sequence of its constant domain.

[1046] “Affinity” refers to the strength of the sum total of noncovalent interactions between a single binding site of a molecule (e.g., an antibody) and its binding partner (e.g., an antigen). Unless indicated otherwise, as used herein, “binding affinity” refers to intrinsic binding affinity which reflects a 1:1 interaction between members of a binding pair (e.g., antibody and antigen). The affinity of a molecule X for its partner Y can generally be represented by the dissociation constant (Kd). Affinity can be measured by common methods known in the art, including those described herein. Specific illustrative and exemplary embodiments for measuring binding affinity are described in the following.

[1047] An “affinity matured” antibody refers to an antibody with one or more alterations in one or more HVRs, compared to a parent antibody which does not possess such alterations, such alterations resulting in an improvement in the affinity of the antibody for antigen.

[1048] An antibody having a “biological characteristic” of a designated antibody is one which possesses one or more of the biological characteristics of that antibody which distinguish it from other antibodies that bind to the same antigen.

[1049] A “functional antigen binding site” of an antibody is one which is capable of binding a target antigen. The antigen binding affinity of the antigen binding site is not necessarily as strong as the parent antibody from which the antigen binding site is derived, but the ability to bind antigen must be measurable using any one of a variety of methods known for evaluating antibody binding to an antigen. Moreover, the antigen binding affinity of each of the antigen binding sites of a multivalent antibody herein need not be quantitatively the same. For the multimeric antibodies herein, the number of functional antigen binding sites can be evaluated using ultracentrifugation analysis as described in Example 2 of U.S. Patent Application Publication No. 2005/0186208 A1. According to this method of analysis, different ratios of target antigen to multimeric antibody are combined and the average molecular weight of the complexes is calculated assuming differing numbers of functional binding sites. These theoretical values are compared to the actual experimental values obtained in order to evaluate the number of functional binding sites.

[1050] A “species-dependent antibody” is one which has a stronger binding affinity for an antigen from a first mammalian species than it has for a homologue of that antigen from a second mammalian species. Normally, the species-dependent antibody “binds specifically” to a human antigen (i.e. has a binding affinity (K_{d}) value of no more than about 1×10⁻⁷ M, preferably no more than about 1×10⁻⁸ M and most preferably no more than about 1×10⁻⁹ M) but has a binding affinity for a homologue of the antigen from a second nonhuman mammalian species which is at least about 50 fold, or at least about 500 fold, or at least about 1000 fold, weaker than its binding affinity for the human antigen. The species-dependent antibody can be any of the various types of antibodies as defined above. In some embodiments, the species-dependent antibody is a humanized or human antibody.

[1051] An “isolated” antibody is one which has been separated from a component of its natural environment. In some embodiments, an antibody is purified to greater than 95% or 99% purity as determined by, for example, electrophoretic (e.g., SDS-PAGE, isoelectric focusing (IEF), capillary electrophoresis) or chromatographic (e.g., ion exchange or reverse phase HPLC). For review of methods for assessment of antibody purity, see, e.g., Flatman et al., J. Chromatogr. B 848:79-87 (2007).

### Fc Domains

[1052] The term “Fc domain”, as used herein, generally refers to a monomer or dimer complex, comprising the C-terminal polypeptide sequences of an immunoglobulin heavy chain. The Fc domain may comprise native or variant Fc sequences. Although the boundaries of the Fc domain of an immunoglobulin heavy chain might vary, the human IgG heavy chain Fc domain is usually defined to stretch from an amino acid residue in the hinge region to the carboxyl terminus of the Fc sequence. The Fc sequence of an immunoglobulin generally comprises two constant regions, a CH2 region and a CH3 region, and optionally comprises a CH4 region. A human Fc domain may be obtained from any suitable immunoglobulin, such as the IgG1, IgG2, IgG3, or IgG4 subtypes, IgA, IgE, IgD or IgM.

[1053] Suitable Fc domains are prepared by recombinant DNA expression of pre-Fc chimeric polypeptides comprising 1) a signal peptide, obtained from a secreted or transmembrane protein, that is cleaved in front of a mature polypeptide having an N-terminal cysteine residue, contiguous with 2) an Fc domain polypeptide having an N-terminal cysteine residue.

[1054] Suitable examples of signal peptides are sonic hedgehog (SHH) (GenBank Acc. No. NM000193), IFNalpha-2 (IFN) (GenBank Acc. No. NP000596), and cholesterol ester transferase (CETP) (GenBank Accession No. NM000078). Other suitable examples include Indian hedgehog (Genbank Acc. No. NM002181), desert hedgehog (Genbank Acc. No. NM021044), IFNalpha-1 (Genbank Acc. No. NP076918), IFNalpha-4 (Genbank Acc. No. NM021068), IFNalpha-5 (Genbank Acc. No. NM002169), IFNalpha-6 (Genbank Acc. No. NM021002), IFNalpha-7 (Genbank Acc. No. NM021057), IFNalpha-8 (Genbank Acc. No. NM002170), IFNalpha-10 (Genbank Acc. No. NM002171), IFNalpha-13 (Genbank Acc. No. NM006900), IFNalpha-14 (Genbank Acc. No. NM002172), IFNalpha-16 (Genbank Acc. No. NM002173), IFNalpha-17 (Genbank Acc. No. NM021268) and IFNalpha-21 (Genbank Acc. No. NM002175).

[1055] Suitable examples of Fc domains and their pre-Fc chimeric polypeptides are shown in SEQ ID NO: 120 through SEQ ID NO: 215. The Fc domains are obtained by expressing the pre-Fc chimeric polypeptides in cells under conditions leading to their secretion and cleavage of the signal peptide. The pre-Fc polypeptides may be expressed in either prokaryotic or eukaryotic host cells. Preferably, mammalian host cells are transfected with expression vectors encoding the pre-Fc polypeptides.

[1056] Human IgG1 Fc domains having the N-terminal sequence CDKTHTCPPCPAPE, CPPCPAPE, and CPAPE are shown in SEQ ID NO: 120, SEQ ID NO: 128, and SEQ ID NO: 136, respectively, and the DNA sequences encoding them are shown in SEQ ID NO: 121, SEQ ID NO: 129, and SEQ ID NO: 137, respectively. The IgG1 domain of SEQ ID NO: 120 is obtained by expressing the pre-Fc chimeric polypeptides shown in SEQ ID NO: 122 (SHH signal peptide), SEQ ID NO: 124 (IFN signal peptide), and SEQ ID NO: 126 (CETP signal peptide), using the DNA sequences shown in SEQ ID NO: 123, SEQ ID NO: 125, and SEQ ID NO: 127, respectively. The IgG1 domain of SEQ ID NO: 128 is obtained by expressing the pre-Fc chimeric polypeptides shown in SEQ ID NO: 130 (SHH signal peptide), SEQ ID NO: 132 (IFN signal peptide), and SEQ ID NO: 134 (CETP signal peptide), using the DNA sequences shown in SEQ ID NO: 131, SEQ ID NO: 133, and SEQ ID NO: 135, respectively. The IgG1 domain of SEQ ID NO: 136 is obtained by expressing the pre-Fc chimeric polypeptides shown in SEQ ID NO: 138 (SHH signal peptide), SEQ ID NO: 140 (IFN signal peptide), and SEQ ID NO: 142 (CETP signal peptide), using the DNA sequences shown in SEQ ID NO: 139, SEQ ID NO: 141, and SEQ ID NO: 143, respectively.

[1057] Human IgG2 Fc domains having the N-terminal sequence CCVECPPCPAPE, CVECPPCPAPE, CPPCPAPE, and CPAPE are shown in SEQ ID NO: 144, SEQ ID NO: 152, SEQ ID NO: 160, and SEQ ID NO: 168, respectively, and the DNA sequences encoding them are shown in SEQ ID NO: 145, SEQ ID NO: 153, SEQ ID NO: 161, and SEQ ID NO: 169, respectively. The IgG2 domain of SEQ ID NO: 144 is obtained by expressing the pre-Fc chimeric polypeptides shown in SEQ ID NO: 146 (SHH signal peptide), SEQ ID NO: 148 (IFN signal peptide), and SEQ ID NO: 150 (CETP signal peptide), using the DNA sequences shown in SEQ ID NO: 147, SEQ ID NO: 149, and SEQ ID NO: 151, respectively. The IgG2 domain of SEQ ID NO: 152 is obtained by expressing the pre-Fc chimeric polypeptides shown in SEQ ID NO: 154 (SHH signal peptide), SEQ ID NO: 156 (IFN signal peptide), and SEQ ID NO: 158 (CETP signal peptide) using the DNA sequences shown in SEQ ID NO: 155, SEQ ID NO: 157, and SEQ ID NO: 159, respectively. The IgG2 domain of SEQ ID NO: 160 is obtained from the pre-Fc chimeric polypeptides shown in SEQ ID NO: 162 (SHH signal peptide), SEQ ID NO: 164 (IFN signal peptide), and SEQ ID NO: 166 (CETP signal peptide), using the DNA sequences shown in SEQ ID NO: 163, SEQ ID NO: 165, and SEQ ID NO: 167, respectively. The IgG2 domain of SEQ ID NO: 168 is obtained from the pre-Fc chimeric polypeptides shown in SEQ ID NO: 170 (SHH signal peptide), SEQ ID NO: 172 (IFN signal peptide), and SEQ ID NO: 174 (CETP signal peptide), using the DNA sequences shown in SEQ ID NO: 171, SEQ ID NO: 173, and SEQ ID NO: 175, respectively.

[1058] Human IgG3 Fc domains having the N-terminal sequence (CPRCPEPKSDTPPP)3-CPRCPAPE, CPRCPAPE, and CPAPE are shown in SEQ ID NO: 176, SEQ ID NO: 184, and SEQ ID NO: 192, respectively, and the DNA sequences encoding them are shown in SEQ ID NO: 177, SEQ ID NO: 185, SEQ ID NO: 161, and SEQ ID NO: 193, respectively. The IgG3 domain of SEQ ID NO: 176 is obtained by expressing the pre-Fc chimeric polypeptides shown in SEQ ID NO: 178 (SHH signal peptide), SEQ ID NO: 180 (IFN signal peptide), and SEQ ID NO: 182 (CETP signal peptide), using the DNA sequences shown in SEQ ID NO: 179, SEQ ID NO: 181, and SEQ ID NO: 183, respectively. The IgG3 domain of SEQ ID NO: 184 is obtained by expressing the pre-Fc chimeric polypeptides shown in SEQ ID NO: 186 (SHH signal peptide), SEQ ID NO: 188 (IFN signal peptide), and SEQ ID NO: 190 (CETP signal peptide), using the DNA sequences shown in SEQ ID NO: 187, SEQ ID NO: 189, and SEQ ID NO: 191, respectively. The IgG3 domain of SEQ ID NO: 192 is obtained by expressing the pre-Fc chimeric polypeptides shown in SEQ ID NO: 194 (SHH signal peptide), SEQ ID NO: 196 (IFN signal peptide), and SEQ ID NO: 198 (CETP signal peptide), using the DNA sequences shown in SEQ ID NO: 195, SEQ ID NO: 197, and SEQ ID NO: 199, respectively.

[1059] The sequences of human IgG4 Fc domains having the N-terminal sequence CPSCPAPE and CPAPE are shown in SEQ ID NO: 200 and SEQ ID NO: 208, respectively, and the DNA sequences encoding them are shown in SEQ ID NO: 201 and SEQ ID NO: 209, respectively. The IgG4 domain of SEQ ID NO: 200 is obtained by expressing the pre-Fc chimeric polypeptides shown in SEQ ID NO: 202 (SHH signal peptide), SEQ ID NO: 204 (IFN signal peptide), and SEQ ID NO: 206 (CETP signal peptide), using the DNA sequences shown in SEQ ID NO: 203, SEQ ID NO: 205, and SEQ ID NO: 207, respectively. The IgG4 domain of SEQ ID NO: 208 is obtained by expressing the pre-Fc chimeric polypeptides shown in SEQ ID NO: 210 (SHH signal peptide), SEQ ID NO: 212 (IFN signal peptide), and SEQ ID NO: 214 (CETP signal peptide), using the DNA sequences shown in SEQ ID NO: 211, SEQ ID NO: 213, and SEQ ID NO: 215, respectively.

[1060] Suitable antibody variants having at their heavy chain N-terminus a cysteine residue are prepared by recombinant DNA expression of pre-heavy chain chimeric polypeptides comprising 1) a signal peptide, obtained from a secreted or transmembrane protein, that is cleaved in front of a mature polypeptide having an N-terminal cysteine residue, contiguous with 2) a antibody heavy chain polypeptide having an N-terminal cysteine residue.

[1061] Suitable antibody variants having at their light chain N-terminus a cysteine residue are prepared by recombinant DNA expression of pre-light chain chimeric polypeptides comprising 1) a signal peptide, obtained from a secreted or transmembrane protein, that is cleaved in front of a mature polypeptide having an N-terminal cysteine residue, contiguous with 2) a antibody light chain polypeptide having an N-terminal cysteine residue.

[1062] Trastuzumab heavy and light chains are obtained by expressing the pre-heavy and pre-light chimeric polypeptides in cells under conditions leading to their secretion and cleavage of the signal peptide. The pre-heavy chain and pre-light chain polypeptides may be expressed in either prokaryotic or eukaryotic host cells. Preferably, mammalian host cells are transfected with expression vectors encoding the pre-heavy chain and pre-light chain polypeptides.

[1063] Protein sequences added to the N-terminus of the aforementioned antibody heavy chain, pre-heavy chain, light chain, and pre-light chain variants are illustrated herein for the recombinant antibody trastuzumab, but are generally applicable to any recombinant antibody. DNA sequences encoding trastuzumab and its variants may be constructed and expressed in mammalian cells by cotransfecting DNA vectors for its heavy and light chains, and variants derived thereof, as described in U.S. Pat. No. 5,821,337 (“Immunoglobulin Variants”) which is hereby incorporated by reference. The amino acid sequence of the wild-type trastuzumab light and heavy chains are shown in SEQ ID NO: 247 and SEQ ID NO: 248, respectively.

[1064] Suitable examples of trastuzumab light chains with N-terminal cysteine residues and their pre-Fc chimeric polypeptides are shown in SEQ ID NO: 249 through SEQ ID NO: 284. Suitable examples of trastuzumab heavy chains with N-terminal cysteine residues and their pre-Fc chimeric polypeptides are shown in SEQ ID NO: 285 through SEQ ID NO: 320.

[1065] Trastuzumab light chains having the N-terminal sequence C, CP, CPP, CPR, CPS, CDKT, CDKTHT, CVE, and CDTPPP are shown in SEQ ID NO: 249, SEQ ID NO: 253, SEQ ID NO: 257, SEQ ID NO: 261, SEQ ID NO: 265, SEQ ID NO: 269, SEQ ID NO: 273, SEQ ID NO: 277, and SEQ ID NO: 281, respectively. The light chain of SEQ ID NO: 249 is obtained by expressing the pre-light chimeric polypeptides shown in SEQ ID NO: 250 (SHH signal peptide), SEQ ID NO: 251 (IFN signal peptide), and SEQ ID NO: 252 (CETP signal peptide). The light chain of SEQ ID NO: 253 is obtained by expressing the pre-light chain chimeric polypeptides shown in SEQ ID NO: 254 (SHH signal peptide), SEQ ID NO: 255 (IFN signal peptide), and SEQ ID NO: 256 (CETP signal peptide). The light chain of SEQ ID NO: 257 is obtained by expressing the pre-light chimeric polypeptides shown in SEQ ID NO: 258 (SHH signal peptide), SEQ ID NO: 259 (IFN signal peptide), and SEQ ID NO: 260 (CETP signal peptide). The light chain of SEQ ID NO: 261 is obtained by expressing the pre-light chimeric polypeptides shown in SEQ ID NO: 262 (SHH signal peptide), SEQ ID NO: 263 (IFN signal peptide), and SEQ ID NO: 264 (CETP signal peptide). The light chain of SEQ ID NO: 265 is obtained by expressing the pre-heat light chimeric polypeptides shown in SEQ ID NO: 266 (SHH signal peptide), SEQ ID NO: 267 (IFN signal peptide), and SEQ ID NO: 268 (CETP signal peptide). The light chain of SEQ ID NO: 269 is obtained by expressing the pre-light chimeric polypeptides shown in SEQ ID NO: 270 (SHH signal peptide), SEQ ID NO: 271 (IFN signal peptide), and SEQ ID NO: 272 (CETP signal peptide). The light chain of SEQ ID NO: 273 is obtained by expressing the pre-light chimeric polypeptides shown in SEQ ID NO: 274 (SHH signal peptide), SEQ ID NO: 275 (IFN signal peptide), and SEQ ID NO: 276 (CETP signal peptide). The light chain of SEQ ID NO: 277 is obtained by expressing the pre-light chimeric polypeptides shown in SEQ ID NO: 278 (SHH signal peptide), SEQ ID NO: 279 (IFN signal peptide), and SEQ ID NO: 280 (CETP signal peptide). The light chain of SEQ ID NO: 281 is obtained by expressing the pre-light chimeric polypeptides shown in SEQ ID NO: 282 (SHH signal peptide), SEQ ID NO: 283 (IFN signal peptide), and SEQ ID NO: 284 (CETP signal peptide).

[1066] Trastuzumab heavy chains having the N-terminal sequence C, CP, CPP, CPR, CPS, CDKT, CDKTHT, CVE, and CDTPPP are shown in SEQ ID NO: 285, SEQ ID NO: 289, SEQ ID NO: 293, SEQ ID NO: 297, SEQ ID NO: 301, SEQ ID NO: 305, SEQ ID NO: 309, SEQ ID NO: 313, and SEQ ID NO: 317, respectively. The heavy chain of SEQ ID NO: 285 is obtained by expressing the pre-heavy chain chimeric polypeptides shown in SEQ ID NO: 286 (SHH signal peptide), SEQ ID NO: 287 (IFN signal peptide), and SEQ ID NO: 288 (CETP signal peptide). The heavy chain of SEQ ID NO: 289 is obtained by expressing the pre-heavy chain chimeric polypeptides shown in SEQ ID NO: 290 (SHH signal peptide), SEQ ID NO: 291 (IFN signal peptide), and SEQ ID NO: 292 (CETP signal peptide). The heavy chain of SEQ ID NO: 293 is obtained from the pre-heavy chain chimeric polypeptides shown in SEQ ID NO: 294 (SHH signal peptide), SEQ ID NO: 295 (IFN signal peptide), and SEQ ID NO: 296 (CETP signal peptide). The heavy chain of SEQ ID NO: 297 is obtained from the pre-heavy chain chimeric polypeptides shown in SEQ ID NO: 298 (SHH signal peptide), SEQ ID NO: 299 (IFN signal peptide), and SEQ ID NO: 300 (CETP signal peptide). The heavy chain of SEQ ID NO: 301 is obtained by expressing the pre-heavy chain chimeric polypeptides shown in SEQ ID NO: 302 (SHH signal peptide), SEQ ID NO: 303 (IFN signal peptide), and SEQ ID NO: 304 (CETP signal peptide). The heavy chain of SEQ ID NO: 305 is obtained by expressing the pre-heavy chain chimeric polypeptides shown in SEQ ID NO: 306 (SHH signal peptide), SEQ ID NO: 307 (IFN signal peptide), and SEQ ID NO: 308 (CETP signal peptide). The heavy chain of SEQ ID NO: 309 is obtained from the pre-heavy chain chimeric polypeptides shown in SEQ ID NO: 310 (SHH signal peptide), SEQ ID NO: 311 (IFN signal peptide), and SEQ ID NO: 312 (CETP signal peptide). The heavy chain of SEQ ID NO: 313 is obtained from the pre-heavy chain chimeric polypeptides shown in SEQ ID NO: 314 (SHH signal peptide), SEQ ID NO: 315 (IFN signal peptide), and SEQ ID NO: 316 (CETP signal peptide). The heavy chain of SEQ ID NO: 317 is obtained from the pre-heavy chain chimeric polypeptides shown in SEQ ID NO: 318 (SHH signal peptide), SEQ ID NO: 319 (IFN signal peptide), and SEQ ID NO: 320 (CETP signal peptide).

[1067] Suitable host cells include 293 human embryonic cells (ATCC CRL-1573) and CHO-K1 hamster ovary cells (ATCC CCL-61) obtained from the American Type Culture Collection (Rockville, Md.). Cells are grown at 37OC. in an atmosphere of air, 95%; carbon dioxide, 5%. 293 cells are maintained in Minimal essential medium (Eagle) with 2 mM L-glutamine and Earle's BSS adjusted to contain 1.5 g/L sodium bicarbonate, 0.1 mM non-essential amino acids, and 1.0 mM sodium pyruvate, 90%; fetal bovine serum, 10%. CHO-K1 cells are maintained in Ham's F12K medium with 2 mM L-glutamine adjusted to contain 1.5 g/L sodium bicarbonate, 90%; fetal bovine serum, 10%. Other suitable host cells include CV1 monkey kidney cells (ATCC CCL-70), COS-7 monkey kidney cells (ATCC CRL-1651), VERO-76 monkey kidney cells (ATCC CRL-1587), HELA human cervical cells (ATCC CCL-2), W138 human lung cells (ATCC CCL-75), MDCK canine kidney cells (ATCC CCL-34), BRL3A rat liver cells (ATCC CRL-1442), BHK hamster kidney cells (ATCC CCL-10), MMT060562 mouse mammary cells (ATCC CCL-51), and human CD8⁺ T lymphocytes (described in U.S. Ser. No. 08/258,152 incorporated herein in its entirety by reference).

[1068] Examples of a suitable expression vectors are pCDNA3.1(+) shown in SEQ ID NO: 216 and pSA shown in SEQ ID NO: 217. Plasmid pSA contains the following DNA sequence elements: 1) pBluescriptIIKS(+) (nucleotides 912-2941/1-619, GenBank Accession No. X52327), 2) a human cytomegalovirus promoter, enhancer, and first exon splice donor (nucleotides 63-912, GenBank Accession No. K03104), 3) a human alpha1-globin second exon splice acceptor (nucleotides 6808-6919, GenBank Accession No. J00153), 4) an SV40 T antigen polyadenylation site (nucleotides 2770-2533, Reddy et al. (1978) Science 200, 494-502), and 5) an SV40 origin of replication (nucleotides 5725-5578, Reddy et al., ibid). Other suitable expression vectors include plasmids pSVeCD4DHFR and pRKCD4 (U.S. Pat. No. 5,336,603), plasmid pIK.1.1 (U.S. Pat. No. 5,359,046), plasmid pVL-2 (U.S. Pat. No. 5,838,464), plasmid pRT43.2F3 (described in U.S. Ser. No. 08/258,152 incorporated herein in its entirety by reference).

[1069] Suitable expression vectors for human IgG pre-Fc polypeptides may be constructed by the ligation of a HindIII-PspOM1 vector fragment prepared from SEQ ID NO: 217, with a HindIII-EagI insert fragment prepared from SEQ ID NOs: 123, 125, 127, 131, 133, 135, 139, 141, 143, 147, 149, 151, 155, 157, 159, 163, 165, 167, 171, 173, 175, 179, 181, 183, 187, 189, 191, 195, 197, 199, 203, 205, 207, 211, 213, and 215.

[1070] Suitable selectable markers include the Tn5 transposon neomycin phosphotransferase (NEO) gene (Southern and Berg (1982) J. Mol. Appl. Gen. 1, 327-341), and the dihydrofolate reductase (DHFR) cDNA (Lucas et al. (1996) Nucl. Acids Res. 24, 1774-1779). One example of a suitable expression vector that incorporates a NEO gene is plasmid pSA-NEO, which is constructed by ligating a first DNA fragment, prepared by digesting SEQ ID NO: 218 with EcoRI and BglII, with a second DNA fragment, prepared by digesting SEQ ID NO: 217 with EcoRI and BglII. SEQ ID NO: 218 incorporates a NEO gene (nucleotides 1551 to 2345, Genbank Accession No. U00004) preceded by a sequence for translational initiation (Kozak (1991) J. Biol. Chem, 266, 19867-19870). Another example of a suitable expression vector that incorporates a NEO gene and a DHFR cDNA is plasmid pSVe-NEO-DHFR, which is constructed by ligating a first DNA fragment, prepared by digesting SEQ ID NO: 218 with EcoRI and BglII, with a second DNA fragment, prepared by digesting pSVeCD4DHFR with EcoRI and BglII. Plasmid pSVe-NEO-DHFR uses SV40 early promoter/enhancers to drive expression of the NEO gene and the DHFR cDNA. Other suitable selectable markers include the XPGT gene (Mulligan and Berg (1980) Science 209, 1422-1427) and the hygromycin resistance gene (Sugden et al. (1985) Mol. Cell. Biol. 5, 410-413).

[1071] In one embodiment, cells are transfected by the calcium phosphate method of Graham et al. (1977) J. Gen. Virol. 36, 59-74. A DNA mixture (10 ug) is dissolved in 0.5 ml of 1 mM Tris-HCl, 0.1 mM EDTA, and 227 mM CaCl2. The DNA mixture contains (in a ratio of 10:1:1) the expression vector DNA, the selectable marker DNA, and a DNA encoding the VA RNA gene (Thimmappaya et al. (1982) Cell 31, 543-551). To this mixture is added, dropwise, 0.5 mL of 50 mM Hepes (pH 7.35), 280 mM NaCl, and 1.5 mM NaPO4. The DNA precipitate is allowed to form for 10 minutes at 25° C., then suspended and added to cells grown to confluence on 100 mm plastic tissue culture dishes. After 4 hours at 37° C., the culture medium is aspirated and 2 ml of 20% glycerol in PBS is added for 0.5 minutes. The cells are then washed with serum-free medium, fresh culture medium is added, and the cells are incubated for 5 days.

[1072] In another embodiment, cells are transiently transfected by the dextran sulfate method of Somparyrac et al. (1981) Proc. Nat. Acad. Sci. 12, 7575-7579. Cells are grown to maximal density in spinner flasks, concentrated by centrifugation, and washed with PBS. The DNA-dextran precipitate is incubated on the cell pellet. After 4 hours at 37° C., the DEAE-dextran is aspirated and 20% glycerol in PBS is added for 1.5 minutes. The cells are then washed with serum-free medium, re-introduced into spinner flasks containing fresh culture medium with 5 micrograms/ml bovine insulin and 0.1 micrograms/ml bovine transferring, and incubated for 4 days.

[1073] Following transfection by either method, the conditioned media is centrifuged and filtered to remove the host cells and debris. The sample contained the Fc domain is then concentrated and purified by any selected method, such as dialysis and/or column chromatography (see below). To identify the Fc domain in the cell culture supernatant, the culture medium is removed 24 to 96 hours after transfection, concentrated, and analyzed by SDS-polyacrylamide gel electrophoresis (SD S-PAGE) in the presence or absence of a reducing agent such as dithiothreitol.

[1074] For unamplified expression, plasmids are transfected into human 293 cells (Graham et al., J. Gen. Virol. 36:59 74 (1977)), using a high efficiency procedure (Gorman et al., DNA Prot. Eng. Tech. 2:3 10 (1990)). Media is changed to serum-free and harvested daily for up to five days. For unamplified expression, plasmids are transfected into human 293 cells (Graham et al., J. Gen. Virol. 36:59 74 (1977)), using a high efficiency procedure (Gorman et al., DNA Prot. Eng. Tech. 2:3 10 (1990)). Media is changed to serum-free and harvested daily for up to five days. The Fc domains are purified from the cell culture supernatant using HiTrap Protein A HP (Pharmacia). The eluted Fc domains are buffer-exchanged into PBS using a Centricon-30 (Amicon), concentrated to 0.5 ml, sterile filtered using a Millex-GV (Millipore) at 4° C.

Fc Domain Modifications Altering Fc Receptor Binding and/or Effector Function

[1075] In certain embodiments, the Fc domain is engineered to have altered binding affinity to an Fc receptor and/or altered effector function, as compared to a non-engineered Fc domain. Embodiments of said modifications are described in U.S. Patent Application Publication No. US 20130058937 A1 and in the paragraphs that follow.

[1076] Binding to Fc receptors can be easily determined e.g. by ELISA, or by Surface Plasmon Resonance (SPR) using standard instrumentation such as a BIAcore instrument (GE Healthcare), and Fc receptors such as may be obtained by recombinant expression. A suitable such binding assay is described herein. Alternatively, binding affinity of Fc domains or tetrahedral antibodies comprising an Fc domain for Fc receptors may be evaluated using cell lines known to express particular Fc receptors, such as NK cells expressing FcγIIIa receptor.

[1077] Effector function of an Fc domain, can be measured by methods known in the art. Suitable in vitro assays to assess ADCC activity of a molecule of interest are described in PCT publication no. WO 2006/082515 or PCT patent application no. PCT/EP2012/055393, incorporated herein by reference in their entirety. Useful effector cells for such assays include peripheral blood mononuclear cells (PBMC) and Natural Killer (NK) cells. Alternatively, or additionally, ADCC activity of the molecule of interest may be assessed in vivo, e.g. in a animal model such as that disclosed in Clynes et al., Proc Natl Acad Sci USA 95, 652-656 (1998).

[1078] In some embodiments binding of the Fc domain to a complement component, specifically to C1q, is altered. Accordingly, in some embodiments wherein the Fc domain is engineered to have altered effector function, said altered effector function includes altered CDC. C1q binding assays may be carried out to determine whether the Fc domain is able to bind C1q and hence has CDC activity. See e.g., C1q and C3c binding ELISA in WO 2006/029879 and WO 2005/100402. To assess complement activation, a CDC assay may be performed (see, for example, Gazzano-Santoro et al., J Immunol Methods 202, 163 (1996); Cragg et al., Blood 101, 1045-1052 (2003); and Cragg and Glennie, Blood 103, 2738-2743 (2004))

### Fc Variants

[1079] The present invention is directed to the generation of multispecific, particularly bispecific binding proteins, and in particular, multispecific antibodies. The present invention generally relies on the use of engineered or variant Fc domains that can self-assemble in production cells to produce heterodimeric proteins, and methods to generate and purify such heterodimeric proteins.

[1080] Furthermore, as outlined herein, additional amino acid variants may be introduced into the Fc domains of the invention, to add additional functionalities. For example, amino acid changes within the Fc region can be added (either to one monomer or both) to facilitate increased ADCC or CDC (e.g. altered binding to Fcγ receptors); to allow or increase yield of the addition of toxins and drugs (e.g. for ADC), as well as to increase binding to FcRn and/or increase serum half-life of the resulting molecules. As is further described herein and as will be appreciated by those in the art, any and all of the variants outlined herein can be optionally and independently combined with other variants. Similarly, another category of functional variants are “Fcγ ablation variants” or “Fcγ silencing variants”. In these embodiments, for some therapeutic applications, it is desirable to reduce or remove the normal binding of the Fc domain to one or more or all of the Fcγ receptors (e.g. FcγRI, FcγRIIa, FcγRIIb, FcγRIIIa, etc.) to avoid additional mechanisms of action. That is, for example, in many embodiments, particularly in the use of bispecific antibodies that bind CD3 monovalently and a tumor antigen on the other (e.g. CD19, her2/neu, etc.), it is generally desirable to ablate FcγRIIIa binding to eliminate or significantly reduce ADCC activity.

### Additional Fc Variants for Additional Functionality

[1081] Accordingly, there are a number of useful Fc substitutions that can be made to alter binding to one or more of the FcγR receptors. Substitutions that result in increased binding as well as decreased binding can be useful. For example, it is known that increased binding to FcγRIIIa generally results in increased ADCC (antibody dependent cell-mediated cytotoxicity; the cell-mediated reaction wherein nonspecific cytotoxic cells that express FcγRs recognize bound antibody on a target cell and subsequently cause lysis of the target cell). Similarly, decreased binding to FcγRIIb (an inhibitory receptor) can be beneficial as well in some circumstances. Amino acid substitutions that find use in the present invention include those listed in U.S. Ser. No. 11/124,620 (particularly FIG. 41), Ser. Nos. 11/174,287, 11/396,495, 11/538,406, all of which are expressly incorporated herein by reference in their entirety and specifically for the variants disclosed therein. Particular variants that find use include, but are not limited to, Kabat positions 236A, 239D, 239E, 332E, 332D, 239D/332E, 267D, 267E, 328F, 267E/328F, 236A/332E, 239D/332E/330Y, 239D, 332E/330L, 243A, 243L, 264A, 264V and 299T.

[1082] In addition, there are additional Fc substitutions that find use in increased binding to the FcRn receptor and increased serum half-life, as specifically disclosed in U.S. Ser. No. 12/341,769, hereby incorporated by reference in its entirety, including, but not limited to, 434S, 434A, 428L, 308F, 259I, 428L/434S, 259I/308F, 436I/428L, 436I or V/4345, 436V/428L and 259I/308F/428L.

### Antigen Binding Domains

[1083] As will be appreciated by a skilled artisan, there are two basic types of antigen binding domains, those that resemble antibody and T cell antigen binding domains (e.g. comprising a set of six CDRs, or in the case of single domain antibodies, single domain T cell receptors and the like, three CDRs) and those that can be otherwise be “ligand binding partners” (i.e. ligands or receptors, enzymes or substrates, or their equivalents), for example, that bind to targets without the use of CDRs.

### Fab Domains

[1084] A challenge in the production of multispecific antibodies is formation of various undesired side products apart from the desired functional molecule. When two or more distinct Fab domains are present, mispairing generally results from the pairing of wrong heavy chains with each other as well as pairing of a light chain with a wrong heavy chain counterpart or undesired pairing of light chains. The light chain mispairing problem is particularly challenging, and to date, no single approach by itself has proven consistent in preventing improper association of light chains with heavy chains and/or the formation of other side-products.

[1085] One approach that has been useful in forcing the pairing of a light chain polypeptide with its correct heavy chain counterpart utilizes chimeric heavy and light chains. Originally described as “variable region domain exchanged IgG”, or “inside-out (io) antibodies”, this approach is based upon intradomain crossovers between heavy and light chains involving the exchange of the heavy and light variable regions within a particular Fab domain (Chan et al, Molecular Immunology 421, 527-538 (2004)).

[1086] This approach, also known as “CrossMab technology”, has been used to make distinct domain crossovers between heavy and light chains thereby creating different domain arrangements for heavy chains and light chains of different specificity. WO 2009/080251, WO 2009/080252, WO 2009/080253, WO 2009/080254 relate to bivalent, bispecific IgG antibodies with such domain crossovers. WO 2010/145792 and WO 2010/145792 relate to tetravalent antigen binding proteins with such domain crossovers. Multispecific antibodies with such a domain exchange in one binding arm (CrossMabVH-VL) are described in WO2009/080252 and Schaefer et al, PNAS, 108 (2011) 11187-1191. (All of the aforementioned citations are incorporated herein by reference in their entirety).

[1087] Variable region domain exchanges generally reduce but do not eliminate the byproducts due to the mismatch of a light chain against a first antigen with the wrong heavy chain against the second antigen. Moreover, the preparations are not completely free of other side products. The main side product is based on a Bence-Jones-type interaction (see also Schaefer, W. et al, PNAS, 108 (2011) 11187-1191; in FIG. S1I of the Supplement).

[1088] Further reduction of side products and the associated aggregation behavior to improve the yield of such multispecific antibodies has been aided by the introduction of substitutions of charged amino acids with the opposite charge at specific amino acid positions in the VH and CL domains, as well as the CH1 and CL domains. The resulting “charge pair” modifications mediate electrostatic steering effects are complementary to the effect of variable region domain exchanges in helping to force the correct pairing of a light chain with its correct heavy chain.

[1089] Amino acid substitutions that find use in the present invention as constituents of such charge pairs include those described in Kannan et al (WO2014/081955), Shaefer et al (WO2015/150447), Ast et al (WO/2016/020309, and Carter et al (WO2016/172485), hereby incorporated by reference in their entirety. Preferred variants that find use include, but are not limited to, EU positions E123, Q124 and V133 in kappa and lambda light chain constant regions, K147, S183 and K213 in heavy chain constant regions, Q38 in light chain variable regions, and Q39 in the heavy chain variable regions. Specific examples of amino acid substitutions include, but are not limited to, substitution at position 123 or 124 in light chain constant regions by K, R or H, at position 147 or 213 in heavy chain constant regions by E or D, substitution at position 133 in light chain constant regions by K, R, H, E or D, substitution at position 183 in heavy chain constant regions by K, R, H, E or D, at position 38 in light chain variable regions by K, R, H, E or D, and at position 39 in heavy chain variable regions by K, R, H, E or D.

[1090] This invention provides tetrahedral antibodies comprising two types of heavy chains and two types of light chains. In such antibodies, the third and fourth domains may comprise one or more charge pairs, while the fifth and sixth domains are a “CrossMab.” Conversely, the third and fourth domains may be a “CrossMab,” while the fifth and sixth domains comprise one or more charge pairs. Further, the third and fourth domains may be a “CrossMab” and comprise one or more charge pairs, while the fifth and sixth domains comprise neither such modifications. Conversely, the fifth and sixth domains may be a “CrossMab” and comprise one or more charge pairs, while the third and fourth domains comprise neither such modifications. In each case, such modifications facilitate correct pairing between the two types of heavy chains with their corresponding light chains. Such tetrahedral antibodies may be bispecific and tetravalent.

[1091] Similarly, this invention provides octahedral antibodies comprising two types of heavy chains and two types of light chains. In such antibodies, the fourth, fifth, and sixth domains may comprise one or more charge pairs, while the seventh, eighth, and ninth domains are a “CrossMab.” Conversely, the fourth, fifth, and sixth domains may be a “CrossMab,” while the seventh, eighth, and ninth comprise one or more charge pairs. Further, the fourth, fifth, and sixth domains may be a “CrossMab” and comprise one or more charge pairs, while the seventh, eighth, and ninth domains comprise neither such modifications. Conversely, the seventh, eighth, and ninth domains may be a “CrossMab” and comprise one or more charge pairs, while the fourth, fifth, and sixth domains comprise neither such modifications. In each case, such modifications facilitate correct pairing between the two types of heavy chains with their corresponding light chains. Such antibodies may be bispecific and octavalent.

[1092] SEQ ID NOs: 5105-7764 provide the sequences of the V region and CDRs of antibodies which may be used in the present invention. Accordingly, the Fab domains of the invention may comprise any of the V regions and/or CDRs provided in SEQ ID NOs 5105-7764.

[1093] In any of the tetrahedral antibodies of the invention wherein the first domain is an Fc domain, and the second, third, and fourth domains are Fab domain, in an embodiment:
[1094] a) the third and fourth domains comprise a first type of Fab and the second domain comprise a second type of Fab,
   [1095] i) the first type of Fab is formed by a VH-CH on a H1 or H2 chain, and a VL-CL on a L1 chain, and the second type of Fab is formed by a VL-CH on a H1 chain, and a VH-CL domain on a L2 chain;
   [1096] ii) the first type of Fab is formed by a VL-CH on a H1 or H2 chain, and a VH-CL on a L1 chain, and the second type of Fab is formed by a VH-CH on a H2 chain, and a VL-CL domain on a L2 chain, or
   [1097] iii) the first type of Fab is formed by a VH-CH on a H1 or H2 chain, and VL-CL on a L1 chain, and the second type of Fab is formed by a VH-CH on a H2 chain, and a VL-CL domain on a L2 chain,
[1098] wherein VL is a kappa and/or lambda light chain V region.

[1099] In any of the tetrahedral antibodies of the invention wherein the third, fourth, fifth, and sixth domains are Fab domains, in an embodiment:
[1100] a) the third and fourth domain comprise a first type of Fab, and the fifth and/or sixth domain comprise a second type of Fab, and
   [1101] i) the first type of Fab is formed by a VH-CH on a H1 chain, and a VL-CL domain on a L1 chain, and the second type of Fab is formed by a VL-CH on a H2 chain, and a VH-CL on a L2 chain;
   [1102] ii) the first type of Fab is formed by a VL-CH on a H1 chain, and a VH-CL domain on a L1 chain, and the second type of Fab is formed by a VH-CH on a H2 chain, and a VL-CL on a L2 chain; or
   [1103] iii) the first type of Fab is formed by a VH-CH on a H1 chain, and a VL-CL domain on a L1 chain, and the second type of Fab is formed by a VH-CH on a H2 chain, and a VL-CL on a L2 chain,
[1104] wherein VL is a kappa and/or lambda light chain V region.

[1105] In any tetrahedral antibodies of the invention:
[1106] a) one type of Fab comprises the mutations Q39K and S183E in its heavy chain portion, and the mutations Q38E and V133K in its light chain portion, and the other type of Fab comprises the mutations S183K and Q38E in its heavy chain portion, and the mutations V133E and Q39K in its light chain portion;
[1107] b) one type of Fab comprises the mutations Q39K and S183E in its heavy chain portion, and the mutations Q38E and V133K in its light chain portion, and the other type of Fab comprises the mutations S183K and Q38K in its heavy chain portion, and the mutations V133E and Q39E in its light chain portion;
[1108] c) one type of Fab comprises the mutations Q39E and S183E in its heavy chain portion, and the mutations Q38E and V133K in its light chain portion, and the other type of Fab comprises the mutations S183K and Q38E in its heavy chain portion, and the mutations V133E and Q39K in its light chain portion;
[1109] d) one type of Fab comprises the mutations Q39E and S183E in its heavy chain portion, and the mutations Q38K and V133K in its light chain portion, and the other type of Fab comprises the mutations S183K and Q38K in its heavy chain portion, and the mutations S176E and Q39E in its light chain portion;
[1110] e) one type of Fab comprises the mutations Q39K and S183E in its heavy chain portion, and the mutations Q38E and S176K in its light chain portion, and the other type of Fab comprises the mutations S183K and Q38E in its heavy chain portion, and the mutations S176E and Q39K in its light chain portion;
[1111] f) one type of Fab comprises the mutations Q39K and S183E in its heavy chain portion, and the mutations Q38E and S176K in its light chain portion, and the other type of Fab comprises the mutations S183K and Q38K in its heavy chain portion, and the mutations S176E and Q39E in its light chain portion;
[1112] g) one type of Fab comprises the mutations Q39E and S183E in its heavy chain portion, and the mutations Q38E and S176K in its light chain portion, and the other type of Fab comprises the mutations S183K and Q38E in its heavy chain portion, and the mutations S176E and Q39K in its light chain portion; or
[1113] h) one type of Fab comprises the mutations Q39E and S183E in its heavy chain portion, and the mutations Q38K and S176K in its light chain portion, and the other type of Fab comprises the mutations S183K and Q38K in its heavy chain portion, and the mutations S176E and Q39E in its light chain portion.

### Extracellular Proteins

[1114] Extracellular proteins play important roles in, among other things, the formation, differentiation and maintenance of multicellular organisms. A discussion of various intracellular proteins of interest is set forth in U.S. Pat. No. 6,723,535, Ashkenazi et al., issued Apr. 20, 2004, hereby incorporated by reference. Extracellular proteins include secreted proteins and the extracellular domains of transmembrane proteins.

### Secreted Proteins

[1115] The fate of many individual cells, e.g., proliferation, migration, differentiation, or interaction with other cells, is typically governed by information received from other cells and/or the immediate environment. This information is often transmitted by secreted polypeptides (for instance, mitogenic factors, survival factors, cytotoxic factors, differentiation factors, neuropeptides, and hormones) which are, in turn, received and interpreted by diverse cell receptors or membrane-bound proteins. These secreted polypeptides or signaling molecules normally pass through the cellular secretory pathway to reach their site of action in the extracellular environment.

[1116] Secreted proteins have various industrial applications, including as pharmaceuticals, diagnostics, biosensors and bioreactors. Most protein drugs available at present, such as thrombolytic agents, interferons, interleukins, erythropoietins, colony stimulating factors, and various other cytokines, are secretory proteins. Their receptors, which are membrane proteins, also have potential as therapeutic or diagnostic agents. Efforts are being undertaken by both industry and academia to identify new, native secreted proteins. Many efforts are focused on the screening of mammalian recombinant DNA libraries to identify the coding sequences for novel secreted proteins. Examples of screening methods and techniques are described in the literature (see, for example, Klein et al., Proc. Natl. Acad. Sci. 93:7108-7113 (1996); U.S. Pat. No. 5,536,637)).

[1117] Interleukin-15 (IL-15) is a member of the gamma cytokine family that stimulates the proliferation of T, B, and natural killer (NK) cells and induces stem, central and effector memory CD8 T cells. The sequence of IL-15 is described in Grabstein et al., Science. 1994 May 13; 264(5161):965-8. The biology of IL-15 and its therapeutic implications are discussed, for example, in Steel et al. Trends Pharmacol Sci. 2012 January; 33(1): 35-41, Perera et al. Microbes Infect. 2012 March; 14(3): 247-261, and Waldmann et al. Nature Reviews Immunology volume 6, pages 595-601(2006).

### Extracellular Domains of Transmembrane Proteins

[1118] Membrane-bound proteins and receptors can play important roles in, among other things, the formation, differentiation, and maintenance of multicellular organisms. The fate of many individual cells, e.g., proliferation, migration, differentiation, or interaction with other cells, is typically governed by information received from other cells and/or the immediate environment. This information is often transmitted by secreted polypeptides (for instance, mitogenic factors, survival factors, cytotoxic factors, differentiation factors, neuropeptides, and hormones) which are, in turn, received and interpreted by diverse cell receptors or membrane-bound proteins. Such membrane-bound proteins and cell receptors include, but are not limited to, cytokine receptors, receptor kinases, receptor phosphatases, receptors involved in cell-cell interactions, and cellular adhesin molecules like selectins and integrins. For instance, transduction of signals that regulate cell growth and differentiation is regulated in part by phosphorylation of various cellular proteins. Protein tyrosine kinases, enzymes that catalyze that process, can also act as growth factor receptors. Examples include fibroblast growth factor receptor and nerve growth factor receptor.

[1119] Membrane-bound proteins and receptor molecules have various industrial applications, including as pharmaceutical and diagnostic agents. Receptor immunoadhesins, for instance, can be employed as therapeutic agents to block receptor-ligand interactions. The membrane-bound proteins can also be employed for screening of potential peptide or small molecule inhibitors of the relevant receptor/ligand interaction.

[1120] The tumor necrosis factor receptor superfamily (TNFRSF) is a protein superfamily of cytokine receptors characterized by the ability to bind tumor necrosis factors (TNFs) via an extracellular cysteine-rich domain. Members of the TNFRSF are described in Locksley et al., Cell. 2001 Feb. 23; 104(4):487-501 and the table reproduced below. See also Hehlgans et al., Immunology. 2005 May; 115(1): 1-20.

TABLE B-1
Members of the TNFR Superfamily

| | | | | Human | Mouse |
|---|---|---|---|---|---|
| Receptor | Standardized | Other Names | Accession | Chromosome | Chromosome |
| NGFR | TNFRSF16 | p75 | M14764 | 17q21-q22 | 11, 55.6 cM |
| Troy | TNFRSF19 | Taj | AF167555 | 13q12.11-12.3 | 14 |
| EDAR | | | AF130988 | 2q11-q13 | 10, 29.0 cM |
| XEDAR | | EDA-A2R | | AF298812 | X |
| CD40 | TNFRSF5 | p50, Bp50 | X60592 | 20q12-q13.2 | 2, 97.0 cM |
| DcR3 | TNFRSF6B | | AF104419 | 20q13 | |
| FAS | TNFRSF6 | CD95, APO-1, | M67454 | 10q24.1 | 19, 23.0 cM |
| | | APT1 | | | |
| OX40 | TNFRSF4 | CD134, ACT35, | X75962 | 1p36 | 4, 79.4 cM |
| | | TXGP1L | | | |
| AITR | TNFRSF18 | GITR | AF125304 | 1p36.3 | 4 |
| CD30 | TNFRSF8 | Ki-1, D1S166E | M83554 | 1p36 | 4, 75.5 cM |
| HveA | TNFRSF14 | HVEM, ATAR, | U70321 | Ip36.3-p36.2 | |
| | | TR2, LIGHTR | | | |
| 4-1BB | TNFRSF9 | CD137, ILA | L12964 | 1p36 | 4, 75.5 cM |
| TNFR2 | TNFRSF1B | CD120b, p75, | M32315 | Ip36.3-p36.2 | 4, 75.5 cM |
| | | TNFBR, | | | |
| | | TNFR80, TNF- | | | |
| | | R-II | | | |
| DR3 | TNFRSF12 | TRAMP, WSL- | U72763 | 1p36.2 | |
| | | 1, LARD, WSL- | | | |
| | | LR, DDR3, | | | |
| | | TR3, APO-3 | | | |
| CD27 | TNFRSF7 | Tp55, S152 | M63928 | 12p13 | 6, 60.35 cM |
| TNFR1 | TNFRSF1A | CD 120a p55-R, | M75866 | 12p13.2 | 6, 60.55 cM |
| | | TNFAR | | | |
| | | TNFR60 TNF- | | | |
| | | R-I | | | |
| LTβR | TNFRSF3 | TNFR2-RP, | L04270 | 12p13 | 6, 60.4 cM |
| | | TNFCR, TNF- | | | |
| | | R-III | | | |
| RANK | TNFRSF11A | TRANCE-R | AF018253 | 18q22.1 | |
| TACI | | CAML | | AF023614 | 17p11 |
| | | interactor | | | |
| BCMA | TNFRSF17 | BCM | Z29574 | 16p13.1 | |
| DR6 | | TR7 | NM_014452 | 6p21.1-12.2 | |
| OPG | TNFRSF11B | OCIF, TR1 | U94332 | 8Q24 | |
| | | osteoprotegerin | | | |
| DR4 | TNFRSF10A | Apo2, TRAILR- | U90875 | 8p21 | |
| | | 1 | | | |
| DR5 | TNFRSF10B | KILLER, | AF012628 | 8p22-p21 | |
| | | TRICK2A, | | | |
| | | TRAIL-R2, | | | |
| | | TRICKB | | | |
| DcR1 | TNFRSF10C | TRAILR3, LIT, | AF012536 | 8p22-p21 | |
| | | TRID | | | |
| DcR2 | TNFRSF10D | TRUNDD | AF029761 | 8p21 | |
| | | TRAILR4 | | | |

[1121] The immunoglobulin superfamily (IgSF) is a large protein superfamily of cell surface and soluble proteins that are involved in the recognition, binding, or adhesion processes of cells. The IgSF is discussed in Natarajan et al. (April 2015) Immunoglobulin Superfamily. In: eLS. John Wiley & Sons, Ltd: Chichester.

[1122] Angiotensin-converting enzyme 2 (ACE2) is an enzyme attached to the cell membranes of cells in the lungs, arteries, heart, kidney, and intestines. ACE2 is discussed in Donoghue, et al., 2000. Circulation research, 87(5), pp. e1-e9.

[1123] Extracellular proteins of the invention are provided in SEQ ID NOs: 847-890 and 935-2038. SEQ ID NOs: 891-934 and 2039-3142 provide the sequences of extracellular domains that also include the sequence of the signal peptide (SP) and pre-protein (PP) sequence.

### Covalent Linkages

[1124] Covalent linkages of the invention may comprise, or consist of, any “non-peptidyl linkage” described in U.S. Patent Application Publication No. US 20170008950 A1, published Jan. 12, 2017, the contents of which are hereby incorporated-by-reference.

### Peptide Linkers

[1125] Peptide linkers are stretches of consecutive amino acids which link two domains.

[1126] In one embodiment, the peptide linker has a length of at least 5 amino acids. In one embodiment, the peptide linker has a length of 5-100 amino acids.

[1127] In one embodiment, the peptide linker has a length of 10-50 amino acids.

[1128] In one embodiment, peptide linkers have a length of 23 amino acids. In one embodiment, the peptide linker connecting domain 1 and a dimerizing polypeptide and the peptide linker connecting domains 2 and a dimerizing polypeptide each have a length of 23 amino acids. In one embodiment, such peptide linkers each have a length of 23 amino acids and are derived from the stalk region of a TNF receptor, preferably wherein the TNF receptor is TNF receptor 1B, still more preferably wherein the peptide linker consists of the amino acid sequence set forth in SEQ ID NO: 4468.

[1129] In one embodiment, the peptide linker is a stretch of consecutive amino acids found in an immunoglobulin hinge region or portion thereof.

[1130] In one embodiment, the peptide linker is a stretch of 5 to 57 consecutive amino acids found in the sequence:

(SEQ ID NO: 3227)
TSTSPTRSMAPGAVHLPQPVSTRSQHTQPTPEPSTAPSTSFLLPMGPSP
PAEGSTGD

[1131] In one embodiment, the peptide linker is a glycine-serine or glycine-alanine linker.

[1132] In one embodiment, the peptide linker is
[1133] a) (GxS)n or (GxS)nGm or (GxA)n or (GxA)nGm
[1134] b) with G=glycine, S=serine, A=alanine, and
[1135] c) x=3, n=2, 3, 4, 5 or 6, m=0, 1, 2 or 3; or
[1136] d) x=4, n=1, 2, 3, 4 or 5, m=0, 1, 2 or 3.

[1137] Exemplary linkers of the invention are provided in SEQ ID NOs: 3143-4656.

Intra-Homodimerization and Intra-Heterodimerization within Domains

### Fc Domain Modifications Promoting Heterodimerization

[1138] The invention provides tetrahedral antibodies, wherein the first and second domains each comprise two polypeptide chains, such that there are two N-termini and two C-termini upon which additional domains may be attached either directly by a peptide bond or via a peptide linker). Similarly, the invention provides octahedral antibodies, wherein the first, second and third domains each comprise two polypeptide chains, such that there are two are two N-termini and two C-termini upon which additional domains may be attached either directly by a peptide bond or via a peptide linker). Other domains of the invention (such as the third, fourth, fifth, sixth, seventh, and eighth domains of a tetrahedral antibody, and the fourth, fifth, sixth, seventh, eighth, ninth, tenth, eleventh, and twelfth domains of an octahedral antibody) may also comprise two polypeptide chains.

[1139] In particular embodiments, such domains are Fc domains comprising a modification promoting association of two different Fc domain subunits, i.e. intra-heterodimerization. A modification may be present in the first Fc domain subunit and/or the second Fc domain subunit. Embodiments of said modifications are described in U.S. Patent Application Publication No. US 20130058937 A1 and in the paragraphs that follow.

[1140] The site of most extensive protein-protein interaction between the two subunits of a human IgG Fc domain is in the CH3 domain of the Fc domain. Thus, in one embodiment said modification is in the CH3 domain of the Fc domain.

[1141] In a specific embodiment said modification is a so-called “knob-into-hole” modification, comprising a “knob” modification in one of the two subunits of the Fc domain and a “hole” modification in the other one of the two subunits of the Fc domain.

[1142] The knob-into-hole technology is described e.g. in U.S. Pat. Nos. 5,731,168; 7,695,936; Ridgway et al., Prot Eng 9, 617-621 (1996) and Carter, J Immunol Meth 248, 7-15 (2001). Generally, the method involves introducing a protuberance (“knob”) at the interface of a first polypeptide and a corresponding cavity (“hole”) in the interface of a second polypeptide, such that the protuberance can be positioned in the cavity so as to promote heterodimer formation and hinder homodimer formation. Protuberances are constructed by replacing small amino acid side chains from the interface of the first polypeptide with larger side chains (e.g. tyrosine or tryptophan). Compensatory cavities of identical or similar size to the protuberances are created in the interface of the second polypeptide by replacing large amino acid side chains with smaller ones (e.g. alanine or threonine).

[1143] Accordingly, in a particular embodiment, in the CH3 domain of the first Fc domain subunit of an Fc domain an amino acid residue is replaced with an amino acid residue having a larger side chain volume, thereby generating a protuberance within the CH3 domain of the first subunit which is positionable in a cavity within the CH3 domain of the second subunit, and in the CH3 domain of the second Fc domain subunit an amino acid residue is replaced with an amino acid residue having a smaller side chain volume, thereby generating a cavity within the CH3 domain of the second subunit within which the protuberance within the CH3 domain of the first subunit is positionable.

[1144] The protuberance and cavity can be made by altering the nucleic acid encoding the polypeptides, e.g. by site-specific mutagenesis, or by peptide synthesis.

[1145] In a specific embodiment, in the CH3 domain of the first subunit of the Fc domain the threonine residue at position 366 is replaced with a tryptophan residue (T366W), and in the CH3 domain of the second subunit of the Fc domain the tyrosine residue at position 407 is replaced with a valine residue (Y407V). In one embodiment, in the second subunit of the Fc domain additionally the threonine residue at position 366 is replaced with a serine residue (T366S) and the leucine residue at position 368 is replaced with an alanine residue (L368A). In yet a further embodiment, in the first subunit of the Fc domain additionally the serine residue at position 354 is replaced with a cysteine residue (S354C), and in the second subunit of the Fc domain additionally the tyrosine residue at position 349 is replaced by a cysteine residue (Y349C). Introduction of these two cysteine residues results in formation of a disulfide bridge between the two subunits of the Fc domain, further stabilizing the dimer (Carter, J Immunol Methods 248, 7-15 (2001)).

[1146] In an alternative embodiment a modification promoting association of the first and the second subunit of the Fc domain comprises a modification mediating electrostatic steering effects, e.g. as described in PCT publication WO 2009/089004. Generally, this method involves replacement of one or more amino acid residues at the interface of the two Fc domain subunits by charged amino acid residues so that homodimer formation becomes electrostatically unfavorable but heterodimerization electrostatically favorable.

[1147] Illustrative examples include but are not limited to, for example, US Patent Application 20030078385 (Arathoon et al. —Genentech; describing knob into holes); WO2007147901 (Kjærgaard et al. —Novo Nordisk: describing ionic interactions); WO 2009089004 (Kannan et al. —Amgen: describing electrostatic steering effects); U.S. Provisional Patent Application 61/243,105 (Christensen et al. —Genentech; describing coiled coils).

[1148] In particular embodiments, domains 1 and 2 of a tetrahedral antibody of the invention, or domains 1, 2 and 3 of an octahedral antibody of the invention, are two or three distinct heterodimeric Fc domains comprising distinct sets of modifications promoting intra-heterodimerization of their respective Fc domain subunits. Illustrative examples of distinct sets of mutations in the antibody heavy chain constant region that can be used to promote the preferential assembly of distinct Fc heterodimers include but are not limited to, for example, U.S. Ser. Nos. 11/533,709, 13/494,870, 12/875,015, 13/289,934, 14/773,418, 12/811,207, 13/866,756, 14/647,480, and 14/830,336. For example, mutations can be made in the CH3 domain based on human IgG1 and incorporating distinct pairs of amino acid substitutions within a first polypeptide and a second polypeptide that allow these two chains to selectively heterodimerize with each other. The positions of amino acid substitutions illustrated below are all numbered according to the EU index as in Kabat.

[1149] For example, one or more mutations can be incorporated into the constant region as compared to human IgG1 constant region, for example at Q347, Y349, L351, S354, E356, E357, K360, Q362, S364, T366, L368, K370, N390, K392, T394, D399, S400, D401, F405, Y407, K409, T411 and/or K439. Exemplary substitutions include, for example, Q347E, Q347R, Y349S, Y349K, Y349T, Y349D, Y349E, Y349C, T350V, L351K, L351D, L351Y, S354C, E356K, E357Q, E357L, E357W, K360E, K360W, Q362E, S364K, S364E, S364H, S364D, T366V, T366I, T366L, T366M, T366K, T366W, T366S, L368E, L368A, L368D, K370S, N390D, N390E, K392L, K392M, K392V, K392F, K392D, K392E, T394F, T394W, D399R, D399K, D399V, S400K, S400R, D401K, F405A, F405T, Y407A, Y407I, Y407V, K409F, K409W, K409D, T411D, T411E, K439D, and K439E.

[1150] Alternatively, amino acid substitutions could be selected from the following sets of substitutions shown in the tables below:

TABLE C-1
Sets of substitutions

| | First Polypeptide | Second Polypeptide |
|---|---|---|
| Set 1 | S364E/F405A | Y349K/T394F |
| Set 2 | S364H/D401K | Y349T/T411E |
| Set 3 | S364H/T394F | Y349T/F405A |
| Set 4 | S364E/T394F | Y349K/F405A |
| Set 5 | S364E/T411E | Y349K/D401K |
| Set 6 | S364D/T394F | Y349K/F405A |
| Set 7 | S364H/F405A | Y349T/T394F |
| Set 8 | S364K/E357Q | L368D/K370S |
| Set 9 | L368D/K370S | S364K |
| Set 10 | L368E/K370S | S364K |
| Set 11 | K360E/Q362E | D401K |
| Set 12 | L368D/K370S | S364K/E357L |
| Set 13 | K370S | S364K/E357Q |
| Set 14 | F405L | K409R |
| Set 15 | K409R | F405L |

TABLE C-2
Sets of substitutions

| | First Polypeptide | Second Polypeptide |
|---|---|---|
| Set 1 | K409W | D399V/F405T |
| Set 2 | Y349S | E357W |
| Set 3 | K360E | Q347R |
| Set 4 | K360E/K409W | Q347R/D399V/F405T |
| Set 5 | Q347E/K360E/K409W | Q347R/D399V/F405T |
| Set 6 | Y349S/K409W | E357W/D399V/F405T |

TABLE C-3
Sets of substitutions

| | First Polypeptide | Second Polypeptide |
|---|---|---|
| Set 1 | T366K/L351K | L351D/L368E |
| Set 2 | T366K/L351K | L351D/Y349E |
| Set 3 | T366K/L351K | L351D/Y349D |
| Set 4 | T366K/L351K | L351D/Y349E/L368E |
| Set 5 | T366K/L351K | L351D/Y349D/L368E |
| Set 6 | E356K/D399K | K392D/K409D |

TABLE C-4
Sets of substitutions

| First Polypeptide | Second Polypeptide |
|---|---|
| L351Y, D399R, D399K, | T366V, T366I, T366L, T366M, N390D, |
| S400K, S400R, Y407A, | N390E, K392L, K392M, K392V, K392F |
| Y407I, Y407V | K392D, K392E, K409F, K409W, T411D and |
| | T411E |

[1151] Alternatively, at least one amino acid substitutions could be selected from the following set of substitutions in Table C-5, where the position(s) indicated in the First Polypeptide column is replaced by any known negatively-charged amino acid, and the position(s) indicated in the Second Polypeptide Column is replaced by any known positively-charged amino acid.

TABLE C-5
Sets of substitutions

| First Polypeptide | Second Polypeptide |
|---|---|
| K392, K370, K409, or K439 | D399, E356, or E357 |

[1152] Alternatively, at least one amino acid substitutions could be selected from the following set of in Table C-6, where the position(s) indicated in the First Polypeptide column is replaced by any known positively-charged amino acid, and the position(s) indicated in the Second Polypeptide Column is replaced by any known negatively-charged amino acid.

TABLE C-6
Sets of substitutions

| First Polypeptide | Second Polypeptide |
|---|---|
| D399, E356, or E357 | K409, K439, K370, or K392 |

[1153] Alternatively, amino acid substitutions could be selected from the following set of in Table C-7.

TABLE C-7
Sets of substitutions

| First Polypeptide | Second Polypeptide |
|---|---|
| T350V, L351Y, F405A, and Y407V | T350V, T366L, K392L, and T394W |

[1154] Alternatively, or in addition, the structural stability of a heteromultimer protein may be increased by introducing S354C on either of the first or second polypeptide chain, and Y349C on the opposing polypeptide chain, which forms an artificial disulfide bridge within the interface of the two polypeptides.

### Extra-Homodimerization and Extra-Heterodimerization Between Domain 1 and Domain 2

[1155] In an embodiment, homodimerization between domain 1 and domain 2 (i.e. extra-homodimerization) is achieved by use of a first and a second dimerizing polypeptide which homodimerize. One example of a homodimerization domain is the ACE2 collectrin-like domain (CLD).

[1156] In an embodiment, heterodimerization between domain 1 and domain 2 (i.e. extra-heterodimerization) is achieved by use of a first and a second dimerizing polypeptide which favor the formation of a heterodimer over a homodimer. Any non-immunoglobulin dimerization polypeptide having a strong preference for forming heterodimers over homodimers is within the scope of the invention.

### Dimerizing Polypeptides

### Leucine Zipper Domains

[1157] Leucine zippers are well known in the art (see Hakoshima; Encyclopedia of Life Sciences; 2005, for example). The leucine zipper is a super-secondary structure that may function as a dimerization domain. Its presence generates adhesion forces in parallel alpha helices. A single leucine zipper consists of multiple leucine residues at approximately 7-residue intervals, which forms an amphipathic alpha helix with a hydrophobic region running along one side. This hydrophobic region provides an area for dimerization, allowing the motifs to “zip” together. Leucine zippers are typically 20 to 40 amino acids in length, for example approximately 30 amino acids. See also Pack, P. & Plueckthun, A., Biochemistry 31, 1579-1584 (1992).

[1158] Leucine zipper domains may be such that the formation of heterodimers is more favorable than the formation of homodimers of the helices. Leucine zippers may be synthetic or naturally occurring. Synthetic leucines can be designed to have a much higher binding affinity. Alternatively, naturally occurring leucine zippers or leucine zippers with a similar binding affinity may be used. Leucine zippers from the c-jun and c-fos protein are an example of leucine zippers. Other leucine zippers include those from the myc and max proteins (Amati, B., S. Dalton, et al. (1992). Nature 359(6394): 423-6). Other leucine zippers with suitable properties may be designed, for example as described in O'Shea, E. K., Lumb, K. J. and Kim, P. S. (1993) Curr. Biol. 3: 658-667. See also O'Shea, E. K., Rutkowski, R., et al. (1989) Science 245: 646-648 and O'Shea, E. K., R. Rutkowski, et al. (1992). Cell 68(4): 699-708 describe leucine zippers from c-jun (αchain) and c-fos (βchain).

[1159] As discussed in U.S. Patent Application Publication No. US 20020119149 A1 (Jakobsen), leucine zippers can be designed and engineered by those skilled in the art to form homodimers, heterodimers or trimeric complexes. See Lumb, K. J. and P. S. Kim (1995). Biochemistry 34(27): 8642-8; Nautiyal, S., D. N. Woolfson, et al. (1995). Biochemistry 34(37): 11645-51; Boice, J. A., G. R. Dieckmann, et al. (1996). Biochemistry 35(46): 14480-5; and Chao, H., M. E. Houston, Jr., et al. (1996). Biochemistry 35(37): 12175-85.

### Collectrin-Like Domains

[1160] Full-length ACE2 consists of an N-terminal Peptidase Domain (PD) and a C-terminal collectrin-like domain (CLD) that ends with a single transmembrane helix and a ˜40-residue intracellular segment. The CLD (residues 616 to 768 of ACE2), consists of a small extracellular domain, a long linker, and the single transmembrane (TM) helix. The CLD comprises the “neck domain” of ACE2 (residues 616 to 726), which is the primary mediator of dimerization of ACE2. (Yan et al., Science 367, 1444-1448 (2020))

### Collectrin Domains

[1161] Collectrin is a homolog of ACE2 and is a transmembrane glycoprotein specifically expressed in collecting tubules of the kidney. Based on its homology to the ACE2 CLD, it is expected that Collectrin domains may be capable of forming homodimers (Zhang et al. J Biol. Chem. Vol. 276, No. 20, Issue of May 18, pp. 17132-17139, 2001)

### Trimerizing Domains

### TNF Ligand Superfamily Members

[1162] Members of the TNF ligand superfamily may be used as trimerizing domains of the inventions. They are described in Locksley et al., Cell. 2001 Feb. 23; 104(4):487-501 and the table reproduced below.

TABLE B-2
Members of the TNF Superfamily

| | | | | Human | Mouse |
|---|---|---|---|---|---|
| Ligand | Standardized | Other Names | Accession | Chromosome | Chromosome |
| EDA | | EDA1 | NM_001399 | Xq12-q13.1 | X, 37.0 cM |
| CD40L | TNFSF5 | IMD3, | X67878 | Xq26 | X, 18.0 cM |
| | | HIGM1, | | | |
| | | TRAP, | | | |
| | | CD154, gp39 | | | |
| FasL | TNFSF6 | APT1LG1 | U11821 | 1423 | 1, 85.0 cM |
| OX40L | TNFSF4 | gp34TXGP1 | D90224 | 1q25 | 1, 84.9 cM |
| AITRL | TNFSF18 | TL6, hGITRL | AF125303 | 1q23 | |
| CD30L | TNFSF8 | | L09753 | 9q33 | 4, 32.2 cM |
| VEGI | TNFSF15 | TL1 | AF039390 | | |
| LIGHT | TNFSF14 | LT_, HVEM- | AF036581 | 19 (probable) | 17 |
| | | L | | | |
| 4-1BBL | TNFSF9 | | U03398 | 19p13.3 | 17 |
| CD27L | TNFSF7 | CD70 | L08096 | 19p13 | 17, 20.0 cM |
| LTα | TNFSF1 | TNFB, LT | X01393 | 6p21.3 | 17, 19.06 cM |
| TNF | TNFSF2 | tumor | X01394 | 6p21.3 | 17, 19.06 |
| | | necrosis | | | |
| | | factor; | | | |
| | | cachectin, | | | |
| | | TNFA, DIF | | | |
| LTβ | TNFSF3 | TNFC, p33 | L11015 | 6p21.3 | 17, 19.061 |
| TWEAK | TNFSF12 | DR3L | AF030099 | 17p13 | 11? |
| | | APO3L | | | |
| APRIL | TNFSF13 | | NM_003808 | 17p13.1 | 11? |
| BLYS | TNFSF13B | BAFF, | AF132600 | 13432-34 | |
| | | THANK, | | | |
| | | TALL1 | | | |
| RANKL | TNFSF11 | TRANCE, | AF013171 | 13q14 | 14, 45.0 |
| | | OPGL, ODF | | | |
| TRAIL | TNFSF10 | Apo-2L TL2 | U37518 | 3q26 | |

[1163] Suitable examples of the trimerizing polypeptides of the invention are the complete extracellular regions or portions thereof of TNFSF1 (UniProtKB TNFB_HUMAN, GenBank Accession No. P01374), TNFSF2 (UniProtKB TNFA_HUMAN, GenBank Accession No. P01375), TNFSF3 (UniProtKB TNFC_HUMAN, GenBank Accession No. Q06643), TNFSF4 (UniProtKB TNFL4_HUMAN, GenBank Accession No. P23510), TNFSF5 (UniProtKB CD40L_HUMAN, GenBank Accession No. P29965), TNFSF6 (UniProtKB TNFL6_HUMAN, GenBank Accession No. P48023), TNFSF7 (UniProtKB CD70_HUMAN, GenBank Accession No. P32970), TNFSF8 (UniProtKB TNFL8_HUMAN, GenBank Accession No. P32971), TNFSF9 (UniProtKB TNFL9_HUMAN, GenBank Accession No. P41273), TNFSF10 (UniProtKB TNF10_HUMAN, GenBank Accession No. P50591), TNFSF11 (UniProtKB TNF11_HUMAN, GenBank Accession No. O14788), TNF SF12 (UniProtKB TNF12_HUMAN, GenBank Accession No. O43508), TNFSF13 (UniProtKB TNF13_HUMAN, GenBank Accession No. O75888), TNFSF13B (UniProtKB TN13B_HUMAN, GenBank Accession No. Q9Y275), TNFSF14 (UniProtKB TNF14_HUMAN; GenBank Accession No. O43557), TNFSF15 (UniProtKB TNF15_HUMAN, GenBank Accession No. O95150), and TNFSF18 (UniProtKB TNF18_HUMAN; GenBank Accession No. Q9UNG2).

[1164] Preferred trimerizing polypeptides are shown in SEQ ID NOs: 787-790 (TNFSF1), SEQ ID NOs: 791-792 (TNFSF2), SEQ ID NOs: 793-795 (TNFSF3), SEQ ID NOs: 796-798 (TNFSF4), SEQ ID NOs: 799-802 (TNFSF5), SEQ ID NOs: 803-806, SEQ ID NOs: 807-809 (TNFSF7), SEQ ID NOs: 810-813 (TNFSF8), SEQ ID NOs: 814-816 (TNFSF9), SEQ ID NOs: 817-820 (TNFSF10), SEQ ID NOs: 821-822 (TNFSF11), SEQ ID NOs: 823-827 (TNFSF12), SEQ ID NOs: 828-831 (TNFSF13), SEQ ID NOs: 832-833 (TNFSF13B), SEQ ID NOs: 834-837 (TNFSF14), SEQ ID NOs: 838-841 (TNFSF15), and SEQ ID NOs: 842-843 (TNFSF18).

### Kits

[1165] Another aspect of the present invention provides kits comprising the compounds disclosed herein and the pharmaceutical compositions comprising these compounds. A kit may include, in addition to the compound or pharmaceutical composition, diagnostic or therapeutic agents. A kit may also include instructions for use in a diagnostic or therapeutic method. In a diagnostic embodiment, the kit includes the compound or a pharmaceutical composition thereof and a diagnostic agent. In a therapeutic embodiment, the kit includes the antibody or a pharmaceutical composition thereof and one or more therapeutic agents, such as an additional antineoplastic agent, anti-tumor agent or chemotherapeutic agent.

### General Techniques

[1166] The description below relates primarily to production of stretches of consecutive amino acids or polypeptides of interest by culturing cells transformed or transfected with a vector containing an encoding nucleic acid. It is, of course, contemplated that alternative methods, which are well known in the art, may be employed. For instance, the amino acid sequence, or portions thereof, may be produced by direct peptide synthesis using solid-phase techniques (see, e.g., Stewart et al., Solid-Phase Peptide Synthesis, W.H. Freeman Co., San Francisco, Calif. (1969); Merrifield, J. Am. Chem. Soc., 85:2149-2154 (1963)). In vitro protein synthesis may be performed using manual techniques or by automation. Automated synthesis may be accomplished, for instance, using an Applied Biosystems Peptide Synthesizer (Foster City, Calif.) using manufacturer's instructions. Various portions of the stretches of consecutive amino acids or polypeptides of interest may be chemically synthesized separately and combined using chemical or enzymatic methods to produce the full-length stretches of consecutive amino acids or polypeptides of interest.

### Selection and Transformation of Host Cells

[1167] Host cells are transfected or transformed with expression or cloning vectors described herein for production and cultured in conventional nutrient media modified as appropriate for inducing promoters, selecting transformants, or amplifying the genes encoding the desired sequences. The culture conditions, such as media, temperature, pH and the like, can be selected by the skilled artisan without undue experimentation. In general, principles, protocols, and practical techniques for maximizing the productivity of cell cultures can be found in Mammalian Cell Biotechnology: a Practical Approach, M. Butler, ed. (IRL Press, 1991) and Sambrook et al., supra.

[1168] Methods of eukaryotic cell transfection and prokaryotic cell transformation are known to the ordinarily skilled artisan, for example, CaCl₂), CaPO₄, liposome-mediated and electroporation. Depending on the host cell used, transformation is performed using standard techniques appropriate to such cells. The calcium treatment employing calcium chloride, as described in Sambrook et al., supra, or electroporation is generally used for prokaryotes. Infection with Agrobacterium tumefaciens is used for transformation of certain plant cells, as described by Shaw et al., Gene, 23:315 (1983) and WO 89/05859 published Jun. 29, 1989. For mammalian cells without such cell walls, the calcium phosphate precipitation method of Graham and van der Eb, Virology, 52:456-457 (1978) can be employed. General aspects of mammalian cell host system transfections have been described in U.S. Pat. No. 4,399,216. Transformations into yeast are typically carried out according to the method of Van Solingen et al., J. Bact., 130:946(1977) and Hsiao et al., Proc. Natl. Acad. Sci. (USA), 76:3829 (1979). However, other methods for introducing DNA into cells, such as by nuclear microinjection, electroporation, bacterial protoplast fusion with intact cells, or polycations, e.g., polybrene, polyornithine, may also be used. For various techniques for transforming mammalian cells, see Keown et al., Methods in Enzymology, 185:527-537 (1990) and Mansour et al., Nature, 336:348-352 (1988).

[1169] Suitable host cells for cloning or expressing the DNA in the vectors herein include prokaryote, yeast, or higher eukaryote cells. Suitable prokaryotes include but are not limited to eubacteria, such as Gram-negative or Gram-positive organisms, for example, Enterobacteriaceae such as E. coli. Various E. coli strains are publicly available, such as E. coli K12 strain MM294 (ATCC 31,446); E. coli X1776 (ATCC 31,537); E. coli strain W3110 (ATCC 27,325) and K5772 (ATCC 53,635). Other suitable prokaryotic host cells include Enterobacteriaceae such as Escherichia, e.g., E. coli, Enterobacter, Erwinia, Klebsiella, Proteus, Salmonella, e.g., Salmonella typhimurium, Serratia, e.g., Serratia marcescans, and Shigella, as well as Bacilli such as B. subtilis and B. licheniformis (e.g., B. licheniformis 41P disclosed in DD 266,710 published Apr. 12, 1989), Pseudomonas such as P. aeruginosa, and Streptomyces. These examples are illustrative rather than limiting. Strain W3110 is one particularly preferred host or parent host because it is a common host strain for recombinant DNA product fermentations. Preferably, the host cell secretes minimal amounts of proteolytic enzymes. For example, strain W3110 may be modified to effect a genetic mutation in the genes encoding proteins endogenous to the host, with examples of such hosts including E. coli W3110 strain 1A2, which has the complete genotype tonA; E. coli W3110 strain 9E4, which has the complete genotype tonA ptr3; E. coli W3110 strain 27C7 (ATCC 55,244), which has the complete genotype tonAptr3phoA E15 (argF-lac)169 degP ompT kan^{r}; E. coli W3110 strain 37D6, which has the complete genotype tonA ptr3 phoA E15 (argF-lac)169 degP ompT rbs7 ilvG kan^{r}, E. coli W3110 strain 40B4, which is strain 37D6 with a non-kanamycin resistant degP deletion mutation; and an E. coli strain having mutant periplasmic protease disclosed in U.S. Pat. No. 4,946,783 issued Aug. 7, 1990. Alternatively, in vitro methods of cloning, e.g., PCR or other nucleic acid polymerase reactions, are suitable.

[1170] In addition to prokaryotes, eukaryotic microbes such as filamentous fungi or yeast are suitable cloning or expression hosts for encoding vectors. Saccharomyces cerevisiae is a commonly used lower eukaryotic host microorganism. Others include Schizosaccharomyces pombe (Beach and Nurse, Nature, 290:140 (1981); EP 139,383 published May 2, 1985); Kluyveromyces hosts (U.S. Pat. No. 4,943,529; Fleer et al., Bio/Technology, 9:968-975 (1991)) such as, e.g., K. lactis (MW98-8C, CBS683, CBS4574; Louvencourt et al., J. Bacteriol., 737 (1983)), K. fragilis (ATCC 12,424), K. bulgaricus (ATCC 16,045), K. wickeramii (ATCC 24,178), K. waltii (ATCC 56,500), K. drosophilarum (ATCC 36,906; Van den Berg et al., Bio/Technology, 8:135 (1990)), K. thermotolerans, and K. marxianus; yarrowia (EP 402,226); Pichia pastoris (EP 183,070; Sreekrishna et al., J. Basic Microbiol., 28:265-278 (1988)); Candida; Trichoderma reesia (EP 244,234); Neurospora crassa (Case et al., Proc. Natl. Acad. Sci. USA, 76:5259-5263 (1979)); Schwanniomyces such as Schwanniomyces occidentalis (EP 394,538 published Oct. 31, 1990); and filamentous fungi such as, e.g., Neurospora, Penicillium, Tolypocladium (WO 91/00357 published Jan. 10, 1991), and Aspergillus hosts such as A. nidulans (Ballance et al., Biochem. Biophys. Res. Commun., 112:284-289 (1983); Tilburn et al., Gene, 26:205-221 (1983); Yelton et al., Proc. Natl. Acad. Sci. USA, 81:1470-1474 (1984)) and A. niger (Kelly and Hynes, EMBO J., 4:475479 (1985)). Methylotropic yeasts are suitable herein and include, but are not limited to, yeast capable of growth on methanol selected from the genera consisting of Hansenula, Candida, Kloeckera, Pichia, Saccharomyces, Torulopsis, and Rhodotorula. A list of specific species that are exemplary of this class of yeasts may be found in C. Anthony, The Biochemistry of Methylotrophs, 269 (1982).

[1171] Suitable host cells for the expression of glycosylated stretches of consecutive amino acids or polypeptides of interest are derived from multicellular organisms. Examples of invertebrate cells include insect cells such as Drosophila S2 and Spodoptera Sf9, as well as plant cells. Examples of useful mammalian host cell lines include Chinese hamster ovary (CHO) and COS cells. More specific examples include monkey kidney CV1 line transformed by SV40 (COS-7, ATCC CRL 1651); human embryonic kidney line (293 or 293 cells subcloned for growth in suspension culture, Graham et al., J. Gen Virol., 36:59 (1977)); Chinese hamster ovary cells/-DHFR (CHO, Urlaub and Chasin, Proc. Natl. Acad. Sci. USA, 77:4216 (1980)); mouse sertoli cells (TM4, Mather, Biol. Reprod., 23:243-251 (1980)); human lung cells (W138, ATCC CCL 75); human liver cells (Hep G2, HB 8065); and mouse mammary tumor (MMT 060562, ATCC CCL51). The selection of the appropriate host cell is deemed to be within the skill in the art.

### Selection and Use of a Replicable Vector

[1172] The nucleic acid (e.g., cDNA or genomic DNA) encoding the stretch of consecutive amino acids or polypeptides of interest may be inserted into a replicable vector for cloning (amplification of the DNA) or for expression. Various vectors are publicly available. The vector may, for example, be in the form of a plasmid, cosmid, viral particle, or phage. The appropriate nucleic acid sequence may be inserted into the vector by a variety of procedures. In general, DNA is inserted into an appropriate restriction endonuclease site(s) using techniques known in the art. Vector components generally include, but are not limited to, one or more of a signal sequence, an origin of replication, one or more marker genes, an enhancer element, a promoter, and a transcription termination sequence. Construction of suitable vectors containing one or more of these components employs standard ligation techniques which are known to the skilled artisan.

[1173] The stretches of consecutive amino acids or polypeptides of interest may be produced recombinantly not only directly, but also as a fusion polypeptide with a heterologous polypeptide, which may be a signal sequence or other polypeptide having a specific cleavage site at the N-terminus of the mature protein or polypeptide. In general, the signal sequence may be a component of the vector, or it may be a part of the encoding DNA that is inserted into the vector. The signal sequence may be a prokaryotic signal sequence selected, for example, from the group of the alkaline phosphatase, penicillinase, 1pp, or heat-stable enterotoxin II leaders. For yeast secretion the signal sequence may be, e.g., the yeast invertase leader, alpha factor leader (including Saccharomyces and Kluyveromyces alpha-factor leaders, the latter described in U.S. Pat. No. 5,010,182), or acid phosphatase leader, the C. albicans glucoamylase leader (EP 362,179 published Apr. 4, 1990), or the signal described in WO 90/13646 published Nov. 15, 1990. In mammalian cell expression, mammalian signal sequences may be used to direct secretion of the protein, such as signal sequences from secreted polypeptides of the same or related species, as well as viral secretory leaders.

[1174] Both expression and cloning vectors contain a nucleic acid sequence that enables the vector to replicate in one or more selected host cells. Such sequences are well known for a variety of bacteria, yeast, and viruses. The origin of replication from the plasmid pBR322 is suitable for most Gram-negative bacteria, the 2mu plasmid origin is suitable for yeast, and various viral origins (SV40, polyoma, adenovirus, VSV or BPV) are useful for cloning vectors in mammalian cells.

[1175] Expression and cloning vectors will typically contain a selection gene, also termed a selectable marker. Typical selection genes encode proteins that (a) confer resistance to antibiotics or other toxins, e.g., ampicillin, neomycin, methotrexate, or tetracycline, (b) complement auxotrophic deficiencies, or (c) supply critical nutrients not available from complex media, e.g., the gene encoding D-alanine racemase for Bacilli.

[1176] An example of suitable selectable markers for mammalian cells are those that enable the identification of cells competent to take up the encoding nucleic acid, such as DHFR or thymidine kinase. An appropriate host cell when wild-type DHFR is employed is the CHO cell line deficient in DHFR activity, prepared and propagated as described by Urlaub et al., Proc. Natl. Acad. Sci. USA, 77:4216 (1980). A suitable selection gene for use in yeast is the trp1 gene present in the yeast plasmid YRp7 (Stinchcomb et al., Nature, 282:39 (1979); Kingsman et al., Gene, 7:141 (1979); Tschemper et al., Gene, 10:157 (1980)). The trp1 gene provides a selection marker for a mutant strain of yeast lacking the ability to grow in tryptophan, for example, ATCC No. 44076 or PEP4-1 (Jones, Genetics, 85:12 (1977)).

[1177] Expression and cloning vectors usually contain a promoter operably linked to the encoding nucleic acid sequence to direct mRNA synthesis. Promoters recognized by a variety of potential host cells are well known. Promoters suitable for use with prokaryotic hosts include the beta-lactamase and lactose promoter systems (Chang et al., Nature, 275:615 (1978); Goeddel et al., Nature, 281:544 (1979)), alkaline phosphatase, a tryptophan (trp) promoter system (Goeddel, Nucleic Acids Res., 8:4057 (1980); EP 36,776), and hybrid promoters such as the tac promoter (deBoer et al., Proc. Natl. Acad. Sci. USA, 80:21-25 (1983)). Promoters for use in bacterial systems also will contain a Shine-Dalgarno (S.D.) sequence operably linked to the encoding DNA.

[1178] Examples of suitable promoting sequences for use with yeast hosts include the promoters for 3-phosphoglycerate kinase (Hitzeman et al., J. Biol. Chem., 255:2073 (1980)) or other glycolytic enzymes (Hess et al., J. Adv. Enzyme Re.g., 7:149 (1968); Holland, Biochemistry, 17:4900 (1978)), such as enolase, glyceraldehyde-3-phosphate dehydrogenase, hexokinase, pyruvate decarboxylase, phosphofructokinase, glucose-6-phosphate isomerase, 3-phosphoglycerate mutase, pyruvate kinase, triosephosphate isomerase, phosphoglucose isomerase, and glucokinase.

[1179] Other yeast promoters, which are inducible promoters having the additional advantage of transcription controlled by growth conditions, are the promoter regions for alcohol dehydrogenase 2, isocytochrome C, acid phosphatase, degradative enzymes associated with nitrogen metabolism, metallothionein, glyceraldehyde-3-phosphate dehydrogenase, and enzymes responsible for maltose and galactose utilization. Suitable vectors and promoters for use in yeast expression are further described in EP 73,657.

[1180] Transcription from vectors in mammalian host cells is controlled, for example, by promoters obtained from the genomes of viruses such as polyoma virus, fowlpox virus (UK 2,211,504 published Jul. 5, 1989), adenovirus (such as Adenovirus 2), bovine papilloma virus, avian sarcoma virus, cytomegalovirus, a retrovirus, hepatitis-B virus and Simian Virus 40 (SV40), from heterologous mammalian promoters, e.g., the actin promoter or an immunoglobulin promoter, and from heat-shock promoters, provided such promoters are compatible with the host cell systems.

[1181] Transcription of a DNA encoding the stretches of consecutive amino acids or polypeptides of interest by higher eukaryotes may be increased by inserting an enhancer sequence into the vector. Enhancers are cis-acting elements of DNA, usually about from 10 to 300 bp, that act on a promoter to increase its transcription. Many enhancer sequences are now known from mammalian genes (globin, elastase, albumin, alpha-fetoprotein, and insulin). Typically, however, one will use an enhancer from a eukaryotic cell virus. Examples include the SV40 enhancer on the late side of the replication origin (bp 100-270), the cytomegalovirus early promoter enhancer, the polyoma enhancer on the late side of the replication origin, and adenovirus enhancers. The enhancer may be spliced into the vector at a position 5′ or 3′ to the coding sequence, but is preferably located at a site 5′ from the promoter.

[1182] Expression vectors used in eukaryotic host cells (yeast, fungi, insect, plant, animal, human, or nucleated cells from other multicellular organisms) will also contain sequences necessary for the termination of transcription and for stabilizing the mRNA. Such sequences are commonly available from the 5′ and, occasionally 3′, untranslated regions of eukaryotic or viral DNAs or cDNAs. These regions contain nucleotide segments transcribed as polyadenylated fragments in the untranslated portion of the mRNA encoding stretches of consecutive amino acids or polypeptides of interest.

[1183] Still other methods, vectors, and host cells suitable for adaptation to the synthesis of stretches of consecutive amino acids or polypeptides in recombinant vertebrate cell culture are described in Gething et al., Nature 293:620-625 (1981); Mantei et al., Nature, 281:4046 (1979); EP 117,060; and EP 117,058.

### Detecting Gene Amplification/Expression

[1184] Gene amplification and/or expression may be measured in a sample directly, for example, by conventional Southern blotting, Northern blotting to quantitate the transcription of mRNA (Thomas, Proc. Natl. Acad. Sci. USA, 77:5201-5205 (1980)), dot blotting (DNA analysis), or in situ hybridization, using an appropriately labeled probe, based on the sequences provided herein. Alternatively, antibodies may be employed that can recognize specific duplexes, including DNA duplexes, RNA duplexes, and DNA-RNA hybrid duplexes or DNA-protein duplexes. The antibodies in turn may be labeled and the assay may be carried out where the duplex is bound to a surface, so that upon the formation of duplex on the surface, the presence of antibody bound to the duplex can be detected.

[1185] Gene expression, alternatively, may be measured by immunological methods, such as immunohistochemical staining of cells or tissue sections and assay of cell culture or body fluids, to quantitate directly the expression of gene product. Antibodies useful for immunohistochemical staining and/or assay of sample fluids may be either monoclonal or polyclonal, and may be prepared in any mammal. Conveniently, the antibodies may be prepared against a native sequence stretches of consecutive amino acids or polypeptides of interest or against a synthetic peptide based on the DNA sequences provided herein or against exogenous sequence fused to DNA encoding a stretch of consecutive amino acids or polypeptide of interest and encoding a specific antibody epitope.

### Purification of Polypeptide

[1186] Forms of the stretches of consecutive amino acids or polypeptides of interest may be recovered from culture medium or from host cell lysates. If membrane-bound, it can be released from the membrane using a suitable detergent solution (e.g. Triton-X 100) or by enzymatic cleavage. Cells employed in expression of the stretches of consecutive amino acids or polypeptides of interest can be disrupted by various physical or chemical means, such as freeze-thaw cycling, sonication, mechanical disruption, or cell lysing agents.

[1187] It may be desired to purify the stretches of consecutive amino acids or polypeptides of interest from recombinant cell proteins or polypeptides. The following procedures are exemplary of suitable purification procedures: by fractionation on an ion-exchange column; ethanol precipitation; reverse phase HPLC; chromatography on silica or on a cation-exchange resin such as DEAE; chromatofocusing; SDS-PAGE; ammonium sulfate precipitation; gel filtration using, for example, Sephadex G-75; protein A Sepharose columns to remove contaminants such as IgG; and metal chelating columns to bind epitope-tagged forms. Various methods of protein purification may be employed and such methods are known in the art and described for example in Deutscher, Methods in Enzymology, 182 (1990); Scopes, Protein Purification: Principles and Practice, Springer-Verlag, New York (1982). The purification step(s) selected will depend, for example, on the nature of the production process used and the particular stretches of consecutive amino acids or polypeptides of interest produced.

### Intein-Based C-Terminal Syntheses

[1188] As described, for example, in U.S. Pat. No. 6,849,428, issued Feb. 1, 2005, inteins are the protein equivalent of the self-splicing RNA introns (see Perler et al., Nucleic Acids Res. 22:1125-1127 (1994)), which catalyze their own excision from a precursor protein with the concomitant fusion of the flanking protein sequences, known as exteins (reviewed in Perler et al., Curr. Opin. Chem. Biol. 1:292-299 (1997); Perler, F. B. Cell 92(1):1-4 (1998); Xu et al., EMBO J. 15(19):5146-5153 (1996)).

[1189] Studies into the mechanism of intein splicing led to the development of a protein purification system that utilized thiol-induced cleavage of the peptide bond at the N-terminus of the Sce VMA intein (Chong et al., Gene 192(2):271-281 (1997)). Purification with this intein-mediated system generates a bacterially-expressed protein with a C-terminal thioester (Chong et al., (1997)). In one application, where it is described to isolate a cytotoxic protein, the bacterially expressed protein with the C-terminal thioester is then fused to a chemically-synthesized peptide with an N-terminal cysteine using the chemistry described for “native chemical ligation” (Evans et al., Protein Sci. 7:2256-2264 (1998); Muir et al., Proc. Natl. Acad. Sci. USA 95:6705-6710 (1998)).

[1190] This technique, referred to as “intein-mediated protein ligation” (IPL), represents an important advance in protein semi-synthetic techniques. However, because chemically-synthesized peptides of larger than about 100 residues are difficult to obtain, the general application of IPL was limited by the requirement of a chemically-synthesized peptide as a ligation partner.

[1191] IPL technology was significantly expanded when an expressed protein with a predetermined N-terminus, such as cysteine, was generated, as described for example in U.S. Pat. No. 6,849,428. This allows the fusion of one or more expressed proteins from a host cell, such as bacterial, yeast or mammalian cells. In one non-limiting example the intein a modified RIR1 Methanobacterium thermoautotrophicum is that cleaves at either the C-terminus or N-terminus is used which allows for the release of a bacterially expressed protein during a one-column purification, thus eliminating the need proteases entirely.

[1192] Intein technology is one example of one route to obtain components. In one embodiment, the subunits of the compounds of the invention are obtained by transfecting suitable cells, capable of expressing and secreting mature chimeric polypeptides, wherein such polypeptides comprise, for example, an adhesin domain contiguous with an isolatable c-terminal intein domain (see U.S. Pat. No. 6,849,428, Evans et al., issued Feb. 1, 2005, hereby incorporated by reference). The cells, such as mammalian cells or bacterial cells, are transfected using known recombinant DNA techniques. The secreted chimeric polypeptide can then be isolated, e.g. using a chitin-derivatized resin in the case of an intein-chitin binding domain (see U.S. Pat. No. 6,897,285, Xu et al., issued May 24, 2005, hereby incorporated by reference), and is then treated under conditions permitting thiol-mediated cleavage and release of the now C-terminal thioester-terminated subunit. The thioester-terminated adhesion subunit is readily converted to a C-terminal cysteine terminated subunit.

[1193] For example, following an intein autocleavage reaction, a thioester intermediate is generated that permits the facile addition of cysteine, selenocysteine, homocysteine, or homoselenocysteine, or a derivative of cysteine, selenocysteine, homocysteine, homoselenocysteine, to the C-terminus by native chemical ligation. Methods of adding a cysteine, selenocysteine, homocysteine, or homoselenocysteine, or a derivative of cysteine, selenocysteine, homocysteine, homoselenocysteine, to the C-terminus by native chemical ligation which are useful in aspects of the present invention are described in U.S. Patent Application No. 2008/0254512, Capon, published Oct. 16, 2008, the entire contents of which are hereby incorporated herein by reference.

### Examples of Expression of Stretches of Consecutive Amino Acids or Polypeptide Components of Interest in Various Cells

[1194] In E. coli

[1195] The DNA sequence encoding the desired amino acid sequence of interest or polypeptide is initially amplified using selected PCR primers. The primers should contain restriction enzyme sites which correspond to the restriction enzyme sites on the selected expression vector. A variety of expression vectors may be employed. An example of a suitable vector is pBR322 (derived from E. coli; see Bolivar et al., Gene, 2:95 (1977)) which contains genes for ampicillin and tetracycline resistance. The vector is digested with restriction enzyme and dephosphorylated. The PCR amplified sequences are then ligated into the vector. The vector will preferably include sequences which encode for an antibiotic resistance gene, a trp promoter, a polyhis leader (including the first six STII codons, polyhis sequence, and enterokinase cleavage site), the specific amino acid sequence of interest/polypeptide coding region, lambda transcriptional terminator, and an argU gene.

[1196] The ligation mixture is then used to transform a selected E. coli strain using the methods described in Sambrook et al., supra. Transformants are identified by their ability to grow on LB plates and antibiotic resistant colonies are then selected. Plasmid DNA can be isolated and confirmed by restriction analysis and DNA sequencing.

[1197] Selected clones can be grown overnight in liquid culture medium such as LB broth supplemented with antibiotics. The overnight culture may subsequently be used to inoculate a larger scale culture. The cells are then grown to a desired optical density, during which the expression promoter is turned on.

[1198] After culturing the cells for several more hours, the cells can be harvested by centrifugation. The cell pellet obtained by the centrifugation can be solubilized using various agents known in the art, and the solubilized amino acid sequence of interest or polypeptide can then be purified using a metal chelating column under conditions that allow tight binding of the protein.

[1199] The primers can contain restriction enzyme sites which correspond to the restriction enzyme sites on the selected expression vector, and other useful sequences providing for efficient and reliable translation initiation, rapid purification on a metal chelation column, and proteolytic removal with enterokinase. The PCR-amplified, poly-His tagged sequences can be ligated into an expression vector used to transform an E. coli host based on, for example, strain 52 (W3110 fuhA(tonA) Ion galE rpoHts(htpRts) clpP(lacIq). Transformants can first be grown in LB containing 50 mg/ml carbenicillin at 30° C. with shaking until an O.D.600 of 3-5 is reached. Cultures are then diluted 50-100 fold into C RAP media (prepared by mixing 3.57 g (NH₄)₂SO₄, 0.71 g sodium citrate-2H₂O, 1.07 g KCl, 5.36 g Difco yeast extract, 5.36 g Sheffield hycase SF in 500 mL water, as well as 110 mM MPOS, pH 7.3, 0.55% (w/v) glucose and 7 mM MgSO₄) and grown for approximately 20-30 hours at 30° C. with shaking. Samples were removed to verify expression by SDS-PAGE analysis, and the bulk culture is centrifuged to pellet the cells. Cell pellets were frozen until purification and refolding.

[1200] E. coli paste from 0.5 to 1 L fermentations (6-10 g pellets) was resuspended in 10 volumes (w/v) in 7 M guanidine, 20 mM Tris, pH 8 buffer. Solid sodium sulfite and sodium tetrathionate is added to make final concentrations of 0.1M and 0.02 M, respectively, and the solution was stirred overnight at 4° C. This step results in a denatured protein with all cysteine residues blocked by sulfitolization. The solution was centrifuged at 40,000 rpm in a Beckman Ultracentifuge for 30 min. The supernatant was diluted with 3-5 volumes of metal chelate column buffer (6 M guanidine, 20 mM Tris, pH 7.4) and filtered through 0.22 micron filters to clarify. Depending the clarified extract was loaded onto a 5 mil Qiagen Ni-NTA metal chelate column equilibrated in the metal chelate column buffer. The column was washed with additional buffer containing 50 mM imidazole (Calbiochem, Utrol grade), pH 7.4. The protein was eluted with buffer containing 250 mM imidazole. Fractions containing the desired protein were pooled and stored at 4.degree. C. Protein concentration was estimated by its absorbance at 280 nm using the calculated extinction coefficient based on its amino acid sequence.

### In Mammalian Cells

[1201] This general example illustrates a preparation of a glycosylated form of a desired amino acid sequence of interest or polypeptide component by recombinant expression in mammalian cells.

[1202] The vector pRK5 (see EP 307,247, published Mar. 15, 1989) can be employed as the expression vector. Optionally, the encoding DNA is ligated into pRK5 with selected restriction enzymes to allow insertion of the DNA using ligation methods such as described in Sambrook et al., supra.

[1203] In one embodiment, the selected host cells may be 293 cells. Human 293 cells (ATCC CCL 1573) are grown to confluence in tissue culture plates in medium such as DMEM supplemented with fetal calf serum and optionally, nutrient components and/or antibiotics. About 10 μg of the ligated vector DNA is mixed with about 1 μg DNA encoding the VA RNA gene [Thimmappaya et al., Cell 31:543 (1982)] and dissolved in 500 μl of I mM Tris-HCl, 0.1 mM EDTA, 0.227 M CaCl₂) To this mixture is added, dropwise, 500 μl of 50 mM HEPES (pH 7.35), 280 mM NaCl, 1.5 mM NaPO₄, and a precipitate is allowed to form for 10 minutes at 25° C. The precipitate is suspended and added to the 293 cells and allowed to settle for about four hours at 37° C. The culture medium is aspirated off and 2 ml of 20% glycerol in PBS is added for 30 seconds. The 293 cells are then washed with serum free medium, fresh medium is added and the cells are incubated for about 5 days.

[1204] Approximately 24 hours after the transfections, the culture medium is removed and replaced with culture medium (alone) or culture medium containing 200 μCi/ml ³⁵S-cysteine and 200 μCi/ml ³⁵S-methionine. After a 12 hour incubation, the conditioned medium is collected, concentrated on a spin filter, and loaded onto a 15% SDS gel. The processed gel may be dried and exposed to film for a selected period of time to reveal the presence of amino acid sequence of interest or polypeptide component. The cultures containing transfected cells may undergo further incubation (in serum free medium) and the medium is tested in selected bioassays.

[1205] In an alternative technique, the nucleic acid amino acid sequence of interest or polypeptide component may be introduced into 293 cells transiently using the dextran sulfate method described by Somparyrac et al., Proc. Natl. Acad. Sci., 12:7575 (1981). 293 cells are grown to maximal density in a spinner flask and 700 μg of the ligated vector is added. The cells are first concentrated from the spinner flask by centrifugation and washed with PBS. The DNA-dextran precipitate is incubated on the cell pellet for four hours. The cells are treated with 20% glycerol for 90 seconds, washed with tissue culture medium, and re-introduced into the spinner flask containing tissue culture medium, 5 μg/ml bovine insulin and 0.1 μg/ml bovine transferrin. After about four days, the conditioned media is centrifuged and filtered to remove cells and debris. The sample containing expressed amino acid sequence of interest or polypeptide component can then be concentrated and purified by any selected method, such as dialysis and/or column chromatography.

[1206] In another embodiment, the amino acid sequence of interest or polypeptide component can be expressed in CHO cells. The amino acid sequence of interest or polypeptide component can be transfected into CHO cells using known reagents such as CaPO₄ or DEAE-dextran. As described above, the cell cultures can be incubated, and the medium replaced with culture medium (alone) or medium containing a radiolabel such as ³⁵S-methionine. After determining the presence of amino acid sequence of interest or polypeptide component, the culture medium may be replaced with serum free medium. Preferably, the cultures are incubated for about 6 days, and then the conditioned medium is harvested. The medium containing the expressed amino acid sequence of interest or polypeptide component can then be concentrated and purified by any selected method.

[1207] Epitope-tagged amino acid sequence of interest or polypeptide component may also be expressed in host CHO cells. The amino acid sequence of interest or polypeptide component may be subcloned out of a pRK5 vector. The subclone insert can undergo PCR to fuse in frame with a selected epitope tag such as a poly-his tag into a Baculovirus expression vector. The poly-his tagged amino acid sequence of interest or polypeptide component insert can then be subcloned into a SV40 driven vector containing a selection marker such as DHFR for selection of stable clones. Finally, the CHO cells can be transfected (as described above) with the SV40 driven vector. Labeling may be performed, as described above, to verify expression. The culture medium containing the expressed poly-His tagged amino acid sequence of interest or polypeptide component can then be concentrated and purified by any selected method, such as by Ni²⁺-chelate affinity chromatography.

[1208] In an embodiment the amino acid sequence of interest or polypeptide component are expressed as an IgG construct (immunoadhesin), in which the coding sequences for the soluble forms (e.g. extracellular domains) of the respective proteins are fused to an IgG1 constant region sequence containing the hinge, CH2 and CH2 domains and/or is a poly-His tagged form.

[1209] Following PCR amplification, the respective DNAs are subcloned in a CHO expression vector using standard techniques as described in Ausubel et al., Current Protocols of Molecular Biology, Unit 3.16, John Wiley and Sons (1997). CHO expression vectors are constructed to have compatible restriction sites 5′ and 3′ of the DNA of interest to allow the convenient shuttling of cDNA's. The vector used in expression in CHO cells is as described in Lucas et al., Nucl. Acids Res. 24:9 (1774-1779 (1996), and uses the SV40 early promoter/enhancer to drive expression of the cDNA of interest and dihydrofolate reductase (DHFR). DHFR expression permits selection for stable maintenance of the plasmid following transfection.

### In Yeast

[1210] The following method describes recombinant expression of a desired amino acid sequence of interest or polypeptide component in yeast.

[1211] First, yeast expression vectors are constructed for intracellular production or secretion of a stretch of consecutive amino acids from the ADH2/GAPDH promoter. DNA encoding a desired amino acid sequence of interest or polypeptide component, a selected signal peptide and the promoter is inserted into suitable restriction enzyme sites in the selected plasmid to direct intracellular expression of the amino acid sequence of interest or polypeptide component. For secretion, DNA encoding the stretch of consecutive amino acids can be cloned into the selected plasmid, together with DNA encoding the ADH2/GAPDH promoter, the yeast alpha-factor secretory signal/leader sequence, and linker sequences (if needed) for expression of the stretch of consecutive amino acids.

[1212] Yeast cells, such as yeast strain AB110, can then be transformed with the expression plasmids described above and cultured in selected fermentation media. The transformed yeast supernatants can be analyzed by precipitation with 10% trichloroacetic acid and separation by SDS-PAGE, followed by staining of the gels with Coomassie Blue stain.

[1213] Recombinant amino acid sequence of interest or polypeptide component can subsequently be isolated and purified by removing the yeast cells from the fermentation medium by centrifugation and then concentrating the medium using selected cartridge filters. The concentrate containing the amino acid sequence of interest or polypeptide component may further be purified using selected column chromatography resins.

### In Baculovirus-Infected Insect Cells

[1214] The following method describes recombinant expression of stretches of consecutive amino acids in Baculovirus-infected insect cells.

[1215] The desired nucleic acid encoding the stretch of consecutive amino acids is fused upstream of an epitope tag contained with a baculovirus expression vector. Such epitope tags include poly-his tags and immunoglobulin tags (like Fc regions of IgG). A variety of plasmids may be employed, including plasmids derived from commercially available plasmids such as pVL1393 (Novagen). Briefly, the amino acid sequence of interest or polypeptide component or the desired portion of the amino acid sequence of interest or polypeptide component (such as the sequence encoding the extracellular domain of a transmembrane protein) is amplified by PCR with primers complementary to the 5′ and 3′ regions. The 5′ primer may incorporate flanking (selected) restriction enzyme sites. The product is then digested with those selected restriction enzymes and subcloned into the expression vector.

[1216] Recombinant baculovirus is generated by co-transfecting the above plasmid and BaculoGold™ virus DNA (Pharmingen) into Spodoptera frugiperda (“Sf9”) cells (ATCC CRL 1711) using lipofectin (commercially available from GIBCO-BRL). After 4-5 days of incubation at 28° C., the released viruses are harvested and used for further amplifications. Viral infection and protein expression is performed as described by O'Reilley et al., Baculovirus expression vectors: A laboratory Manual, Oxford: Oxford University Press (1994).

[1217] Expressed poly-his tagged amino acid sequence of interest or polypeptide component can then be purified, for example, by Ni²⁺-chelate affinity chromatography as follows. Extracts are prepared from recombinant virus-infected Sf9 cells as described by Rupert et al., Nature, 362:175-179 (1993). Briefly, Sf9 cells are washed, resuspended in sonication buffer (25 mL Hepes, pH 7.9; 12.5 mM MgCl₂; 0.1 mM EDTA; 10% Glycerol; 0.1% NP40; 0.4 M KCl), and sonicated twice for 20 seconds on ice. The sonicates are cleared by centrifugation, and the supernatant is diluted 50-fold in loading buffer (50 mM phosphate, 300 mM NaCl, 10% Glycerol, pH 7.8) and filtered through a 0.45 μm filter. A Ni²⁺-NTA agarose column (commercially available from Qiagen) is prepared with a bed volume of 5 mL, washed with 25 mL of water and equilibrated with 25 mL of loading buffer. The filtered cell extract is loaded onto the column at 0.5 mL per minute. The column is washed to baseline A₂₈₀ with loading buffer, at which point fraction collection is started. Next, the column is washed with a secondary wash buffer (50 mM phosphate; 300 mM NaCl, 10% Glycerol, pH 6.0), which elutes nonspecifically bound protein. After reaching A₂₈₀ baseline again, the column is developed with a 0 to 500 mM Imidazole gradient in the secondary wash buffer. One mL fractions are collected and analyzed by SDS-PAGE and silver staining or western blot with Ni²⁺-NTA-conjugated to alkaline phosphatase (Qiagen). Fractions containing the eluted His₁₀-tagged sequence are pooled and dialyzed against loading buffer.

[1218] Alternatively, purification of the IgG tagged (or Fc tagged) amino acid sequence can be performed using known chromatography techniques, including for instance, Protein A or Protein G column chromatography.

[1219] Fc containing constructs of proteins can be purified from conditioned media as follows. The conditioned media is pumped onto a 5 ml Protein A column (Pharmacia) which is equilibrated in 20 mM Na phosphate buffer, pH 6.8. After loading, the column is washed extensively with equilibration buffer before elution with 100 mM citric acid, pH 3.5. The eluted protein is immediately neutralized by collecting 1 ml fractions into tubes containing 275 mL of 1 M Tris buffer, pH 9. The highly purified protein is subsequently desalted into storage buffer as described above for the poly-His tagged proteins. The homogeneity of the proteins is verified by SDS polyacrylamide gel (PEG) electrophoresis and N-terminal amino acid sequencing by Edman degradation.

### Examples of Pharmaceutical Compositions

[1220] Non-limiting examples of such compositions and dosages are set forth as follows:

### Etanercept and Related Compositions

[1221] Compositions comprising tetrahedral or octahedral antibodies wherein one or more domains of tetrahedral or octahedral antibodies comprise consecutive amino acids having the sequence of etanercept (e.g. Enbrel) or the sequence of one or more domains thereof, may comprise mannitol, sucrose, and tromethamine. In an embodiment, the composition is in the form of a lyophilizate. In an embodiment, the composition is reconstituted with, for example, Sterile Bacteriostatic Water for injection (BWFI), USP (containing 0.9% benzyl alcohol). In an embodiment the compound is administered to a subject for reducing signs and symptoms, inducing major clinical response, inhibiting the progression of structural damage, and improving physical function in subjects with moderately to severely active rheumatoid arthritis. The compound may be initiated in combination with methotrexate (MTX) or used alone. In an embodiment the compound is administered to a subject for reducing signs and symptoms of moderately to severely active polyarticular-course juvenile rheumatoid arthritis in subjects who have had an inadequate response to one or more DMARDs. In an embodiment the compound is administered to a subject for reducing signs and symptoms, inhibiting the progression of structural damage of active arthritis, and improving physical function in subjects with psoriatic arthritis. In an embodiment the compound is administered to a subject for reducing signs and symptoms in subjects with active ankylosing spondylitis. In an embodiment the compound is administered to a subject for the treatment of chronic moderate to severe plaque psoriasis. In an embodiment wherein the subject has rheumatoid arthritis, psoriatic arthritis, or ankylosing spondylitis the compound is administered at 25-75 mg per week given as one or more subcutaneous (SC) injections. In a further embodiment the compound is administered at 50 mg per week in a single SC injection. In an embodiment wherein the subject has plaque psoriasis the compound is administered at 25-75 mg twice weekly or 4 days apart for 3 months followed by a reduction to a maintenance dose of 25-75 mg per week. In a further embodiment the compound is administered at a dose of at 50 mg twice weekly or 4 days apart for 3 months followed by a reduction to a maintenance dose of 50 mg per week. In an embodiment the dose is between 2× and 100× less than the doses set forth herein. In an embodiment wherein the subject has active polyarticular-course JRA the compound may be administered at a dose of 0.2-1.2 mg/kg per week (up to a maximum of 75 mg per week). In a further embodiment the compound is administered at a dose of 0.8 mg/kg per week (up to a maximum of 50 mg per week). In some embodiments the dose is between 2× and 100× less than the doses set forth hereinabove.

### Infliximab, Adalimumab, and Related Compositions

[1222] Compositions comprising tetrahedral or octahedral antibodies wherein one or more domains of tetrahedral or octahedral antibodies comprise consecutive amino acids having the sequence of infliximab (e.g. Remicade) or the sequence of one or more domains thereof, may comprise sucrose, polysorbate 80, monobasic sodium phosphate, monohydrate, and dibasic sodium phosphate, dihydrate. Preservatives are not present in one embodiment. In an embodiment, the composition is in the form of a lyophilizate. In an embodiment, the composition is reconstituted with, for example, Water for Injection (BWFI), USP. In an embodiment the pH of the composition is 7.2 or is about 7.2. In one embodiment the compound is administered is administered to a subject with rheumatoid arthritis in a dose of 2-4 mg/kg given as an intravenous infusion followed with additional similar doses at 2 and 6 weeks after the first infusion then every 8 weeks thereafter. In a further embodiment the compound is administered in a dose of 3 mg/kg given as an intravenous infusion followed with additional similar doses at 2 and 6 weeks after the first infusion then every 8 weeks thereafter. In an embodiment the dose is adjusted up to 10 mg/kg or treating as often as every 4 weeks. In an embodiment the compound is administered in combination with methotrexate. In one embodiment the compound is administered to a subject with Crohn's disease or fistulizing Crohn's disease at dose of 2-7 mg/kg given as an induction regimen at 0, 2 and 6 weeks followed by a maintenance regimen of 4-6 mg/kg every 8 weeks thereafter for the treatment of moderately to severely active Crohn's disease or fistulizing disease. In a further embodiment the compound is administered at a dose of 5 mg/kg given as an induction regimen at 0, 2 and 6 weeks followed by a maintenance regimen of 5 mg/kg every 8 weeks thereafter for the treatment of moderately to severely active Crohn's disease or fistulizing disease. In an embodiment the dose is adjusted up to 10 mg/kg. In one embodiment the compound is administered to a subject with ankylosing spondylitis at a dose of 2-7 mg/kg given as an intravenous infusion followed with additional similar doses at 2 and 6 weeks after the first infusion, then every 6 weeks thereafter. In a further embodiment the compound is administered at a dose of 5 mg/kg given as an intravenous infusion followed with additional similar doses at 2 and 6 weeks after the first infusion, then every 6 weeks thereafter. In one embodiment the compound is administered to a subject with psoriatic arthritis at a dose of 2-7 mg/kg given as an intravenous infusion followed with additional similar doses at 2 and 6 weeks after the first infusion then every 8 weeks thereafter. In a further embodiment the compound is administered at a dose of 5 mg/kg given as an intravenous infusion followed with additional similar doses at 2 and 6 weeks after the first infusion then every 8 weeks thereafter. In an embodiment the compound is administered with methotrexate. In one embodiment the compound is administered to a subject with ulcerative colitis at a dose of 2-7 mg/kg given as an induction regimen at 0, 2 and 6 weeks followed by a maintenance regimen of 2-7 mg/kg every 8 weeks thereafter for the treatment of moderately to severely active ulcerative colitis. In a further embodiment the compound is administered to a subject with ulcerative colitis at a dose of 5 mg/kg given as an induction regimen at 0, 2 and 6 weeks followed by a maintenance regimen of 5 mg/kg every 8 weeks thereafter. In some embodiments the dose is between 2× and 100× less than the doses set forth hereinabove for treating the individual diseases.

### Rituximab, Ocrelizumab, and Related Compositions

[1223] Compositions comprising tetrahedral or octahedral antibodies wherein one or more domains of tetrahedral or octahedral antibodies comprise consecutive amino acids having the sequence of rituximab, ocrelizumab, or the sequence of one or more domains thereof, may comprise sodium chloride, sodium citrate dihydrate, sodium citrate dihydrate, and Sterile Water for Injection. In an embodiment, the composition is provided in a sterile, clear, colourless, preservative-free liquid concentrate for intravenous (IV) administration. In an embodiment, the composition is supplied at a concentration of 10 mg/ml. In an embodiment, the product is formulated for intravenous administration in 9.0 mg/ml sodium chloride, 7.35 mg/ml sodium citrate dihydrate, 0.7 mg/ml polysorbate 80, and Sterile Water for Injection. In an embodiment the pH of the composition is 6.5 or about 6.5. In an embodiment, the composition comprises the tetrahedral or octahedral antibody at a concentration of 30 mg/mL in 20 mM sodium acetate, 106 mM trehalose dihydrate, 0.02% (w/v) polysorbate 20, at pH 5.3.

### Blinatumomab, and Related Compositions

[1224] Compositions comprising tetrahedral or octahedral antibodies wherein one or more domains of tetrahedral or octahedral antibodies comprise consecutive amino acids having the sequence of blinatumomab, or the sequence of one or more domains thereof, may comprise citric acid monohydrate (E330), trehalose dihydrate, lysine hydrochloride, polysorbate 80, sodium hydroxide (for pH-adjustment), and water for injections. In an embodiment, the pH is 7 or about 8. For treatment of relapsed or refractory B-precursor ALL, the dose depends on the patient's bodyweight. The composition is infused continuously during a treatment cycle of 4 weeks. Each cycle of treatment is separated by a 2-week treatment-free interval. Patients who have no signs of cancer after 2 cycles may be treated with up to 3 additional cycles of treatment. For treatment of patients with minimal residual disease, the dose depends on the patient's bodyweight. The composition is infused continuously during a treatment cycle of 4 weeks. Patients may be treated for up to 3 additional treatment cycles, each one given after a 2-week treatment-free interval.

### ACE2 and Related Compositions

[1225] Compositions comprising tetrahedral or octahedral antibodies wherein one or more domains of tetrahedral or octahedral antibodies comprise consecutive amino acids having the sequence of ACE2 or portions thereof, may comprise known excipients such as those discussed in the sections above. Such compositions may be used, for example, for treatment of SARS-CoV-2.

[1226] In each of the embodiments of the compositions described herein, the compositions, when in the form of a lyophilizate, may be reconstituted with, for example, sterile aqueous solutions, sterile water, Sterile Water for Injections (USP), Sterile Bacteriostatic Water for Injections (USP), and equivalents thereof known to those skilled in the art.

[1227] It is understood that in administration of any of the instant compounds, the compound may be administered in isolation, in a carrier, as part of a pharmaceutical composition, or in any appropriate vehicle.

### Dosage

[1228] It is understood that where a dosage range is stated herein, e.g. 1-10 mg/kg per week, the invention disclosed herein also contemplates each integer dose, and tenth thereof, between the upper and lower limits. In the case of the example given, therefore, the invention contemplates 1.0, 1.1, 1.2, 1.3, 1.4, 1.5, 1.6, 1.7, 1.8, 1.9, 2.0, 2.1, 2.2, 2.3, 2.4 etc. mg/kg up to 10 mg/kg.

[1229] In embodiments, the compounds of the present invention can be administered as a single dose or may be administered as multiple doses.

[1230] In general, the daily dosage for treating a disorder or condition according to the methods described above will generally range from about 0.01 to about 10.0 mg/kg body weight of the subject to be treated.

[1231] Variations based on the aforementioned dosage ranges may be made by a physician of ordinary skill taking into account known considerations such as the weight, age, and condition of the person being treated, the severity of the affliction, and the particular route of administration chosen.

[1232] It is also expected that the compounds disclosed will affect cooperative binding with attendant consequences on effective dosages required.

### Pharmaceuticals

[1233] The term “pharmaceutically acceptable carrier” is understood to include excipients, carriers or diluents. The particular carrier, diluent or excipient used will depend upon the means and purpose for which the active ingredient is being applied.

[1234] For parenteral administration, solutions containing a compound of this invention or a pharmaceutically acceptable salt thereof in sterile aqueous solution may be employed. Such aqueous solutions should be suitably buffered if necessary and the liquid diluent first rendered isotonic with sufficient saline or glucose. These particular aqueous solutions are especially suitable for intravenous, intramuscular, subcutaneous and intraperitoneal administration. The sterile aqueous media employed are all readily available by standard techniques known to those skilled in the art.

[1235] The compositions of this invention may be in a variety of forms. These include, for example, liquid, semi-solid and solid dosage forms, such as liquid solutions (e.g., injectable and infusible solutions), dispersions or suspensions. The preferred form depends on the intended mode of administration and therapeutic application. Some compositions are in the form of injectable or infusible solutions. A mode of administration is parenteral (e.g., intravenous, subcutaneous, intraperitoneal, intramuscular). In an embodiment, the compound is administered by intravenous infusion or injection. In another embodiment, the compound is administered by intramuscular or subcutaneous injection. In another embodiment, the compound is administered intranasally.

[1236] For therapeutic use, the compositions disclosed here can be administered in various manners, including soluble form by bolus injection, continuous infusion, sustained release from implants, oral ingestion, local injection (e.g. intracrdiac, intramuscular), systemic injection, or other suitable techniques well known in the pharmaceutical arts. Other methods of pharmaceutical administration include, but are not limited to oral, subcutaneously, transdermal, intravenous, intramuscular and parenteral methods of administration. Typically, a soluble composition will comprise a purified compound in conjunction with physiologically acceptable carriers, excipients or diluents. Such carriers will be nontoxic to recipients at the dosages and concentrations employed. The preparation of such compositions can entail combining a compound with buffers, antioxidants, carbohydrates including glucose, sucrose or dextrins, chelating agents such as EDTA, glutathione and other stabilizers and excipients. Neutral buffered saline or saline mixed with conspecific serum albumin are exemplary appropriate diluents. The product can be formulated as a lyophilizate using appropriate excipient solutions (e.g., sucrose) as diluents.

[1237] Other derivatives comprise the compounds/compositions of this invention covalently bonded to a nonproteinaceous polymer. The bonding to the polymer is generally conducted so as not to interfere with the preferred biological activity of the compound, e.g. the binding activity of the compound to a target. The nonproteinaceous polymer ordinarily is a hydrophilic synthetic polymer, i.e., a polymer not otherwise found in nature. However, polymers which exist in nature and are produced by recombinant or in vitro methods are useful, as are polymers which are isolated from nature. Hydrophilic polyvinyl polymers fall within the scope of this invention, e.g. polyvinylalcohol and polyvinylpyrrolidone. Particularly useful are polyalkylene ethers such as polyethylene glycol, polypropylene glycol, polyoxyethylene esters or methoxy polyethylene glycol; polyoxyalkylenes such as polyoxyethylene, polyoxypropylene, and block copolymers of polyoxyethylene and polyoxypropylene (Pluronics); polymethacrylates; carbomers; branched or unbranched polysaccharides which comprise the saccharide monomers D-mannose, D- and L-galactose, fucose, fructose, D-xylose, L-arabinose, D-glucuronic acid, sialic acid, D-galacturontc acid, D-mannuronic acid (e.g. polymannuronic acid, or alginic acid), D-glucosamine, D-galactosamine, D-glucose and neuraminic acid including homopolysaccharides and heteropolysaccharides such as lactose, amylopectin, starch, hydroxyethyl starch, amylose, dextran sulfate, dextran, dextrins, glycogen, or the polysaccharide subunit of acid mucopolysaccharides, e.g. hyaluronic acid; polymers of sugar alcohols such as polysorbitol and polymannitol; as well as heparin or heparon.

[1238] The pharmaceutical compositions of the invention may include a “therapeutically effective amount” or a “prophylactically effective amount” of a compound of the invention. A “therapeutically effective amount” refers to an amount effective, at dosages and for periods of time necessary, to achieve the desired therapeutic result. A therapeutically effective amount of the compound may vary according to factors such as the disease state, age, sex, and weight of the individual. A therapeutically effective amount is also one in which any toxic or detrimental effects of the compound are outweighed by the therapeutically beneficial effects. A “prophylactically effective amount” refers to an amount effective, at dosages and for periods of time necessary, to achieve the desired prophylactic result. Typically, since a prophylactic dose is used in subjects prior to or at an earlier stage of disease, the prophylactically effective amount will be less than the therapeutically effective amount.

### General

[1239] All combinations of the various elements disclosed herein are within the scope of the invention.

[1240] As used herein, all headings are simply for organization and are not intended to limit the disclosure in any manner. The content of any individual section may be equally applicable to all sections. All combinations of the various elements disclosed herein are within the scope of the invention.

[1241] Additional objects, advantages, and novel features of the present invention will become apparent to one ordinarily skilled in the art upon examination of the following examples, which are not intended to be limiting. Additionally, each of the various embodiments and aspects of the present invention as delineated hereinabove and as claimed in the claims section below finds experimental support in the following examples.

[1242] It is appreciated that certain features of the invention, which are, for clarity, described in the context of separate embodiments, may also be provided in combination in a single embodiment. Conversely, various features of the invention, which are, for brevity, described in the context of a single embodiment, may also be provided separately or in any suitable sub-combination or as suitable in any other described embodiment of the invention. Certain features described in the context of various embodiments are not to be considered essential features of those embodiments, unless the embodiment is inoperative without those elements.

[1243] This invention will be better understood by reference to the Examples which follow, but those skilled in the art will readily appreciate that the specific experiments detailed are only illustrative of the invention as described more fully in the claims which follow thereafter.

### EXAMPLES

### Example 1—Methods and Materials

### Recombinant Proteins

[1244] Recombinant proteins were expressed in Chinese hamster ovary (CHO) cells using a mammalian expression vector and purified by Protein A affinity chromatography and size-exclusion chromatography (SEC). Production was carried out by transient expression in CHO-K1 cells adapted to serum-free suspension culture (TunaCHO, LakePharma Inc., Belmont, Calif.). Suspension CHO cells were seeded in a shake flask and expanded using a serum-free and chemically defined medium. On the day of transfection, the expanded cells were seeded into a new vessel with fresh medium. Transient transfections were done with the addition of transfection reagents complexed with DNA under high density conditions. Transfections were carried out in cultures of 0.1 to 2.0 liters. After transfection, the cells were maintained as a batch-fed culture in a shake flask until the end of the production run. The conditioned cell culture fluid was harvested after 7 to 14 days, clarified by centrifugation, and sterile-filtered prior to purification.

[1245] Protein A affinity chromatography was carried out by applying the culture supernatant to a column packed with CaptivA® Protein A Affinity Resin (Repligen, Mass., USA) pre-equilibrated with 137 mM NaCl 2.7 mM KCl 10 mM Na2HPO4 2 mM KH2PO4 pH 7.4 (PBS). The column was washed with PBS buffer until the OD280 value returned to baseline. The target protein was then eluted with 0.25% acetic acid buffer at pH 3.5. Fractions were collected, buffered with 1 M HEPES, and the OD280 value of each fraction was recorded. Fractions containing the target protein were pooled, buffer exchanged into 100 mM HEPES, 100 mM NaCl, 50 mM NaOAc, pH 6.0, and filtered through a 0.2 μm membrane filter and stored at 4° C. prior to use. The protein concentration was calculated from the OD280 value and the calculated extinction coefficient.

[1246] Preparative SEC was carried out using an AKTA Avant 25 FPLC system (GE Healthcare, Uppsala, Sweden). Proteins were first concentrated to 10-15 mg/ml using an Amicon Ultra-15, 3MWCO, ultracentrifugal filter unit, catalog #UFC900324 (Millipore, Burlington, Mass.), then loaded onto a HiLoad 26/600 Superdex 200 prep grade column (GE Healthcare). Elution was carried out with Dulbecco's phosphate-buffered saline without calcium or magnesium salts (PBS) (UCSF Cell Culture Facility, San Francisco, Calif.) containing 10 mM EDTA. Fractions corresponding to the protein of interest were identified based upon analytical SEC and analysis by reducing and non-reducing SDS-PAGE, and pooled, concentrated by ultrafiltration, and stored at 4° C.

### Heterobifunctional Crosslinkers

TABLE 1
Heterobifunctional Crosslinkers

| Name | Formula | Mol Wt | Sequence | Manufacture | Item # |
|---|---|---|---|---|---|
| Az-thioester | C₃₂H₄₅O₁₀N₁₁S | 775.83 | Azidoacetyl-DKTHT-thiophenol | CPC Scientific Inc | 860245 |
| Az-P12- | C₅₉H₉₈O₂₃N₁₂S | 1375.54 | Azide-PEG₁₂-DHTHT-thiophenol | CPC Scientific Inc | 852119 |
| thioester | | | | | |
| Az-P24- | C₈₃H₁₄₆O₃₅N₁₂S | 1904.17 | Azide-PEG₂₄-DHTHT-thiophenol | CPC Scientific Inc | 834144 |
| thioester | | | | | |
| Az-P36- | C₁₀₇H₁₉₄O₄₇N₁₂S | 2432.79 | Azide-PEG₃₆-DHTHT-thiophenol | CPC Scientific Inc | 860249 |
| thioester | | | | | |
| Az-P48- | C₁₃₄H₂₄₇O₆₀N₁₃S | 3032.50 | Azidoacetyl-PEG₃₆PEG₁₂-DKTHT- | CPC Scientific Inc | 869441 |
| thioester | | | thiophenol | | |
| Tet-DBCO | C₃₄H₃₃N₇O₇S | 683.70 | Methyltetrazine-Sulfo-DBCO | Click Chemistry | 1022 |
| | | | | Tools | |
| TCO-P4- | C₄₁H₅₄N₄O₁₂S | 826.95 | Trans-Cyclooctene-Sulfo-PEG₄- | Click Chemistry | 1005 |
| DBCO | | | DBCO | Tools | |
| Tet-P4-Mal | C₂H₃₀N₆O₇ | 514.53 | Methyltetrazine-PEG₄-Maleimide | Click Chemistry | 1068 |
| | | | | Tools | |
| TCO-P3-Mal | C₂₆H₄₁N₃O₈ | 523.62 | Trans-Cyclooctene-PEG₃-Maleimide | Click Chemistry | 1002 |
| | | | | Tools | |
| TCO-P12-Mal | C₄₆H₈₀N₄O₁₈ | 977.14 | Trans-Cyclooctene-PEG₁₂- | AnaSpec Inc | 659252 |
| | | | Maleimide | | |
| TCO-P24-Mal | C₇₀H₁₂₈N₄O₃₀ | 1505.77 | Trans-Cyclooctene-PEG₂₄- | AnaSpec Inc | 659254 |
| | | | Maleimide | | |
| TCO-P36-Mal | C₉₄H₁₇₆N₄O₄₂ | 2034.40 | Trans-Cyclooctene-PEG₃₆- | AnaSpec Inc | 659256 |
| | | | Maleimide | | |

### Electrospray Ionization Mass Spectrometry (ESI-MS)

[1248] Intact proteins were analyzed by ESI-MS using a Model 1260 HPLC system (Agilent Technologies, Santa Clara, Calif.) and MicroTOF-QII MS system (Bruker Corporation, Billerica, Mass.). A BioResolve RP mAb Polyphenyl column with a 2.7 micron particle size, 450 angstrom pore size, and dimensions of 2.1×100 mm (Waters Corporation, Milford, Mass.) was used at 50° C. with a flow rate of 0.3 ml/min, and injection volume of 2-5 uL. The mobile phase was a gradient of 0.1% formic acid in water (solvent A) and 0.1% formic acid in acetonitrile (solvent B) as follows: 0 min, 95%:5%; 2 min, 65%:35%; 10 min, 54%:46%; 11 min, 5%:95% held for 3 minutes. Data was collected in full scan MS mode with a mass range of 600-4000 Da. The collision RF setting was 800 Vpp. For deglycosylation analysis, samples were reduced and deglycosylated with Rapid PNGase F, P0710S (New England BioLabs Inc, Ipswich, Mass.) according to the manufacturer's instructions. Bruker DataAnalysis Version 4.0 SP4 software was used for mass spectral display and deconvolution.

### Analytical Size-Exclusion HPLC (SE-HPLC)

[1249] Analytical SE-HPLC was carried out using a Prominence HPLC system (Shimadzu Corporation, Kyoto, Japan). Zenix-C columns with a 3 micron particle size, 300 angstrom pore size, and dimensions of 4.6×300 mm (Sepax Technologies, Newark, Del.) were used individually or as a pair of columns connected in series. Mobile phase, flow rate, column temperature, and detection wavelength used were 50 mM sodium phosphate pH 7.4 and 300 mM NaCl, 0.2 mL/min, 25° C., and 280/214 nm, respectively. LabSolutions v5.9 software (Shimadzu Corporation) was used for UV data acquisition and processing.

### Multi-Angle Light Scattering Analysis (MALS)

[1250] The molar mass of proteins was determined by combining SE-HPLC with measurement of refractive index (RI) and multi-angle light scattering (SEC-MALS) using an Optilab T-rEX RI detector and Treos MALS detector in-line (Wyatt Technology, Goleta, Calif.). The temperature of detectors was maintained at 25° C. The signal obtained for the monomeric form of bovine serum albumin (BSA) was used to normalize the detectors and to correct for band broadening between detectors. Astra v7.3 software (Wyatt Technology) was used for light scattering and refractive index data acquisition and processing. A value of 0.185 mL/g was used for the do/dc ratio of proteins.

### Stoichiometric Binding Measurements by SE-HPLC

[1251] The relative binding affinities of two distinct proteins to a common ligand-binding partner was determined by stoichiometric binding analysis using SE-HPLC. Partially purified mixtures of the two proteins, or mixtures prepared by combining two purified proteins, were assessed for the relative binding affinity of their constituents in a binding reaction containing a molar ratio of 0.2 to 2.0 of the ligand-binding partner. Following incubation for two hours at 25° C., binding reaction were analyzed by SE-HPLC to determine the remaining unbound fraction of each of the two proteins.

### Kinetic Exclusion Assay (KinExA®)

[1252] Equilibrium binding affinity and kinetic binding measurements were made between unmodified molecules in solution using a KinExA 3200 instrument (Sapidyne Instruments, Boise, Id.). For Kd analysis of ACE2 binding to SARS-CoV-2 S protein, PMMA beads were adsorption-coated with recombinant SARS-CoV-2 spike protein, Reference No. 46328 (LakePharma Inc, Belmont, Calif.); then used as the solid-phase to capture the ACE2 protein (the constant binding partner (CBP)). For each experiment, S protein was titrated in a background of the ACE2 protein and allowed to reach equilibrium. The binding reactions were then briefly exposed to the solid phase and a portion of free ACE2 protein was captured and then detected with a fluorescent secondary molecule. The short contact time with the solid phase is less than the time needed for dissociation of the pre-formed complex in solution, thus competition between the solution and the solid phase titrated binding partner is “kinetically excluded.” Since the solid phase is only used as a probe for the free CBP in each sample, the solution equilibrium is not altered during such KinExA measurements.

### Octet

### Kinetic Assay on Fc Gamma Receptors

[1253] The kinetic characterization of antibody binding on Fc gamma receptors were performed on a Octet Red384 (Satorius) using 384-well plates.

[1254] Various recombinant human Fc gamma receptors containing polyhistidine tag at C-terminus were purchased from R&D systems. The Fc gamma receptors with concentration of 5 μg/ml were immobilized on Anti-Penta-His biosensors (Satorius) in PBS-B (PBS with 1 mg/mL BSA, pH 7.4) at 26° C. with the orbital shake speed of 1000 rpm. After washing with PBS-B, the Fc gamma receptors captured biosensors were submerged in different concentrations of testing antibodies for 15 seconds. The biosensors were then submerged in PBS-B for 60 seconds during dissociation. Biosensors were regenerated by stripping with glycine pH1.5 at the end of each cycle. Data analysis was conducted using a standard 1:1 binding model.

### Example 2—Tetrahedral Antibodies with the Structures Shown in FIG. 1 (Panel A), FIG. 2, FIG. 11 (Panels A-H), FIG. 12

[1255] Panel A of FIG. 1, FIG. 2, and panels A-H of FIG. 11 show the schematic structure of tetrahedral antibodies of this example.

[1256] FIG. 12 describes the preparation of tetrahedral antibody Rc6-P4-Rc6.

### Rc6-Rc6

[1257] A tetrahedral antibody with the structure shown in FIG. 1, Panel A was constructed with the following domains:
[1258] a) Domain 1: Fc
[1259] b) Domain 2: Fc
[1260] c) Domain 3: anti-CD20Fab
[1261] d) Domain 4: anti-CD20Fab

### Rc6-B19

[1262] A tetrahedral antibody with the structure shown in FIG. 1, Panel A was constructed with the following domains:
[1263] a) Domain 1: Fc
[1264] b) Domain 2: Fc
[1265] c) Domain 3: anti-CD20Fab
[1266] d) Domain 4: anti-CD19Fab

### Rc66SIDE-Rc66SIDE

[1267] A tetrahedral antibody with the structure shown in FIG. 1A was constructed with the following domains:
[1268] a) Domain 1: FcSIDE
[1269] b) Domain 2: FcSIDE
[1270] c) Domain 3: anti-CD20Fab
[1271] d) Domain 4: anti-CD20Fab

### HA9AAC9-HA9AAC9

[1272] A tetrahedral antibody with the structure shown in FIG. 1, Panel A was constructed with the following domains:
[1273] a) Domain 1: FcAAC9
[1274] b) Domain 2: FcAAC9
[1275] c) Domain 3: anti-CD16Fab
[1276] d) Domain 4: anti-CD26Fab

### 6Ec66-Soc66

[1277] A tetrahedral antibody with the structure shown in FIG. 1, Panel A was constructed with the following domains:
[1278] a) Domain 1: Fc
[1279] b) Domain 2: Fc
[1280] c) Domain 3: anti-betaAmyloidFab
[1281] d) Domain 4: anti-betaAmyloid Fab

### Ace2-Ace2

[1282] A tetrahedral antibody with the structure shown in FIG. 1, Panel A was constructed with the following domains:
[1283] a) Domain 1: Fc
[1284] b) Domain 2: Fc
[1285] c) Domain 3: Ace2-615
[1286] d) Domain 4: Ace2-615

TABLE 2
SEO IDs of Proteins Used for the Preparation of Tetrahedral Antibodies

| Protein | Light chain 1 | Light Chain 2 | Heavy chain | Fc fusion chain | Fc chain |
|---|---|---|---|---|---|
| Rc6 | SEQ ID NO 1 | | SEQ ID NO 2 | | SEQ ID NO 3 |
| Rc6HYRF | SEQ ID NO 1 | | SEQ ID NO 4 | | SEQ ID NO 3 |
| Rc60 | SEQ ID NO 1 | | SEQ ID NO 5 | | SEQ ID NO 6 |
| Rc66 | SEQ ID NO 1 | | SEQ ID NO 7 | | SEQ ID NO 8 |
| Rc66SIDE | SEQ ID NO 1 | | SEQ ID NO 9 | | SEQ ID NO 10 |
| Rc66AAC9 | SEQ ID NO 1 | | SEQ ID NO 11 | | SEQ ID NO 12 |
| HA9c66AAC9 | SEQ ID NO 16 | | SEQ ID NO 17 | | SEQ ID NO 12 |
| HRc66 | SEQ ID NO 18 | | SEQ ID NO 19 | | SEQ ID NO 8 |
| B19c66 | SEQ ID NO 20 | | SEQ ID NO 21 | | SEQ ID NO 8 |
| B19c66AAC9 | SEQ ID NO 20 | | SEQ ID NO 22 | | SEQ ID NO 12 |
| Blc6AAC9 | | | | SEQ ID NO 23 | SEQ ID NO 12 |
| Drc66 | SEQ ID NO 24 | | SEQ ID NO 25 | | SEQ ID NO 8 |
| 6Ec66 | SEQ ID NO 32 | | SEQ ID NO 33 | | SEQ ID NO 8 |
| Soc66 | SEQ ID NO 35 | | SEQ ID NO 36 | | SEQ ID NO 8 |
| IL15c6AAC9 | | | | SEQ ID NO 26 | SEQ ID NO 12 |
| IL15c6AAC9N79Q | | | | SEQ ID NO 31 | SEQ ID NO 12 |
| IL15Rc6AAC9 | | | | SEQ ID NO 27 | SEQ ID NO 12 |
| ObSpc60PG | SEQ ID NO 43 | SEQ ID NO 44 | SEQ ID NO 45 | | SEQ ID NO 42 |
| Obc60PG | SEQ ID NO 46 | | SEQ ID NO 47 | | SEQ ID NO 42 |
| ObSP41BBLc60PG | SEQ ID NO 43 | SEQ ID NO 44 | SEQ ID NO 48 | | SEQ ID NO 42 |
| Ob41BBLc60PG | SEQ ID NO 46 | | SEQ ID NO 49 | | SEQ ID NO 42 |
| ObSpc60PG41BBL- | SEQ ID NO 43 | SEQ ID NO 44 | SEQ ID NO 45 | | SEQ ID NO 50 |
| RF | | | | | |
| Obc60PG41BBL- | SEQ ID NO 46 | | SEQ ID NO 47 | | SEQ ID NO 50 |
| RF | | | | | |
| Glc60PG | SEQ ID NO 38 | SEQ ID NO 39 | SEQ ID NO 40 | | SEQ ID NO 42 |
| Cic60PG | SEQ ID NO 51 | SEQ ID NO 52 | SEQ ID NO 53 | | SEQ ID NO 42 |
| ACE2RQ615c60PG | | | | SEQ ID NO 62 | SEQ ID NO 42 |
| ACE2RQ615c61PG | | | | SEQ ID NO 63 | SEQ ID NO 64 |
| ACE2RQ106c60PG | | | | SEQ ID NO 82 | SEQ ID NO 42 |
| ACE2RQ106x6c60 | | | | SEQ ID NO 84 | SEQ ID NO 42 |
| PG | | | | | |
| CoV2spike680c60P | | | | SEQ ID NO 86 | SEQ ID NO 42 |
| G | | | | | |
| SARSspike666c60P | | | | SEQ ID NO 88 | SEQ ID NO 42 |
| G | | | | | |
| RaTG13spike680c6 | | | | SEQ ID NO 89 | SEQ ID NO 42 |
| 0PG | | | | | |
| CD3Ec60PG | | | | SEQ ID NO 55 | SEQ ID NO 42 |
| 41BBc60PG | | | | SEQ ID NO 56 | SEQ ID NO 42 |
| CD19c60PG | | | | SEQ ID NO 58 | SEQ ID NO 42 |
| CEACAM5c60PG | | | | SEQ ID NO 60 | SEQ ID NO 42 |

TABLE 3
Properties of Proteins Used for the Preparation of Tetrahedral Antibodies

| | D1 domain | D1 binding | | D3 binding |
|---|---|---|---|---|
| Protein | type | specificity | D3 domain type | specificity |
| Rc6 | Fc homodimer | FcRn, FcRγ | Fab | CD20 |
| Rc6HYRF | Fc heterodimer | FcRn, FcRγ | Fab | CD20 |
| | (HYRF) | (SpA-low) | | |
| Rc60 | Fc heterodimer | FcRn, FcRγ | Fab | CD20 |
| | (KiH) | | | |
| Rc66 | Fc heterodimer | FcRn, FcRγ | Fab | CD20 |
| | (ZW1) | | | |
| Rc66SIDE | Fc heterodimer | FcRn, FcRγ-high | Fab | CD20 |
| | (ZW1) | | | |
| Rc66AAC9 | Fc heterodimer | FcRn, FcRγ-low | Fab | CD20 |
| | (ZW1) | | | |
| HA9c66AAC9 | Fc heterodimer | FcRn, FcRγ-low | Fab | CD 16 |
| | (ZW1) | | | |
| HRc66 | Fc heterodimer | FcRn, FcRγ | Fab | CD20 |
| | (ZW1) | | | |
| B19c66 | Fc heterodimer | FcRn, FcRγ | Fab | CD19 |
| | (ZW1) | | | |
| B19c66AAC9 | Fc heterodimer | FcRn, FcRγ-low | Fab | CD19 |
| | (ZW1) | | | |
| Blc6AAC9 | Fc heterodimer | FcRn, FcRγ-low | ScFv-ScFv | CD 19, CD3e |
| | (ZW1) | | | |
| Drc66 | Fc heterodimer | FcRn, FcRγ | Fab | DR5 |
| | (ZW1) | | | |
| 6Ec66 | Fc heterodimer | FcRn, FcRγ | Fab | amyloid beta (3-8) |
| | (ZW1) | | | |
| Soc66 | Fc heterodimer | FcRn, FcRγ | Fab | amyloid beta (17- |
| | (ZW1) | | | 24) |
| IL15c6AAC9 | Fc heterodimer | FcRn, FcRγ-low | IL-15 | IL-15R alpha |
| | (ZW1) | | | |
| IL15c6AAC9N79Q | Fc heterodimer | FcRn, FcRγ-low | IL-15 | IL-15R alpha |
| | (ZW1) | | | |
| IL15Rc6AAC9 | Fc heterodimer | FcRn, FcRγ-low | IL-15Rα | IL-15 |
| | (ZW1) | | | |
| ObSpc60PG | Fc heterodimer | FcRn, FcRγ-low | Fab-Fab | CD20, CD3e |
| | (KiH) | | | |
| Obc60PG | Fc heterodimer | FcRn, FcRγ-low | Fab | CD20 |
| | (KiH) | | | |
| ObSP41BBLc60PG | Fc heterodimer | FcRn, FcRγ-low, | Fab-Fab | CD20, CD3e |
| | (KiH) | 4-1BB | | |
| Ob41BBLc60PG | Fc heterodimer | FcRn, FcRγ-low, | Fab | CD20 |
| | (KiH) | 4-1BB | | |
| ObSpc60PG41BBL-RF | Fc heterodimer | FcRn, FcRγ-low, | Fab-Fab | CD20, CD3e |
| | (KiH) | 4-1BB | | |
| Obc60PG41BBL-RF | Fc heterodimer | FcRn, FcRγ-low, | Fab | CD20 |
| | (KiH) | 4-1BB | | |
| Glc60PG | Fc heterodimer | FcRn, FcRγ-low | Fab-CrossFab(VH- | CD20, CD3e |
| | (KiH) | | VL) | |
| Cic60PG | Fc heterodimer | FcRn, FcRγ-low | Fab-CrossFab(CH1- | CEACAM5, CD3e |
| | (KiH) | | CL) | |
| ACE2RQ615c60PG | Fc heterodimer | FcRn, FcRγ-low | ACE2 | SARS-CoV-2 Spike |
| | (KiH) | | | protein |
| ACE2RQ615c61PG | Fc heterodimer | FcRn, FcRγ-low | ACE2 | SARS-CoV-2 Spike |
| | (KiH) | | | protein |
| ACE2RQ106c60PG | Fc heterodimer | FcRn, FcRγ-low | ACE2 | SARS-CoV-2 Spike |
| | (KiH) | | | protein |
| ACE2RQ106x6c60PG | Fc heterodimer | FcRn, FcRγ-low | ACE2 | SARS-CoV-2 Spike |
| | (KiH) | | | protein |
| CoV2spike680c60PG | Fc heterodimer | FcRn, FcRγ-low | SARS-CoV-2 Spike | ACE2 |
| | (KiH) | | | |
| SARSspike666c60PG | Fc heterodimer | FcRn, FcRγ-low | SARS-CoV-1 Spike | ACE2 |
| | (KiH) | | | |
| RaTG13spike680c60PG | Fc heterodimer | FcRn, FcRγ-low | RaTG13 Spike | ACE2 |
| | (KiH) | | | |
| CD3Ec60PG | Fc heterodimer | FcRn, FcRγ-low | CD3e | anti-CD3e |
| | (KiH) | | | |
| 41BBc60PG | Fc heterodimer | FcRn, FcRγ-low | 4-1BB | anti-4-1BB, 4-1BBL |
| | (KiH) | | | |
| CD19c60PG | Fc heterodimer | FcRn, FcRγ-low | CD19 | anti-CD19 |
| | (KiH) | | | |
| CEACAM5c60PG | Fc heterodimer | FcRn, FcRγ-low | CEACAM5 | anti-CEACAM5 |
| | (KiH) | | | |

TABLE 4
Preparation of Tetrahedral Antibodies

| | | | Crosslinker | Crosslinker | Crosslinker | Crosslinker |
|---|---|---|---|---|---|---|
| Name | Protein 1 | Protein 2 | 1a | 1b | 2a | 2b |
| Rc6-P4-Rc6 | Rc6 | Rc6 | Az-Thioester | Tet-DBCO | TCO-P4- | Az-Thioester |
| | | | | | DBCO | |
| Rc66SIDE-P4- | Rc66SIDE | Rc66SIDE | Az-Thioester | Tet-DBCO | TCO-P4- | Az-Thioester |
| Rc66SIDE | | | | | DBCO | |
| Rc66SIDE-P16- | Rc66SIDE | Rc66SIDE | Az-Thioester | Tet-DBCO | TCO-P4- | Az-P12- |
| Rc66SIDE | | | | | DBCO | Thioester |
| Rc66SIDE-P28- | Rc66SIDE | Rc66SIDE | Az-P12- | Tet-DBCO | TCO-P4- | Az-P12- |
| Rc66SIDE | | | Thioester | | DBCO | Thioester |
| B19c66-P4-Rc6 | B19c66 | Rc6 | Az-Thioester | Tet-DBCO | TCO-P4- | Az-Thioester |
| | | | | | DBCO | |
| Soc66-P28-6Ec66 | Soc66 | 6Ec66 | Az-P12- | Tet-DBCO | TCO-P4- | Az-P12- |
| | | | Thioester | | DBCO | Thioester |
| HA9c66AAC9- | HA9c66AAC9 | HA9c66AAC9 | Az-Thioester | Tet-DBCO | TCO-P4- | Az-Thioester |
| P4-HA9c66AAC9 | | | | | DBCO | |
| HA9c66AAC9- | HA9c66AAC9 | IL15c6AAC9 | Az-Thioester | Tet-DBCO | TCO-P4- | Az-Thioester |
| P4-IL15c6AAC9 | | | | | DBCO | |
| Obc60PG-P4- | Obc60PG | Obc60PG | Az-Thioester | Tet-DBCO | TCO-P4- | Az-Thioester |
| Obc60PG | | | | | DBCO | |
| Obc60PG-P4- | Obc60PG | Ob41BBc60PG | Az-Thioester | Tet-DBCO | TCO-P4- | Az-Thioester |
| Ob41BBc60PG | | | | | DBCO | |
| Obc60PG-P4- | Obc60PG | Obc60PG41BB | Az-Thioester | Tet-DBCO | TCO-P4- | Az-Thioester |
| Obc60PG41BB | | | | | DBCO | |
| Ob41BBc60PG- | Ob41BBc60PG | Ob41BBc60PG | Az-Thioester | Tet-DBCO | TCO-P4- | Az-Thioester |
| P4- | | | | | DBCO | |
| Ob41BBc60PG | | | | | | |
| Ob41BBc60PG- | Ob41BBc60PG | Obc60PG41BB | Az-Thioester | Tet-DBCO | TCO-P4- | Az-Thioester |
| P4- | | | | | DBCO | |
| Obc60PG41BB | | | | | | |
| Obc60PG41BB- | Obc60PG41BB | Obc60PG41BB | Az-Thioester | Tet-DBCO | TCO-P4- | Az-Thioester |
| P4- | | | | | DBCO | |
| Obc60PG41BB | | | | | | |
| ObSpc60PG-P4- | ObSpc60PG | Obc60PG | Az-Thioester | Tet-DBCO | TCO-P4- | Az-Thioester |
| Obc60PG | | | | | DBCO | |
| ObSpc60PG-P4- | ObSpc60PG | Ob41BBc60PG | Az-Thioester | Tet-DBCO | TCO-P4- | Az-Thioester |
| Ob41BBc60PG | | | | | DBCO | |
| ObSpc60PG-P4- | ObSpc60PG | Obc60PG41BB | Az-Thioester | Tet-DBCO | TCO-P4- | Az-Thioester |
| Obc60PG41BB | | | | | DBCO | |
| ObSP41BBLc60PG- | ObSP41BBLc60PG | Ob41BBLc60PG | Az-Thioester | Tet-DBCO | TCO-P4- | Az-Thioester |
| P4- | | | | | DBCO | |
| Ob41BBLc60PG | | | | | | |
| ObSP41BBLc60PG- | ObSP41BBLc60PG | Obc60PG41BBL | Az-Thioester | Tet-DBCO | TCO-P4- | Az-Thioester |
| P4- | | | | | DBCO | |
| Obc60PG41BBL | | | | | | |
| ObSpc60PG41BBL- | ObSpc60PG41BBL | Obc60PG41BBL | Az-Thioester | Tet-DBCO | TCO-P4- | Az-Thioester |
| P4- | | | | | DBCO | |
| Obc60PG41BBL | | | | | | |
| Glc60PG-P4- | G1C60PG | Obc60PG | Az-Thioester | Tet-DBCO | TCO-P4- | Az-Thioester |
| Obc60PG | | | | | DBCO | |
| Glc60PG-P4- | G1C60PG | Ob41BBc60PG | Az-Thioester | Tet-DBCO | TCO-P4- | Az-Thioester |
| Ob41BBc60PG | | | | | DBCO | |
| Glc60PG-P4- | G1C60PG | Obc60PG41BB | Az-Thioester | Tet-DBCO | TCO-P4- | Az-Thioester |
| Obc60PG41BB | | | | | DBCO | |
| IL15c6AAC9-P4- | IL15c6AAC9 | IL15Rc6AAC9 | Az-Thioester | Tet-DBCO | TCO-P4- | Az-Thioester |
| IL15Rc6AAC9 | | | | | DBCO | |
| IL15c6AAC9-P4- | IL15c6AAC9 | Rc66AAC9 | Az-Thioester | Tet-DBCO | TCO-P4- | Az-Thioester |
| Rc66AAC9 | | | | | DBCO | |
| IL15c6AAC9-P4- | IL15c6AAC9 | B19c66AAC9 | Az-Thioester | Tet-DBCO | TCO-P4- | Az-Thioester |
| B19c66AAC9 | | | | | DBCO | |
| IL15c6AAC9-P4- | IL15c6AAC9 | G1C60PG | Az-Thioester | Tet-DBCO | TCO-P4- | Az-Thioester |
| Glc60PG | | | | | DBCO | |
| IL15c6AAC9-P4- | IL15c6AAC9 | Cic60PG | Az-Thioester | Tet-DBCO | TCO-P4- | Az-Thioester |
| Cic60PG | | | | | DBCO | |
| IL15c6AAC9-P4- | IL15c6AAC9 | Obc60PG | Az-Thioester | Tet-DBCO | TCO-P4- | Az-Thioester |
| Obc60PG | | | | | DBCO | |
| IL15c6AAC9-P4- | IL15c6AAC9 | Ob41BBc60PG | Az-Thioester | Tet-DBCO | TCO-P4- | Az-Thioester |
| Ob41BBc60PG | | | | | DBCO | |
| IL15c6AAC9-P4- | IL15c6AAC9 | Obc60PG41BB | Az-Thioester | Tet-DBCO | TCO-P4- | Az-Thioester |
| Obc60PG41BB | | | | | DBCO | |
| IL15c6AAC9-P4- | IL15c6AAC9 | ObSpc60PG | Az-Thioester | Tet-DBCO | TCO-P4- | Az-Thioester |
| ObSpc60PG | | | | | DBCO | |
| IL15c6AAC9-P4- | IL15c6AAC9 | ObSP41BBLc60PG | Az-Thioester | Tet-DBCO | TCO-P4- | Az-Thioester |
| ObSP41BBLc60PG | | | | | DBCO | |
| IL15c6AAC9-P4- | IL15c6AAC9 | ObSpc60PG41BBL | Az-Thioester | Tet-DBCO | TCO-P4- | Az-Thioester |
| ObSpc60PG41BBL | | | | | DBCO | |
| ACE2RQ615c60PG- | ACE2RQ615c60PG | ACE2RQ615c60PG | Az-Thioester | Tet-DBCO | TCO-P4- | Az-Thioester |
| P4- | | | | | DBCO | |
| ACE2RQ615c60PG | | | | | | |
| ACE2RQ615c61PG- | ACE2RQ615c61PG | ACE2RQ615c61PG | Tet-P4-Mal | NA | Tco-P3-Mal | NA |
| P7- | | | | | | |
| ACE2RQ615c61PG | | | | | | |
| ACE2RQ106c60PG- | ACE2RQ106c60PG | ACE2RQ106c60PG | Az-Thioester | Tet-DBCO | TCO-P4- | Az-Thioester |
| P4- | | | | | DBCO | |
| ACE2RQ106c60PG | | | | | | |
| ACE2RQ106x6c60PG- | ACE2RQ106x6c60PG | ACE2RQ106x6c60PG | Az-Thioester | Tet-DBCO | TCO-P4- | Az-Thioester |
| P4- | | | | | DBCO | |
| ACE2RQ106c60PG | | | | | | |
| CoV2spike680c60PG- | CoV2spike680c60PG | CoV2spike680c60PG | Az-Thioester | Tet-DBCO | TCO-P4- | Az-Thioester |
| P4- | | | | | DBCO | |
| CoV2spike680c60PG | | | | | | |
| SARSspike666c60PG- | SARSspike666c60PG | SARS spike666c60PG | Az-Thioester | Tet-DBCO | TCO-P4- | Az-Thioester |
| P4- | | | | | DBCO | |
| SARSspike666c60PG | | | | | | |
| RaTG13spike680c60PG- | RaTG13spike680c60PG | RaTG13spike680c60PG | Az-Thioester | Tet-DBCO | TCO-P4- | Az-Thioester |
| P4- | | | | | DBCO | |
| RaTG13spike680c60PG | | | | | | |

NA, not applicable (only two crosslinkers are required)

TABLE 5
Yields of Tetrahedral Antibodies

| Tetrahedral | | | Reactant | Reactant | Product | Unreacted | Yield |
|---|---|---|---|---|---|---|---|
| Antibody | Reactant 1 | Reactant 2 | 1 (mg) | 2 (mg) | (AUC) | (AUC) | % |
| Rc6-P4-Rc6 | Rc6-Tet | Rc6-P4-TCO | 3.03 | 3.10 | 885.87 | 626.26 | 58.6 |
| Rc66SIDE-P4- | Rc66SIDE- | Rc66SIDE-P4- | 2.15 | 2.50 | 785.13 | 674.60 | 59.9 |
| Rc66SIDE | Tet | TCO | | | | | |
| Rc66SIDE-P16- | Rc66SIDE- | Rc66SIDE- | 2.15 | 2.50 | 675.70 | 513.68 | 56.8 |
| Rc66SIDE | Tet | P16-TCO | | | | | |
| Rc66SIDE-P28- | Rc66SIDE- | Rc66SIDE- | 2.61 | 2.90 | 760.10 | 679.84 | 52.8 |
| Rc66SIDE | P12-Tet | P16-TCO | | | | | |
| B19c66-P4-Rc6 | B19c66-Tet | Rc6-P4-TCO | 4.02 | 2.87 | 913.82 | 1164.97 | 44.0 |
| Soc66-P28-6Ec66 | Soc66-P12- | 6Ec66-P16- | 4.96 | 3.55 | 756.17 | 2083.34 | 26.6 |
| | Tet | TCO | | | | | |
| HA9c66AAC9- | HA9c66AAC9- | HA9c66AAC9- | 11.52 | 8.37 | 1134.69 | 2510.24 | 31.1 |
| P4-HA9c66AAC9 | Tet | P4-TCO | | | | | |
| HA9c6AAC9-P4- | HA9c66AAC9- | IL15c6AAC9- | 1.55 | 1.33 | 288.00 | 471.32 | 37.9 |
| IL15c6AAC9 | Tet | P4-TCO | | | | | |

Yield (%) = (Procuct)/(Product + Unreacted)

TABLE 6
Intact Mass Measurements of Tetrahedral Antibodies bv ESI-MS

| | | Intact | | | | | Fc fusion |
|---|---|---|---|---|---|---|---|
| Control | Tetrahedral | Mass | L1 chain | H1 chain | Fc chain | Fc-Px-Fc | chain |
| Antibody | Antibody | (non-reducing) | (reducing) | (reducing) | (reducing) | (reducing) | (reducing) |
| Rituxan* | | 147,077.1 (147,077.0) | 23,039.3 (23,057.7) | 50,514.2 (50,530.8) | | | |
| Rc6* | | 99,815.6 (99,814.4) | 23,039.4 (23,057.7) | 50,513.9 (50,530.8) | 26,281.9 (26,281.9) | | |
| | Rc6-P4-Rc6* | 202,450.4 (202,445.2) | 23,035.9 (23.057.7) | 50,510.4 (50,530.8) | | 55,374.3 (55,380.2) | |

*The heavy and light chains undergo an N-terminal glutamine to pyroglutamate conversion (17 Da decrease)

TABLE 7
Predicted Binding Domains of Tetrahedral Antibodies

| | D1 binding | D2 binding | D3 binding | D4 binding |
|---|---|---|---|---|
| Tetrahedral Antibody | specificity | specificity | specificity | specificity |
| Rc6-P4-Rc6 | FcRn, FcRγ | FcRn, FcRγ | CD20 | CD20 |
| Rc66SIDE−P4-Rc66SIDE | FcRn, FcRγ-high | FcRn, FcRγ-high | CD20 | CD20 |
| Rc66SIDE−P16-Rc66SIDE | FcRn, FcRγ-high | FcRn, FcRγ-high | CD20 | CD20 |
| Rc66SIDE−P28-Rc66SIDE | FcRn, FcRγ-high | FcRn, FcRγ-high | CD20 | CD20 |
| B19c66-P4-Rc6 | FcRn, FcRγ | FcRn, FcRγ | CD19 | CD20 |
| Soc66-P28-S6Ec66 | FcRn, FcRγ | FcRn, FcRγ | amyloid beta | amyloid beta (3- |
| | | | (17-24) | 8) |
| HA9c66AAC9-P4-HA9c66AAC9 | FcRn, FcRγ-low | FcRn, FcRγ-low | CD16 | CD16 |
| HA9c66AAC9-P4-IL15c6AAC9 | FcRn, FcRγ-low | FcRn, FcRγ-low | CD16 | IL-15R alpha |
| Obc60PG-P4-Obc60PG | FcRn, FcRγ-low | FcRn, FcRγ-low | CD20 | CD20 |
| Obc60PG-P4-Ob41BBc60PG | FcRn, FcRγ-low | FcRn, FcRγ-low, | CD20 | CD20 |
| | | 4-1BB | | |
| Obc60PG-P4-Obc60PG41BB | FcRn, FcRγ-low | FcRn, FcRγ-low, | CD20 | CD20 |
| | | 4-1BB | | |
| Ob41BBc60PG-P4- | FcRn, FcRγ-low, | FcRn, FcRγ-low, | CD20 | CD20 |
| Ob41BBc60PG | 4-1BB | 4-1BB | | |
| Ob41BBc60PG-P4- | FcRn, FcRγ-low, | FcRn, FcRγ-low, | CD20 | CD20 |
| Obc60PG41BB | 4-1BB | 4-1BB | | |
| Obc60PG41BB-P4- | FcRn, FcRγ-low, | FcRn, FcRγ-low, | CD20 | CD20 |
| Obc60PG41BB | 4-1BB | 4-1BB | | |
| ObSpc60PG-P4-Obc60PG | FcRn, FcRγ-low | FcRn, FcRγ-low | CD20, CD3 | CD20 |
| ObSpc60PG-P4-Ob41BBc60PG | FcRn, FcRγ-low | FcRn, FcRγ-low, | CD20, CD3 | CD20 |
| | | 4-1BB | | |
| ObSpc60PG-P4-Obc60PG41BB | FcRn, FcRγ-low | FcRn, FcRγ-low, | CD20, CD3 | CD20 |
| | | 4-1BB | | |
| ObSP41BBLc60PG-P4- | FcRn, FcRγ-low, | FcRn, FcRγ-low, | CD20, CD3 | CD20 |
| Ob41BBLc60PG | 4-1BB | 4-1BB | | |
| ObSP41BBLc60PG-P4- | FcRn, FcRγ-low, | FcRn, FcRγ-low, | CD20, CD3 | CD20 |
| Obc60PG41BBL | 4-1BB | 4-1BB | | |
| ObSpc60PG41BBL-P4- | FcRn, FcRγ-low, | FcRn, FcRγ-low, | CD20, CD3 | CD20 |
| Obc60PG41BBL | 4-1BB | 4-1BB | | |
| Glc60PG-P4-Obc60PG | FcRn, FcRγ-low | FcRn, FcRγ-low | CD20, CD3 | CD20 |
| Glc60PG-P4-Ob41BBc60PG | FcRn, FcRγ-low | FcRn, FcRγ-low, | CD20, CD3 | CD20 |
| | | 4-1BB | | |
| Glc60PG-P4-Obc60PG41BB | FcRn, FcRγ-low | FcRn, FcRγ-low, | CD20, CD3 | CD20 |
| | | 4-1BB | | |
| IL15c6AAC9-P4-IL15Rc6AAC9 | FcRn, FcRγ-low | FcRn, FcRγ-low | IL-15R alpha | IL-15 |
| IL15c6AAC9-P4-Rc66AAC9 | FcRn, FcRγ-low | FcRn, FcRγ-low | IL-15R alpha | CD20 |
| IL15c6AAC9-P4-B19c66AAC9 | FcRn, FcRγ-low | FcRn, FcRγ-low | IL-15R alpha | CD19 |
| IL15c6AAC9-P4-Obc60PG | FcRn, FcRγ-low | FcRn, FcRγ-low | IL-15R alpha | CD20 |
| IL15c6AAC9-P4-Ob41BBc60PG | FcRn, FcRγ-low | FcRn, FcRγ-low, | IL-15R alpha | CD20 |
| | | 4-1BB | | |
| IL15c6AAC9-P4-Obc60PG41BB | FcRn, FcRγ-low | FcRn, FcRγ-low, | IL-15R alpha | CD20 |
| | | 4-1BB | | |
| IL15c6AAC9-P4-ObSpc60PG | FcRn, FcRγ-low | FcRn, FcRγ-low | IL-15R alpha | CD20, CD3 |
| IL15c6AAC9-P4- | FcRn, FcRγ-low | FcRn, FcRγ-low, | IL-15R alpha | CD20, CD3 |
| ObSP41BBLc60PG | | 4-1BB | | |
| IL15c6AAC9-P4- | FcRn, FcRγ-low | FcRn, FcRγ-low, | IL-15R alpha | CD20, CD3 |
| ObSpc60PG41BBL | | 4-1BB | | |
| IL15c6AAC9-P4-Glc60PG | FeRn, FcRγ-low | FcRn, FcRγ-low | IL-15R alpha | CD20, CD3 |
| IL15c6AAC9-P4-Cic60PG | FcRn, FcRγ-low | FeRn, FcRγ-low | IL-15R alpha | CEACAM5, |
| | | | | CD3 |
| ACE2RQ615c60PG-P4- | FcRn, FcRγ-low | FcRn, FcRγ-low | SARS-CoV-2 S | SARS-CoV-2 S |
| ACE2RQ615c60PG | | | protein | protein |
| ACE2RQ615c61PG-P7- | FcRn, FcRγ-low | FcRn, FcRγ-low | SARS-CoV-2 S | SARS-CoV-2 S |
| ACE2RQ615c61PG | | | protein | protein |
| ACE2RQ106c60PG-P4- | FcRn, FcRγ-low | FcRn, FcRγ-low | SARS-CoV-2 S | SARS-CoV-2 S |
| ACE2RQ106c60PG | | | protein | protein |
| ACE2RQ106x6c60PG-P4- | FcRn, FcRγ-low | FcRn, FcRγ-low | SARS-CoV-2 S | SARS-CoV-2 S |
| ACE2RQ106c60PG | | | protein | protein |
| CoV2spike680c60PG-P4- | FcRn, FcRγ-low | FcRn, FcRγ-low | ACE2 | ACE2 |
| CoV2spike680c60PG | | | | |
| SARSspike666c60PG-P4- | FcRn, FcRγ-low | FcRn, FcRγ-low | ACE2 | ACE2 |
| SARSspike666c60PG | | | | |
| RaTG13spike680c60PG-P4- | FcRn, FcRγ-low | FcRn, FcRγ-low | ACE2 | ACE2 |
| RaTG13spike680c60PG | | | | |

TABLE 8
Observed IgG-FcRγ Binding of Tetrahedral Antibodies

| | | CD16a | CD16a | | CD32a | CD32a | | |
|---|---|---|---|---|---|---|---|---|
| Tetrahedral | Control | 158F | 158V | CD16b | 131H | 131R | CD32b/c | CD64 |
| Antibody | Antibody | FcRγIIIa | FcRγIIIa | FcRγIIIb | FcRγIIIa | FcRγIIIa | FcRγIIIb | FcRγI |
| | Rituxan | 1.10E−06 | 7.15E−07 | 1.53E−06 | 8.92E−07 | 1.25E−06 | 1.52E−06 | 5.28E−08 |
| | (antibody) | (1.0) | (1.0) | (1.0) | (1.0) | (1.0) | (1.0) | (1.0) |
| | Rituximab- | 1.18E−07 | 6.08E−08 | 1.94E−07 | 4.45E−07 | 3.88E−07 | 4.52E−07 | 9.41E−09 |
| | SIDE | (9.3) | (11.8) | (7.9) | (2.0) | (3.2) | (3.3) | (5.6) |
| | (antibody) | | | | | | | |
| | Rc66SIDE | 7.68E−08 | 4.62E−08 | 1.63E−07 | 2.55E−07 | 2.02E−07 | 2.53E−07 | 1.20E−08 |
| | (One-arm | (14.3) | (15.5) | (9.4) | (3.5) | (6.2) | (6.0) | (4.4) |
| | antibody) | | | | | | | |
| Rc66SIDE- | | 3.87E−09 | 1.14E−09 | 1.05E−09 | 2.54E−09 | 4.93E−09 | 3.17E−09 | <1.0E−12 |
| P4- | | (283.8) | (628.9) | (1456.1) | (351.3) | (252.9) | (478.5) | (>10,000) |
| Rc66SIDE | | | | | | | | |
| Rc66SIDE- | | 2.71E−09 | 2.57E−10 | <1.0E−12 | 8.08E−10 | 1.83E−09 | 5.56E−10 | <1.0E−12 |
| P16- | | (405.6) | (2785.7) | (>10,000) | (1103.3) | (682.0) | (2727.3) | (>10,000) |
| Rc66SIDE | | | | | | | | |
| Rc66SIDE- | | 6.62E−09 | 4.98E−09 | 5.64E−09 | 5.42E−09 | 8.11E−09 | 7.28E−09 | 1.14E−09 |
| P28- | | (166.0) | (143.7) | (270.7) | (164.4) | (153.7) | (208.1) | (46.3) |
| Rc66SIDE | | | | | | | | |

TABLE 9
Observed Binding by Tetrahedral Antibodies to CD20, CD10 and CD16a

| | | CD20 | CD20 | | CD16a |
|---|---|---|---|---|---|
| Tetrahedral | | Lipoparticles | Lipoparticles | | 158V |
| Antibody | Control Antibody | Expt #1 | Expt #2 | CD19 | FcRγIIIa |
| | Rituxan | <1.0E−12 | <1.0E−12 | No binding | 2.62E−07 |
| | (antibody) | | | | |
| | Rc6 | 5.23E−08 | 1.71E−08 | No binding | 3.03E−07 |
| | (one-arm antibody) | | | | |
| | Rc66-SIDE | 2.14E−08 | ND | ND | ND |
| | (one-arm antibody) | | | | |
| Rc6-P4-Rc6 | | <1.0E−12 | ND | ND | ND |
| Rc66SIDE-P4- | | <1.0E−12 | ND | ND | ND |
| Rc66SIDE | | | | | |
| Rc66SIDE-P16- | | <1.0E−12 | ND | ND | ND |
| Rc66SIDE | | | | | |
| Rc66SIDE-P28- | | <1.0E−12 | ND | ND | ND |
| Rc66SIDE | | | | | |
| | B19c66 | No binding | No binding | 2.18E−08 | 2.34E−07 |
| | (one-arm antibody) | | | | |
| | B19c66AAC9 | ND | ND | 2.10E−08 | No binding |
| | (one-arm antibody | | | | |
| B19c66-P4-Rc6 | | ND | 3.99E−08 | 1.81E−08 | 2.45E−08 |

ND, not done

### Example 3—Tetrahedral Antibodies with the Structures Shown in Panel B of FIG. 1, FIG. 3, and FIG. 13

[1287] Panel B of FIG. 1 and FIG. 3 show the schematic structure of tetrahedral antibodies of this example.

[1288] FIG. 13 describes the preparation of tetrahedral antibodies with non-covalent linkages as shown in Panel B of FIG. 1.

### Example 4—Tetrahedral Antibodies with the Structures Shown in Panel C of FIG. 1, FIG. 4, and FIG. 14-18

[1289] Panel C of Figure C and FIG. 4 show the schematic structure of tetrahedral antibodies of this example.

[1290] FIG. 14 describes the preparation of tetrahedral antibody ACE2RQ740c60PG-ACE2RQ740c60PG.

[1291] FIG. 15 shows analysis of tetrahedral antibody ACE2RQ740c60PG-ACE2RQ740c60PG by SE-HPLC.

[1292] FIG. 16 shows analysis of tetrahedral antibodies by SE-HPLC with different peptide linkers (L-1) ACE2RQ740c60PGRF-ACE2RQ740c60PGRF, (L-185) ACE2RQ740c60PGRF185-ACE2RQ740c60PGRF185, (L-198) ACE2RQ740c60PGRF198-ACE2RQ740c60PGRF198, (L-208) ACE2RQ740c60PGRF208-ACE2RQ740c60PGRF208, (L-212) ACE2RQ740c60PGRF235-ACE2RQ740c60PGRF235, (L-235) ACE2RQ740c60PGRF235-ACE2RQ740c60PGRF235, (L-240) ACE2RQ740c60PGRF240-ACE2RQ740c60PGRF240.

[1293] FIG. 17 shows analysis of tetrahedral antibody ACE2RQ740c60PG-ACE2RQ740c60PG by SE-HPLC/MALS.

[1294] FIG. 18 describes the stoichiometric binding analysis of a mixture of tetrahedral antibody ACE2RQ740c60PG-ACE2RQ740c60PG and ACE monomer ACE2RQ615c60PG.

TABLE 10
SEQ IDs of Proteins Used for the Preparation of Tetrahedral Antibodies

| | Fc fusion | Linker | | |
|---|---|---|---|---|
| Protein name | chain | length | Linker Sequence | Fc chain |
| ACE2RQ740c60PG | SEQ ID NO 65 | 5 | EPKSS (Residues 724-728 | SEQ ID NO 42 |
| | | | of SEQ ID NO 65) | |
| ACE2RQ740c60PGRF- | SEQ ID NO 66 | 62 | TSTSPTRSMAPGAVHLP | SEQ ID NO 73 |
| 240 | | | QPVSTRSQHTQPTPEPST | |
| | | | APSTSFLLPMGPSPPAEG | |
| | | | STGDEPKSS (Residues | |
| | | | 724-785 of SEQ ID NO 66) | |
| ACE2RQ740c60PGRF- | SEQ ID NO 67 | 57 | TSTSPTRSMAPGAVHLP | SEQ ID NO 73 |
| 235 | | | QPVSTRSQHTQPTPEPST | |
| | | | APSTSFLLPMGPSPPAEG | |
| | | | STGD (Residues 724-780 | |
| | | | of SEQ ID NO 67) | |
| ACE2RQ740c60PGRF- | SEQ ID NO 68 | 34 | TSTSPTRSMAPGAVHLP | SEQ ID NO 73 |
| 212 | | | QPVSTRSQHTQPTPEPS | |
| | | | (Residues 724-757 of SEQ | |
| | | | ID NO 68) | |
| ACE2RQ740c60PGRF- | SEQ ID NO 69 | 30 | TSTSPTRSMAPGAVHLP | SEQ ID NO 73 |
| 208 | | | QPVSTRSQHTQPT | |
| | | | (Residues 724-753 of SEQ | |
| | | | ID NO 69) | |
| ACE2RQ740c60PGRF- | SEQ ID NO 70 | 20 | TSTSPTRSMAPGAVHLP | SEQ ID NO 73 |
| 198 | | | QPV (Residues 724-743 | |
| | | | of SEQ ID NO 70) | |
| ACE2RQ740c60PGRF- | SEQ ID NO 71 | 7 | TSTSPTR (Residues 724- | SEQ ID NO 73 |
| 185 | | | 730 of SEQ ID NO 71) | |
| ACE2RQ740c60PGRF | SEQ ID NO 72 | 5 | EPKSS (Residues 724-728 | SEQ ID NO 73 |
| | | | of SEQ ID NO 72) | |

TABLE 11
Tetrahedral Antibody formation by dimerization of the ACE2RQ740c60 protein

| | ACE2 | | | | | |
|---|---|---|---|---|---|---|
| | Tetrahedral | | ACE2 | | | |
| | Antibody | ACE2 | Monomer | | HMW | |
| | retention | Tetrahedral | retention | ACE2 | retention | |
| | time | Antibody | time | Monomer | time | HMW |
| Protein | (minutes) | (%) | (minutes) | (%) | (minutes) | (%) |
| ACE2RQ615c60PG | ND | ND | 27.169 | 54.2 | 22.004-23.975 | 45.8 |
| ACE2RQ740c60PG | 23.912 | 76.1 | ND | ND | 21.642 | 23.9 |

ND; not detected; HMW, high molecular weight

TABLE 12
Molar Mass of the SEC-purified ACE2RQ740c60 Tetrahedral Antibody by SE-
HPLC/MALS

| | | Tetrahedral | | |
|---|---|---|---|---|
| | | Antibody | ACE2 Monomer | |
| ACE2 Tetrahedral | | retention time | retention time | Molar Mass |
| Antibody | ACE2 Monomer | (minutes) | (minutes) | (kDa) |
| ACE2RQ740c60PG- | | 24.206 | ND | 297.4 (±1.9%) |
| ACE2RQ740c60PG | | | | |
| | ACE2RQ615c60PG | ND | 27.567 | 143.4 (±1.7%) |

ND; not detected;
HMW, high molecular weight

TABLE 13
Tetrahedral Antibody Formation by Non-covalent Linkage of ACE2RQ740c60 Protein
with Different Peptide Linkers

| | | | Dimer | | | |
|---|---|---|---|---|---|---|
| | | | retention | | Mono | |
| Tetrahedral | Linker | | time | Dimer | mer | HMW |
| Antibody | length | Linker sequence | (minutes) | (%) | (%) | (%) |
| ACE2RQ740c60PGRF240- | 62 | TSTSPTRSMAPGAVHLP | 22.566 | 87.7 | ND | 11.0 |
| ACE2RQ740c60PGRF240 | | QPVSTRSQHTQPTPEPS | | | | |
| | | TAPSTSFLLPMGPSPPA | | | | |
| | | EGSTGDEPKSS | | | | |
| | | (Residues 724-785 of SEQ | | | | |
| | | ID NO 66) | | | | |
| ACE2RQ740c60PGRF235- | 57 | TSTSPTRSMAPGAVHLP | 22.634 | 94.7 | ND | 4.0 |
| ACE2RQ740c60PGRF235 | | QPVSTRSQHTQPTPEPS | | | | |
| | | TAPSTSFLLPMGPSPPA | | | | |
| | | EGSTGD (Residues 724- | | | | |
| | | 780 of SEQ ID NO 67) | | | | |
| ACE2RQ740c60PGRF212- | 34 | TSTSPTRSMAPGAVHLP | 23.138 | 93.4 | ND | 5.4 |
| ACE2RQ740c60PGRF212 | | QPVSTRSQHTQPTPEPS | | | | |
| | | (Residues 724-757 of SEQ | | | | |
| | | ID NO 68) | | | | |
| ACE2RQ740c60PGRF208- | 30 | TSTSPTRSMAPGAVHLP | 23.227 | 96.3 | ND | 2.4 |
| ACE2RQ740c60PGRF208 | | QPVSTRSQHTQPT | | | | |
| | | (Residues 724-753 of SEQ | | | | |
| | | ID NO 69) | | | | |
| ACE2RQ740c60PGRF198- | 20 | TSTSPTRSMAPGAVHLP | 23.544 | 64.8 | ND | 32.8 |
| ACE2RQ740c60PGRF198 | | QPV (Residues 724-743 of | | | | |
| | | SEQ ID NO 70) | | | | |
| ACE2RQ740c60PGRF185- | 7 | TSTSPTR (Residues 724- | 23.817 | 87.6 | ND | 11.0 |
| ACE2RQ740c60PGRF185 | | 730 of SEQ ID NO 71) | | | | |
| ACE2RQ740c60PGRF- | 5 | EPKSS (Residues 724-728 | 23.995 | 88.0 | ND | 11.1 |
| ACE2RQ740c60PGRF | | of SEQ ID NO 72) | | | | |

ND, not detected; HMW, ligh molecular weight

TABLE 14

| Predicted Binding Domains of ACE2 Tetrahedral Antibodies | | | | |
|---|---|---|---|---|
| | D1 binding | | D3 binding | D4 binding |
| Tetrahedral Antibody | specificity | D2 binding specificity | specificity | specificity |
| ACE2RQ740c60PG- | FcRn, FcRγ-low | FcRn, FcRγ-low | SARS-CoV-2 | SARS-CoV-2 |
| ACE2RQ740c60PG | | | Spike protein | Spike protein |
| ACE2RQ740c60PGRF240- | FeRn, FcRγ-low | FcRn, FcRγ-low | SARS-CoV-2 | SARS-CoV-2 |
| ACE2RQ740c60PGRF240 | | | Spike protein | Spike protein |
| ACE2RQ740c60PGRF235- | FcRn, FcRγ-low | FcRn, FcRγ-low | SARS-CoV-2 | SARS-CoV-2 |
| ACE2RQ740c60PGRF235 | | | Spike protein | Spike protein |
| ACE2RQ740c60PGRF212- | FcRn, FcRγ-low | FcRn, FcRγ-low | SARS-CoV-2 | SARS-CoV-2 |
| ACE2RQ740c60PGRF212 | | | Spike protein | Spike protein |
| ACE2RQ740c60PGRF208- | FcRn, FcRγ-low | FcRn, FcRγ-low | SARS-CoV-2 | SARS-CoV-2 |
| ACE2RQ740c60PGRF208 | | | Spike protein | Spike protein |
| ACE2RQ740c60PGRF198- | FcRn, FcRγ-low | FcRn, FcRγ-low | SARS-CoV-2 | SARS-CoV-2 |
| ACE2RQ740c60PGRF198 | | | Spike protein | Spike protein |
| ACE2RQ740c60PGRF185- | FcRn, FcRγ-low | FcRn, FcRγ-low | SARS-CoV-2 | SARS-CoV-2 |
| ACE2RQ740c60PGRF185 | | | Spike protein | Spike protein |
| ACE2RQ740c60PGRF- | FcRn, FcRγ-low | FcRn, FcRγ-low | SARS-CoV-2 | SARS-CoV-2 |
| ACE2RQ740c60PGRF | | | Spike protein | Spike protein |

### Example 5—Tetrahedral Antibodies with the Structure Shown in Panel D of FIG. 1 and FIGS. 5-10, 19-28

[1295] Panel D of FIG. 1 and FIGS. 5-10 show the schematic structure of tetrahedral antibodies of this example.

[1296] FIG. 19 describes preparation of tetrahedral antibody ACE2740FcG9-ACE2740FcG9.

[1297] FIG. 20 shows analysis of tetrahedral antibody ACE2740FcG9-ACE2740FcG9 by SE-HPLC.

[1298] FIG. 21 shows analysis of tetrahedral antibody ACE2740FcG9-ACE2740FcG9 by SE-HPLC/MALS.

[1299] FIG. 22 shows analysis of tetrahedral antibody ACE2RQ740FcPG-ACE2RQ740FcPG by SE-HPLC/MALS.

[1300] FIG. 23 shows stoichiometric binding analysis of an impure preparation of tetrahedral antibody ACE2740FcG9-ACE2740FcG9 and ACE2 dimer ACE2740FcG9.

[1301] FIG. 24 shows stoichiometric binding analysis of a mixture of tetrahedral antibody ACE2740FcG9-ACE2740FcG9 and ACE2 dimer ACE2-740Fc-G9.

[1302] FIG. 25 shows stoichiometric binding analysis of a mixture of tetrahedral antibody ACE2RQ740FcPG-ACE2RQ740FcPG and ACE2 dimer ACE2-740Fc-G9.

[1303] FIG. 26 shows stoichiometric binding analysis of a mixture of tetrahedral antibody ACE2740FcG9-ACE2740FcG9 and ACE2 dimer ACE2-615Fc-G9.

[1304] FIG. 27 shows inhibition of SARS-CoV-2-VSV pseudotype virus infection by ACE2 tetrahedral antibodies ACE2740FcG9-ACE2740FcG9 and ACE2RQ740FcPG-ACE2RQ740FcPG, and by ACE2 dimers ACE2-615Fc-G9 and ACE2RQ615FcPG.

[1305] FIG. 28 shows inhibition of SARS-CoV-2-VSV pseudotype virus infection by ACE2 tetrahedral antibodies ACE2740FcG9-ACE2740FcG9 and ACE2RQ740FcPG-ACE2RQ740FcPG, and by ACE2 dimers ACE2-740Fc-G9 and ACE2RQ740FcPG.

TABLE 15
SEQ IDs of Proteins Used for the Preparation of Tetrahedral Antibodies

| | | Linker | |
|---|---|---|---|
| Protein name | Fc fusion chain | length | Linker Sequence |
| ACE2-615Fc-G9 | SEQ ID NO 74 | 9 | GGGGAGGGG (Residues 598-607 of SEQ ID NO: |
| | | | 74) |
| ACE2-740Fc-G9 | SEQ ID NO 75 | 9 | GGGGAGGGG (Residues 724-732 of SEQ ID NO: |
| | | | 75) |
| ACE2RQ615FcPG | SEQ ID NO 76 | 5 | EPKSS (Residues 598-603 of SEQ ID NO: 76) |
| ACE2RQ740FcPG | SEQ ID NO 77 | 5 | EPKSS (Residues 724-728 of SEQ ID NO: 77) |
| ACE2RQ740FcPG-G9 | SEQ ID NO 78 | 9 | GGGGAGGGG (Residues 724-732 of SEQ ID NO: |
| | | | 78) |
| ACE2-740FcPG-G9 | SEQ ID NO 79 | 9 | GGGGAGGGG (Residues 724-732 of SEQ ID NO: |
| | | | 79) |
| ACE2RQ740Fc-G9 | SEQ ID NO 80 | 9 | GGGGAGGGG (Residues 724-732 of SEQ ID NO: |
| | | | 80) |
| ACE2-740Fc-G9 | SEQ ID NO 81 | 9 | GGGGAGGGG (Residues 724-732 of SEQ ID NO: |
| | | | 81) |
| ACE2RQ740FcPG-235 | SEQ ID NO 90 | 57 | TSTSPTRSMAPGAVHLPQPVSTRSQHTQPTPEPS |
| | | | TAPSTSFLLPMGPSPPAEGSTGD (Residues 724- |
| | | | 780 of SEQ ID NO: 90) |
| ACE2RQ740FcPG-212 | SEQ ID NO 91 | 34 | TSTSPTRSMAPGAVHLPQPVSTRSQHTQPTPEPS |
| | | | (Residues 724-757 of SEQ ID NO: 91) |
| ACE2RQ740FcPG-208 | SEQ ID NO 92 | 30 | TSTSPTRSMAPGAVHLPQPVSTRSQHTQPT |
| | | | (Residues 724-753 of SEQ ID NO: 92) |
| ACE2RQ740FcPG-202 | SEQ ID NO 93 | 24 | TSTSPTRSMAPGAVHLPQPVSTRS (Residues 724- |
| | | | 747 of SEQ ID NO: 93) |
| ACE2RQ740FcPG-201 | SEQ ID NO 94 | 23 | TSTSPTRSMAPGAVHLPQPVSTR (Residues 724- |
| | | | 746 of SEQ ID NO: 94) |
| ACE2RQ740FcPG-200 | SEQ ID NO 95 | 22 | TSTSPTRSMAPGAVHLPQPVST (Residues 724- |
| | | | 745 of SEQ ID NO: 95) |
| ACE2RQ740FcPG-199 | SEQ ID NO 96 | 21 | TSTSPTRSMAPGAVHLPQPVS (Residues 724-744 |
| | | | of SEQ ID NO: 96) |
| ACE2RQ740FcPG-198 | SEQ ID NO 97 | 20 | TSTSPTRSMAPGAVHLPQPV (Residues 724-743 of |
| | | | SEQ ID NO: 97) |
| ACE2RQ740FcPG-197 | SEQ ID NO 98 | 19 | TSTSPTRSMAPGAVHLPQP (Residues 724-742 of |
| | | | SEQ ID NO: 98) |
| ACE2RQ740FcPG-196 | SEQ ID NO 99 | 18 | TSTSPTRSMAPGAVHLPQ (Residues 724-741 of |
| | | | SEQ ID NO: 99) |
| ACE2RQ740FcPG-195 | SEQ ID NO 100 | 17 | TSTSPTRSMAPGAVHLP (Residues 724-740 of |
| | | | SEQ ID NO: 100) |
| ACE2RQ740FcPG-194 | SEQ ID NO 101 | 16 | TSTSPTRSMAPGAVHL (Residues 724-739 of SEQ |
| | | | ID NO: 101) |
| ACE2RQ740FcPG-193 | SEQ ID NO 102 | 15 | TSTSPTRSMAPGAVH (Residues 724-738 of SEQ |
| | | | ID NO: 102) |
| ACE2RQ740FcPG-192 | SEQ ID NO 103 | 14 | TSTSPTRSMAPGAV (Residues 724-737 of SEQ ID |
| | | | NO: 103) |
| ACE2RQ740FcPG-191 | SEQ ID NO 104 | 13 | TSTSPTRSMAPGA (Residues 724-736 of SEQ ID |
| | | | NO: 104) |
| ACE2RQ740FcPG-190 | SEQ ID NO 105 | 12 | TSTSPTRSMAPG (Residues 724-735 of SEQ ID |
| | | | NO: 105) |
| ACE2RQ740FcPG-189 | SEQ ID NO 106 | 11 | TSTSPTRSMAP (Residues 724-734 of SEQ ID NO: |
| | | | 106) |
| ACE2RQ740FcPG-188 | SEQ ID NO 107 | 10 | TSTSPTRSMA (Residues 724-733 of SEQ ID NO: |
| | | | 107) |
| ACE2RQ740FcPG-187 | SEQ ID NO 108 | 9 | TSTSPTRSM (Residues 724-732 of SEQ ID NO: |
| | | | 108) |
| ACE2RQ740FcPG-186 | SEQ ID NO 109 | 8 | TSTSPTRS (Residues 724-731 of SEQ ID NO: 109) |
| ACE2RQ740FcPG-185 | SEQ ID NO 110 | 7 | TSTSPTR (Residues 724-730 of SEQ ID NO: 110) |
| ACE2RQ740FcPG-184 | SEQ ID NO ill | 6 | TSTSPT (Residues 724-729 of SEQ ID NO: 111) |
| ACE2RQ740FcPG-183 | SEQ ID NO 112 | 5 | TSTSP (Residues 724-728 of SEQ ID NO: 105) |
| ACE2RQ740FcPG-G14 | SEQ ID NO 113 | 14 | GGGGAGGGGAGGGG (Residues 724-737 of SEQ |
| | | | ID NO: 113) |
| ACE2RQ740FcPG-G12 | SEQ ID NO 114 | 12 | GGAGGGGAGGGG (Residues 724-735 of SEQ ID |
| | | | NO: 114) |
| ACE2RQ740FcPG-G10 | SEQ ID NO 115 | 10 | AGGGGAGGGG (Residues 724-733 of SEQ ID NO: |
| | | | 115) |
| ACE2RQ740FcPG-G8 | SEQ ID NO 116 | 8 | GGGAGGGG (Residues 724-731 of SEQ ID NO: |
| | | | 116) |
| ACE2RQ740FcPG-G7 | SEQ ID NO 117 | 7 | GGAGGGG (Residues 724-730 of SEQ ID NO: 117) |
| ACE2RQ740FcPG-G6 | SEQ ID NO 118 | 6 | GAGGGG (Residues 724-729 of SEQ ID NO: 118) |
| ACE2RQ740FcPG-G5 | SEQ ID NO 119 | 5 | AGGGG (Residues 724-728 of SEQ ID NO: 119) |

TABLE 16
Tetrahedral Antibody formation by dimerization of the ACE2RQ740c60 and ACE2-
740Fc-G9 proteins

| | ACE2 | | | | | |
|---|---|---|---|---|---|---|
| | Tetrahedral | | | | | |
| | Antibody | ACE2 | ACE2 Dimer | | High Mol | High |
| | retention | Tetrahedral | retention | | Wt retention | Molecular |
| Protein | time | Antibody | time | ACE2 Dimer | time | Weight |
| name | (minutes) | (%) | (minutes) | (%) | (minutes) | (%) |
| ACE2- | ND | ND | 25.255 | 90.1 | 21.956-22.857 | 8.6 |
| 615Fc-G9 | | | | | | |
| ACE2- | 22.674 | 26.7 | 24.960 | 63.8 | 21.679 | 8.9 |
| 740Fc-G9 | | | | | | |

TABLE 17
Molar Mass of SEC-purified ACE2
Tetrahedral Antibodies by SE-HLPC/MALS

| ACE2 Tetrahedral | | Retention time | Molar Mass |
|---|---|---|---|
| Antibody | ACE2 DIMER | (minutes) | (kDa) |
| ACE2740FcG9- | | 22.621 | 510.1 (±2.3%) |
| ACE2740FcG9 | | | |
| | ACE2-740Fc-G9 | 24.919 | 256.6 (±2.9%) |
| ACE2RQ740FcPG- | | 22.454 | 493.8 (±2.0%) |
| ACE2RQ740FcPG | | | |
| | ACE2RQ740FcPG | 24.831 | 242.4 (±3.6%) |

TABLE 18
Binding domains of Tetrahedral Antibodies

| | D1/D2 | D3/D4 | D5/D6 |
|---|---|---|---|
| | binding | binding | binding |
| Tetrahedral Antibody | specificity | specificity | specificity |
| ACE2615FcG9- | NA | NA | NA |
| ACE2615FcG9 | | | |
| ACE2740FcG9- | FcRn, | FcRn, | SARS-CoV-2 |
| ACE2740FcG9 | FcRγ-low | FcRγ-low | Spike protein |
| ACE2RQ615FcPG- | NA | NA | NA |
| ACE2RQ615FcPG | | | |
| ACE2RQ740FcPG- | FcRn, | SARS-CoV-2 | SARS-CoV-2 |
| ACE2RQ740FcPG | FcRγ-low | Spike protein | Spike protein |
| ACE2RQ740FcPGG9- | FcRn, | SARS-CoV-2 | SARS-CoV-2 |
| ACE2RQ740FcPGG9 | FcRγ-low | Spike protein | Spike protein |
| ACE2740FcPGG9- | FcRn, | SARS-CoV-2 | SARS-CoV-2 |
| ACE2740FcPGG9 | FcRγ-low | Spike protein | Spike protein |
| ACE2RQ740FcG9- | FcRn, | SARS-CoV-2 | SARS-CoV-2 |
| ACE2RQ740FcG9 | FcRγ-low | Spike protein | Spike protein |
| ACE2740FcG9- | FcRn, | SARS-CoV-2 | SARS-CoV-2 |
| ACE2740FcG9 | FcRγ-low | Spike protein | Spike protein |
| ACE2RQ740FcPG235- | FcRn, | SARS-CoV-2 | SARS-CoV-2 |
| ACE2RQ740FcPG235 | FcRγ-low | Spike protein | Spike protein |
| ACE2RQ740FcPG212- | FcRn, | SARS-CoV-2 | SARS-CoV-2 |
| ACE2RQ740FcPG212 | FcRγ-low | Spike protein | Spike protein |
| ACE2RQ740FcPG208- | FcRn, | SARS-CoV-2 | SARS-CoV-2 |
| ACE2RQ740FcPG208 | FcRγ-low | Spike protein | Spike protein |
| ACE2RQ740FcPG202- | FcRn, | SARS-CoV-2 | SARS-CoV-2 |
| ACE2RQ740FcPG202 | FcRγ-low | Spike protein | Spike protein |
| ACE2RQ740FcPG201- | FcRn, | SARS-CoV-2 | SARS-CoV-2 |
| ACE2RQ740FcPG201 | FcRγ-low | Spike protein | Spike protein |
| ACE2RQ740FcPG200- | FcRn, | SARS-CoV-2 | SARS-CoV-2 |
| ACE2RQ740FcPG200 | FcRγ-low | Spike protein | Spike protein |
| ACE2RQ740FcPG199- | FcRn, | SARS-CoV-2 | SARS-CoV-2 |
| ACE2RQ740FcPG199 | FcRγ-low | Spike protein | Spike protein |
| ACE2RQ740FcPG198- | FcRn, | SARS-CoV-2 | SARS-CoV-2 |
| ACE2RQ740FcPG198 | FcRγ-low | Spike protein | Spike protein |
| ACE2RQ740FcPG197- | FcRn, | SARS-CoV-2 | SARS-CoV-2 |
| ACE2RQ740FcPG197 | FcRγ-low | Spike protein | Spike protein |
| ACE2RQ740FcPG196- | FcRn, | SARS-CoV-2 | SARS-CoV-2 |
| ACE2RQ740FcPG196 | FcRγ-low | Spike protein | Spike protein |
| ACE2RQ740FcPG195- | FcRn, | SARS-CoV-2 | SARS-CoV-2 |
| ACE2RQ740FcPG195 | FcRγ-low | Spike protein | Spike protein |
| ACE2RQ740FcPG194- | FcRn, | SARS-CoV-2 | SARS-CoV-2 |
| ACE2RQ740FcPG194 | FcRγ-low | Spike protein | Spike protein |
| ACE2RQ740FcPG193- | FcRn, | SARS-CoV-2 | SARS-CoV-2 |
| ACE2RQ740FcPG193 | FcRγ-low | Spike protein | Spike protein |
| ACE2RQ740FcPG192- | FcRn, | SARS-CoV-2 | SARS-CoV-2 |
| ACE2RQ740FcPG192 | FcRγ-low | Spike protein | Spike protein |
| ACE2RQ740FcPG191- | FcRn, | SARS-CoV-2 | SARS-CoV-2 |
| ACE2RQ740FcPG191 | FcRγ-low | Spike protein | Spike protein |
| ACE2RQ740FcPG190- | FcRn, | SARS-CoV-2 | SARS-CoV-2 |
| ACE2RQ740FcPG190 | FcRγ-low | Spike protein | Spike protein |
| ACE2RQ740FcPG189- | FcRn, | SARS-CoV-2 | SARS-CoV-2 |
| ACE2RQ740FcPG189 | FcRγ-low | Spike protein | Spike protein |
| ACE2RQ740FcPG188- | FcRn, | SARS-CoV-2 | SARS-CoV-2 |
| ACE2RQ740FcPG188 | FcRγ-low | Spike protein | Spike protein |
| ACE2RQ740FcPG187- | FcRn, | SARS-CoV-2 | SARS-CoV-2 |
| ACE2RQ740FcPG187 | FcRγ-low | Spike protein | Spike protein |
| ACE2RQ740FcPG186- | FcRn, | SARS-CoV-2 | SARS-CoV-2 |
| ACE2RQ740FcPG186 | FcRγ-low | Spike protein | Spike protein |
| ACE2RQ740FcPG185- | FcRn, | SARS-CoV-2 | SARS-CoV-2 |
| ACE2RQ740FcPG185 | FcRγ-low | Spike protein | Spike protein |
| ACE2RQ740FcPG184- | FcRn, | SARS-CoV-2 | SARS-CoV-2 |
| ACE2RQ740FcPG184 | FcRγ-low | Spike protein | Spike protein |
| ACE2RQ740FcPG183- | FcRn, | SARS-CoV-2 | SARS-CoV-2 |
| ACE2RQ740FcPG183 | FcRγ-low | Spike protein | Spike protein |
| ACE2RQ740FcPGG14- | FcRn, | SARS-CoV-2 | SARS-CoV-2 |
| ACE2RQ740FcPGG14 | FcRγ-low | Spike protein | Spike protein |
| ACE2RQ740FcPGG12- | FcRn, | SARS-CoV-2 | SARS-CoV-2 |
| ACE2RQ740FcPGG12 | FcRγ-low | Spike protein | Spike protein |
| ACE2RQ740FcPGG10- | FcRn, | SARS-CoV-2 | SARS-CoV-2 |
| ACE2RQ740FcPGG10 | FcRγ-low | Spike protein | Spike protein |
| ACE2RQ740FcPGG8- | FcRn, | SARS-CoV-2 | SARS-CoV-2 |
| ACE2RQ740FcPGG8 | FcRγ-low | Spike protein | Spike protein |
| ACE2RQ740FcPGG7- | FcRn, | SARS-CoV-2 | SARS-CoV-2 |
| ACE2RQ740FcPGG7 | FcRγ-low | Spike protein | Spike protein |
| ACE2RQ740FcPGG6- | FcRn, | SARS-CoV-2 | SARS-CoV-2 |
| ACE2RQ740FcPGG6 | FcRγ-low | Spike protein | Spike protein |
| ACE2RQ740FcPGG5- | FcRn, | SARS-CoV-2 | SARS-CoV-2 |
| ACE2RQ740FcPGG5 | FcRγ-low | Spike protein | Spike protein |

NA, not applicable (no appreciable formation)

TABLE 19
SARS-CoV-2-VSV Virus Inhibition by ACE2 Tetrahedral Antibodies

| | | SARS-CoV-2 | VSV-G |
|---|---|---|---|
| ACE2 Tetrahedral | | (VSV pseudotype) | (VSV contro)l |
| Antibody | ACE2 DIMER | NT₅₀ (ug/mL) | NT₅₀ (ug/mL) |
| ACE2740FcG9- | | 0.060 | >66.6 |
| ACE2740FcG9 | ACE2-740Fc-G9 | 3.12 | >66.6 |
| | ACE2-615Fc-G9 | 13.05 | >66.6 |
| ACE2RQ740FcPG- | | 0.11 | >66.6 |
| ACE2RQ740FcPG | | | |
| | ACE2RQ740FcPG | 3.10 | >66.6 |
| | ACE2RQ615FcPG | 17.56 | >66.6 |

### Example 6—Structural Studies of the Superdimeric ACE2 Tetrahedral Antibody

[1306] The experiment of FIG. 19 demonstrated the production of a tetrahedral antibody comprising four ACE 2 domains via the superdimerization of four identical ACE2-Fc fusion polypeptide chains, construct ACE2-740FcPG-G9 (SEQ ID NO:81). The superdimerization reaction required the presence of the collectrin-like domain acting as a dimerizing polypeptide (Panel B of FIG. 19); in its absence no tetrahedral antibody was detected (Panel A of FIG. 19). The yield of tetrahedral antibody in this experiment was 27%; in addition, a dimeric form of ACE2-740FcPG-G9 was produced at a level of 64% (FIG. 20, Table 16). SEC-MALS analysis indicated a molar mass of 510 kDa and 257 kDa for the superdimeric and dimeric forms in good agreement with their predicted molecular weights of 438 kDa and 219 kDa, respectively, especially in view of the extensive glycosylation of the ACE2 molecule (FIG. 21, Table 17).

[1307] The quaternary structure predicted for the superdimeric ACE2 tetrahedral antibody is shown in part C of FIG. 43. Confirmation of this structure was provided by fragmentation studies carried out with the IdeZ protease which cuts the IgG1 molecule just below the hinge region. Upon digestion with IdeZ (Genovis, Lund, Sweden), followed by reduction of the hinge disulfides with TCEP, both the superdimeric form (part C of FIG. 43) and dimeric form (Part B of FIG. 43) yielded ACE2 dimer as predicted, whereas the monomeric ACE2-Fc fusion protein shown in part A of FIG. 43 (SEQ ID NO:74) yielded only the expected ACE2 monomer.

[1308] The superdimer and dimer forms of the ACE2 tetrahedral antibody were readily separated by size exclusion chromatography (FIGS. 20, 21). Following purification, both forms were apparently stable and did not noticeably interconvert over a period of a month, suggesting that the relative formation of the two species had occurred prior to transit from the cell. To determine whether the linker connecting the dimerizing polypeptide to the Fc domain plays a role in the relative abundance of the superdimeric and dimeric forms obtained from the cell supernatant, a series of tetrahedral antibodies was prepared using a series of linkers of varying lengths (Table 15) and the relative yield of superdimer and dimer determined. As summarized in Table 20, the 201 linker consisting of 23 amino acid sequence derived from the stalk region of TNF receptor 1B gave rise to the highest ratio of the superdimeric and dimeric forms, 38%, as well as the lowest levels of high molecular weight (BMW) species, 5.1% (Table 20).

TABLE 20

| Protein | | | Linker | | | | % |
|---|---|---|---|---|---|---|---|
| ID | Protein name | SEQ ID | length | HMW | SD | D | SD:D |
| 6-01 | ACE2RQ740FcPG-235 | SEQ ID NO 90 | 57 | 6.2 | 25.4 | 68.0 | 27.2 |
| 6-02 | ACE2RQ740FcPG-212 | SEQ ID NO 91 | 34 | 5.1 | 29.6 | 65.1 | 31.2 |
| 6-03 | ACE2RQ740FcPG-208 | SEQ ID NO 92 | 30 | 3.8 | 33.8 | 62.1 | 35.3 |
| 6-04 | ACE2RQ740FcPG-202 | SEQ ID NO 93 | 24 | 5.3 | 35.8 | 58.7 | 37.8 |
| 6-05 | ACE2RQ740FcPG-201 | SEQ ID NO 94 | 23 | 5.1 | 36.2 | 58.7 | 38.1 |
| 6-06 | ACE2RQ740FcPG-200 | SEQ ID NO 95 | 22 | 7.8 | 34.5 | 57.4 | 37.6 |
| 6-07 | ACE2RQ740FcPG-199 | SEQ ID NO 96 | 21 | 6.2 | 35.2 | 58.4 | 37.6 |
| 6-08 | ACE2RQ740FcPG-198 | SEQ ID NO 97 | 20 | 8.0 | 34.1 | 57.6 | 37.2 |
| 6-09 | ACE2RQ740FcPG-197 | SEQ ID NO 98 | 19 | 8.0 | 33.9 | 57.7 | 37.0 |
| 6-10 | ACE2RQ740FcPG-196 | SEQ ID NO 99 | 18 | 9.5 | 33.4 | 56.9 | 37.0 |
| 6-11 | ACE2RQ740FcPG-195 | SEQ ID NO 100 | 17 | 8.6 | 32.8 | 58.4 | 36.0 |
| 6-12 | ACE2RQ740FcPG-194 | SEQ ID NO 101 | 16 | 6.3 | 34.3 | 59.2 | 36.7 |
| 6-13 | ACE2RQ740FcPG-193 | SEQ ID NO 102 | 15 | 7.9 | 32.1 | 59.7 | 35.0 |
| 6-14 | ACE2RQ740FcPG-192 | SEQ ID NO 103 | 14 | 8.2 | 31.8 | 59.7 | 34.7 |
| 6-15 | ACE2RQ740FcPG-191 | SEQ ID NO 104 | 13 | 7.1 | 33.3 | 59.5 | 35.9 |
| 6-16 | ACE2RQ740FcPG-190 | SEQ ID NO 105 | 12 | 7.5 | 30.4 | 61.8 | 33.0 |
| 6-17 | ACE2RQ740FcPG-189 | SEQ ID NO 106 | 11 | 8.1 | 30.2 | 61.6 | 32.9 |
| 6-18 | ACE2RQ740FcPG-188 | SEQ ID NO 107 | 10 | 7.5 | 30.9 | 61.5 | 33.4 |
| 6-19 | ACE2RQ740FcPG-187 | SEQ ID NO 108 | 9 | 9.3 | 28.8 | 61.7 | 31.9 |
| 6-20 | ACE2RQ740FcPG-186 | SEQ ID NO 109 | 8 | 6.6 | 30.2 | 63.0 | 32.4 |
| 6-21 | ACE2RQ740FcPG-185 | SEQ ID NO 110 | 7 | 6.7 | 27.7 | 65.4 | 29.7 |
| 6-22 | ACE2RQ740FcPG-184 | SEQ ID NO 111 | 6 | 7.4 | 28.2 | 64.1 | 30.6 |
| 6-23 | ACE2RQ740FcPG-183 | SEQ ID NO 112 | 5 | 8.2 | 26.3 | 65.5 | 28.7 |
| 6-24 | ACE2RQ740FcPG-G14 | SEQ ID NO 113 | 14 | 6.5 | 27.8 | 65.4 | 29.8 |
| 6-25 | ACE2RQ740FcPG-G12 | SEQ ID NO 114 | 12 | 15.0 | 29.8 | 54.7 | 35.3 |
| 6-26 | ACE2RQ740FcPG-G10 | SEQ ID NO 115 | 10 | 8.8 | 27.5 | 63.6 | 30.2 |
| | ACE2RQ740FcPG-G9 | SEQ ID NO 78 | 9 | 9.3 | 26.3 | 63.4 | 29.3 |
| | ACE2RQ740FcPG-G9 | SEQ ID NO 78 | 9 | 9.3 | 26.3 | 63.4 | 29.3 |
| | ACE2RQ740Fc-G9 | SEQ ID NO 80 | 9 | 7.8 | 27.0 | 64.1 | 29.6 |
| | ACE2-740FcPG-G9 | SEQ ID NO 79 | 9 | 10.8 | 25.6 | 62.2 | 29.2 |
| | ACE2-740Fc-G9 | SEQ ID NO 81 | 9 | 6.8 | 25.7 | 66.3 | 27.9 |
| 6-27 | ACE2RQ740FcPG-G8 | SEQ ID NO 116 | 8 | 11.3 | 28.8 | 59.7 | 32.6 |
| 6-28 | ACE2RQ740FcPG-G7 | SEQ ID NO 117 | 7 | 11.4 | 29.0 | 59.6 | 32.7 |
| 6-29 | ACE2RQ740FcPG-G6 | SEQ ID NO 118 | 6 | 6.7 | 26.8 | 65.8 | 28.9 |
| 6-30 | ACE2RQ740FcPG-G5 | SEQ ID NO 119 | 5 | 8.5 | 25.6 | 65.7 | 28.1 |

### Example 7—Functional Studies of the Superdimeric ACE2 Tetrahedral Antibody

[1309] The stoichiometric binding experiments of FIGS. 23-25 demonstrated that when SARS-CoV-2 spike protein is added to mixtures of the ACE2 superdimer and dimer, essentially all of the superdimer is consumed before the dimer begins to bind. This was observed whether the experiment was carried out with the superdimer/dimer mixture produced by cells (FIG. 23) or with a mixture that was prepared using purified and separated superdimer and dimer obtained by size exclusion chromatography (FIG. 24). Similar order-of-binding results were obtained whether the wild-type ACE2 protein or a catalytically inactive ACE2 mutant protein (R273Q) was used in the experiment (compare FIGS. 24 and 25). These results suggested that the ACE2 superdimer binds with much higher affinity than the dimer. SARS-CoV-2 pseudovirus neutralization experiments (FIGS. 27, 28) consistently demonstrated that the ACE2 superdimer is approximately two orders of magnitude more potent than either the ACE2 dimer found in superdimer preparations (FIG. 43, panel b) or an ACE2-Fc dimer lacking the collectrin-like dimerizing polypeptide (FIG. 43, panel a).

[1310] To confirm the biological relevance of the stoichiometric binding and pseudovirus experiments, neutralization assays were carried out with live SARS-CoV-2 virus. These experiments confirmed that the ACE2 is approximately two orders of magnitude more potent in neutralizing virus than the ACE2 dimer, and approximately three orders of magnitude more potent than the ACE2-Fc dimer (FIG. 44). Similar results were obtained in neutralization assay carried out with the NL63 alpha coronavirus which also infects cells through the ACE2 receptor.

[1311] Method: Live SARS-Cov-2 neutralization assay. USA-WA1/2020 (NR-52281) and Germany/BavPat1/2020 (NR-52370) were obtained from BEI Resources, Manassas, Va. and expanded using a single passage in Vero/TMPRSS2. Virus was end-point titrated in Vero/TMPRSS2 and 100 TCID₅₀ used per well. Virus was pre-incubated for 1 hour at 37° C. with serial dilutions of antibody and then plated in replicates of 8 on Vero/TMPRSS2 cells. After 7 days wells were scored for cytopathic effect.

TABLE 21

| | EC50 (nM) Live Virus Neutralization | | | |
|---|---|---|---|---|
| Protein ID | SARS-CoV-2 | Fold Increase | NL63 | Fold Increase |
| 6-05 Superdimer | 0.233 | 403.7 | 1.58 | 86.5 |
| 6-05 Dimer | 0.970 | 96.9 | 10.43 | 13.1 |
| 6-05 Impure | 14.87 | 6.3 | 29.94 | 4.6 |
| ACE2Fc615 | 93.95 | 1.0 | 136.50 | 1.0 |

### Example 8—Engineering ACE 2 Super-Heterodimeric Tetrahedral Antibodies

[1312] As linker optimization alone did not overcome the apparent structural constraints that limited the yield of superdimeric ACE2 tetrahedral antibody, a series of constructs was generated with the predicted structure shown in part E of FIG. 43 (Table 22). This structure, termed “super-heterodimer”, differs from the “super-homodimer shown in Part C of FIG. 43 by having one pair instead of two pair of dimerizing polypeptides. It was reasoned that the super-heterodimer would have the advantage of greater conformational flexibility by limiting superdimerization to one of the heavy chains. This prediction was borne out; by independently varying the linker length on the H1 and H2 chains, the ACE2 super-heterodimer was obtained in yields as high as 98.8% from culture supernatant (Table 23).

TABLE 22
SEQ IDs Used for the Preparation of Hetero-Superdimeric Tetrahedral Antibodies

| Protein | | Domain Type | | |
|---|---|---|---|---|
| ID | Protein name | D3/D4/D5/D6 | H1 Chain | H2 Chain |
| 5-01 | ACE2FcPGRF-740RQ186/615RQ201 | ACE2 R273Q | SEQ ID NO: 338 | SEQ ID NO: 342 |
| 5-02 | ACE2FcPGRF-740RQ186/615RQ202 | ACE2 R273Q | SEQ ID NO: 338 | SEQ ID NO: 343 |
| 5-03 | ACE2FcPGRF-740RQ186/615RQ208 | ACE2 R273Q | SEQ ID NO: 338 | SEQ ID NO: 344 |
| 5-04 | ACE2FcPGRF-740RQ186/615RQ212 | ACE2 R273Q | SEQ ID NO: 338 | SEQ ID NO: 345 |
| 5-05 | ACE2FcPGRF-740RQ186/615RQ213 | ACE2 R273Q | SEQ ID NO: 338 | SEQ ID NO: 346 |
| 5-06 | ACE2FcPGRF-740RQ186/615RQ216 | ACE2 R273Q | SEQ ID NO: 338 | SEQ ID NO: 347 |
| 5-07 | ACE2FcPGRF-740RQ186/615RQ217 | ACE2 R273Q | SEQ ID NO: 338 | SEQ ID NO: 348 |
| 5-08 | ACE2FcPGRF-740RQ186/615RQ218 | ACE2 R273Q | SEQ ID NO: 338 | SEQ ID NO: 349 |
| 5-09 | ACE2FcPGRF-740RQ186/615RQ224 | ACE2 R273Q | SEQ ID NO: 338 | SEQ ID NO: 350 |
| 5-10 | ACE2FcPGRF-740RQ186/615RQ235 | ACE2 R273Q | SEQ ID NO: 338 | SEQ ID NO: 351 |
| 5-11 | ACE2FcPGRF-740RQ194/615RQ201 | ACE2 R273Q | SEQ ID NO: 339 | SEQ ID NO: 342 |
| 5-12 | ACE2FcPGRF-740RQ194/615RQ202 | ACE2 R273Q | SEQ ID NO: 339 | SEQ ID NO: 343 |
| 5-13 | ACE2FcPGRF-740RQ194/615RQ208 | ACE2 R273Q | SEQ ID NO: 339 | SEQ ID NO: 344 |
| 5-14 | ACE2FcPGRF-740RQ194/615RQ212 | ACE2 R273Q | SEQ ID NO: 339 | SEQ ID NO: 345 |
| 5-15 | ACE2FcPGRF-740RQ194/615RQ213 | ACE2 R273Q | SEQ ID NO: 339 | SEQ ID NO: 346 |
| 5-16 | ACE2FcPGRF-740RQ194/615RQ216 | ACE2 R273Q | SEQ ID NO: 339 | SEQ ID NO: 347 |
| 5-17 | ACE2FcPGRF-740RQ194/615RQ217 | ACE2 R273Q | SEQ ID NO: 339 | SEQ ID NO: 348 |
| 5-18 | ACE2FcPGRF-740RQ194/615RQ218 | ACE2 R273Q | SEQ ID NO: 339 | SEQ ID NO: 349 |
| 5-19 | ACE2FcPGRF-740RQ194/615RQ224 | ACE2 R273Q | SEQ ID NO: 339 | SEQ ID NO: 350 |
| 5-20 | ACE2FcPGRF-740RQ194/615RQ235 | ACE2 R273Q | SEQ ID NO: 339 | SEQ ID NO: 351 |
| 5-21 | ACE2FcPGRF-740RQ201/615RQ201 | ACE2 R273Q | SEQ ID NO: 340 | SEQ ID NO: 342 |
| 5-22 | ACE2FcPGRF-740RQ201/615RQ202 | ACE2 R273Q | SEQ ID NO: 340 | SEQ ID NO: 343 |
| 5-23 | ACE2FcPGRF-740RQ201/615RQ208 | ACE2 R273Q | SEQ ID NO: 340 | SEQ ID NO: 344 |
| 5-24 | ACE2FcPGRF-740RQ201/615RQ212 | ACE2 R273Q | SEQ ID NO: 340 | SEQ ID NO: 345 |
| 5-25 | ACE2FcPGRF-740RQ201/615RQ213 | ACE2 R273Q | SEQ ID NO: 340 | SEQ ID NO: 346 |
| 5-26 | ACE2FcPGRF-740RQ201/615RQ216 | ACE2 R273Q | SEQ ID NO: 340 | SEQ ID NO: 347 |
| 5-27 | ACE2FcPGRF-740RQ201/615RQ217 | ACE2 R273Q | SEQ ID NO: 340 | SEQ ID NO: 348 |
| 5-28 | ACE2FcPGRF-740RQ201/615RQ218 | ACE2 R273Q | SEQ ID NO: 340 | SEQ ID NO: 349 |
| 5-29 | ACE2FcPGRF-740RQ201/615RQ224 | ACE2 R273Q | SEQ ID NO: 340 | SEQ ID NO: 350 |
| 5-30 | ACE2FcPGRF-740RQ201/615RQ235 | ACE2 R273Q | SEQ ID NO: 341 | SEQ ID NO: 351 |
| 5-31 | ACE2FcPGRF-740RQ208/615RQ201 | ACE2 R273Q | SEQ ID NO: 341 | SEQ ID NO: 342 |
| 5-32 | ACE2FcPGRF-740RQ208/615RQ202 | ACE2 R273Q | SEQ ID NO: 341 | SEQ ID NO: 343 |
| 5-33 | ACE2FcPGRF-740RQ208/615RQ208 | ACE2 R273Q | SEQ ID NO: 341 | SEQ ID NO: 344 |
| 5-34 | ACE2FcPGRF-740RQ208/615RQ212 | ACE2 R273Q | SEQ ID NO: 341 | SEQ ID NO: 345 |
| 5-35 | ACE2FcPGRF-740RQ208/615RQ213 | ACE2 R273Q | SEQ ID NO: 341 | SEQ ID NO: 346 |
| 5-36 | ACE2FcPGRF-740RQ208/615RQ216 | ACE2 R273Q | SEQ ID NO: 341 | SEQ ID NO: 347 |
| 5-37 | ACE2FcPGRF-740RQ208/615RQ217 | ACE2 R273Q | SEQ ID NO: 341 | SEQ ID NO: 348 |
| 5-38 | ACE2FcPGRF-740RQ208/615RQ218 | ACE2 R273Q | SEQ ID NO: 341 | SEQ ID NO: 349 |
| 5-39 | ACE2FcPGRF-740RQ208/615RQ224 | ACE2 R273Q | SEQ ID NO: 341 | SEQ ID NO: 350 |
| 5-40 | ACE2FcPGRF-740RQ208/615RQ235 | ACE2 R273Q | SEQ ID NO: 341 | SEQ ID NO: 351 |

TABLE 23

| | | | Dimerizing | | | |
|---|---|---|---|---|---|---|
| | | | Polypeptide | | Main | Retention |
| Protein | H1 Chain | H2 Chain | Pair | HMW | Peak | Time |
| ID | Linker | Linker | D3/D4 | (%) | (%) | (min) |
| 5-01 | 186 | 201 | Collectrin-like | 28.7 | 71.3 | 21.41 |
| 5-02 | 186 | 202 | Collectrin-like | 30.9 | 69.1 | 21.37 |
| 5-03 | 186 | 208 | Collectrin-like | 5.1 | 81.6 | 21.25 |
| 5-04 | 186 | 212 | Collectrin-like | 20.3 | 79.7 | 21.22 |
| 5-05 | 186 | 213 | Collectrin-like | 21.2 | 78.8 | 21.19 |
| 5-06 | 186 | 216 | Collectrin-like | 17.9 | 82.1 | 21.16 |
| 5-07 | 186 | 217 | Collectrin-like | 24.3 | 75.7 | 21.11 |
| 5-08 | 186 | 218 | Collectrin-like | 25.1 | 74.9 | 21.11 |
| 5-09 | 186 | 224 | Collectrin-like | 42.0 | 58.0 | 21.04 |
| 5-10 | 186 | 235 | Collectrin-like | 26.3 | 73.7 | 20.98 |
| 5-11 | 194 | 201 | Collectrin-like | 24.7 | 75.3 | 21.29 |
| 5-12 | 194 | 202 | Collectrin-like | 16.2 | 83.8 | 21.29 |
| 5-13 | 194 | 208 | Collectrin-like | 8.5 | 91.5 | 21.19 |
| 5-14 | 194 | 212 | Collectrin-like | 19.0 | 81.0 | 20.95 |
| 5-15 | 194 | 213 | Collectrin-like | 18.3 | 81.7 | 21.00 |
| 5-16 | 194 | 216 | Collectrin-like | 32.0 | 68.0 | 20.91 |
| 5-17 | 194 | 217 | Collectrin-like | 27.4 | 72.6 | 20.92 |
| 5-18 | 194 | 218 | Collectrin-like | 45.8 | 53.9 | 20.84 |
| 5-19 | 194 | 224 | Collectrin-like | 21.6 | 78.4 | 20.83 |
| 5-20 | 194 | 235 | Collectrin-like | 46.3 | 53.6 | 20.67 |
| 5-21 | 201 | 201 | Collectrin-like | 1.2 | 98.8 | 21.55 |
| 5-22 | 201 | 202 | Collectrin-like | 4.1 | 95.9 | 21.47 |
| 5-23 | 201 | 208 | Collectrin-like | 4.0 | 95.9 | 21.39 |
| 5-24 | 201 | 212 | Collectrin-like | 3.3 | 96.7 | 21.34 |
| 5-25 | 201 | 213 | Collectrin-like | 4.7 | 95.3 | 21.32 |
| 5-26 | 201 | 216 | Collectrin-like | 4.7 | 95.3 | 21.28 |
| 5-27 | 201 | 217 | Collectrin-like | 4.0 | 96.0 | 20.96 |
| 5-28 | 201 | 218 | Collectrin-like | 7.5 | 92.5 | 20.96 |
| 5-29 | 201 | 224 | Collectrin-like | 11.1 | 88.7 | 21.30 |
| 5-30 | 201 | 235 | Collectrin-like | 4.9 | 95.1 | 21.16 |
| 5-31 | 208 | 201 | Collectrin-like | 4.0 | 95.8 | 21.39 |
| 5-32 | 208 | 202 | Collectrin-like | 10.7 | 89.2 | 21.36 |
| 5-33 | 208 | 208 | Collectrin-like | 11.0 | 89.0 | 21.32 |
| 5-34 | 208 | 212 | Collectrin-like | 4.6 | 95.4 | 21.25 |
| 5-35 | 208 | 213 | Collectrin-like | 3.2 | 96.7 | 21.26 |
| 5-36 | 208 | 216 | Collectrin-like | 19.3 | 73.6 | 21.25 |
| 5-37 | 208 | 217 | Collectrin-like | 22.9 | 76.3 | 21.21 |
| 5-38 | 208 | 218 | Collectrin-like | 14.5 | 85.5 | 21.18 |
| 5-39 | 208 | 224 | Collectrin-like | 15.0 | 84.9 | 21.16 |
| 5-40 | 208 | 235 | Collectrin-like | 16.7 | 75.5 | 21.10 |

### Example 9—Viral Neutralizing Activity of ACE2 Super-Heterodimeric Tetrahedral Antibody

[1313] Live virus neutralization studies confirmed that the super-heterodimer retained the exquisite potency of the super-homodimer in neutralizing both the SARS-CoV-2 beta coronavirus and the NL63 alpha coronavirus. (Table 24).

TABLE 24

| | | No. of | | | | EC50 (nM) | |
|---|---|---|---|---|---|---|---|
| Protein | Tetrahedral | Dimerizing | H | H1 | H2 | SARS- | |
| ID | Antibody Type | Polypeptide Pairs | Chain | Chain | Chain | CoV-2 | NL63 |
| 6-05 | Super-homodimer | 2 | 201 | N/A | N/A | 0.4610 | 10.20 |
| 5-21 | Super-heterodimer | 1 | N/A | 201 | 201 | 0.9421 | 7.688 |
| 5-27 | Super-heterodimer | 1 | N/A | 201 | 217 | 0.9556 | 4.160 |
| 5-28 | Super-heterodimer | 1 | N/A | 201 | 218 | 1.276 | 10.05 |
| 5-34 | Super-heterodimer | 1 | N/A | 208 | 212 | 0.6933 | 3.687 |
| 5-37 | Super-heterodimer | 1 | N/A | 208 | 217 | 0.8348 | 5.400 |

### Example 10—ACE2 Mutants

[1314] In the course of these investigations, the R273Q mutation was evaluated as a means to render ACE2 enzymatically active to avoid possible complications associated with clinical use of the active enzyme in SARS Co-V-2 patients. We discovered that R273Q had a severe effect on the plasma half-life of ACE2. Accordingly, five new mutations, R273A, R293G, R273C, H378A and E402A, were generated and evaluated in several ACE2 constructs (Tables 25A, 25B and 26A). The effect of the mutations on carboxypeptidase was consistent among different was consistent among the various constructs. It was determined that H378A was the best tolerated with respect to half-life and provided for the greatest reduction in enzyme activity.

[1315] The H378A mutation decreased the level of ACE2 carboxypeptidase activity by 99.95% with angiotensin-II, 99.93% with bradykinin and 99.85% with apelin-13 (in Table 26B).

[1316] Materials: Angiotensin II peptide (AS-20633), Des-Arg9-bradykinin peptide (AS-65642) (AnaSpec, Fremont, Calif.), Apelin-13 peptide (APEL-003) (CPC Scientific, San Jose, Calif.). Recombinant human ACE2 (79200) (BioLegend, San Diego, Calif.) was used as a positive control. Phenylalanine assay kits (ab83376) (Abcam, Cambridge, UK).

[1317] Methods: ACE2 carboxypeptidase activity was quantified using the presence of phenylalanine. The carboxypeptidase reaction was initiated when 0.025 μg (wild-type) or 15 μg (ACE2 mutant) of COVICEPT was added to 0.2 μM angiotensin II, bradykinin or apelin-13 in the presence of the reaction buffer (PBS with 10 μM ZnCl2) at 37° C. Twenty microliter aliquots were taken out from the reaction mixture every 2 minutes up to 20 minutes and heat inactivated at 80° C. for 5 minutes. The amount of phenylalanine in the heat inactivated aliquots was quantified using the phenylalanine assay kit.

TABLE 25A

| Protein | | | |
|---|---|---|---|
| ID | Protein Name | H1 Chain | H2 Chain |
| 10-01 | ACE2FcPGRF-740wt201/615wt201 | SEQ ID NO: 354 | SEQ ID NO: 366 |
| 10-02 | ACE2FcPGRF-740RA201/615RA201 | SEQ ID NO: 355 | SEQ ID NO: 367 |
| 10-03 | ACE2FcPGRF-740RG201/615RG201 | SEQ ID NO: 356 | SEQ ID NO: 368 |
| 10-04 | ACE2FcPGRF-740RV201/615RV201 | SEQ ID NO: 357 | SEQ ID NO: 369 |
| 10-05 | ACE2FcPGRF-740HA201/615HA201 | SEQ ID NO: 358 | SEQ ID NO: 370 |
| 10-06 | ACE2FcPGRF-740EA201/615EA201 | SEQ ID NO: 359 | SEQ ID NO: 371 |
| 10-07 | ACE2FcPGRF-740wt201/615wt208 | SEQ ID NO: 354 | SEQ ID NO: 372 |
| 10-08 | ACE2FcPGRF-740RA201/615RA208 | SEQ ID NO: 355 | SEQ ID NO: 373 |
| 10-09 | ACE2FcPGRF-740RG201/615RG208 | SEQ ID NO: 356 | SEQ ID NO: 374 |
| 10-10 | ACE2FcPGRF-740RV201/615RV208 | SEQ ID NO: 357 | SEQ ID NO: 375 |
| 10-11 | ACE2FcPGRF-740HA201/615HA208 | SEQ ID NO: 358 | SEQ ID NO: 376 |
| 10-12 | ACE2FcPGRF-740EA201/615EA208 | SEQ ID NO: 359 | SEQ ID NO: 377 |
| 10-13 | ACE2FcPGRF-740wt208/615wt201 | SEQ ID NO: 360 | SEQ ID NO: 366 |
| 10-14 | ACE2FcPGRF-740RA208/615RA201 | SEQ ID NO: 361 | SEQ ID NO: 367 |
| 10-15 | ACE2FcPGRF-740RG208/615RG201 | SEQ ID NO: 362 | SEQ ID NO: 368 |
| 10-16 | ACE2FcPGRF-740RV208/615RV201 | SEQ ID NO: 363 | SEQ ID NO: 369 |
| 10-17 | ACE2FcPGRF-740HA208/615HA201 | SEQ ID NO: 364 | SEQ ID NO: 370 |
| 10-18 | ACE2FcPGRF-740EA208/615EA201 | SEQ ID NO: 365 | SEQ ID NO: 371 |
| 10-19 | ACE2FcPGRF-740wt208/615wt212 | SEQ ID NO: 360 | SEQ ID NO: 378 |
| 10-20 | ACE2FcPGRF-740RA208/615RA212 | SEQ ID NO: 361 | SEQ ID NO: 379 |
| 10-21 | ACE2FcPGRF-740RG208/615RG212 | SEQ ID NO: 362 | SEQ ID NO: 380 |
| 10-22 | ACE2FcPGRF-740RV208/615RV212 | SEQ ID NO: 363 | SEQ ID NO: 381 |
| 10-23 | ACE2FcPGRF-740HA208/615HA212 | SEQ ID NO: 364 | SEQ ID NO: 382 |
| 10-24 | ACE2FcPGRF-740EA208/615EA212 | SEQ ID NO: 365 | SEQ ID NO: 383 |
| 10-25 | ACE2FcPGRF-740wt201/615wt201/TMEM27CA | SEQ ID NO: 354 | SEQ ID NO: 384 |
| 10-26 | ACE2FcPGRF-740RA201/615RA201/TMEM27CA | SEQ ID NO: 355 | SEQ ID NO: 385 |
| 10-27 | ACE2FcPGRF-740RG201/615RG201/TMEM27CA | SEQ ID NO: 356 | SEQ ID NO: 386 |
| 10-28 | ACE2FcPGRF-740RV201/615RV201/TMEM27CA | SEQ ID NO: 357 | SEQ ID NO: 387 |
| 10-29 | ACE2FcPGRF-740HA201/615HA201/TMEM27CA | SEQ ID NO: 358 | SEQ ID NO: 388 |
| 10-30 | ACE2FcPGRF-740EA201/615EA201/TMEM27CA | SEQ ID NO: 359 | SEQ ID NO: 389 |
| 10-31 | ACE2FcPGRF-740wt201/607wt201/TMEM27 | SEQ ID NO: 354 | SEQ ID NO: 390 |
| 10-32 | ACE2FcPGRF-740RA201/607RA201/TMEM27 | SEQ ID NO: 355 | SEQ ID NO: 391 |
| 10-33 | ACE2FcPGRF-740RG201/607RG201/TMEM27 | SEQ ID NO: 356 | SEQ ID NO: 392 |
| 10-34 | ACE2FcPGRF-740RV201/607RV201/TMEM27 | SEQ ID NO: 357 | SEQ ID NO: 393 |
| 10-35 | ACE2FcPGRF-740HA201/607HA201/TMEM27 | SEQ ID NO: 358 | SEQ ID NO: 394 |
| 10-36 | ACE2FcPGRF-740EA201/607EA201/TMEM27 | SEQ ID NO: 359 | SEQ ID NO: 395 |
| 10-37 | ACE2FcPGRF-740wt201/611wt201/TMEM27 | SEQ ID NO: 354 | SEQ ID NO: 396 |
| 10-38 | ACE2FcPGRF-740RA201/611RA201/TMEM27 | SEQ ID NO: 355 | SEQ ID NO: 397 |
| 10-39 | ACE2FcPGRF-740RG201/611RG201/TMEM27 | SEQ ID NO: 356 | SEQ ID NO: 398 |
| 10-40 | ACE2FcPGRF-740RV201/611RV201/TMEM27 | SEQ ID NO: 357 | SEQ ID NO: 399 |
| 10-41 | ACE2FcPGRF-740HA201/611HA201/TMEM27 | SEQ ID NO: 358 | SEQ ID NO: 400 |
| 10-42 | ACE2FcPGRF-740EA201/611EA201/TMEM27 | SEQ ID NO: 359 | SEQ ID NO: 401 |

TABLE 25B

| Protein | | | | |
|---|---|---|---|---|
| ID | Protein Name | H1 Chain | Fc Chain | ACE2 Mutations |
| 10-43 | ACE2FcPGRF-740wt201 | SEQ ID NO: 402 | | |
| 10-44 | ACE2FcPGRF-740RA201 | SEQ ID NO: 403 | | |
| 10-45 | ACE2FcPGRF-740RG201 | SEQ ID NO: 404 | | |
| 10-46 | ACE2FcPGRF-740RV201 | SEQ ID NO: 405 | | |
| 10-47 | ACE2FcPGRF-740HA201 | SEQ ID NO: 406 | | |
| 10-48 | ACE2FcPGRF-740EA201 | SEQ ID NO: 407 | | |
| 10-49 | ACE2FcPGRF-740wt201/313 | SEQ ID NO: 408 | | K31F/N33D/H34S/E35Q |
| 10-50 | ACE2FcPGRF-740RA201/313 | SEQ ID NO: 409 | | K31F/N33D/H34S/E35Q |
| 10-51 | ACE2FcPGRF-740RG201/313 | SEQ ID NO: 410 | | K31F/N33D/H34S/E35Q |
| 10-52 | ACE2FcPGRF-740RV201/313 | SEQ ID NO: 411 | | K31F/N33D/H34S/E35Q |
| 10-53 | ACE2FcPGRF-740HA201/313 | SEQ ID NO: 412 | | K31F/N33D/H34S/E35Q |
| 10-54 | ACE2FcPGRF-740EA201/313 | SEQ ID NO: 413 | | K31F/N33D/H34S/E35Q |
| 10-55 | ACE2c60PGRF-740wt208 | SEQ ID NO: 360 | SEQ ID NO: 420 | |
| 10-56 | ACE2c60PGRF-740RA208 | SEQ ID NO: 361 | SEQ ID NO: 420 | |
| 10-57 | ACE2c60PGRF-740RG208 | SEQ ID NO: 362 | SEQ ID NO: 420 | |
| 10-58 | ACE2c60PGRF-740RV208 | SEQ ID NO: 363 | SEQ ID NO: 420 | |
| 10-59 | ACE2c60PGRF-740HA208 | SEQ ID NO: 364 | SEQ ID NO: 420 | |
| 10-60 | ACE2c60PGRF-740EA208 | SEQ ID NO: 365 | SEQ ID NO: 420 | |
| 10-61 | ACE2c60PGRF-740wt208/313 | SEQ ID NO: 414 | SEQ ID NO: 420 | K31F/N33D/H34S/E35Q |
| 10-62 | ACE2c60PGRF-740RA208/313 | SEQ ID NO: 415 | SEQ ID NO: 420 | K31F/N33D/H34S/E35Q |
| 10-63 | ACE2c60PGRF-740RG208/313 | SEQ ID NO: 416 | SEQ ID NO: 420 | K31F/N33D/H34S/E35Q |
| 10-64 | ACE2c60PGRF-740RV208/313 | SEQ ID NO: 417 | SEQ ID NO: 420 | K31F/N33D/H34S/E35Q |
| 10-65 | ACE2c60PGRF-740HA208/313 | SEQ ID NO: 418 | SEQ ID NO: 420 | K31F/N33D/H34S/E35Q |
| 10-66 | ACE2c60PGRF-740EA208/313 | SEQ ID NO: 419 | SEQ ID NO: 420 | K31F/N33D/H34S/E35Q |

TABLE 26A

| | | | | | Second | Second |
|---|---|---|---|---|---|---|
| | | | First Dimerizing | First Dimerizing | Dimerizing | Dimerizing |
| Protein | Domain | Domain | Polypeptide Pair | Polypeptide | Polypeptide Pair | Polypeptide |
| ID | Type D3/D4 | Type D5/D6 | D3/D4 | Sequence | D5/D6 | Sequence |
| 10-01 | ACE2 wt | ACE2 wt | Collectrin-like | SEQ ID NO: 782 | | |
| 10-02 | ACE2 R273A | ACE2 R273A | Collectrin-like | SEQ ID NO: 782 | | |
| 10-03 | ACE2 R273G | ACE2 R273G | Collectrin-like | SEQ ID NO: 782 | | |
| 10-04 | ACE2 R273V | ACE2 R273V | Collectrin-like | SEQ ID NO: 782 | | |
| 10-05 | ACE2 H378A | ACE2 H378A | Collectrin-like | SEQ ID NO: 782 | | |
| 10-06 | ACE2 E201A | ACE2 E201A | Collectrin-like | SEQ ID NO: 782 | | |
| 10-07 | ACE2 wt | ACE2 wt | Collectrin-like | SEQ ID NO: 782 | | |
| 10-08 | ACE2 R273A | ACE2 R273A | Collectrin-like | SEQ ID NO: 782 | | |
| 10-09 | ACE2 R273G | ACE2 R273G | Collectrin-like | SEQ ID NO: 782 | | |
| 10-10 | ACE2 R273V | ACE2 R273V | Collectrin-like | SEQ ID NO: 782 | | |
| 10-11 | ACE2 H378A | ACE2 H378A | Collectrin-like | SEQ ID NO: 782 | | |
| 10-12 | ACE2 E201A | ACE2 E201A | Collectrin-like | SEQ ID NO: 782 | | |
| 10-13 | ACE2 wt | ACE2 wt | Collectrin-like | SEQ ID NO: 782 | | |
| 10-14 | ACE2 R273A | ACE2 R273A | Collectrin-like | SEQ ID NO: 782 | | |
| 10-15 | ACE2 R273G | ACE2 R273G | Collectrin-like | SEQ ID NO: 782 | | |
| 10-16 | ACE2 R273V | ACE2 R273V | Collectrin-like | SEQ ID NO: 782 | | |
| 10-17 | ACE2 H378A | ACE2 H378A | Collectrin-like | SEQ ID NO: 782 | | |
| 10-18 | ACE2 E201A | ACE2 E201A | Collectrin-like | SEQ ID NO: 782 | | |
| 10-19 | ACE2 wt | ACE2 wt | Collectrin-like | SEQ ID NO: 782 | | |
| 10-20 | ACE2 R273A | ACE2 R273A | Collectrin-like | SEQ ID NO: 782 | | |
| 10-21 | ACE2 R273G | ACE2 R273G | Collectrin-like | SEQ ID NO: 782 | | |
| 10-22 | ACE2 R273V | ACE2 R273V | Collectrin-like | SEQ ID NO: 782 | | |
| 10-23 | ACE2 H378A | ACE2 H378A | Collectrin-like | SEQ ID NO: 782 | | |
| 10-24 | ACE2 E201A | ACE2 E201A | Collectrin-like | SEQ ID NO: 782 | | |
| 10-25 | ACE2 wt | ACE2 wt | Collectrin-like | SEQ ID NO: 782 | Collectrin | SEQ ID NO: 784 |
| 10-26 | ACE2 R273A | ACE2 R273A | Collectrin-like | SEQ ID NO: 782 | Collectrin | SEQ ID NO: 784 |
| 10-27 | ACE2 R273G | ACE2 R273G | Collectrin-like | SEQ ID NO: 782 | Collectrin | SEQ ID NO: 784 |
| 10-28 | ACE2 R273V | ACE2 R273V | Collectrin-like | SEQ ID NO: 782 | Collectrin | SEQ ID NO: 784 |
| 10-29 | ACE2 H378A | ACE2 H378A | Collectrin-like | SEQ ID NO: 782 | Collectrin | SEQ ID NO: 784 |
| 10-30 | ACE2 E201A | ACE2 E201A | Collectrin-like | SEQ ID NO: 782 | Collectrin | SEQ ID NO: 784 |
| 10-31 | ACE2 wt | ACE2 wt | Collectrin-like | SEQ ID NO: 782 | Collectrin | SEQ ID NO: 783 |
| 10-32 | ACE2 R273A | ACE2 R273A | Collectrin-like | SEQ ID NO: 782 | Collectrin | SEQ ID NO: 783 |
| 10-33 | ACE2 R273G | ACE2 R273G | Collectrin-like | SEQ ID NO: 782 | Collectrin | SEQ ID NO: 783 |
| 10-34 | ACE2 R273V | ACE2 R273V | Collectrin-like | SEQ ID NO: 782 | Collectrin | SEQ ID NO: 783 |
| 10-35 | ACE2 H378A | ACE2 H378A | Collectrin-like | SEQ ID NO: 782 | Collectrin | SEQ ID NO: 783 |
| 10-36 | ACE2 E201A | ACE2 E201A | Collectrin-like | SEQ ID NO: 782 | Collectrin | SEQ ID NO: 783 |
| 10-37 | ACE2 wt | ACE2 wt | Collectrin-like | SEQ ID NO: 782 | Collectrin | SEQ ID NO: 786 |
| 10-38 | ACE2 R273A | ACE2 R273A | Collectrin-like | SEQ ID NO: 782 | Collectrin | SEQ ID NO: 786 |
| 10-39 | ACE2 R273G | ACE2 R273G | Collectrin-like | SEQ ID NO: 782 | Collectrin | SEQ ID NO: 786 |
| 10-40 | ACE2 R273V | ACE2 R273V | Collectrin-like | SEQ ID NO: 782 | Collectrin | SEQ ID NO: 786 |
| 10-41 | ACE2 H378A | ACE2 H378A | Collectrin-like | SEQ ID NO: 782 | Collectrin | SEQ ID NO: 786 |
| 10-42 | ACE2 E201A | ACE2 E201A | Collectrin-like | SEQ ID NO: 782 | Collectrin | SEQ ID NO: 786 |
| 10-43 | ACE2 wt | ACE2 wt | Collectrin-like | SEQ ID NO: 782 | Collectrin-like | SEQ ID NO: 782 |
| 10-44 | ACE2 R273A | ACE2 R273A | Collectrin-like | SEQ ID NO: 782 | Collectrin-like | SEQ ID NO: 782 |
| 10-45 | ACE2 R273G | ACE2 R273G | Collectrin-like | SEQ ID NO: 782 | Collectrin-like | SEQ ID NO: 782 |
| 10-46 | ACE2 R273V | ACE2 R273V | Collectrin-like | SEQ ID NO: 782 | Collectrin-like | SEQ ID NO: 782 |
| 10-47 | ACE2 H378A | ACE2 H378A | Collectrin-like | SEQ ID NO: 782 | Collectrin-like | SEQ ID NO: 782 |
| 10-48 | ACE2 E201A | ACE2 E201A | Collectrin-like | SEQ ID NO: 782 | Collectrin-like | SEQ ID NO: 782 |
| 10-49 | ACE2 wt | ACE2 wt | Collectrin-like | SEQ ID NO: 782 | Collectrin-like | SEQ ID NO: 782 |
| 10-50 | ACE2 R273A | ACE2 R273A | Collectrin-like | SEQ ID NO: 782 | Collectrin-like | SEQ ID NO: 782 |
| 10-51 | ACE2 R273G | ACE2 R273G | Collectrin-like | SEQ ID NO: 782 | Collectrin-like | SEQ ID NO: 782 |
| 10-52 | ACE2 R273V | ACE2 R273V | Collectrin-like | SEQ ID NO: 782 | Collectrin-like | SEQ ID NO: 782 |
| 10-53 | ACE2 H378A | ACE2 H378A | Collectrin-like | SEQ ID NO: 782 | Collectrin-like | SEQ ID NO: 782 |
| 10-54 | ACE2 E201A | ACE2 E201A | Collectrin-like | SEQ ID NO: 782 | Collectrin-like | SEQ ID NO: 782 |
| 10-55 | ACE2 wt | ACE2 wt | Collectrin-like | SEQ ID NO: 782 | | |
| 10-56 | ACE2 R273A | ACE2 R273A | Collectrin-like | SEQ ID NO: 782 | | |
| 10-57 | ACE2 R273G | ACE2 R273G | Collectrin-like | SEQ ID NO: 782 | | |
| 10-58 | ACE2 R273V | ACE2 R273V | Collectrin-like | SEQ ID NO: 782 | | |
| 10-59 | ACE2 H378A | ACE2 H378A | Collectrin-like | SEQ ID NO: 782 | | |
| 10-60 | ACE2 E201A | ACE2 E201A | Collectrin-like | SEQ ID NO: 782 | | |
| 10-61 | ACE2 wt | ACE2 wt | Collectrin-like | SEQ ID NO: 782 | | |
| 10-62 | ACE2 R273A | ACE2 R273A | Collectrin-like | SEQ ID NO: 782 | | |
| 10-63 | ACE2 R273G | ACE2 R273G | Collectrin-like | SEQ ID NO: 782 | | |
| 10-64 | ACE2 R273V | ACE2 R273V | Collectrin-like | SEQ ID NO: 782 | | |
| 10-65 | ACE2 H378A | ACE2 H378A | Collectrin-like | SEQ ID NO: 782 | | |
| 10-66 | ACE2 E201A | ACE2 E201A | Collectrin-like | SEQ ID NO: 782 | | |

TABLE 26B

| | Specific Activity (pmol/min/ug) | | | |
|---|---|---|---|---|
| Protein ID | ACE2 | Angiotensin II | Bradykinin | Apelin-13 |
| 13-17 | wt | 1655.2 | 1724.8 | 688 |
| 13-18 | H378A | 0.76 | 1.14 | 1.01 |

### Example 11—SARS-CoV-2 Neutralizing Antibodies

[1318] Biosimilar versions of eight antibodies that have received Emergency Use Authorization or are in late stage trials, REGN10897, REGN10933, Bamlanivimab, Etesevimab, AZD1061, AZD 8895, VIR-7841, and CT-P59, were produced according to Table 27 to evaluate the relative effectiveness of ACE2 superdimeric tetrahedral antibodies against SARS-CoV-2 variants.

TABLE 27

| Protein | Antibody | | Fc Domain | | |
|---|---|---|---|---|---|
| ID | Name | Other Name | Mutations | L Chain | H Chain |
| 12-01 | Imdevimab | REGN10987 | | SEQ ID NO: 423 | SEQ ID NO: 424 |
| 12-02 | Casirivimab | REGN10933 | | SEQ ID NO: 429 | SEQ ID NO: 430 |
| 12-03 | Bamlanivimab | LY-CoV555 | | SEQ ID NO: 441 | SEQ ID NO: 442 |
| 12-04 | Etesevimab | LY-CoV016 | L234A/L235A | SEQ ID NO: 445 | SEQ ID NO: 446 |
| 12-05 | Cilgavimab | AZD1061 | L234F/L235E/P331S | SEQ ID NO: 449 | SEQ ID NO: 450 |
| | | | M252Y/S254T/T256E | | |
| 12-06 | Tixagevimab | AZD8895 | L234F/L235E/P331S | SEQ ID NO: 453 | SEQ ID NO: 454 |
| | | | M252Y/S254T/T256E | | |
| 12-07 | Sotrovimab | VIR-7831 | M428L/N434S | SEQ ID NO: 457 | SEQ ID NO: 458 |
| 12-08 | Regdanvimab | CT-P59 | | SEQ ID NO: 461 | SEQ ID NO: 462 |
| 12-09 | B13A-PG | | L234A/L235A/P329G | SEQ ID NO: 465 | SEQ ID NO: 466 |
| 12-10 | O24A-PG | | L234A/L235A/P329G | SEQ ID NO: 469 | SEQ ID NO: 470 |
| 16-01 | B13A | | | SEQ ID NO: 465 | SEQ ID NO: 554 |
| 16-02 | O24A | | | SEQ ID NO: 469 | SEQ ID NO: 555 |

### Example 12

[1319] To provide proof-of-principle demonstrating tetrahedral antibodies comprising two distinct types of domain that specifically bind two different targets, two series of constructs were generated, a first series with the predicted structure shown in Panel B of FIG. 31, according to Tables 28 and 29, and a second series with the predicted structure shown in Panel C of FIG. 32, according to Tables 30 and 31, then evaluated for their structural and functional bispecificity.

TABLE 28

| Protein | | | | |
|---|---|---|---|---|
| ID | Protein Name | H1 Chain | L2 Chain | H2 Chain |
| 13-01 | ACE2FcPG-740wt201RF/REGN10987 | SEQ ID NO: 471 | SEQ ID NO: 423 | SEQ ID NO: 472 |
| 13-02 | ACE2FcPG-740HA201RF/REGN10987 | SEQ ID NO: 473 | SEQ ID NO: 423 | SEQ ID NO: 472 |
| 13-03 | ACE2FcPG-740wt201RF/REGN10933 | SEQ ID NO: 471 | SEQ ID NO: 429 | SEQ ID NO: 474 |
| 13-04 | ACE2FcPG-740HA201RF/REGN10933 | SEQ ID NO: 473 | SEQ ID NO: 429 | SEQ ID NO: 474 |
| 13-05 | ACE2FcPG-740wt20IRF/Bamlanivimab | SEQ ID NO: 471 | SEQ ID NO: 441 | SEQ ID NO: 475 |
| 13-06 | ACE2FcPG-740HA20IRF/Bamlanivimab | SEQ ID NO: 473 | SEQ ID NO: 441 | SEQ ID NO: 475 |
| 13-07 | ACE2FcPG-740wt20IRF/Etesevimab | SEQ ID NO: 471 | SEQ ID NO: 445 | SEQ ID NO: 476 |
| 13-08 | ACE2FcPG-740HA20IRF/Etesevimab | SEQ ID NO: 473 | SEQ ID NO: 445 | SEQ ID NO: 476 |
| 13-09 | ACE2FcFES-740wt201RF/Cilgavimab-YTE | SEQ ID NO: 477 | SEQ ID NO: 449 | SEQ ID NO: 478 |
| 13-10 | ACE2FcFES-740HA201RF/Cilgavimab-YTE | SEQ ID NO: 479 | SEQ ID NO: 449 | SEQ ID NO: 478 |
| 13-11 | ACE2FcFES-740wt201RF/Tixagevimab-YTE | SEQ ID NO: 477 | SEQ ID NO: 453 | SEQ ID NO: 480 |
| 13-12 | ACE2FcFES-740HA201RF/Tixagevimab-YTE | SEQ ID NO: 479 | SEQ ID NO: 453 | SEQ ID NO: 480 |
| 13-13 | ACE2FcPG-740wt20IRF/Sotrovimab | SEQ ID NO: 481 | SEQ ID NO: 457 | SEQ ID NO: 482 |
| 13-14 | ACE2FcPG-740HA20IRF/Sotrovimab | SEQ ID NO: 483 | SEQ ID NO: 457 | SEQ ID NO: 482 |
| 13-15 | ACE2FcPG-740wt20IRF/Regdanvimab | SEQ ID NO: 471 | SEQ ID NO: 461 | SEQ ID NO: 484 |
| 13-16 | ACE2FcPG-740HA20IRF/Regdanvimab | SEQ ID NO: 473 | SEQ ID NO: 461 | SEQ ID NO: 484 |
| 13-17 | ACE2FcPG-740wt20IRF/B13A | SEQ ID NO: 471 | SEQ ID NO: 465 | SEQ ID NO: 485 |
| 13-18 | ACE2FcPG-740HA20IRF/B13A | SEQ ID NO: 473 | SEQ ID NO: 465 | SEQ ID NO: 485 |
| 13-19 | ACE2FcPG-740wt201RF/O24A | SEQ ID NO: 471 | SEQ ID NO: 469 | SEQ ID NO: 486 |
| 13-20 | ACE2FcPG-740HA201RF/O24A | SEQ ID NO: 473 | SEQ ID NO: 469 | SEQ ID NO: 486 |
| 13-21 | ACE2FcFES-740wt20IRF/B13A-YTE | SEQ ID NO: 477 | SEQ ID NO: 465 | SEQ ID NO: 487 |
| 13-22 | ACE2FcFES-740HA20IRF/B13A-YTE | SEQ ID NO: 479 | SEQ ID NO: 465 | SEQ ID NO: 487 |
| 13-23 | ACE2FcFES-740wt201RF/O24A-YTE | SEQ ID NO: 477 | SEQ ID NO: 469 | SEQ ID NO: 488 |
| 13-24 | ACE2FcFES-740HA201RF/O24A-YTE | SEQ ID NO: 479 | SEQ ID NO: 469 | SEQ ID NO: 488 |

TABLE 29

| | | | First | First | |
|---|---|---|---|---|---|
| | | | Dimerizing | Dimerizing | |
| Protein | Domain Type | Domain Type | Polypeptide | Polypeptide | Fc Domain Type |
| ID | D3/D4 | D5/D6 | Pair D3/D4 | Sequence | D1/D2 |
| 13-01 | ACE2 wt | REGN10987 | Collectrin-like | SEQ ID NO: 782 | L234A/L235A/P329G |
| 13-02 | ACE2 H378A | REGN10987 | Collectrin-like | SEQ ID NO: 782 | L234A/L235A/P329G |
| 13-03 | ACE2 wt | REGN10933 | Collectrin-like | SEQ ID NO: 782 | L234A/L235A/P329G |
| 13-04 | ACE2 H378A | REGN10933 | Collectrin-like | SEQ ID NO: 782 | L234A/L235A/P329G |
| 13-05 | ACE2 wt | LY-CoV555 | Collectrin-like | SEQ ID NO: 782 | L234A/L235A/P329G |
| 13-06 | ACE2 H378A | LY-CoV555 | Collectrin-like | SEQ ID NO: 782 | L234A/L235A/P329G |
| 13-07 | ACE2 wt | LY-CoV016 | Collectrin-like | SEQ ID NO: 782 | L234A/L235A/P329G |
| 13-08 | ACE2 H378A | LY-CoV016 | Collectrin-like | SEQ ID NO: 782 | L234A/L235A/P329G |
| 13-09 | ACE2 wt | AZD1061 | Collectrin-like | SEQ ID NO: 782 | L234F/L235E/P331S |
| | | | | | M252Y/S254T/T256E |
| 13-10 | ACE2 H378A | AZD1061 | Collectrin-like | SEQ ID NO: 782 | L234F/L235E/P331S |
| | | | | | M252Y/S254T/T256E |
| 13-11 | ACE2 wt | AZD8895 | Collectrin-like | SEQ ID NO: 782 | L234F/L235E/P331S |
| | | | | | M252Y/S254T/T256E |
| 13-12 | ACE2 H378A | AZD8895 | Collectrin-like | SEQ ID NO: 782 | L234F/L235E/P331S |
| | | | | | M252Y/S254T/T256E |
| 13-13 | ACE2 wt | VIR-7831 | Collectrin-like | SEQ ID NO: 782 | L234A/L235A/P329G |
| | | | | | M428L/N434S |
| 13-14 | ACE2 H378A | VIR-7831 | Collectrin-like | SEQ ID NO: 782 | L234A/L235A/P329G |
| | | | | | M428L/N434S |
| 13-15 | ACE2 wt | CT-P59 | Collectrin-like | SEQ ID NO: 782 | L234A/L235A/P329G |
| 13-16 | ACE2 H378A | CT-P59 | Collectrin-like | SEQ ID NO: 782 | L234A/L235A/P329G |
| 13-17 | ACE2 wt | B13A | Collectrin-like | SEQ ID NO: 782 | L234A/L235A/P329G |
| 13-18 | ACE2 H378A | B13A | Collectrin-like | SEQ ID NO: 782 | L234A/L235A/P329G |
| 13-19 | ACE2 wt | O24A | Collectrin-like | SEQ ID NO: 782 | L234A/L235A/P329G |
| 13-20 | ACE2 H378A | O24A | Collectrin-like | SEQ ID NO: 782 | L234A/L235A/P329G |
| 13-21 | ACE2 wt | B13A | Collectrin-like | SEQ ID NO: 782 | L234F/L235E/P331S |
| | | | | | M252Y/S254T/T256E |
| 13-22 | ACE2 H378A | B13A | Collectrin-like | SEQ ID NO: 782 | L234F/L235E/P331S |
| | | | | | M252Y/S254T/T256E |
| 13-23 | ACE2 wt | O24A | Collectrin-like | SEQ ID NO: 782 | L234F/L235E/P331S |
| | | | | | M252Y/S254T/T256E |
| 13-24 | ACE2 H378A | O24A | Collectrin-like | SEQ ID NO: 782 | L234F/L235E/P331S |
| | | | | | M252Y/S254T/T256E |

### Example 13

TABLE 30

| Protein | | | | | |
|---|---|---|---|---|---|
| ID | Protein Name | L1 Chain | H1 Chain | L2 Chain | H2 Chain |
| 14-01 | REGN10987-CLD201RF-N84S/REGN10987 | SEQ ID NO: 423 | SEQ ID NO: 489 | SEQ ID NO: 423 | SEQ ID NO: 472 |
| 14-02 | REGN10987(x)CLD201RF-N84S/REGN10933 | SEQ ID NO: 503 | SEQ ID NO: 490 | SEQ ID NO: 429 | SEQ ID NO: 474 |
| 14-03 | REGN10933-CLD201RF-N84S/REGN10933 | SEQ ID NO: 429 | SEQ ID NO: 491 | SEQ ID NO: 429 | SEQ ID NO: 474 |
| 14-04 | REGN10933(x)CLD201RF-N84S/REGN10987 | SEQ ID NO: 504 | SEQ ID NO: 492 | SEQ ID NO: 423 | SEQ ID NO: 472 |
| 14-05 | Bamlanivimab-CLD201RF/Bamlanivimab | SEQ ID NO: 441 | SEQ ID NO: 493 | SEQ ID NO: 441 | SEQ ID NO: 475 |
| 14-06 | Bamlanivimab(x)CLD201RF/Etesevimab | SEQ ID NO: 505 | SEQ ID NO: 494 | SEQ ID NO: 445 | SEQ ID NO: 476 |
| 14-07 | Etesevimab-CLD201RF-N83S/Etesevimab | SEQ ID NO: 445 | SEQ ID NO: 495 | SEQ ID NO: 445 | SEQ ID NO: 476 |
| 14-08 | Etesevimab(x)CLD201RF-N83S/Bamlanivimab | SEQ ID NO: 506 | SEQ ID NO: 496 | SEQ ID NO: 441 | SEQ ID NO: 475 |
| 14-09 | Cilgavimab-CLD201RF-N86S/Cilgavimab-YTE | SEQ ID NO: 449 | SEQ ID NO: 497 | SEQ ID NO: 449 | SEQ ID NO: 478 |
| 14-10 | Cilgavimab(x)CLD201RF-N86S/Tixagevimab-YTE | SEQ ID NO: 507 | SEQ ID NO: 498 | SEQ ID NO: 453 | SEQ ID NO: 480 |
| 14-11 | Tixagevimab-CLD201RF/Tixagevimab | SEQ ID NO: 453 | SEQ ID NO: 499 | SEQ ID NO: 453 | SEQ ID NO: 480 |
| 14-12 | Tixagevimab(x)CLD201RF/Cilgavimab | SEQ ID NO: 508 | SEQ ID NO: 500 | SEQ ID NO: 449 | SEQ ID NO: 478 |
| 14-13 | Sotrovimab-CLD201RF/Sotrovimab | SEQ ID NO: 457 | SEQ ID NO: 501 | SEQ ID NO: 457 | SEQ ID NO: 482 |
| 14-14 | Regdanvimab-CLD201RF/Regdanvimab | SEQ ID NO: 461 | SEQ ID NO: 502 | SEQ ID NO: 461 | SEQ ID NO: 484 |

TABLE 31

| | | Fab Domain | | Fab Domain | |
|---|---|---|---|---|---|
| Protein | Domain Type | Configuration | Domain | Configuration | Fc Domain Type |
| ID | D3/D4 | D3/D4 | Type D5/D6 | D5/D6 | D1/D2 |
| 14-01 | REGN10987 | VL-CL/VH-CH1 | REGN10987 | VL-CL/VH-CH1 | L234A/L235A/P329G |
| 14-02 | REGN10987 | VH-CH1/VL-CL | REGN10933 | VK-CK/VH-CH1 | L234A/L235A/P329G |
| 14-03 | REGN10933 | VK-CK/VH-CH1 | REGN10933 | VK-CK/VH-CH1 | L234A/L235A/P329G |
| 14-04 | REGN10933 | VH-CH1/VK-CK | REGN10987 | VL-CL/VH-CH1 | L234A/L235A/P329G |
| 14-05 | LY-CoV555 | VK-CK/VH-CH1 | LY-CoV555 | VK-CK/VH-CH1 | L234A/L235A/P329G |
| 14-06 | LY-CoV555 | VH-CH1/VK-CK | LY-CoV016 | VK-CK/VH-CH1 | L234A/L235A/P329G |
| 14-07 | LY-CoV016 | VK-CK/VH-CH1 | LY-CoV016 | VK-CK/VH-CH1 | L234A/L235A/P329G |
| 14-08 | LY-C0V016 | VH-CH1/VK-CK | LY-CoV555 | VK-CK/VH-CH1 | L234A/L235A/P329G |
| 14-09 | AZD1061 | VK-CK/VH-CH1 | AZD1061 | VK-CK/VH-CH1 | L234F/L235E/P331S |
| | | | | | M252Y/S254T/T256E |
| 14-10 | AZD1061 | VH-CH1/VK-CK | AZD8895 | VK-CK/VH-CH1 | L234F/L235E/P331S |
| | | | | | M252Y/S254T/T256E |
| 14-11 | AZD8895 | VK-CK/VH-CH1 | AZD8895 | VK-CK/VH-CH1 | L234F/L235E/P331S |
| | | | | | M252Y/S254T/T256E |
| 14-12 | AZD8895 | VH-CH1/VK-CK | AZD1061 | VK-CK/VH-CH1 | L234F/L235E/P331S |
| | | | | | M252Y/S254T/T256E |
| 14-13 | VIR-7831 | VK-CK/VH-CH1 | VIR-7831 | VK-CK/VH-CH1 | L234A/L235A/P329G |
| | | | | | M428L/N434S |
| 14-14 | CT-P59 | VL-CL/VH-CH1 | CT-P59 | VL-CL/VH-CH1 | L234A/L235A/P329G |

### Example 14—Pharmacokinetics

[1321] Pharmacokinetic studies were carried out with two series of constructs designed to evaluate the effect of mutations in the Fc region that affect FcgR and FcRn binding. The first series is described in Tables 28 and 29, The second series is described in Tables 33 and 34.

[1322] Methods: The study was conducted by The Jackson Laboratory, Bar Harbor, Me. 6-8 week old male B6.Cg-Fcgrttm1Dcr Tg(FCGRT)32Dcr/DcrJ mice were homozygous for the human FcRn transgene. Body weights were measured within 1 day of each test article administration. At 0 hours on Day 0, COVICEPT was administered by IV injection at 10 mg/kg in a volume of 5 ml/kg. 25 μL blood samples were collected from each mouse at 5 m, 6 h, 1 d, 4 d, 7 d, 10 d, 14 d, 17 d, 21 d, and 28 d. The blood samples were collected into 1 uL of K₃EDTA, processed to plasma, diluted 1/10 in 50% glycerol in PBS, frozen in specialized 96 well storage pates and stored at −20° C. Plasma samples were assessed by electrochemiluminescent immunoassay (Meso Scale Diagnostics LLC, Rockville, Md.) to detect the level of COVICEPT.

[1323] Electrochemiluminescent immunoassay: Wild-type spike protein (LakePharma, Inc., San Carlos, Calif.) was diluted to 20 nM with PBS and coated on QuickPlex 96-Well plates (Meso Scale Diagnostics) with 25 μL per well. The plates were sealed and incubated overnight at 4° C. The plates were then blocked by PBS-B (PBS with 1% BSA) at room temperature for 30 minutes. The plasma samples were diluted 250- to 4000-fold with PBS-B. Twenty five microliters of the diluted plasma samples were added to the coated MSD plates using Biomek IS liquid handler (Beckman Coulter Inc., Brea, Calif.). Plasma samples were incubated with shaking (700 rpm) at room temperature for 60 mins. Twenty five microliters of biotinylated goat anti human-Fab antibody (Abcam), or biotinylated goat Anti-Human ACE-2 detection antibody (R&D Systems) was used as a detection antibody. Detection antibody was incubated with shaking (700 rpm) at room temperature for 60 mins. Twenty five microliters of sulfo-tag streptavidin and Read buffer A (Meso Scale Diagnostics LLC, Rockville, Md.) were then added to generate the electrochemiluminescent signal. Data were analyzed with MSD discovery workbench 4.0.13 (Meso Scale Diagnostics LLC, Rockville, Md.). Pharmacokinetic analysis was performed using PKSolver22.

TABLE 32A

| Protein | | | Half-life |
|---|---|---|---|
| ID | Protein Name | Detection | (days) |
| 1317 | B13-ACE2 WT | ACE2 | 4.6 |
| | | Fab | 4.9 |
| 1318 | B13-ACE2 HA | ACE2 | 5.4 |
| | | Fab | 5.4 |
| 1321 | B13-ACE2 WT_YTE | ACE2 | 9.0 |
| | | Fab | 9.4 |
| 1322 | B13-ACE2 HA_YTE | ACE2 | 7.9 |
| | | Fab | 8.3 |

TABLE 32C

| Protein | Domain Type | Domain Type | FcR Domain Type | FcRn Domain Type | Half-life |
|---|---|---|---|---|---|
| ID | D3/D4 | D5/D6 | D1/D2 | D1/D2 | (days) |
| 15-01 | ACE2 H378A | ACE2 H378A | L234A/L235A/P329G | | 1.3 |
| 15-02 | ACE2 H378A | ACE2 H378A | L234A/L235A/P329G | | 1.1 |
| 15-03 | ACE2 H378A | ACE2 H378A | L234A/L235A/P329G | M252Y/S254T/T256E | 1.7 |
| 15-04 | ACE2 H378A | ACE2 H378A | L234A/L235A/P329G | M252Y/S254T/T256E | 1.1 |
| 15-05 | ACE2 H378A | ACE2 H378A | L234A/L235A/P329G | M428L/N434S | 1.4 |
| 15-06 | ACE2 H378A | ACE2 H378A | L234A/L235A/P329G | M428L/N434S | 1.4 |
| 15-07 | ACE2 H378A | ACE2 H378A | L234A/L235A/P329G | FCFL309D/Q311H/N434S | 1.1 |
| 15-08 | ACE2 H378A | ACE2 H378A | L234A/L235A/P329G | FCFL309D/Q311H/N434S | 1.3 |
| 15-09 | ACE2 H378A | B13A | | | 2.8 |
| 15-10 | ACE2 H378A | B13A | L234A/L235A/P329G | | 3.5 |
| 15-11 | ACE2 H378A | B13A | | M252Y/S254T/T256E | 6.2 |
| 15-12 | ACE2 H378A | B13A | L234A/L235A/P329G | M252Y/S254T/T256E | 3.9 |
| 15-13 | ACE2 H378A | B13A | | M428L/N434S | 2.8 |
| 15-14 | ACE2 H378A | B13A | L234A/L235A/P329G | M428L/N434S | 4.5 |
| 15-15 | ACE2 H378A | B13A | | FCFL309D/Q311H/N434S | 4.4 |
| 15-16 | ACE2 H378A | B13A | L234A/L235A/P329G | FCFL309D/Q311H/N434S | 6.0 |

### Example 15

[1324] A series of constructs were generated according to Tables 33 and 34 to evaluate the effect of mutations in the Fc region that affect FcgR and FcRn binding and pharmacokinetics.

[1325] The results of the binding measurements are presented in Tables 35A, 35B, 35C, 35D.

[1326] Methods: Surface plasmon resonance capture kinetic experiments were performed on a Carterra LSA instrument purchased from Carterra, Inc. Salt Lake City, Utah COVICEPT and its controls (5 μg/ml) were immobilized on the Carterra CMD-P chip using amine coupling. Recombinant Fc gamma receptors (R&D Systems) were diluted with running buffer (PBS with 0.05% TWEEN) to a concentration of 2000 nM, followed by 7 times 3-fold serial dilution to 0.9 nM. Fc gamma receptors were injected onto the CMD-P chip for 5 minutes during the association phase followed by running buffer injection for another 5 minutes during the dissociation phase. The CMD-P chip was regenerated by flowing Pierce™ IgG Elution Buffer for 1 minute (Thermo Fisher Scientific Inc., Waltham, Mass.) after each round of Fc-gamma receptors injection. Data were analyzed using the Carterra's Kinetic tool.

TABLE 33

| Protein | | | | |
|---|---|---|---|---|
| ID | Protein Name | H1 Chain | L2 Chain | H2 Chain |
| 15-01 | ACE2FcPG-740HA201/615HA201RF | SEQ ID NO: 509 | | SEQ ID NO: 510 |
| 15-02 | ACE2FcPG-740HA201RF/615HA201 | SEQ ID NO: 473 | | SEQ ID NO: 511 |
| 15-03 | ACE2FcPG-740HA201/615HA201RF-YTE | SEQ ID NO: 512 | | SEQ ID NO: 513 |
| 15-04 | ACE2FcPG-740HA201RF/615HA201-YTE | SEQ ID NO: 514 | | SEQ ID NO: 515 |
| 15-05 | ACE2FcPG-740HA201/615HA201RF-LS | SEQ ID NO: 516 | | SEQ ID NO: 517 |
| 15-06 | ACE2FcPG-740HA201RF/615HA201-LS | SEQ ID NO: 518 | | SEQ ID NO: 519 |
| 15-07 | ACE2FcPG-740HA201/615HA201RF-DHS | SEQ ID NO: 520 | | SEQ ID NO: 521 |
| 15-08 | ACE2FcPG-740HA201RF/615HA201-DHS | SEQ ID NO: 522 | | SEQ ID NO: 523 |
| 15-09 | ACE2Fc-740HA201RF/B13A | SEQ ID NO: 524 | SEQ ID NO: 465 | SEQ ID NO: 525 |
| 15-10 | ACE2FcPG-740HA201RF/B13A | SEQ ID NO: 473 | SEQ ID NO: 465 | SEQ ID NO: 485 |
| 15-11 | ACE2Fc-740HA201RF/B13A-YTE | SEQ ID NO: 526 | SEQ ID NO: 465 | SEQ ID NO: 527 |
| 15-12 | ACE2FcPG-740HA201RF/B13A-YTE | SEQ ID NO: 514 | SEQ ID NO: 465 | SEQ ID NO: 528 |
| 15-13 | ACE2Fc-740HA201RF/B13A-LS | SEQ ID NO: 529 | SEQ ID NO: 465 | SEQ ID NO: 530 |
| 15-14 | ACE2FcPG-740HA201RF/B13A-LS | SEQ ID NO: 518 | SEQ ID NO: 465 | SEQ ID NO: 531 |
| 15-15 | ACE2Fc-740HA201RF/B13A-DHS | SEQ ID NO: 532 | SEQ ID NO: 465 | SEQ ID NO: 533 |
| 15-16 | ACE2FcPG-740HA201RF/B13A-DHS | SEQ ID NO: 522 | SEQ ID NO: 465 | SEQ ID NO: 534 |
| 15-17 | ACE2Fc-740HA201RF/O24A | SEQ ID NO: 524 | SEQ ID NO: 469 | SEQ ID NO: 535 |
| 15-18 | ACE2FcPG-740HA201RF/O24A | SEQ ID NO: 473 | SEQ ID NO: 469 | SEQ ID NO: 486 |
| 15-19 | ACE2Fc-740HA201RF/O24A-YTE | SEQ ID NO: 526 | SEQ ID NO: 469 | SEQ ID NO: 536 |
| 15-20 | ACE2FcPG-740HA201RF/O24A-YTE | SEQ ID NO: 514 | SEQ ID NO: 469 | SEQ ID NO: 537 |
| 15-21 | ACE2Fc-740HA201RF/O24A-LS | SEQ ID NO: 529 | SEQ ID NO: 469 | SEQ ID NO: 538 |
| 15-22 | ACE2FcPG-740HA201RF/O24A-LS | SEQ ID NO: 518 | SEQ ID NO: 469 | SEQ ID NO: 539 |
| 15-23 | ACE2Fc-740HA201RF/O24A-DHS | SEQ ID NO: 532 | SEQ ID NO: 469 | SEQ ID NO: 540 |
| 15-24 | ACE2FcPG-740HA201RF/O24A-DHS | SEQ ID NO: 522 | SEQ ID NO: 469 | SEQ ID NO: 541 |
| 15-49 | ACE2Fc-740HA201/615HA201RF | SEQ ID NO: 542 | | SEQ ID NO: 543 |
| 15-50 | ACE2Fc-740HA201RF/615HA201 | SEQ ID NO: 524 | | SEQ ID NO: 544 |
| 15-51 | ACE2Fc-740HA201/615HA201RF-YTE | SEQ ID NO: 545 | | SEQ ID NO: 546 |
| 15-52 | ACE2Fc-740HA201RF/615HA201-YTE | SEQ ID NO: 526 | | SEQ ID NO: 547 |
| 15-53 | ACE2Fc-740HA201/615HA201RF-LS | SEQ ID NO: 548 | | SEQ ID NO: 549 |
| 15-54 | ACE2Fc-740HA201RF/615HA201-LS | SEQ ID NO: 529 | | SEQ ID NO: 550 |
| 15-55 | ACE2Fc-740HA201/615HA201RF-DHS | SEQ ID NO: 551 | | SEQ ID NO: 552 |
| 15-56 | ACE2Fc-740HA201RF/615HA201-DHS | SEQ ID NO: 532 | | SEQ ID NO: 553 |

TABLE 34

| | | | | | Fc Domain Type | |
|---|---|---|---|---|---|---|
| | | | | | Protein A | |
| | | | | | D1/D2 | |
| Protein | Domain Type | Domain Type | FcR Domain Type | FcRn Domain Type | H1 | H2 |
| ID | D3/D4 | D5/D6 | D1/D2 | D1/D2 | Chain | Chain |
| 15-01 | ACE2 H378A | ACE2 H378A | L234A/L235A/P329G | | HY | RF |
| 15-02 | ACE2 H378A | ACE2 H378A | L234A/L235A/P329G | | RF | HY |
| 15-03 | ACE2 H378A | ACE2 H378A | L234A/L235A/P329G | M252Y/S254T/T256E | HY | RF |
| 15-04 | ACE2 H378A | ACE2 H378A | L234A/L235A/P329G | M252Y/S254T/T256E | RF | HY |
| 15-05 | ACE2 H378A | ACE2 H378A | L234A/L235A/P329G | M428L/N434S | HY | RF |
| 15-06 | ACE2 H378A | ACE2 H378A | L234A/L235A/P329G | M428L/N434S | RF | HY |
| 15-07 | ACE2 H378A | ACE2 H378A | L234A/L235A/P329G | FCΓL309D/Q311H/N434S | HY | RF |
| 15-08 | ACE2 H378A | ACE2 H378A | L234A/L235A/P329G | FCΓL309D/Q311H/N434S | RF | HY |
| 15-09 | ACE2 H378A | B13A | | | RF | HY |
| 15-10 | ACE2 H378A | B13A | L234A/L235A/P329G | | RF | HY |
| 15-11 | ACE2 H378A | B13A | | M252Y/S254T/T256E | RF | HY |
| 15-12 | ACE2 H378A | B13A | L234A/L235A/P329G | M252Y/S254T/T256E | RF | HY |
| 15-13 | ACE2 H378A | B13A | | M428L/N434S | RF | HY |
| 15-14 | ACE2 H378A | B13A | L234A/L235A/P329G | M428L/N434S | RF | HY |
| 15-15 | ACE2 H378A | B13A | | FCΓL309D/Q311H/N434S | RF | HY |
| 15-16 | ACE2 H378A | B13A | L234A/L235A/P329G | FCΓL309D/Q311H/N434S | RF | HY |
| 15-17 | ACE2 H378A | O24A | | | RF | HY |
| 15-18 | ACE2 H378A | O24A | L234A/L235A/P329G | | RF | HY |
| 15-19 | ACE2 H378A | O24A | | M252Y/S254T/T256E | RF | HY |
| 15-20 | ACE2 H378A | O24A | L234A/L235A/P329G | M252Y/S254T/T256E | RF | HY |
| 15-21 | ACE2 H378A | O24A | | M428L/N434S | RF | HY |
| 15-22 | ACE2 H378A | O24A | L234A/L235A/P329G | M428L/N434S | RF | HY |
| 15-23 | ACE2 H378A | O24A | | FCΓL309D/Q311H/N434S | RF | HY |
| 15-24 | ACE2 H378A | O24A | L234A/L235A/P329G | FCΓL309D/Q311H/N434S | RF | HY |
| 15-49 | ACE2 H378A | ACE2 H378A | | | HY | RF |
| 15-50 | ACE2 H378A | ACE2 H378A | | | RF | HY |
| 15-51 | ACE2 H378A | ACE2 H378A | | M252Y/S254T/T256E | HY | RF |
| 15-52 | ACE2 H378A | ACE2 H378A | | M252Y/S254T/T256E | RF | HY |
| 15-53 | ACE2 H378A | ACE2 H378A | | M428L/N434S | HY | RF |
| 15-54 | ACE2 H378A | ACE2 H378A | | M428L/N434S | RF | HY |
| 15-55 | ACE2 H378A | ACE2 H378A | | FCΓL309D/Q311H/N434S | HY | RF |
| 15-56 | ACE2 H378A | ACE2 H378A | | FCΓL309D/Q311H/N434S | RF | HY |

TABLE 35A

| Protein | FcR Domain Type | FcRn Domain Type | FcgRI_CD64 | | | |
|---|---|---|---|---|---|---|
| ID | D1/D2 | D1/D2 | ka (M-1 s-1) | kd (s-1) | KD (M) | Rmax (RU) |
| 15-01 | L234A/L235A/P329G | | NB | NB | NB | NB |
| 15-02 | L234A/L235A/P329G | | NB | NB | NB | NB |
| 15-03 | L234A/L235A/P329G | M252Y/S254T/T256E | NB | NB | NB | NB |
| 15-04 | L234A/L235A/P329G | M252Y/S254T/T256E | NB | NB | NB | NB |
| 15-05 | L234A/L235A/P329G | M428L/N434S | NB | NB | NB | NB |
| 15-06 | L234A/L235A/P329G | M428L/N434S | NB | NB | NB | NB |
| 15-07 | L234A/L235A/P329G | L309D/Q311H/N434S | NB | NB | NB | NB |
| 15-08 | L234A/L235A/P329G | L309D/Q311H/N434S | NB | NB | NB | NB |
| 15-09 | | | 9.71E+05 | 7.44E−04 | 7.67E−10 | 3.61E+01 |
| 15-10 | L234A/L235A/P329G | | NB | NB | NB | NB |
| 15-11 | | M252Y/S254T/T256E | 7.62E+05 | 1.20E−03 | 1.57E−09 | 3.64E+01 |
| 15-12 | L234A/L235A/P329G | M252Y/S254T/T256E | NB | NB | NB | NB |
| 15-13 | | M428L/N434S | 8.29E+05 | 5.83E−04 | 7.02E−10 | 5.34E+01 |
| 15-14 | L234A/L235A/P329G | M428L/N434S | NB | NB | NB | NB |
| 15-15 | | L309D/Q311H/N434S | 7.40E+05 | 7.25E−04 | 9.80E−10 | 6.05E+01 |
| 15-16 | L234A/L235A/P329G | L309D/Q311H/N434S | NB | NB | NB | NB |
| 15-17 | | | 6.94E+05 | 7.16E−04 | 1.03E−09 | 4.37E+01 |
| 15-18 | L234A/L235A/P329G | | NB | NB | NB | NB |
| 15-19 | | M252Y/S254T/T256E | 7.07E+05 | 1.57E−03 | 2.22E−09 | 2.90E+01 |
| 15-20 | L234A/L235A/P329G | M252Y/S254T/T256E | NB | NB | NB | NB |
| 15-21 | | M428L/N434S | 8.87E+05 | 6.72E−04 | 7.58E−10 | 2.97E+01 |
| 15-22 | L234A/L235A/P329G | M428L/N434S | NB | NB | NB | NB |
| 15-23 | | L309D/Q311H/N434S | 9.08E+05 | 6.81E−04 | 7.50E−10 | 3.84E+01 |
| 15-24 | L234A/L235A/P329G | L309D/Q311H/N434S | NB | NB | NB | NB |
| 15-49 | | | 9.04E+05 | 7.02E−04 | 7.76E−10 | 4.87E+01 |
| 15-50 | | | 1.01E+06 | 7.62E−04 | 7.52E−10 | 3.05E+01 |
| 15-51 | | M252Y/S254T/T256E | 9.34E+05 | 1.10E−03 | 1.18E−09 | 2.28E+01 |
| 15-52 | | M252Y/S254T/T256E | 8.54E+05 | 1.17E−03 | 1.37E−09 | 2.69E+01 |
| 15-53 | | M428L/N434S | 9.99E+05 | 6.98E−04 | 6.98E−10 | 2.21E+01 |
| 15-54 | | M428L/N434S | NB | NB | NB | NB |
| 15-56 | | L309D/Q311H/N434S | 7.74E+05 | 9.16E−04 | 1.18E−09 | 3.76E+01 |

TABLE 35B

| Protein | FcR Domain Type | FcRn Domain Type | FcgRIIa (131 R)_CD 32a 131 R | | | |
|---|---|---|---|---|---|---|
| ID | D1/D2 | D1/D2 | ka (M-1 s-1) | kd (s-1) | KD (M) | Rmax (RU) |
| 15-01 | L234A/L235A/P329G | | NB | NB | NB | NB |
| 15-02 | L234A/L235A/P329G | | NB | NB | NB | NB |
| 15-03 | L234A/L235A/P329G | M252Y/S254T/T256E | NB | NB | NB | NB |
| 15-04 | L234A/L235A/P329G | M252Y/S254T/T256E | NB | NB | NB | NB |
| 15-05 | L234A/L235A/P329G | M428L/N434S | NB | NB | NB | NB |
| 15-06 | L234A/L235A/P329G | M428L/N434S | NB | NB | NB | NB |
| 15-07 | L234A/L235A/P329G | L309D/Q311H/N434S | NB | NB | NB | NB |
| 15-08 | L234A/L235A/P329G | L309D/Q311H/N434S | NB | NB | NB | NB |
| 15-09 | | | 1.56E+06 | 3.97E−02 | 2.55E−08 | 3.33E+01 |
| 15-10 | L234A/L235A/P329G | | NB | NB | NB | NB |
| 15-11 | | M252Y/S254T/T256E | 7.26E+05 | 1.12E−01 | 1.54E−07 | 2.79E+01 |
| 15-12 | L234A/L235A/P329G | M252Y/S254T/T256E | NB | NB | NB | NB |
| 15-13 | | M428L/N434S | 1.37E+06 | 1.98E−02 | 1.44E−08 | 4.03E+01 |
| 15-14 | L234A/L235A/P329G | M428L/N434S | NB | NB | NB | NB |
| 15-15 | | L309D/Q311H/N434S | 9.86E+05 | 2.31E−02 | 2.34E−08 | 4.57E+01 |
| 15-16 | L234A/L235A/P329G | L309D/Q311H/N434S | NB | NB | NB | NB |
| 15-17 | | | 8.83E+05 | 4.35E−02 | 4.93E−08 | 1.37E+01 |
| 15-18 | L234A/L235A/P329G | | NB | NB | NB | NB |
| 15-19 | | M252Y/S254T/T256E | 7.19E+05 | 1.98E−01 | 2.76E−07 | 1.65E+01 |
| 15-20 | L234A/L235A/P329G | M252Y/S254T/T256E | NB | NB | NB | NB |
| 15-21 | | M428L/N434S | 1.55E+06 | 7.79E−02 | 5.03E−08 | 2.06E+01 |
| 15-22 | L234A/L235A/P329G | M428L/N434S | NB | NB | NB | NB |
| 15-23 | | L309D/Q311H/N434S | 1.66E+06 | 8.06E−02 | 4.86E−08 | 1.98E+01 |
| 15-24 | L234A/L235A/P329G | L309D/Q311H/N434S | NB | NB | NB | NB |
| 15-49 | | | 1.32E+06 | 3.65E−02 | 2.76E−08 | 3.33E+01 |
| 15-50 | | | 2.03E+06 | 7.99E−02 | 3.94E−08 | 1.91E+01 |
| 15-51 | | M252Y/S254T/T256E | NB | NB | NB | NB |
| 15-52 | | M252Y/S254T/T256E | 1.14E+06 | 2.08E−01 | 1.82E−07 | 1.67E+01 |
| 15-53 | | M428L/N434S | NB | NB | NB | NB |
| 15-54 | | M428L/N434S | NB | NB | NB | NB |
| 15-56 | | L309D/Q311H/N434S | 1.13E+06 | 6.80E−02 | 6.00E−08 | 2.08E+01 |

TABLE 35C

| Protein | FcR Domain Type | FcRn Domain Type | FcgRIIb/c_CD32b/c | | | |
|---|---|---|---|---|---|---|
| ID | D1/D2 | D1/D2 | ka (M-1 s-1) | kd (s-1) | KD (M) | Rmax (RU) |
| 15-01 | L234A/L235A/P329G | | NB | NB | NB | NB |
| 15-02 | L234A/L235A/P329G | | NB | NB | NB | NB |
| 15-03 | L234A/L235A/P329G | M252Y/S254T/T256E | NB | NB | NB | NB |
| 15-04 | L234A/L235A/P329G | M252Y/S254T/T256E | NB | NB | NB | NB |
| 15-05 | L234A/L235A/P329G | M428L/N434S | NB | NB | NB | NB |
| 15-06 | L234A/L235A/P329G | M428L/N434S | NB | NB | NB | NB |
| 15-07 | L234A/L235A/P329G | L309D/Q311H/N434S | NB | NB | NB | NB |
| 15-08 | L234A/L235A/P329G | L309D/Q311H/N434S | NB | NB | NB | NB |
| 15-09 | | | 1.75E+06 | 2.87E−01 | 1.64E−07 | 2.27E+01 |
| 15-10 | L234A/L235A/P329G | | NB | NB | NB | NB |
| 15-11 | | M252Y/S254T/T256E | NB | NB | NB | NB |
| 15-12 | L234A/L235A/P329G | M252Y/S254T/T256E | NB | NB | NB | NB |
| 15-13 | | M428L/N434S | 1.63E+06 | 2.16E−01 | 1.32E−07 | 3.42E+01 |
| 15-14 | L234A/L235A/P329G | M428L/N434S | NB | NB | NB | NB |
| 15-15 | | L309D/Q311H/N434S | 1.26E+06 | 1.99E−01 | 1.57E−07 | 3.67E+01 |
| 15-16 | L234A/L235A/P329G | L309D/Q311H/N434S | NB | NB | NB | NB |
| 15-17 | | | NB | NB | NB | NB |
| 15-18 | L234A/L235A/P329G | | NB | NB | NB | NB |
| 15-19 | | M252Y/S254T/T256E | NB | NB | NB | NB |
| 15-20 | L234A/L235A/P329G | M252Y/S254T/T256E | NB | NB | NB | NB |
| 15-21 | | M428L/N434S | 1.55E+06 | 3.46E−01 | 2.23E−07 | 1.62E+01 |
| 15-22 | L234A/L235A/P329G | M428L/N434S | NB | NB | NB | NB |
| 15-23 | | L309D/Q311H/N434S | NB | NB | NB | NB |
| 15-24 | L234A/L235A/P329G | L309D/Q311H/N434S | NB | NB | NB | NB |
| 15-49 | | | 1.65E+06 | 2.89E−01 | 1.75E−07 | 2.27E+01 |
| 15-50 | | | NB | NB | NB | NB |
| 15-51 | | M252Y/S254T/T256E | NB | NB | NB | NB |
| 15-52 | | M252Y/S254T/T256E | NB | NB | NB | NB |
| 15-53 | | M428L/N434S | NB | NB | NB | NB |
| 15-54 | | M428L/N434S | NB | NB | NB | NB |
| 15-56 | | L309D/Q311H/N434S | NB | NB | NB | NB |

TABLE 35D

| Protein | FcR Domain Type | FcRn Domain Type | FcgRIIIa 158 F_CD 16 a 158 F | | | |
|---|---|---|---|---|---|---|
| ID | D1/D2 | D1/D2 | ka (M-1 s-1) | kd (s-1) | KD (M) | Rmax (RU) |
| 15-01 | L234A/L235A/P329G | | NB | NB | NB | NB |
| 15-02 | L234A/L235A/P329G | | NB | NB | NB | NB |
| 15-03 | L234A/L235A/P329G | M252Y/S254T/T256E | NB | NB | NB | NB |
| 15-04 | L234A/L235A/P329G | M252Y/S254T/T256E | NB | NB | NB | NB |
| 15-05 | L234A/L235A/P329G | M428L/N434S | NB | NB | NB | NB |
| 15-06 | L234A/L235A/P329G | M428L/N434S | NB | NB | NB | NB |
| 15-07 | L234A/L235A/P329G | L309D/Q311H/N434S | NB | NB | NB | NB |
| 15-08 | L234A/L235A/P329G | L309D/Q311H/N434S | NB | NB | NB | NB |
| 15-09 | | | 6.98E+04 | 1.13E−01 | 1.61E−06 | 4.14E+01 |
| 15-10 | L234A/L235A/P329G | | NB | NB | NB | NB |
| 15-11 | | M252Y/S254T/T256E | NB | NB | NB | NB |
| 15-12 | L234A/L235A/P329G | M252Y/S254T/T256E | NB | NB | NB | NB |
| 15-13 | | M428L/N434S | 5.92E+04 | 4.97E−02 | 8.40E−07 | 4.41E+01 |
| 15-14 | L234A/L235A/P329G | M428L/N434S | NB | NB | NB | NB |
| 15-15 | | L309D/Q311H/N434S | 6.04E+04 | 6.92E−02 | 1.15E−06 | 4.81E+01 |
| 15-16 | L234A/L235A/P329G | L309D/Q311H/N434S | NB | NB | NB | NB |
| 15-17 | | | NB | NB | NB | NB |
| 15-18 | L234A/L235A/P329G | | NB | NB | NB | NB |
| 15-19 | | M252Y/S254T/T256E | NB | NB | NB | NB |
| 15-20 | L234A/L235A/P329G | M252Y/S254T/T256E | NB | NB | NB | NB |
| 15-21 | | M428L/N434S | NB | NB | NB | NB |
| 15-22 | L234A/L235A/P329G | M428L/N434S | NB | NB | NB | NB |
| 15-23 | | L309D/Q311H/N434S | NB | NB | NB | NB |
| 15-24 | L234A/L235A/P329G | L309D/Q311H/N434S | NB | NB | NB | NB |
| 15-49 | | | 8.90E+04 | 1.04E−01 | 1.17E−06 | 3.38E+01 |
| 15-50 | | | NB | NB | NB | NB |
| 15-51 | | M252Y/S254T/T256E | NB | NB | NB | NB |
| 15-52 | | M252Y/S254T/T256E | NB | NB | NB | NB |
| 15-53 | | M428L/N434S | NB | NB | NB | NB |
| 15-54 | | M428L/N434S | NB | NB | NB | NB |
| 15-56 | | L309D/Q311H/N434S | NB | NB | NB | NB |

TABLE 35E

| Protein | FcR Domain Type | FcRn Domain Type | FcgRIIb/c_CD32b/c FcgRIIIa 158 V_CD 16 a 158 V | | | |
|---|---|---|---|---|---|---|
| ID | D1/D2 | D1/D2 | ka (M-1 s-1) | kd (s-1) | KD (M) | Rmax (RU) |
| 15-01 | L234A/L235A/P329G | | NB | NB | NB | NB |
| 15-02 | L234A/L235A/P329G | | NB | NB | NB | NB |
| 15-03 | L234A/L235A/P329G | M252Y/S254T/T256E | NB | NB | NB | NB |
| 15-04 | L234A/L235A/P329G | M252Y/S254T/T256E | NB | NB | NB | NB |
| 15-05 | L234A/L235A/P329G | M428L/N434S | NB | NB | NB | NB |
| 15-06 | L234A/L235A/P329G | M428L/N434S | NB | NB | NB | NB |
| 15-07 | L234A/L235A/P329G | L309D/Q311H/N434S | NB | NB | NB | NB |
| 15-08 | L234A/L235A/P329G | L309D/Q311H/N434S | NB | NB | NB | NB |
| 15-09 | | | 1.05E+05 | 3.33E−02 | 3.16E−07 | 3.79E+01 |
| 15-10 | L234A/L235A/P329G | | NB | NB | NB | NB |
| 15-11 | | M252Y/S254T/T256E | NB | NB | NB | NB |
| 15-12 | L234A/L235A/P329G | M252Y/S254T/T256E | NB | NB | NB | NB |
| 15-13 | | M428L/N434S | 9.51E+04 | 2.02E−02 | 2.13E−07 | 4.58E+01 |
| 15-14 | L234A/L235A/P329G | M428L/N434S | NB | NB | NB | NB |
| 15-15 | | L309D/Q311H/N434S | 8.55E+04 | 2.52E−02 | 2.95E−07 | 5.12E+01 |
| 15-16 | L234A/L235A/P329G | L309D/Q311H/N434S | NB | NB | NB | NB |
| 15-17 | | | NB | NB | NB | NB |
| 15-18 | L234A/L235A/P329G | | NB | NB | NB | NB |
| 15-19 | | M252Y/S254T/T256E | NB | NB | NB | NB |
| 15-20 | L234A/L235A/P329G | M252Y/S254T/T256E | NB | NB | NB | NB |
| 15-21 | | M428L/N434S | 1.78E+05 | 3.90E−02 | 2.19E−07 | 2.00E+01 |
| 15-22 | L234A/L235A/P329G | M428L/N434S | NB | NB | NB | NB |
| 15-23 | | L309D/Q311H/N434S | NB | NB | NB | NB |
| 15-24 | L234A/L235A/P329G | L309D/Q311H/N434S | NB | NB | NB | NB |
| 15-49 | | | 1.70E+05 | 3.62E−02 | 2.13E−07 | 3.40E+01 |
| 15-50 | | | NB | NB | NB | NB |
| 15-51 | | M252Y/S254T/T256E | NB | NB | NB | NB |
| 15-52 | | M252Y/S254T/T256E | NB | NB | NB | NB |
| 15-53 | | M428L/N434S | NB | NB | NB | NB |
| 15-54 | | M428L/N434S | NB | NB | NB | NB |
| 15-56 | | L309D/Q311H/N434S | NB | NB | NB | NB |

### Example 16—SARS-CoV-2 Variant Neutralization Studies

[1327] Tetrahedral antibody constructs 15-15 and 15-16 (ACE2-B13A), 15-23 and 15-24 (ACE2-O24), 15-07 and 15-53 (ACE2-ACE2), and 10-61 and 10-65 (ACE2 core dimer as shown in FIG. 43) were evaluated for activity against a range of antibody-resistant variants of SARS-CoV-2 using a pseudovirus neutralization assay (Integral Molecular, Philadelphia, Pa.). The 10-61 and 10-65 constructs incorporated the 313 affinity enhancing mutations described in Glasgow et al. PNAS 117:28046-28055 (2020)). Each construct was evaluated against eleven SARS-CoV-2 variants and one SARS-CoV-1 strain, and compared side-by-side with the parent antibodies B13A and O24, and biosimilar versions of eight antibodies that have received Emergency Use Authorization (EUA) by the U.S. Food and Drug Administration (FDA) or are in late-stage clinical trials: REGN10897, REGN10933, Bamlanivimab, Etesevimab, AZD1061, AZD 8895, VIR-7841, and CT-P59.

[1328] The SARS-CoV-2 variants tested were D614G B.1 (RVP-702), Californian B.1.427/B.1.429 (RVP-713), Indian B.1.617.2 (RVP-763), South African B.1.351 (RVP-707), South African Δ B.1.351 (RVP-724), N439K (RVP-703), Brazilian P.1 (RVP-708), Nigerian/European B.1.525 (RVP-723), New York B.1.526 (RVP-726), UK B.1.1.7 (RVP-706, and UK B.1.1.7 with E484K (RVP-717). The SARS-CoV-1 variant tested was Urbani (RVP-801). The Integral Molecular catalog numbers are indicated in parentheses.

[1329] The results are shown in FIGS. 48A-48P. Notably, the tetrahedral antibody constructs HB1515 and HB1516 were effective against all eleven SARS-CoV-2 variants as well as SARS-CoV-1. By contrast, significant viral resistance was observed for all ten antibodies with at least two of the SARS-CoV-2 variants. In addition, HB1515 and HB1516 were at least as potent as all ten of the antibodies tested (with the exception of CT-P59 against the D614G variant).

[1330] Methods: SARS-CoV-2 pseudovirus neutralization assay. The neutralization assay was carried out according to the manufacturers' protocols. In brief, serially diluted antibodies were incubated with pseudotyped SARS-CoV-2-Renilla Luciferase for 1 hr. at 37° C. At least nine concentrations were tested for each antibody. Pseudovirus in culture media without antibody was used as a negative control to determine 100% infectivity. The mixtures were then incubated with 293T-hsACE2 cells at 2.5×10e5 cells/ml in the 96-well plates. Infection took place over approximately 72 hrs. at 37° C. with 5% CO2. The luciferase signal was measured using the Renilla-Glo luciferase assay system (Promega, Cat #E2710) with the luminometer set at 1 ms integration time. The obtained relative luminescence signals (RLU) from the negative control wells were normalized and used to calculate the neutralization percentage for each concentration. These data were processed by Prism 9 (GraphPad) to fit a 4PL curve and calculate the log IC50.

### Example 17—Efficacy of Tetrahedral Antibody HB1516 in the Hamster Covid-19 model

[1331] A leading animal model for the study of SARS-CoV-2 utilizes Golden Syrian Hamsters to study the pathogenicity and test therapeutics or vaccines. Prior studies using this model have found that SARS-CoV-2 infection of hamsters results in mild to moderate clinical signs (rapid breathing, weight loss, high titers of virus in the upper and lower respiratory tract and histological changes in the lungs) showing similar infectivity and pathology characteristics between hamsters and humans. HB1516 (protein 15-16) was evaluated in a prophylactic version of this model to determine its efficacy in protecting against challenge using the South African variant of SARS-CoV-2 and compared with REGN-CoV-2, a neutralizing antibody cocktail (Regeneron, Tarrytown, N.Y.) consisting of REGN10987 (protein 12-01) and REGN10933 (protein 12-01), which has received an Emergency Use Authorization (EUA) by the U.S. Food and Drug Administration (FDA) and previously demonstrated efficacy in the hamsters (Baum et al, Science 370, 1110-1115 (2020)).

[1332] Materials. The South African variant of SARS-CoV-2 virus used for infection was sourced from BEI Resources, American Type Culture Collection (Manassas, Va.): Catalog No. NR-54974 (hCoV-19/South Africa/KRISP-K005325/2020). This SARS-CoV-2 variant has the following amino acid mutations in its spike (S) protein with reference to the sequence of the Wuhan-1 isolate (NCBI Reference Sequence: NC_045512.2): L18F, D80A, D215A, L242/A243/L244 deletion, K417N, E484K N501Y, D614G, A701V. The biosimilar versions of REGN10987 and REGN10933 used in this study were produced at Lakepharma Inc. (Belmont, Calif.).

[1333] Methods. The study was conducted at BIOQUAL, Inc. (Rockville, Md.). A total of 24 male golden hamsters 6-8 weeks old were assigned to four groups (n=6). Animals were treated with the appropriate material for their group on study day minus one (−1) via the intraperitoneal (IP) route. Test articles were prepared in Dulbecco's Phosphate-Buffered Saline (ATCC No. 30-2020) and administered at the following concentrations: HB1516 (25 mg/kg), REGN10933 (25 mg/kg), and REGN-CoV-2 (25 mg/kg each of REGN10987 and REGN10933).

[1334] On study day 0, animals were bled pre-challenge, followed by intranasal challenge with the South Africa SARS-CoV-2 strain. Animals were observed twice daily in the post-challenge phase and their weights were collected daily.

[1335] Results. As shown in FIG. 49, the PBS negative control group lost weight steadily following infection and by day 7 had lost approximately 18% of their starting weight. The HB1516 treated group maintained their weight throughout the study and by day 7 had gained approximately 3% of their starting weight (HB1516 vs. PBS control: p value <0.0001), comparable to results for the REGN-CoV-2 treated group (HB1516 vs. REGN-CoV: p value 0.9019). By contrast, the REGN10933 treated group had lost about 7% of their weight through day 5.

### Example 18—Tetrahedral Antibodies Comprising Fab Domains of Two Distinct Binding Specificities for SARS-CoV-2 Spike Protein

[1336] To provide proof-of-principle demonstrating tetrahedral antibodies comprising two distinct types of Fab domain that specifically bind two different targets, two series of constructs were generated with the predicted structure shown in Panel C of FIG. 32, according to Table 36, then evaluated for their structural and functional bispecificity. The first series of constructs employed VH and VL regions from REGN10987 (SEQ ID NOs: 421-422) and REGN10933 (SEQ ID NOs: 423-424); the second series of constructs employed VH and VL regions from B13A (SEQ ID NOs: 463-464) and O24A (SEQ ID NOs: 467-468) (Tables 36 and 37).

[1337] To optimize correct VH/VL pairing and to minimize VH/VL mispairing, V region exchange was combined with electrostatic steering (Table 38). Three sets of electrostatically matched mutations were employed. In each series of constructs V region exchange was evaluated in both orientations, e.g., REGN10987/REGN10933 and REGN10933/REGN10987. In each orientation the V regions of the D5/D6 domains were exchanged. Heterodimerization of the H1 and H2 chains was achieved using the Knob-into-Hole approach (knob: T366W/S354C, hole: T366/L368A/Y407V/Y349C). To further facilitate purification of the correctly paired product by Protein A chromatography, either of the H1 or the H2 chain incorporated the H435R/Y436F substitution (Table 37).

[1338] The constructs were evaluated for structural bispecificity by intact mass spectrometry. Following removal of N-glycan and O-glycan using Protein Deglycosylation Mix II (NEB, Ipswich, Mass.), samples were analyzed under non-reducing, denaturing conditions by LS/MS on a Maxis II UHR QTOF instrument following size-exclusion chromatography (Bruker, Billerica, Mass.). One to five ug of each sample was injected at a flowrate of 20 uL in a mobile phase consisting of a 10 min gradient of water with 180 mM ammonium acetate at room temperature. A full scan MS acquisition method was used with a mass resolution of 10,000.

[1339] Following deconvolution, the intensity of the signal was determined for the correctly VH/VL paired tetrahedral antibody (L1L2H1H2) and the two mispaired side-products (L1L1H1H2, L2L2H1H2). Results were obtained for 16 of the constructs (FIG. 50A-50C). No significant mispairing was detected for the H1/H2 chains. The percentage of the main product and side products was calculated and normalized to the total yield of the correct and incorrect products (Table 39). The yield of the correctly paired VH/VL construct (L1L2H1H2) ranged from 98.0 to 99.7%; the yield of the correctly paired VH/VL for four of the constructs was greater than 99.5%.

TABLE 36

| Protein ID | L1 Chain | H1 Chain | L2 Chain | H2 Chain |
|---|---|---|---|---|
| 17-01 | SEQ ID NO: 576 | SEQ ID NO: 556 | SEQ ID NO: 577 | SEQ ID NO: 557 |
| 17-02 | SEQ ID NO: 578 | SEQ ID NO: 558 | SEQ ID NO: 579 | SEQ ID NO: 559 |
| 17-03 | SEQ ID NO: 578 | SEQ ID NO: 558 | SEQ ID NO: 580 | SEQ ID NO: 560 |
| 17-04 | SEQ ID NO: 581 | SEQ ID NO: 561 | SEQ ID NO: 582 | SEQ ID NO: 562 |
| 17-05 | SEQ ID NO: 583 | SEQ ID NO: 563 | SEQ ID NO: 584 | SEQ ID NO: 564 |
| 17-06 | SEQ ID NO: 583 | SEQ ID NO: 563 | SEQ ID NO: 585 | SEQ ID NO: 565 |
| 17-07 | SEQ ID NO: 586 | SEQ ID NO: 556 | SEQ ID NO: 577 | SEQ ID NO: 557 |
| 17-08 | SEQ ID NO: 587 | SEQ ID NO: 558 | SEQ ID NO: 579 | SEQ ID NO: 559 |
| 17-09 | SEQ ID NO: 587 | SEQ ID NO: 558 | SEQ ID NO: 580 | SEQ ID NO: 560 |
| 17-10 | SEQ ID NO: 581 | SEQ ID NO: 561 | SEQ ID NO: 588 | SEQ ID NO: 562 |
| 17-11 | SEQ ID NO: 583 | SEQ ID NO: 563 | SEQ ID NO: 589 | SEQ ID NO: 564 |
| 17-12 | SEQ ID NO: 583 | SEQ ID NO: 563 | SEQ ID NO: 590 | SEQ ID NO: 565 |
| 17-13 | SEQ ID NO: 576 | SEQ ID NO: 566 | SEQ ID NO: 577 | SEQ ID NO: 567 |
| 17-14 | SEQ ID NO: 578 | SEQ ID NO: 568 | SEQ ID NO: 579 | SEQ ID NO: 569 |
| 17-15 | SEQ ID NO: 578 | SEQ ID NO: 568 | SEQ ID NO: 580 | SEQ ID NO: 570 |
| 17-16 | SEQ ID NO: 581 | SEQ ID NO: 571 | SEQ ID NO: 582 | SEQ ID NO: 572 |
| 17-17 | SEQ ID NO: 583 | SEQ ID NO: 573 | SEQ ID NO: 584 | SEQ ID NO: 574 |
| 17-18 | SEQ ID NO: 583 | SEQ ID NO: 573 | SEQ ID NO: 585 | SEQ ID NO: 575 |
| 17-19 | SEQ ID NO: 586 | SEQ ID NO: 566 | SEQ ID NO: 577 | SEQ ID NO: 567 |
| 17-20 | SEQ ID NO: 587 | SEQ ID NO: 568 | SEQ ID NO: 579 | SEQ ID NO: 569 |
| 17-21 | SEQ ID NO: 587 | SEQ ID NO: 568 | SEQ ID NO: 580 | SEQ ID NO: 570 |
| 17-22 | SEQ ID NO: 581 | SEQ ID NO: 571 | SEQ ID NO: 588 | SEQ ID NO: 572 |
| 17-23 | SEQ ID NO: 583 | SEQ ID NO: 573 | SEQ ID NO: 589 | SEQ ID NO: 574 |
| 17-24 | SEQ ID NO: 583 | SEQ ID NO: 573 | SEQ ID NO: 590 | SEQ ID NO: 575 |
| 17-25 | SEQ ID NO: 631 | SEQ ID NO: 591 | SEQ ID NO: 632 | SEQ ID NO: 592 |
| 17-26 | SEQ ID NO: 633 | SEQ ID NO: 593 | SEQ ID NO: 634 | SEQ ID NO: 594 |
| 17-27 | SEQ ID NO: 633 | SEQ ID NO: 593 | SEQ ID NO: 635 | SEQ ID NO: 595 |
| 17-28 | SEQ ID NO: 631 | SEQ ID NO: 596 | SEQ ID NO: 632 | SEQ ID NO: 597 |
| 17-29 | SEQ ID NO: 633 | SEQ ID NO: 598 | SEQ ID NO: 634 | SEQ ID NO: 599 |
| 17-30 | SEQ ID NO: 633 | SEQ ID NO: 598 | SEQ ID NO: 635 | SEQ ID NO: 600 |
| 17-31 | SEQ ID NO: 636 | SEQ ID NO: 601 | SEQ ID NO: 637 | SEQ ID NO: 602 |
| 17-32 | SEQ ID NO: 638 | SEQ ID NO: 603 | SEQ ID NO: 639 | SEQ ID NO: 604 |
| 17-33 | SEQ ID NO: 638 | SEQ ID NO: 603 | SEQ ID NO: 640 | SEQ ID NO: 605 |
| 17-34 | SEQ ID NO: 636 | SEQ ID NO: 606 | SEQ ID NO: 637 | SEQ ID NO: 607 |
| 17-35 | SEQ ID NO: 638 | SEQ ID NO: 608 | SEQ ID NO: 639 | SEQ ID NO: 609 |
| 17-36 | SEQ ID NO: 638 | SEQ ID NO: 608 | SEQ ID NO: 640 | SEQ ID NO: 610 |
| 17-37 | SEQ ID NO: 631 | SEQ ID NO: 611 | SEQ ID NO: 632 | SEQ ID NO: 612 |
| 17-38 | SEQ ID NO: 633 | SEQ ID NO: 613 | SEQ ID NO: 634 | SEQ ID NO: 614 |
| 17-39 | SEQ ID NO: 633 | SEQ ID NO: 613 | SEQ ID NO: 635 | SEQ ID NO: 615 |
| 17-40 | SEQ ID NO: 631 | SEQ ID NO: 616 | SEQ ID NO: 632 | SEQ ID NO: 617 |
| 17-41 | SEQ ID NO: 633 | SEQ ID NO: 618 | SEQ ID NO: 634 | SEQ ID NO: 619 |
| 17-42 | SEQ ID NO: 633 | SEQ ID NO: 618 | SEQ ID NO: 635 | SEQ ID NO: 620 |
| 17-43 | SEQ ID NO: 636 | SEQ ID NO: 621 | SEQ ID NO: 637 | SEQ ID NO: 622 |
| 17-44 | SEQ ID NO: 638 | SEQ ID NO: 623 | SEQ ID NO: 639 | SEQ ID NO: 624 |
| 17-45 | SEQ ID NO: 638 | SEQ ID NO: 623 | SEQ ID NO: 640 | SEQ ID NO: 625 |
| 17-46 | SEQ ID NO: 636 | SEQ ID NO: 626 | SEQ ID NO: 637 | SEQ ID NO: 627 |
| 17-47 | SEQ ID NO: 638 | SEQ ID NO: 628 | SEQ ID NO: 639 | SEQ ID NO: 629 |
| 17-48 | SEQ ID NO: 638 | SEQ ID NO: 628 | SEQ ID NO: 640 | SEQ ID NO: 630 |

TABLE 37

| | D1-Fc | | | | | | | D2-FC | | |
|---|---|---|---|---|---|---|---|---|---|---|
| Protein ID | FcRn | H1 | H2 | D5-Fab | D4-Fab | D3-Fab | D6-Fab | FcRn | H1 | H2 |
| 17-01 | DHS | RF | HY | REGN10933 | REGN10987 | REGN10987 | REGN10933 | DHS | RF | HY |
| 17-02 | DHS | RF | HY | REGN10933 | REGN10987 | REGN10987 | REGN10933 | DHS | RF | HY |
| 17-03 | DHS | RF | HY | REGN10933 | REGN10987 | REGN10987 | REGN10933 | DHS | RF | HY |
| 17-04 | DHS | RF | HY | REGN10987 | REGN10933 | REGN10933 | REGN10987 | DHS | RF | HY |
| 17-05 | DHS | RF | HY | REGN10987 | REGN10933 | REGN10933 | REGN10987 | DHS | RF | HY |
| 17-06 | DHS | RF | HY | REGN10987 | REGN10933 | REGN10933 | REGN10987 | DHS | RF | HY |
| 17-07 | DHS | RF | HY | REGN10933 | REGN10987 | REGN10987 | REGN10933 | DHS | RF | HY |
| 17-08 | DHS | RF | HY | REGN10933 | REGN10987 | REGN10987 | REGN10933 | DHS | RF | HY |
| 17-09 | DHS | RF | HY | REGN10933 | REGN10987 | REGN10987 | REGN10933 | DHS | RF | HY |
| 17-10 | DHS | RF | HY | REGN10987 | REGN10933 | REGN10933 | REGN10987 | DHS | RF | HY |
| 17-11 | DHS | RF | HY | REGN10987 | REGN10933 | REGN10933 | REGN10987 | DHS | RF | HY |
| 17-12 | DHS | RF | HY | REGN10987 | REGN10933 | REGN10933 | REGN10987 | DHS | RF | HY |
| 17-13 | DHS | HY | RF | REGN10933 | REGN10987 | REGN10987 | REGN10933 | DHS | HY | RF |
| 17-14 | DHS | HY | RF | REGN10933 | REGN10987 | REGN10987 | REGN10933 | DHS | HY | RF |
| 17-15 | DHS | HY | RF | REGN10933 | REGN10987 | REGN10987 | REGN10933 | DHS | HY | RF |
| 17-16 | DHS | HY | RF | REGN10987 | REGN10933 | REGN10933 | REGN10987 | DHS | HY | RF |
| 17-17 | DHS | HY | RF | REGN10987 | REGN10933 | REGN10933 | REGN10987 | DHS | HY | RF |
| 17-18 | DHS | HY | RF | REGN10987 | REGN10933 | REGN10933 | REGN10987 | DHS | HY | RF |
| 17-19 | DHS | HY | RF | REGN10933 | REGN10987 | REGN10987 | REGN10933 | DHS | HY | RF |
| 17-20 | DHS | HY | RF | REGN10933 | REGN10987 | REGN10987 | REGN10933 | DHS | HY | RF |
| 17-21 | DHS | HY | RF | REGN10933 | REGN10987 | REGN10987 | REGN10933 | DHS | HY | RF |
| 17-22 | DHS | HY | RF | REGN10987 | REGN10933 | REGN10933 | REGN10987 | DHS | HY | RF |
| 17-23 | DHS | HY | RF | REGN10987 | REGN10933 | REGN10933 | REGN10987 | DHS | HY | RF |
| 17-24 | DHS | HY | RF | REGN10987 | REGN10933 | REGN10933 | REGN10987 | DHS | HY | RF |
| 17-25 | wt | RF | HY | O24A | B13A | B13A | O24A | wt | RF | HY |
| 17-26 | wt | RF | HY | O24A | B13A | B13A | O24A | wt | RF | HY |
| 17-27 | wt | RF | HY | O24A | B13A | B13A | O24A | wt | RF | HY |
| 17-28 | DHS | RF | HY | O24A | B13A | B13A | O24A | DHS | RF | HY |
| 17-29 | DHS | RF | HY | O24A | B13A | B13A | O24A | DHS | RF | HY |
| 17-30 | DHS | RF | HY | O24A | B13A | B13A | O24A | DHS | RF | HY |
| 17-31 | wt | RF | HY | B13A | O24A | O24A | B13A | wt | RF | HY |
| 17-32 | wt | RF | HY | B13A | O24A | O24A | B13A | wt | RF | HY |
| 17-33 | wt | RF | HY | B13A | O24A | O24A | B13A | wt | RF | HY |
| 17-34 | DHS | RF | HY | B13A | O24A | O24A | B13A | DHS | RF | HY |
| 17-35 | DHS | RF | HY | B13A | O24A | O24A | B13A | DHS | RF | HY |
| 17-36 | DHS | RF | HY | B13A | O24A | O24A | B13A | DHS | RF | HY |
| 17-37 | wt | HY | RF | O24A | B13A | B13A | O24A | wt | HY | RF |
| 17-38 | wt | HY | RF | O24A | B13A | B13A | O24A | wt | HY | RF |
| 17-39 | wt | HY | RF | O24A | B13A | B13A | O24A | wt | HY | RF |
| 17-40 | DHS | HY | RF | O24A | B13A | B13A | O24A | DHS | HY | RF |
| 17-41 | DHS | HY | RF | O24A | B13A | B13A | O24A | DHS | HY | RF |
| 17-42 | DHS | HY | RF | O24A | B13A | B13A | O24A | DHS | HY | RF |
| 17-43 | wt | HY | RF | B13A | O24A | O24A | B13A | wt | HY | RF |
| 17-44 | wt | HY | RF | B13A | O24A | O24A | B13A | wt | HY | RF |
| 17-45 | wt | HY | RF | B13A | O24A | O24A | B13A | wt | HY | RF |
| 17-46 | DHS | HY | RF | B13A | O24A | O24A | B13A | DHS | HY | RF |
| 17-47 | DHS | HY | RF | B13A | O24A | O24A | B13A | DHS | HY | RF |
| 17-48 | DHS | HY | RF | B13A | O24A | O24A | B13A | DHS | HY | RF |

TABLE 38

| | L1 Chain | | H1 Chain | | L2 Chain | | H2 Chain | |
|---|---|---|---|---|---|---|---|---|
| | V region | Amino acid | V region | Amino acid | V region | Amino acid | V region | Amino acid |
| Protein ID | type | Substitutions | Type | Substitutions | Type | Substitutions | Type | Substitutions |
| 17-01 | VL-CL | E123R/Q124K | VH-CH1 | K147E/K213E | VH-CK | | VK-CH1 | |
| 17-02 | VL-CL | Q38E/V133K | VH-CH1 | Q39K/S183E | VH-CK | Q39K/V133E | VK-CH1 | Q38E/S183K |
| 17-03 | VL-CL | Q38E/V133K | VH-CH1 | Q39K/S183E | VH-CK | Q39E/V133E | VK-CH1 | Q38K/S183K |
| 17-04 | VK-CK | E123R/Q124K | VH-CH1 | K147E/K213E | VH-CL | | VL-CH1 | |
| 17-05 | VK-CK | Q38E/V133K | VH-CH1 | Q39K/S183E | VH-CL | Q39K/V133E | VL-CH1 | Q38E/S183K |
| 17-06 | VK-CK | Q38E/V133K | VH-CH1 | Q39K/S183E | VH-CL | Q39E/V133E | VL-CH1 | Q38K/S183K |
| 17-07 | VL-CK | E123R/Q124K | VH-CH1 | K147E/K213E | VH-CK | | VK-CH1 | |
| 17-08 | VL-CK | Q38E/V133K | VH-CH1 | Q39K/S183E | VH-CK | Q39K/V133E | VK-CH1 | Q38E/S183K |
| 17-09 | VL-CK | Q38E/V133K | VH-CH1 | Q39K/S183E | VH-CK | Q39E/V133E | VK-CH1 | Q38K/S183K |
| 17-10 | VK-CK | E123R/Q124K | VH-CH1 | K147E/K213E | VH-CK | | VL-CH1 | |
| 17-11 | VK-CK | Q38E/V133K | VH-CH1 | Q39K/S183E | VH-CK | Q39K/V133E | VL-CH1 | Q38E/S183K |
| 17-12 | VK-CK | Q38E/V133K | VH-CH1 | Q39K/S183E | VH-CK | Q39E/V133E | VL-CH1 | Q38K/S183K |
| 17-13 | VL-CL | E123R/Q124K | VH-CH1 | K147E/K213E | VH-CK | | VK-CH1 | |
| 17-14 | VL-CL | Q38E/V133K | VH-CH1 | Q39K/S183E | VH-CK | Q39K/V133E | VK-CH1 | Q38E/S183K |
| 17-15 | VL-CL | Q38E/V133K | VH-CH1 | Q39K/S183E | VH-CK | Q39E/V133E | VK-CH1 | Q38K/S183K |
| 17-16 | VK-CK | E123R/Q124K | VH-CH1 | K147E/K213E | VH-CL | | VL-CH1 | |
| 17-17 | VK-CK | Q38E/V133K | VH-CH1 | Q39K/S183E | VH-CL | Q39K/V133E | VL-CH1 | Q38E/S183K |
| 17-18 | VK-CK | Q38E/V133K | VH-CH1 | Q39K/S183E | VH-CL | Q39E/V133E | VL-CH1 | Q38K/S183K |
| 17-19 | VL-CK | E123R/Q124K | VH-CH1 | K147E/K213E | VH-CK | | VK-CH1 | |
| 17-20 | VL-CK | Q38E/V133K | VH-CH1 | Q39K/S183E | VH-CK | Q39K/V133E | VK-CH1 | Q38E/S183K |
| 17-21 | VL-CK | Q38E/V133K | VH-CH1 | Q39K/S183E | VH-CK | Q39E/V133E | VK-CH1 | Q38K/S183K |
| 17-22 | VK-CK | E123R/Q124K | VH-CH1 | K147E/K213E | VH-CK | | VL-CH1 | |
| 17-23 | VK-CK | Q38E/V133K | VH-CH1 | Q39K/S183E | VH-CK | Q39K/V133E | VL-CH1 | Q38E/S183K |
| 17-24 | VK-CK | Q38E/V133K | VH-CH1 | Q39K/S183E | VH-CK | Q39E/V133E | VL-CH1 | Q38K/S183K |
| 17-25 | VK-CK | E123R/Q124K | VH-CH1 | K147E/K213E | VH-CK | | VK-CH1 | |
| 17-26 | VK-CK | Q38E/V133K | VH-CH1 | Q39K/S183E | VH-CK | Q39K/V133E | VK-CH1 | Q38E/S183K |
| 17-27 | VK-CK | Q38E/V133K | VH-CH1 | Q39K/S183E | VH-CK | Q39E/V133E | VK-CH1 | Q38K/S183K |
| 17-28 | VK-CK | E123R/Q124K | VH-CH1 | K147E/K213E | VH-CK | | VK-CH1 | |
| 17-29 | VK-CK | Q38E/V133K | VH-CH1 | Q39K/S183E | VH-CK | Q39K/V133E | VK-CH1 | Q38E/S183K |
| 17-30 | VK-CK | Q38E/V133K | VH-CH1 | Q39K/S183E | VH-CK | Q39E/V133E | VK-CH1 | Q38K/S183K |
| 17-31 | VK-CK | E123R/Q124K | VH-CH1 | K147E/K213E | VH-CK | | VK-CH1 | |
| 17-32 | VK-CK | Q38E/V133K | VH-CH1 | Q39K/S183E | VH-CK | Q39K/V133E | VK-CH1 | Q38E/S183K |
| 17-33 | VK-CK | Q38E/V133K | VH-CH1 | Q39K/S183E | VH-CK | Q39E/V133E | VK-CH1 | Q38K/S183K |
| 17-34 | VK-CK | E123R/Q124K | VH-CH1 | K147E/K213E | VH-CK | | VK-CH1 | |
| 17-35 | VK-CK | Q38E/V133K | VH-CH1 | Q39K/S183E | VH-CK | Q39K/V133E | VK-CH1 | Q38E/S183K |
| 17-36 | VK-CK | Q38E/V133K | VH-CH1 | Q39K/S183E | VH-CK | Q39E/V133E | VK-CH1 | Q38K/S183K |
| 17-37 | VK-CK | E123R/Q124K | VH-CH1 | K147E/K213E | VH-CK | | VK-CH1 | |
| 17-38 | VK-CK | Q38E/V133K | VH-CH1 | Q39K/S183E | VH-CK | Q39K/V133E | VK-CH1 | Q38E/S183K |
| 17-39 | VK-CK | Q38E/V133K | VH-CH1 | Q39K/S183E | VH-CK | Q39E/V133E | VK-CH1 | Q38K/S183K |
| 17-40 | VK-CK | E123R/Q124K | VH-CH1 | K147E/K213E | VH-CK | | VK-CH1 | |
| 17-41 | VK-CK | Q38E/V133K | VH-CH1 | Q39K/S183E | VH-CK | Q39K/V133E | VK-CH1 | Q38E/S183K |
| 17-42 | VK-CK | Q38E/V133K | VH-CH1 | Q39K/S183E | VH-CK | Q39E/V133E | VK-CH1 | Q38K/S183K |
| 17-43 | VK-CK | E123R/Q124K | VH-CH1 | K147E/K213E | VH-CK | | VK-CH1 | |
| 17-44 | VK-CK | Q38E/V133K | VH-CH1 | Q39K/S183E | VH-CK | Q39K/V133E | VK-CH1 | Q38E/S183K |
| 17-45 | VK-CK | Q38E/V133K | VH-CH1 | Q39K/S183E | VH-CK | Q39E/V133E | VK-CH1 | Q38K/S183K |
| 17-46 | VK-CK | E123R/Q124K | VH-CH1 | K147E/K213E | VH-CK | | VK-CH1 | |
| 17-47 | VK-CK | Q38E/V133K | VH-CH1 | Q39K/S183E | VH-CK | Q39K/V133E | VK-CH1 | Q38E/S183K |
| 17-48 | VK-CK | Q38E/V133K | VH-CH1 | Q39K/S183E | VH-CK | Q39E/V133E | VK-CH1 | Q38K/S183K |

TABLE 39

| Protein | L1L1H1H2 | L1L2H1H2 | L2L2H1H2 | | Theoretical Average Intact Mass, Da | | |
|---|---|---|---|---|---|---|---|
| ID | (%) | (%) | (%) | Delta, Da | L1L1H1H2 | L1L2H1H2 | L2L2H1H2 |
| 17-01 | 0.2 | 99.7 | 0.1 | 2027 | 160023 | 162050 | 164077 |
| 17-02 | 0.4 | 99.6 | 0.0 | 2053 | 160113 | 162166 | 164220 |
| 17-03 | 0.8 | 99.2 | 0.0 | 2054 | 160112 | 162166 | 164221 |
| 17-04 | 0.0 | 98.0 | 2.0 | 1021 | 161042 | 162063 | 163084 |
| 17-07 | 0.0 | 99.6 | 0.4 | 1498 | 161082 | 162580 | 164077 |
| 17-08 | 0.3 | 98.6 | 1.1 | 1525 | 161170 | 162695 | 163220 |
| 17-09 | 0.9 | 98.4 | 0.7 | 1526 | 161169 | 162695 | 164221 |
| 17-10 | 0.3 | 98.6 | 1.1 | 1481 | 161042 | 162523 | 164003 |
| 17-11 | 0.3 | 99.1 | 0.5 | 1535 | 161130 | 162665 | 164200 |
| 17-12 | 0.3 | 98.9 | 0.8 | 1536 | 161129 | 162655 | 164200 |
| 17-19 | 0.5 | 99.2 | 0.3 | 1498 | 161082 | 162580 | 164077 |
| 17-20 | 0.2 | 99.3 | 0.5 | 1525 | 161170 | 162695 | 164220 |
| 17-21 | 0.3 | 99.5 | 0.2 | 1526 | 161169 | 162695 | 164221 |
| 17-22 | 0.4 | 99.0 | 0.6 | 1481 | 161042 | 162523 | 164003 |
| 17-23 | 0.3 | 98.5 | 1.2 | 1535 | 161130 | 162665 | 164200 |
| 17-24 | 0.4 | 98.9 | 0.7 | 1536 | 161129 | 162665 | 164200 |

### Example 19—Neutralization of SARS-CoV-2 Pseudovirus by Bispecific Tetrahedral Antibodies

[1340] The tetrahedral antibody constructs of Example 18 were evaluated for their functional bispecificity using a SARS-CoV-2 pseudovirus neutralization assay (Integral Molecular, Philadelphia, Pa.) as described in Example 18. Each construct was evaluated against two SARS-CoV-2 variants: an N439L variant highly resistant to REGN10987 (genotype N439K, D614G; Catalog #RVP-703) and a South African Δ3 B.1.351 variant highly resistant to REGN10933 (genotype L18F, D80A, D215G, ΔL242/L243/L244, R2461, K417N, N501Y, E484K, A701V; Catalog #RVP-724). The activity each of the bispecific constructs was directly compared with the parent antibodies REGN10987 and REN10933 as well as REGN-CoV-2, a 1:1 cocktail of REGN10987 and REGN10933. The biosimilar versions of REGN10987, REGN10933 and REGN-CoV-2 used in this study were produced at Lakepharma Inc. (Belmont, Calif.).

[1341] Results were obtained for 18 of the constructs (FIG. 51A-51C, Table 40). With respect to the control constructs, REGN10987 was approximately 1,000-fold less potent than REGN10933 against the N439K variant, and REGN10933 was approximately 3,000-fold less potent than REGN10987 against the South African variant. The REGN-CoV-2 cocktail was approximately 1.5-fold more potent than REGN10933 against the N439 variant and approximately equal in potency to REGB10987 against the South African variant. All 18 of the tetravalent, bispecific tetrahedral antibody constructs potently neutralized both the N439K and South African variants; 15 of the 18 bispecific constructs were at least as potent as the REGN-CoV-2 cocktail against the N43K variant, and 14 of the 18 bispecific constructs were approximately two- to three-fold more potent than the REGN-CoV-2 cocktail against the South African variant.

TABLE 40

| | EC50 (pM) Neutralization | | | | | |
|---|---|---|---|---|---|---|
| | | South Africa | | | | |
| Protein ID | N439K | B.1.351 | D5-Fab | D4-Fab | D3-Fab | D6-Fab |
| REGN10987 | 2,256.46 | 2.48 | | | | |
| REGN10987 | 2,216.82 | 2.37 | | | | |
| REGN10933 | 2.09 | 7,776.27 | | | | |
| REGN10933 | 1.80 | 8,548.99 | | | | |
| REGN-CoV2 | 1.18 | 1.87 | | | | |
| REGN-CoV2 | 1.44 | 2.91 | | | | |
| 17-01 | 1.10 | 0.82 | REGN10933 | REGN10987 | REGN10987 | REGN10933 |
| 17-02 | 1.08 | 1.19 | REGN10933 | REGN10987 | REGN10987 | REGN10933 |
| 17-03 | 1.25 | 1.29 | REGN10933 | REGN10987 | REGN10987 | REGN10933 |
| 17-04 | 0.87 | 1.25 | REGN10987 | REGN10933 | REGN10933 | REGN10987 |
| 17-05 | 1.88 | 3.88 | REGN10987 | REGN10933 | REGN10933 | REGN10987 |
| 17-06 | 2.51 | 5.81 | REGN10987 | REGN10933 | REGN10933 | REGN10987 |
| 17-07 | 0.92 | 0.84 | REGN10933 | REGN10987 | REGN10987 | REGN10933 |
| 17-08 | 1.03 | 0.97 | REGN10933 | REGN10987 | REGN10987 | REGN10933 |
| 17-09 | 1.16 | 1.59 | REGN10933 | REGN10987 | REGN10987 | REGN10933 |
| 17-10 | 0.96 | 0.75 | REGN10987 | REGN10933 | REGN10933 | REGN10987 |
| 17-11 | 0.92 | 0.90 | REGN10987 | REGN10933 | REGN10933 | REGN10987 |
| 17-12 | 2.22 | 2.53 | REGN10987 | REGN10933 | REGN10933 | REGN10987 |
| 17-19 | 1.11 | 0.86 | REGN10933 | REGN10987 | REGN10987 | REGN10933 |
| 17-20 | 1.43 | 0.98 | REGN10933 | REGN10987 | REGN10987 | REGN10933 |
| 17-21 | 1.07 | 1.24 | REGN10933 | REGN10987 | REGN10987 | REGN10933 |
| 17-22 | 0.94 | 0.90 | REGN10987 | REGN10933 | REGN10933 | REGN10987 |
| 17-23 | 0.88 | 0.98 | REGN10987 | REGN10933 | REGN10933 | REGN10987 |
| 17-24 | 1.11 | 0.96 | REGN10987 | REGN10933 | REGN10933 | REGN10987 |

### Example 20—Tetravalent, Bispecific Tetrahedral Antibodies Comprising Two Distinct Fabs that Specifically Bind CD38, BCMA, CD16 or CD3

[1342] The exceptional activity of tetravalent, bispecific tetrahedral antibodies against SARS-CoV-2 suggests their broad applicability in other fields such as cancer in which there is intense interest among investigators in the potential of multispecific targeting agents. Accordingly, three series of constructs were generated with the predicted structures shown in panel D of FIG. 31, panel C of FIG. 32, and panel D of FIG. 34, then evaluated for their bispecificity.

[1343] The first series of constructs employed VH and VL regions from daratumumab (Da), an FDA-approved anti-CD38 antibody used to target and treat multiple myeloma (SEQ ID Nos 641, 686), HA9, an anti-CD16 antibody that specifically targets and engages Natural Killer (NK) cells (SEQ ID Nos 648, 688), and SP34, an anti-CD3 antibody that specifically targets and engages T cells (SEQ ID Nos 657, 697). The second series of constructs additionally employed VH and VL regions from 4C8, an anti-BCMA antibody that targets myeloma cells and certain other cell types (SEQ ID Nos 663, 700). The third series of constructs additionally employed VH and VL regions from B34, an anti-BCMA antibody that targets myeloma cells and certain other cell types (SEQ ID Nos 676, 703) (Tables 41, 42, 43)

[1344] To optimize correct VH/VL pairing and to minimize VH/VL mispairing, V region exchange was combined with electrostatic steering as described in Example 18 (Table 44). Additionally, to further facilitate purification of the correctly paired product by Protein A chromatography, in some constructs, particularly those having the predicted structures shown in FIG. 31, Panel D and FIG. 32 Panel C, the H1 chain incorporated the H435R/Y436F substitution while the H2 chain had the H435/Y436 wild-type sequence. In other constructs, particularly those having the predicted structure shown in FIG. 34, Panel D, the H1 and H2 chains incorporated the H435R/Y436F substitution while the Fc chain had the H435/Y436 wild-type sequence (Table 42).

[1345] The constructs were evaluated for structural bispecificity by intact mass spectrometry, following removal of N-glycan and O-glycan, as described in Example 18. Results were obtained for 18 of the constructs (Table 45). No significant mispairing was detected for the H1/H2 chains. The percentage of the main product and side products was calculated and normalized to the total yield of the correct and incorrect products (Table 45). The yield of the correctly paired VH/VL construct (L1L2H1H2) ranged from 94.6 to 98.2% when daratumumab was combined with HA9, 94.3 to 97.7% when 4C8 was combined with HA9, and 96.8 to 99.5% when 4C8 was combined with daratumumab. For constructs 18-30, 18-31 and 18-32, two bispecific products were detected by LC/MS as expected for the predicted structure shown in FIG. 34, Panel D, and consistent with the denaturing conditions of the LC/MS method that was employed. The first structure corresponds to the D2/D4/D6 portion of the tetrahedral antibody; the second structure corresponds to the D1/D3 portion of the tetrahedral antibody. The yield of the correctly paired VH/VL construct contained within the D2/D4/D6 portion (L1L2H1H2) ranged from 97.1 to 99.5%; the yield of the correctly paired VH/VL construct contained within the D1/D3 portion (L1H1Fc) ranged from 99.4 to 99.8%.

TABLE 41

| Protein | | | | | |
|---|---|---|---|---|---|
| ID | L1 Chain | H1 Chain | L2 Chain | H2 Chain | Fc Chain |
| 18-01 | SEQ ID NO: 686 | SEQ ID NO: 641 | | | |
| 18-02 | SEQ ID NO: 686 | SEQ ID NO: 642 | | | |
| 18-03 | SEQ ID NO: 686 | SEQ ID NO: 643 | SEQ ID NO: 686 | SEQ ID NO: 644 | |
| 18-04 | SEQ ID NO: 686 | SEQ ID NO: 645 | SEQ ID NO: 686 | SEQ ID NO: 646 | |
| 18-05 | SEQ ID NO: 687 | SEQ ID NO: 647 | SEQ ID NO: 688 | SEQ ID NO: 648 | |
| 18-06 | SEQ ID NO: 689 | SEQ ID NO: 649 | SEQ ID NO: 690 | SEQ ID NO: 650 | |
| 18-07 | SEQ ID NO: 689 | SEQ ID NO: 649 | SEQ ID NO: 691 | SEQ ID NO: 651 | |
| 18-08 | SEQ ID NO: 692 | SEQ ID NO: 652 | SEQ ID NO: 693 | SEQ ID NO: 653 | |
| 18-09 | SEQ ID NO: 694 | SEQ ID NO: 654 | SEQ ID NO: 695 | SEQ ID NO: 655 | |
| 18-10 | SEQ ID NO: 694 | SEQ ID NO: 654 | SEQ ID NO: 696 | SEQ ID NO: 656 | |
| 18-11 | SEQ ID NO: 687 | SEQ ID NO: 647 | SEQ ID NO: 697 | SEQ ID NO: 657 | |
| 18-12 | SEQ ID NO: 689 | SEQ ID NO: 649 | SEQ ID NO: 698 | SEQ ID NO: 658 | |
| 18-13 | SEQ ID NO: 689 | SEQ ID NO: 649 | SEQ ID NO: 699 | SEQ ID NO: 659 | |
| 18-14 | SEQ ID NO: 687 | SEQ ID NO: 647 | SEQ ID NO: 697 | SEQ ID NO: 660 | SEQ ID NO: 706 |
| 18-15 | SEQ ID NO: 689 | SEQ ID NO: 649 | SEQ ID NO: 698 | SEQ ID NO: 661 | SEQ ID NO: 706 |
| 18-16 | SEQ ID NO: 689 | SEQ ID NO: 649 | SEQ ID NO: 699 | SEQ ID NO: 662 | SEQ ID NO: 706 |
| 18-17 | SEQ ID NO: 700 | SEQ ID NO: 663 | | | |
| 18-18 | SEQ ID NO: 700 | SEQ ID NO: 664 | | | |
| 18-19 | SEQ ID NO: 700 | SEQ ID NO: 665 | SEQ ID NO: 700 | SEQ ID NO: 666 | |
| 18-20 | SEQ ID NO: 700 | SEQ ID NO: 667 | SEQ ID NO: 700 | SEQ ID NO: 668 | |
| 18-21 | SEQ ID NO: 701 | SEQ ID NO: 669 | SEQ ID NO: 688 | SEQ ID NO: 648 | |
| 18-22 | SEQ ID NO: 702 | SEQ ID NO: 670 | SEQ ID NO: 690 | SEQ ID NO: 650 | |
| 18-23 | SEQ ID NO: 702 | SEQ ID NO: 670 | SEQ ID NO: 691 | SEQ ID NO: 651 | |
| 18-24 | SEQ ID NO: 701 | SEQ ID NO: 671 | SEQ ID NO: 693 | SEQ ID NO: 672 | |
| 18-25 | SEQ ID NO: 702 | SEQ ID NO: 673 | SEQ ID NO: 695 | SEQ ID NO: 674 | |
| 18-26 | SEQ ID NO: 702 | SEQ ID NO: 673 | SEQ ID NO: 696 | SEQ ID NO: 675 | |
| 18-27 | SEQ ID NO: 701 | SEQ ID NO: 669 | SEQ ID NO: 693 | SEQ ID NO: 653 | |
| 18-28 | SEQ ID NO: 702 | SEQ ID NO: 670 | SEQ ID NO: 695 | SEQ ID NO: 655 | |
| 18-29 | SEQ ID NO: 702 | SEQ ID NO: 670 | SEQ ID NO: 696 | SEQ ID NO: 656 | |
| 18-30 | SEQ ID NO: 701 | SEQ ID NO: 669 | SEQ ID NO: 693 | SEQ ID NO: 653 | SEQ ID NO: 706 |
| 18-31 | SEQ ID NO: 702 | SEQ ID NO: 670 | SEQ ID NO: 695 | SEQ ID NO: 655 | SEQ ID NO: 706 |
| 18-32 | SEQ ID NO: 702 | SEQ ID NO: 670 | SEQ ID NO: 696 | SEQ ID NO: 656 | SEQ ID NO: 706 |
| 18-33 | SEQ ID NO: 701 | SEQ ID NO: 669 | SEQ ID NO: 697 | SEQ ID NO: 657 | |
| 18-34 | SEQ ID NO: 702 | SEQ ID NO: 670 | SEQ ID NO: 698 | SEQ ID NO: 658 | |
| 18-35 | SEQ ID NO: 702 | SEQ ID NO: 670 | SEQ ID NO: 699 | SEQ ID NO: 659 | |
| 18-36 | SEQ ID NO: 701 | SEQ ID NO: 669 | SEQ ID NO: 697 | SEQ ID NO: 660 | SEQ ID NO: 706 |
| 18-37 | SEQ ID NO: 702 | SEQ ID NO: 670 | SEQ ID NO: 698 | SEQ ID NO: 661 | SEQ ID NO: 706 |
| 18-38 | SEQ ID NO: 702 | SEQ ID NO: 670 | SEQ ID NO: 699 | SEQ ID NO: 662 | SEQ ID NO: 706 |
| 18-39 | SEQ ID NO: 703 | SEQ ID NO: 676 | | | |
| 18-40 | SEQ ID NO: 703 | SEQ ID NO: 677 | | | |
| 18-41 | SEQ ID NO: 703 | SEQ ID NO: 678 | SEQ ID NO: 703 | SEQ ID NO: 679 | |
| 18-42 | SEQ ID NO: 703 | SEQ ID NO: 680 | SEQ ID NO: 703 | SEQ ID NO: 681 | |
| 18-43 | SEQ ID NO: 704 | SEQ ID NO: 682 | SEQ ID NO: 688 | SEQ ID NO: 648 | |
| 18-44 | SEQ ID NO: 705 | SEQ ID NO: 683 | SEQ ID NO: 690 | SEQ ID NO: 650 | |
| 18-45 | SEQ ID NO: 705 | SEQ ID NO: 683 | SEQ ID NO: 691 | SEQ ID NO: 651 | |
| 18-46 | SEQ ID NO: 704 | SEQ ID NO: 684 | SEQ ID NO: 693 | SEQ ID NO: 672 | |
| 18-47 | SEQ ID NO: 705 | SEQ ID NO: 685 | SEQ ID NO: 695 | SEQ ID NO: 674 | |
| 18-48 | SEQ ID NO: 705 | SEQ ID NO: 685 | SEQ ID NO: 696 | SEQ ID NO: 675 | |
| 18-49 | SEQ ID NO: 704 | SEQ ID NO: 682 | SEQ ID NO: 693 | SEQ ID NO: 653 | |
| 18-50 | SEQ ID NO: 705 | SEQ ID NO: 683 | SEQ ID NO: 695 | SEQ ID NO: 655 | |
| 18-51 | SEQ ID NO: 705 | SEQ ID NO: 683 | SEQ ID NO: 696 | SEQ ID NO: 656 | |
| 18-52 | SEQ ID NO: 704 | SEQ ID NO: 682 | SEQ ID NO: 693 | SEQ ID NO: 653 | SEQ ID NO: 706 |
| 18-53 | SEQ ID NO: 705 | SEQ ID NO: 683 | SEQ ID NO: 695 | SEQ ID NO: 655 | SEQ ID NO: 706 |
| 18-54 | SEQ ID NO: 705 | SEQ ID NO: 683 | SEQ ID NO: 696 | SEQ ID NO: 656 | SEQ ID NO: 706 |
| 18-55 | SEQ ID NO: 704 | SEQ ID NO: 682 | SEQ ID NO: 697 | SEQ ID NO: 657 | |
| 18-56 | SEQ ID NO: 705 | SEQ ID NO: 683 | SEQ ID NO: 698 | SEQ ID NO: 658 | |
| 18-57 | SEQ ID NO: 705 | SEQ ID NO: 683 | SEQ ID NO: 699 | SEQ ID NO: 659 | |
| 18-58 | SEQ ID NO: 704 | SEQ ID NO: 682 | SEQ ID NO: 697 | SEQ ID NO: 660 | SEQ ID NO: 706 |
| 18-59 | SEQ ID NO: 705 | SEQ ID NO: 683 | SEQ ID NO: 698 | SEQ ID NO: 661 | SEQ ID NO: 706 |
| 18-60 | SEQ ID NO: 705 | SEQ ID NO: 683 | SEQ ID NO: 699 | SEQ ID NO: 662 | SEQ ID NO: 706 |

TABLE 42

| Protein | D1-Fc | | | D5 | D4 | D3 | D6 | D2-Fc | | |
|---|---|---|---|---|---|---|---|---|---|---|
| ID | Fc Receptor binding | H1 | H2 | Fab | Fab | Fab | Fab | Fc Receptor binding | H1 | H2 |
| 18-01 | wt | | | | | | | | | |
| 18-02 | L234A/L235A/P329G | | | | | | | | | |
| 18-03 | wt | RF | HY | Da | Da | Da | Da | wt | RF | HY |
| 18-04 | L234A/L235A/P329G | RF | HY | Da | Da | Da | Da | L234A/L235A/P329G | RF | HY |
| 18-05 | L234A/L235A/P329G | RF | HY | HA9 | Da | Da | HA9 | L234A/L235A/P329G | RF | HY |
| 18-06 | L234A/L235A/P329G | RF | HY | HA9 | Da | Da | HA9 | L234A/L235A/P329G | RF | HY |
| 18-07 | L234A/L235A/P329G | RF | HY | HA9 | Da | Da | HA9 | L234A/L235A/P329G | RF | HY |
| 18-08 | L234A/L235A/P329G | RF | HY | Da | HA9 | HA9 | Da | L234A/L235A/P329G | RF | HY |
| 18-09 | L234A/L235A/P329G | RF | HY | Da | HA9 | HA9 | Da | L234A/L235A/P329G | RF | HY |
| 18-10 | L234A/L235A/P329G | RF | HY | Da | HA9 | HA9 | Da | L234A/L235A/P329G | RF | HY |
| 18-11 | L234A/L235A/P329G | RF | HY | SP34 | Da | Da | SP34 | L234A/L235A/P329G | RF | HY |
| 18-12 | L234A/L235A/P329G | RF | HY | SP34 | Da | Da | SP34 | L234A/L235A/P329G | RF | HY |
| 18-13 | L234A/L235A/P329G | RF | HY | SP34 | Da | Da | SP34 | L234A/L235A/P329G | RF | HY |
| 18-14 | L234A/L235A/P329G | RF | HY | | Da | Da | SP34 | L234A/L235A/P329G | RF | RF |
| 18-15 | L234A/L235A/P329G | RF | HY | | Da | Da | SP34 | L234A/L235A/P329G | RF | RF |
| 18-16 | L234A/L235A/P329G | RF | HY | | Da | Da | SP34 | L234A/L235A/P329G | RF | RF |
| 18-17 | wt | | | | | | | | | |
| 18-18 | S239D/I332E | | | | | | | | | |
| 18-19 | wt | RF | HY | 4C8 | 4C8 | 4C8 | 4C8 | wt | RF | HY |
| 18-20 | S239D/I332E | RF | HY | 4C8 | 4C8 | 4C8 | 4C8 | S239D/I332E | RF | HY |
| 18-21 | L234A/L235A/P329G | RF | HY | HA9 | 4C8 | 4C8 | HA9 | L234A/L235A/P329G | RF | HY |
| 18-22 | L234A/L235A/P329G | RF | HY | HA9 | 4C8 | 4C8 | HA9 | L234A/L235A/P329G | RF | HY |
| 18-23 | L234A/L235A/P329G | RF | HY | HA9 | 4C8 | 4C8 | HA9 | L234A/L235A/P329G | RF | HY |
| 18-24 | wt | RF | HY | Da | 4C8 | 4C8 | Da | wt | RF | HY |
| 18-25 | wt | RF | HY | Da | 4C8 | 4C8 | Da | wt | RF | HY |
| 18-26 | wt | RF | HY | Da | 4C8 | 4C8 | Da | wt | RF | HY |
| 18-27 | L234A/L235A/P329G | RF | HY | Da | 4C8 | 4C8 | Da | L234A/L235A/P329G | RF | HY |
| 18-28 | L234A/L235A/P329G | RF | HY | Da | 4C8 | 4C8 | Da | L234A/L235A/P329G | RF | HY |
| 18-29 | L234A/L235A/P329G | RF | HY | Da | 4C8 | 4C8 | Da | L234A/L235A/P329G | RF | HY |
| 18-30 | L234A/L235A/P329G | RF | HY | | 4C8 | 4C8 | Da | L234A/L235A/P329G | RF | RF |
| 18-31 | L234A/L235A/P329G | RF | HY | | 4C8 | 4C8 | Da | L234A/L235A/P329G | RF | RF |
| 18-32 | L234A/L235A/P329G | RF | HY | | 4C8 | 4C8 | Da | L234A/L235A/P329G | RF | RF |
| 18-33 | L234A/L235A/P329G | RF | HY | SP34 | 4C8 | 4C8 | SP34 | L234A/L235A/P329G | RF | HY |
| 18-34 | L234A/L235A/P329G | RF | HY | SP34 | 4C8 | 4C8 | SP34 | L234A/L235A/P329G | RF | HY |
| 18-35 | L234A/L235A/P329G | RF | HY | SP34 | 4C8 | 4C8 | SP34 | L234A/L235A/P329G | RF | HY |
| 18-36 | L234A/L235A/P329G | RF | HY | | 4C8 | 4C8 | SP34 | L234A/L235A/P329G | RF | RF |
| 18-37 | L234A/L235A/P329G | RF | HY | | 4C8 | 4C8 | SP34 | L234A/L235A/P329G | RF | RF |
| 18-38 | L234A/L235A/P329G | RF | HY | | 4C8 | 4C8 | SP34 | L234A/L235A/P329G | RF | RF |
| 18-39 | wt | | | | | | | | | |
| 18-40 | S239D/I332E | | | | | | | | | |
| 18-41 | wt | RF | HY | B34 | B34 | B34 | B34 | wt | RF | HY |
| 18-42 | S239D/I332E | RF | HY | B34 | B34 | B34 | B34 | S239D/I332E | RF | HY |
| 18-43 | L234A/L235A/P329G | RF | HY | HA9 | B34 | B34 | HA9 | L234A/L235A/P329G | RF | HY |
| 18-44 | L234A/L235A/P329G | RF | HY | HA9 | B34 | B34 | HA9 | L234A/L235A/P329G | RF | HY |
| 18-45 | L234A/L235A/P329G | RF | HY | HA9 | B34 | B34 | HA9 | L234A/L235A/P329G | RF | HY |
| 18-46 | wt | RF | HY | Da | B34 | B34 | Da | wt | RF | HY |
| 18-47 | wt | RF | HY | Da | B34 | B34 | Da | wt | RF | HY |
| 18-48 | wt | RF | HY | Da | B34 | B34 | Da | wt | RF | HY |
| 18-49 | L234A/L235A/P329G | RF | HY | Da | B34 | B34 | Da | L234A/L235A/P329G | RF | HY |
| 18-50 | L234A/L235A/P329G | RF | HY | Da | B34 | B34 | Da | L234A/L235A/P329G | RF | HY |
| 18-51 | L234A/L235A/P329G | RF | HY | Da | B34 | B34 | Da | L234A/L235A/P329G | RF | HY |
| 18-52 | L234A/L235A/P329G | RF | HY | | B34 | B34 | Da | L234A/L235A/P329G | RF | RF |
| 18-53 | L234A/L235A/P329G | RF | HY | | B34 | B34 | Da | L234A/L235A/P329G | RF | RF |
| 18-54 | L234A/L235A/P329G | RF | HY | | B34 | B34 | Da | L234A/L235A/P329G | RF | RF |
| 18-55 | L234A/L235A/P329G | RF | HY | SP34 | B34 | B34 | SP34 | L234A/L235A/P329G | RF | HY |
| 18-56 | L234A/L235A/P329G | RF | HY | SP34 | B34 | B34 | SP34 | L234A/L235A/P329G | RF | HY |
| 18-57 | L234A/L235A/P329G | RF | HY | SP34 | B34 | B34 | SP34 | L234A/L235A/P329G | RF | HY |
| 18-58 | L234A/L235A/P329G | RF | HY | | B34 | B34 | SP34 | L234A/L235A/P329G | RF | RF |
| 18-59 | L234A/L235A/P329G | RF | HY | | B34 | B34 | SP34 | L234A/L235A/P329G | RF | RF |
| 18-60 | L234A/L235A/P329G | RF | HY | | B34 | B34 | SP34 | L234A/L235A/P329G | RF | RF |

TABLE 43

| Protein | D1 | D5 | D4 | D3 | D6 | | |
|---|---|---|---|---|---|---|---|
| ID | Target | Target | Target | Target | Target | D2-Fc | Other |
| 18-01 | FcγR | | | | | | α-CD38 mAb |
| 18-02 | Fc silent | | | | | | α-CD38 mAb |
| 18-03 | FcγR | CD38 | CD38 | CD38 | CD38 | FcgR | |
| 18-04 | Fc silent | CD38 | CD38 | CD38 | CD38 | Fc silent | |
| 18-05 | Fc silent | CD16 | CD38 | CD38 | CD16 | Fc silent | |
| 18-06 | Fc silent | CD16 | CD38 | CD38 | CD16 | Fc silent | |
| 18-07 | Fc silent | CD16 | CD38 | CD38 | CD16 | Fc silent | |
| 18-08 | Fc silent | CD38 | CD16 | CD16 | CD38 | Fc silent | |
| 18-09 | Fc silent | CD38 | CD16 | CD16 | CD38 | Fc silent | |
| 18-10 | Fc silent | CD38 | CD16 | CD16 | CD38 | Fc silent | |
| 18-11 | Fc silent | CD3 | CD38 | CD38 | CD3 | Fc silent | |
| 18-12 | Fc silent | CD3 | CD38 | CD38 | CD3 | Fc silent | |
| 18-13 | Fc silent | CD3 | CD38 | CD38 | CD3 | Fc silent | |
| 18-14 | Fc silent | | CD38 | CD38 | CD3 | Fc silent | |
| 18-15 | Fc silent | | CD38 | CD38 | CD3 | Fc silent | |
| 18-16 | Fc silent | | CD38 | CD38 | CD3 | Fc silent | |
| 18-17 | FcγR | | | | | | α-BCMA mAb |
| 18-18 | FcγR-high | | | | | | α-BCMA mAb |
| 18-19 | FcγR | BCMA | BCMA | BCMA | BCMA | FcgR | |
| 18-20 | FcγR-high | BCMA | BCMA | BCMA | BCMA | FcgR-high | |
| 18-21 | Fc silent | CD16 | BCMA | BCMA | CD16 | Fc silent | |
| 18-22 | Fc silent | CD16 | BCMA | BCMA | CD16 | Fc silent | |
| 18-23 | Fc silent | CD16 | BCMA | BCMA | CD16 | Fc silent | |
| 18-24 | FcγR | CD38 | BCMA | BCMA | CD38 | FcγR | |
| 18-25 | FcγR | CD38 | BCMA | BCMA | CD38 | FcγR | |
| 18-26 | FcγR | CD38 | BCMA | BCMA | CD38 | FcγR | |
| 18-27 | Fc silent | CD38 | BCMA | BCMA | CD38 | Fc silent | |
| 18-28 | Fc silent | CD38 | BCMA | BCMA | CD38 | Fc silent | |
| 18-29 | Fc silent | CD38 | BCMA | BCMA | CD38 | Fc silent | |
| 18-30 | Fc silent | | BCMA | BCMA | CD38 | Fc silent | |
| 18-31 | Fc silent | | BCMA | BCMA | CD38 | Fc silent | |
| 18-32 | Fc silent | | BCMA | BCMA | CD38 | Fc silent | |
| 18-33 | Fc silent | CD3 | BCMA | BCMA | CD3 | Fc silent | |
| 18-34 | Fc silent | CD3 | BCMA | BCMA | CD3 | Fc silent | |
| 18-35 | Fc silent | CD3 | BCMA | BCMA | CD3 | Fc silent | |
| 18-36 | Fc silent | | BCMA | BCMA | CD3 | Fc silent | |
| 18-37 | Fc silent | | BCMA | BCMA | CD3 | Fc silent | |
| 18-38 | Fc silent | | BCMA | BCMA | CD3 | Fc silent | |
| 18-39 | FcγR | | | | | | α-BCMA mAb |
| 18-40 | FcγR-high | | | | | | α-BCMA mAb |
| 18-41 | FcγR | BCMA | BCMA | BCMA | BCMA | FcgR | |
| 18-42 | FcγR-high | BCMA | BCMA | BCMA | BCMA | FcgR-high | |
| 18-43 | Fc silent | CD16 | BCMA | BCMA | CD16 | Fc silent | |
| 18-44 | Fc silent | CD16 | BCMA | BCMA | CD16 | Fc silent | |
| 18-45 | Fc silent | CD16 | BCMA | BCMA | CD16 | Fc silent | |
| 18-46 | FcγR | CD38 | BCMA | BCMA | CD38 | FcγR | |
| 18-47 | FcγR | CD38 | BCMA | BCMA | CD38 | FcγR | |
| 18-48 | FcγR | CD38 | BCMA | BCMA | CD38 | FcγR | |
| 18-49 | Fc silent | CD38 | BCMA | BCMA | CD38 | Fc silent | |
| 18-50 | Fc silent | CD38 | BCMA | BCMA | CD38 | Fc silent | |
| 18-51 | Fc silent | CD38 | BCMA | BCMA | CD38 | Fc silent | |
| 18-52 | Fc silent | | BCMA | BCMA | CD38 | Fc silent | |
| 18-53 | Fc silent | | BCMA | BCMA | CD38 | Fc silent | |
| 18-54 | Fc silent | | BCMA | BCMA | CD38 | Fc silent | |
| 18-55 | Fc silent | CD3 | BCMA | BCMA | CD3 | Fc silent | |
| 18-56 | Fc silent | CD3 | BCMA | BCMA | CD3 | Fc silent | |
| 18-57 | Fc silent | CD3 | BCMA | BCMA | CD3 | Fc silent | |
| 18-58 | Fc silent | | BCMA | BCMA | CD3 | Fc silent | |
| 18-59 | Fc silent | | BCMA | BCMA | CD3 | Fc silent | |
| 18-60 | Fc silent | | BCMA | BCMA | CD3 | Fc silent | |

TABLE 44

| | L1 Chain | | H1 Chain | | L2 Chain | | H2 Chain | |
|---|---|---|---|---|---|---|---|---|
| | V region | Amino acid | V region | Amino acid | V region | Amino acid | V region | Amino acid |
| Protein ID | type | Substitutions | Type | Substitutions | Type | Substitutions | Type | Substitutions |
| 18-01 | VK-CK | | VH-CH1 | | | | | |
| 18-02 | VK-CK | | VH-CH1 | | | | | |
| 18-03 | VK-CK | | VH-CH1 | | VK-CK | | VH-CH1 | |
| 18-04 | VK-CK | | VH-CH1 | | VK-CK | | VH-CH1 | |
| 18-05 | VK-CK | E123R/Q124K | VH-CH1 | K147E/K213E | VH-CK | | VK-CH1 | |
| 18-06 | VK-CK | Q38E/V133K | VH-CH1 | Q39K/S183E | VH-CK | Q39K/V133E | VK-CH1 | Q38E/S183K |
| 18-07 | VK-CK | Q38E/V133K | VH-CH1 | Q39K/S183E | VH-CK | Q39E/V133E | VK-CH1 | Q38K/S183K |
| 18-08 | VK-CK | E123R/Q124K | VH-CH1 | K147E/K213E | VH-CK | | VK-CH1 | |
| 18-09 | VK-CK | Q38E/V133K | VH-CH1 | Q39K/S183E | VH-CK | Q39K/V133E | VK-CH1 | Q38E/S183K |
| 18-10 | VK-CK | Q38E/V133K | VH-CH1 | Q39K/S183E | VH-CK | Q39E/V133E | VK-CH1 | Q38K/S183K |
| 18-11 | VK-CK | E123R/Q124K | VH-CH1 | K147E/K213E | VH-CK | | VK-CH1 | |
| 18-12 | VK-CK | Q38E/V133K | VH-CH1 | Q39K/S183E | VH-CK | Q39K/V133E | VK-CH1 | Q38E/S183K |
| 18-13 | VK-CK | Q38E/V133K | VH-CH1 | Q39K/S183E | VH-CK | Q39E/V133E | VK-CH1 | Q38K/S183K |
| 18-14 | VK-CK | E123R/Q124K | VH-CH1 | K147E/K213E | VH-CK | | VK-CH1 | |
| 18-15 | VK-CK | Q38E/V133K | VH-CH1 | Q39K/S183E | VH-CK | Q39K/V133E | VK-CH1 | Q38E/S183K |
| 18-16 | VK-CK | Q38E/V133K | VH-CH1 | Q39K/S183E | VH-CK | Q39E/V133E | VK-CH1 | Q38K/S183K |
| 18-17 | VK-CK | | VH-CH1 | | | | | |
| 18-18 | VK-CK | | VH-CH1 | | | | | |
| 18-19 | VK-CK | | VH-CH1 | | VK-CK | | VH-CH1 | |
| 18-20 | VK-CK | | VH-CH1 | | VK-CK | | VH-CH1 | |
| 18-21 | VK-CK | E123R/Q124K | VH-CH1 | K147E/K213E | VH-CK | | VK-CH1 | |
| 18-22 | VK-CK | Q38E/V133K | VH-CH1 | Q39K/S183E | VH-CK | Q39K/V133E | VK-CH1 | Q38E/S183K |
| 18-23 | VK-CK | Q38E/V133K | VH-CH1 | Q39K/S183E | VH-CK | Q39E/V133E | VK-CH1 | Q38K/S183K |
| 18-24 | VK-CK | E123R/Q124K | VH-CH1 | K147E/K213E | VH-CK | | VK-CH1 | |
| 18-25 | VK-CK | Q38E/V133K | VH-CH1 | Q39K/S183E | VH-CK | Q39K/V133E | VK-CH1 | Q38E/S183K |
| 18-26 | VK-CK | Q38E/V133K | VH-CH1 | Q39K/S183E | VH-CK | Q39E/V133E | VK-CH1 | Q38K/S183K |
| 18-27 | VK-CK | E123R/Q124K | VH-CH1 | K147E/K213E | VH-CK | | VK-CH1 | |
| 18-28 | VK-CK | Q38E/V133K | VH-CH1 | Q39K/S183E | VH-CK | Q39K/V133E | VK-CH1 | Q38E/S183K |
| 18-29 | VK-CK | Q38E/V133K | VH-CH1 | Q39K/S183E | VH-CK | Q39E/V133E | VK-CH1 | Q38K/S183K |
| 18-30 | VK-CK | E123R/Q124K | VH-CH1 | K147E/K213E | VH-CK | | VK-CH1 | |
| 18-31 | VK-CK | Q38E/V133K | VH-CH1 | Q39K/S183E | VH-CK | Q39K/V133E | VK-CH1 | Q38E/S183K |
| 18-32 | VK-CK | Q38E/V133K | VH-CH1 | Q39K/S183E | VH-CK | Q39E/V133E | VK-CH1 | Q38K/S183K |
| 18-33 | VK-CK | E123R/Q124K | VH-CH1 | K147E/K213E | VH-CK | | VK-CH1 | |
| 18-34 | VK-CK | Q38E/V133K | VH-CH1 | Q39K/S183E | VH-CK | Q39K/V133E | VK-CH1 | Q38E/S183K |
| 18-35 | VK-CK | Q38E/V133K | VH-CH1 | Q39K/S183E | VH-CK | Q39E/V133E | VK-CH1 | Q38K/S183K |
| 18-36 | VK-CK | E123R/Q124K | VH-CH1 | K147E/K213E | VH-CK | | VK-CH1 | |
| 18-37 | VK-CK | Q38E/V133K | VH-CH1 | Q39K/S183E | VH-CK | Q39K/V133E | VK-CH1 | Q38E/S183K |
| 18-38 | VK-CK | Q38E/V133K | VH-CH1 | Q39K/S183E | VH-CK | Q39E/V133E | VK-CH1 | Q38K/S183K |
| 18-39 | VK-CK | | VH-CH1 | | | | | |
| 18-40 | VK-CK | | VH-CH1 | | | | | |
| 18-41 | VK-CK | | VH-CH1 | | VK-CK | | VH-CH1 | |
| 18-42 | VK-CK | | VH-CH1 | | VK-CK | | VH-CH1 | |
| 18-43 | VK-CK | E123R/Q124K | VH-CH1 | K147E/K213E | VK-CK | | VK-CH1 | |
| 18-44 | VK-CK | Q38E/V133K | VH-CH1 | Q39K/S183E | VH-CK | Q39K/V133E | VK-CH1 | Q38E/S183K |
| 18-45 | VK-CK | Q38E/V133K | VH-CH1 | Q39K/S183E | VH-CK | Q39E/V133E | VK-CH1 | Q38K/S183K |
| 18-46 | VK-CK | E123R/Q124K | VH-CH1 | K147E/K213E | VH-CK | | VK-CH1 | |
| 18-47 | VK-CK | Q38E/V133K | VH-CH1 | Q39K/S183E | VH-CK | Q39K/V133E | VK-CH1 | Q38E/S183K |
| 18-48 | VK-CK | Q38E/V133K | VH-CH1 | Q39K/S183E | VH-CK | Q39E/V133E | VK-CH1 | Q38K/S183K |
| 18-49 | VK-CK | E123R/Q124K | VH-CH1 | K147E/K213E | VH-CK | | VK-CH1 | |
| 18-50 | VK-CK | Q38E/V133K | VH-CH1 | Q39K/S183E | VH-CK | Q39K/V133E | VK-CH1 | Q38E/S183K |
| 18-51 | VK-CK | Q38E/V133K | VH-CH1 | Q39K/S183E | VH-CK | Q39E/V133E | VK-CH1 | Q38K/S183K |
| 18-52 | VK-CK | E123R/Q124K | VH-CH1 | K147E/K213E | VH-CK | | VK-CH1 | |
| 18-53 | VK-CK | Q38E/V133K | VH-CH1 | Q39K/S183E | VH-CK | Q39K/V133E | VK-CH1 | Q38E/S183K |
| 18-54 | VK-CK | Q38E/V133K | VH-CH1 | Q39K/S183E | VH-CK | Q39E/V133E | VK-CH1 | Q38K/S183K |
| 18-55 | VK-CK | E123R/Q124K | VH-CH1 | K147E/K213E | VH-CK | | VK-CH1 | |
| 18-56 | VK-CK | Q38E/V133K | VH-CH1 | Q39K/S183E | VH-CK | Q39K/V133E | VK-CH1 | Q38E/S183K |
| 18-57 | VK-CK | Q38E/V133K | VH-CH1 | Q39K/S183E | VH-CK | Q39E/V133E | VK-CH1 | Q38K/S183K |
| 18-58 | VK-CK | E123R/Q124K | VH-CH1 | K147E/K213E | VH-CK | | VK-CH1 | |
| 18-59 | VK-CK | Q38E/V133K | VH-CH1 | Q39K/S183E | VH-CK | Q39K/V133E | VK-CH1 | Q38E/S183K |
| 18-60 | VK-CK | Q38E/V133K | VH-CH1 | Q39K/S183E | VH-CK | Q39E/V133E | VK-CH1 | Q38K/S183K |

TABLE 45

| Protein | L1L1H1H2 | L1L2H1H2 | L2L2H1H2 | Delta, | Theoretical Average Intact Mass, Da | | | | |
|---|---|---|---|---|---|---|---|---|---|
| ID | (%) | (%) | (%) | Da | L1L1H1H2 | L1L2H1H2 | L2L2H1H2 | L1H1Fc | L2H1Fc |
| 18-05 | 0.4% | 95.8% | *3.8% | 1048 | 161216 | 162264 | 163312 | | |
| 18-06 | 0.4% | 95.3% | *4.3% | 1075 | 161304 | 162379 | 163455 | | |
| 18-07 | 0.4% | 94.6% | *5.0% | 1076 | 161303 | 162379 | 163455 | | |
| 18-08 | 0.3% | 97.9% | 1.8% | 1200 | 161064 | 162264 | 163465 | | |
| 18-09 | 0.2% | 98.2% | 1.6% | 1228 | 161099 | 162327 | 163554 | | |
| 18-10 | 0.6% | 97.9% | 1.4% | 1228 | 161151 | 162379 | 163608 | | |
| 18-21 | 0.8% | 94.3% | *4.9% | 976 | 161150 | 162126 | 163102 | | |
| 18-22 | 1.3% | 97.7% | 1.0% | 1132 | 161238 | 162370 | 163503 | | |
| 18-23 | 0.5% | 96.7% | 2.8% | 1133 | 161237 | 162370 | 163503 | | |
| 18-24 | 0.7% | 97.3% | 2.0% | 1447 | 161210 | 162656 | 164103 | | |
| 18-25 | 0.7% | 97.8% | 1.5% | 1474 | 161298 | 162771 | 164245 | | |
| 18-26 | 0.9% | 98.7% | 0.4% | 1475 | 161297 | 162771 | 164246 | | |
| 18-27 | 0.6% | 96.8% | 2.6% | 1475 | 160961 | 162408 | 163854 | | |
| 18-28 | 1.0% | 96.8% | 2.2% | 1474 | 161049 | 162523 | 163997 | | |
| 18-29 | 0.5% | 98.0% | 1.5% | 1475 | 161048 | 162523 | 163998 | | |
| 18-30 | 0.0% | 97.1% | 2.9% | 1447 | 188158 | 189605 | 191051 | 99.4% | 0.6% |
| 18-31 | 0.0% | 98.3% | 1.7% | 1474 | 188249 | 189723 | 191197 | 99.8% | 0.2% |
| 18-32 | 0.0% | 99.5% | 0.5% | 1475 | 188248 | 189723 | 191198 | 99.7% | 0.3% |

### Example 21—Pentavalent/Hexavalent, Trispecific Tetrahedral Antibodies Comprising Two Distinct Fabs that Specifically Bind CD19, CD20 and the 4-1BB Receptor

[1346] Tetrahedral antibodies offer a unique opportunity to exploit the contribution of dimensionality in creating multivalent, multispecific targeting agents for the treatment of cancer and other disease. Accordingly, a series of constructs was generated with the predicted structures shown in panel C of FIG. 40, thus enabling the evaluation and application of their trispecificity.

[1347] This series of trispecific constructs employed VH and VL regions from FMC63, an FDA-approved anti-CD19 antibody used in the form of a chimeric antigen receptor (CAR-T) to treat B cell cancer (SEQ ID Nos 734, 708), and rituximab, an FDA-approved standalone anti-CD20 antibody used to treat B cell cancer and inflammatory disease (SEQ ID Nos 739, 713). Additionally, this series of trispecific constructs employed a single chain 4-1BB ligand (SEQ ID No 844) (Tables 46, 47, 48), and optionally employ a single chain OX40 ligand (SEQ ID No 845), or single chain GITR ligand (SEQ ID No 846). The targeting CD19 and CD20 by a single therapeutic agent offers a significant opportunity in the treatment and prevention of resistance and remission in B cell cancer, while the simultaneous delivery of 4-1BBL, OX40L or GITRL offers a significant opportunity to activate NK cells and T cells in the vicinity of the cancer.

[1348] To optimize correct VH/VL pairing and to minimize VH/VL mispairing, V region exchange was combined with electrostatic steering as described in Example 18 (Table 49). Additionally, to further facilitate purification of the correctly paired product by Protein A chromatography, the H1 chain incorporated the H435R/Y436F substitution. The constructs are then evaluated for their structural trispecificity by intact mass spectrometry, following removal of N-glycan and O-glycan, as described in Example 18. These constructs and those of Example 20 are further evaluated for their functional bi- and trispecificity using a variety of in vitro and in vivo cancer cell targeting and cytotoxicity models that are well known to one skilled in the art.

TABLE 46

| Protein ID | L1 Chain | H1 Chain | L2 Chain | H2 Chain |
|---|---|---|---|---|
| 19-01 | SEQ ID NO: 733 | SEQ ID NO: 707 | SEQ ID NO: 734 | SEQ ID NO: 708 |
| 19-02 | SEQ ID NO: 735 | SEQ ID NO: 709 | SEQ ID NO: 736 | SEQ ID NO: 710 |
| 19-03 | SEQ ID NO: 735 | SEQ ID NO: 709 | SEQ ID NO: 737 | SEQ ID NO: 711 |
| 19-04 | SEQ ID NO: 738 | SEQ ID NO: 712 | SEQ ID NO: 739 | SEQ ID NO: 713 |
| 19-05 | SEQ ID NO: 740 | SEQ ID NO: 714 | SEQ ID NO: 741 | SEQ ID NO: 715 |
| 19-06 | SEQ ID NO: 740 | SEQ ID NO: 714 | SEQ ID NO: 742 | SEQ ID NO: 716 |
| 19-07 | SEQ ID NO: 733 | SEQ ID NO: 707 | SEQ ID NO: 734 | SEQ ID NO: 717 |
| 19-08 | SEQ ID NO: 735 | SEQ ID NO: 709 | SEQ ID NO: 736 | SEQ ID NO: 718 |
| 19-09 | SEQ ID NO: 735 | SEQ ID NO: 709 | SEQ ID NO: 737 | SEQ ID NO: 719 |
| 19-10 | SEQ ID NO: 738 | SEQ ID NO: 712 | SEQ ID NO: 739 | SEQ ID NO: 720 |
| 19-11 | SEQ ID NO: 740 | SEQ ID NO: 714 | SEQ ID NO: 741 | SEQ ID NO: 721 |
| 19-12 | SEQ ID NO: 740 | SEQ ID NO: 714 | SEQ ID NO: 742 | SEQ ID NO: 722 |
| 19-13 | SEQ ID NO: 733 | SEQ ID NO: 723 | SEQ ID NO: 734 | SEQ ID NO: 724 |
| 19-14 | SEQ ID NO: 735 | SEQ ID NO: 725 | SEQ ID NO: 736 | SEQ ID NO: 726 |
| 19-15 | SEQ ID NO: 735 | SEQ ID NO: 725 | SEQ ID NO: 737 | SEQ ID NO: 727 |
| 19-16 | SEQ ID NO: 738 | SEQ ID NO: 728 | SEQ ID NO: 739 | SEQ ID NO: 729 |
| 19-17 | SEQ ID NO: 740 | SEQ ID NO: 730 | SEQ ID NO: 741 | SEQ ID NO: 731 |
| 19-18 | SEQ ID NO: 740 | SEQ ID NO: 730 | SEQ ID NO: 742 | SEQ ID NO: 732 |

TABLE 47

| Protein | | | | | | | | |
|---|---|---|---|---|---|---|---|---|
| ID | D1-Fc | D7 | D5-Fab | D4-Fab | D3-Fab | D6-Fab | D8 | D2-Fc |
| 19-01 | | | FMC63 | Rituximab | Rituximab | FMC63 | | |
| 19-02 | | | FMC63 | Rituximab | Rituximab | FMC63 | | |
| 19-03 | | | FMC63 | Rituximab | Rituximab | FMC63 | | |
| 19-04 | | | Rituximab | FMC63 | FMC63 | Rituximab | | |
| 19-05 | | | Rituximab | FMC63 | FMC63 | Rituximab | | |
| 19-06 | | | Rituximab | FMC63 | FMC63 | Rituximab | | |
| 19-07 | | 4-1BBL | FMC63 | Rituximab | Rituximab | FMC63 | 4-1BBL | |
| 19-08 | | 4-1BBL | FMC63 | Rituximab | Rituximab | FMC63 | 4-1BBL | |
| 19-09 | | 4-1BBL | FMC63 | Rituximab | Rituximab | FMC63 | 4-1BBL | |
| 19-10 | | 4-1BBL | Rituximab | FMC63 | FMC63 | Rituximab | 4-1BBL | |
| 19-11 | | 4-1BBL | Rituximab | FMC63 | FMC63 | Rituximab | 4-1BBL | |
| 19-12 | | 4-1BBL | Rituximab | FMC63 | FMC63 | Rituximab | 4-1BBL | |
| 19-13 | L234A/L235A/P329G | 4-1BBL | FMC63 | Rituximab | Rituximab | FMC63 | 4-1BBL | L234A/L235A/P329G |
| 19-14 | L234A/L235A/P329G | 4-1BBL | FMC63 | Rituximab | Rituximab | FMC63 | 4-1BBL | L234A/L235A/P329G |
| 19-15 | L234A/L235A/P329G | 4-1BBL | FMC63 | Rituximab | Rituximab | FMC63 | 4-1BBL | L234A/L235A/P329G |
| 19-16 | L234A/L235A/P329G | 4-1BBL | Rituximab | FMC63 | FMC63 | Rituximab | 4-1BBL | L234A/L235A/P329G |
| 19-17 | L234A/L235A/P329G | 4-1BBL | Rituximab | FMC63 | FMC63 | Rituximab | 4-1BBL | L234A/L235A/P329G |
| 19-18 | L234A/L235A/P329G | 4-1BBL | Rituximab | FMC63 | FMC63 | Rituximab | 4-1BBL | L234A/L235A/P329G |

TABLE 48

| Protein ID | D1 Target | D7 Target | D5 Target | D4 Target | D3 Target | D6 Target | D8 Target | D2 Target |
|---|---|---|---|---|---|---|---|---|
| 19-01 | FcgR | | CD19 | CD20 | CD20 | CD19 | | FcgR |
| 19-02 | FcgR | | CD19 | CD20 | CD20 | CD19 | | FcgR |
| 19-03 | FcgR | | CD19 | CD20 | CD20 | CD19 | | FcgR |
| 19-04 | FcgR | | CD20 | CD19 | CD19 | CD20 | | FcgR |
| 19-05 | FcgR | | CD20 | CD19 | CD19 | CD20 | | FcgR |
| 19-06 | FcgR | | CD20 | CD19 | CD19 | CD20 | | FcgR |
| 19-07 | FcgR | 4-1BBR | CD19 | CD20 | CD20 | CD19 | 4-1BBR | FcgR |
| 19-08 | FcgR | 4-1BBR | CD19 | CD20 | CD20 | CD19 | 4-1BBR | FcgR |
| 19-09 | FcgR | 4-1BBR | CD19 | CD20 | CD20 | CD19 | 4-1BBR | FcgR |
| 19-10 | FcgR | 4-1BBR | CD20 | CD19 | CD19 | CD20 | 4-1BBR | FcgR |
| 19-11 | FcgR | 4-1BBR | CD20 | CD19 | CD19 | CD20 | 4-1BBR | FcgR |
| 19-12 | FcgR | 4-1BBR | CD20 | CD19 | CD19 | CD20 | 4-1BBR | FcgR |
| 19-13 | Fc silent | 4-1BBR | CD19 | CD20 | CD20 | CD19 | 4-1BBR | Fc silent |
| 19-14 | Fc silent | 4-1BBR | CD19 | CD20 | CD20 | CD19 | 4-1BBR | Fc silent |
| 19-15 | Fc silent | 4-1BBR | CD19 | CD20 | CD20 | CD19 | 4-1BBR | Fc silent |
| 19-16 | Fc silent | 4-1BBR | CD20 | CD19 | CD19 | CD20 | 4-1BBR | Fc silent |
| 19-17 | Fc silent | 4-1BBR | CD20 | CD19 | CD19 | CD20 | 4-1BBR | Fc silent |
| 19-18 | Fc silent | 4-1BBR | CD20 | CD19 | CD19 | CD20 | 4-1BBR | Fc silent |

TABLE 49

| | L1 Chain | | H1 Chain | | L2 Chain | | H2 Chain | |
|---|---|---|---|---|---|---|---|---|
| Protein | V region | Amino acid | V region | Amino acid | V region | Amino acid | V region | Amino acid |
| ID | type | Substitutions | Type | Substitutions | Type | Substitutions | Type | Substitutions |
| 19-01 | VK-CK | E123R/Q124K | VH-CH1 | K147E/K213E | VH-CK | | VK-CH1 | |
| 19-02 | VK-CK | Q38E/V133K | VH-CH1 | Q39K/S183E | VH-CK | Q39K/V133E | VK-CH1 | Q38E/S183K |
| 19-03 | VK-CK | Q38E/V133K | VH-CH1 | Q39K/S183E | VH-CK | Q39E/V133E | VK-CH1 | Q38K/S183K |
| 19-04 | VK-CK | E123R/Q124K | VH-CH1 | K147E/K213E | VH-CK | | VK-CH1 | |
| 19-05 | VK-CK | Q38E/V133K | VH-CH1 | Q39K/S183E | VH-CK | Q39K/V133E | VK-CH1 | Q38E/S183K |
| 19-06 | VK-CK | Q38E/V133K | VH-CH1 | Q39K/S183E | VH-CK | Q39E/V133E | VK-CH1 | Q38K/S183K |
| 19-07 | VK-CK | E123R/Q124K | VH-CH1 | K147E/K213E | VH-CK | | VK-CH1 | |
| 19-08 | VK-CK | Q38E/V133K | VH-CH1 | Q39K/S183E | VH-CK | Q39K/V133E | VK-CH1 | Q38E/S183K |
| 19-09 | VK-CK | Q38E/V133K | VH-CH1 | Q39K/S183E | VH-CK | Q39E/V133E | VK-CH1 | Q38K/S183K |
| 19-10 | VK-CK | E123R/Q124K | VH-CH1 | K147E/K213E | VH-CK | | VK-CH1 | |
| 19-11 | VK-CK | Q38E/V133K | VH-CH1 | Q39K/S183E | VH-CK | Q39K/V133E | VK-CH1 | Q38E/S183K |
| 19-12 | VK-CK | Q38E/V133K | VH-CH1 | Q39K/S183E | VH-CK | Q39E/V133E | VK-CH1 | Q38K/S183K |
| 19-13 | VK-CK | E123R/Q124K | VH-CH1 | K147E/K213E | VH-CK | | VK-CH1 | |
| 19-14 | VK-CK | Q38E/V133K | VH-CH1 | Q39K/S183E | VH-CK | Q39K/V133E | VK-CH1 | Q38E/S183K |
| 19-15 | VK-CK | Q38E/V133K | VH-CH1 | Q39K/S183E | VH-CK | Q39E/V133E | VK-CH1 | Q38K/S183K |
| 19-16 | VK-CK | E123R/Q124K | VH-CH1 | K147E/K213E | VH-CK | | VK-CH1 | |
| 19-17 | VK-CK | Q38E/V133K | VH-CH1 | Q39K/S183E | VH-CK | Q39K/V133E | VK-CH1 | Q38E/S183K |
| 19-18 | VK-CK | Q38E/V133K | VH-CH1 | Q39K/S183E | VH-CK | Q39E/V133E | VK-CH1 | Q38K/S183K |

### Example 22—Trivalent/Tetravalent, Bispecific Tetrahedral Antibodies Comprising Two Distinct Fabs that Specifically Bind CD3 and either CD19 or CD20

[1349] Tetrahedral antibodies incorporating an anti-CD3 domain were designed, expressed, and evaluated for their ability to co-engage T cells and disease target cells for the treatment of cancer and other disease. This series of bispecific constructs employ VH and VL regions from rituximab (anti-CD20), FMC63 (anti-CD19), or obinutuzumab (anti-CD20) to engage target cells, together with VH and VL regions from SP34 (anti-CD3) to engage T cells (Tables 50, 51). Two tetrahedral antibody configurations were employed (Table 52). In the first configuration, the disease targeting Fab domain (anti-CD19 or anti-CD20) is placed in D3/D4 (bivalent), the T cell engaging Fab domain is placed in D6 (monovalent) and/or D5/D6 (bivalent), and D1/D2 are Fc domains. In the second configuration, the disease targeting Fab domain (anti-CD19 or anti-CD20) is placed in D3/D4 (bivalent), the T cell engaging Fab domain is placed in D2 (monovalent), and D1 is an Fc domain. To optimize correct VH/VL pairing and to minimize VH/VL mispairing, V region exchange was combined with three different sets of charge pairs to ensure correct pairing of heavy and light chain V regions (Table 53). Additionally, to further facilitate purification of the correctly paired product by Protein A chromatography, for bivalent CD3, the H1 chain incorporated the H435R/Y436F substitution (for bivalent CD3); for monovalent CD3, both the H1 and H2 chains incorporated the H435R/Y436F substitution. The constructs are then evaluated for their structural bispecificity by intact mass spectrometry as described in Example 18, and for their functional bispecificity using a variety of in vitro binding assays, cytotoxicity assays, and cytokine induction and release assays, and in vivo cancer efficacy models, known to one skilled in the art.

TABLE 50

| Protein | | | | | | |
|---|---|---|---|---|---|---|
| ID | H1 Chain | H2 Chain | L1 Chain | L2 Chain | Fc Chain | H3 Chain |
| 20-01 | SEQ ID NO: 4658 | SEQ ID NO: 4659 | SEQ ID NO: 4685 | SEQ ID NO: 4686 | SEQ ID NO: 4694 | |
| 20-02 | SEQ ID NO: 4660 | SEQ ID NO: 4661 | SEQ ID NO: 4687 | SEQ ID NO: 4688 | SEQ ID NO: 4694 | |
| 20-03 | SEQ ID NO: 4660 | SEQ ID NO: 4662 | SEQ ID NO: 4687 | SEQ ID NO: 4689 | SEQ ID NO: 4694 | |
| 20-04 | SEQ ID NO: 4658 | SEQ ID NO: 4659 | SEQ ID NO: 4685 | SEQ ID NO: 4686 | | SEQ ID NO: 4663 |
| 20-05 | SEQ ID NO: 4660 | SEQ ID NO: 4661 | SEQ ID NO: 4687 | SEQ ID NO: 4688 | | SEQ ID NO: 4664 |
| 20-06 | SEQ ID NO: 4660 | SEQ ID NO: 4662 | SEQ ID NO: 4687 | SEQ ID NO: 4689 | | SEQ ID NO: 4664 |
| 20-07 | SEQ ID NO: 4658 | SEQ ID NO: 4665 | SEQ ID NO: 4685 | SEQ ID NO: 4686 | SEQ ID NO: 4694 | |
| 20-08 | SEQ ID NO: 4660 | SEQ ID NO: 4666 | SEQ ID NO: 4687 | SEQ ID NO: 4688 | SEQ ID NO: 4694 | |
| 20-09 | SEQ ID NO: 4660 | SEQ ID NO: 4667 | SEQ ID NO: 4687 | SEQ ID NO: 4689 | SEQ ID NO: 4694 | |
| 20-10 | SEQ ID NO: 4658 | SEQ ID NO: 4665 | SEQ ID NO: 4685 | SEQ ID NO: 4686 | | SEQ ID NO: 4663 |
| 20-11 | SEQ ID NO: 4660 | SEQ ID NO: 4666 | SEQ ID NO: 4687 | SEQ ID NO: 4688 | | SEQ ID NO: 4664 |
| 20-12 | SEQ ID NO: 4660 | SEQ ID NO: 4667 | SEQ ID NO: 4687 | SEQ ID NO: 4689 | | SEQ ID NO: 4664 |
| 20-13 | SEQ ID NO: 4668 | SEQ ID NO: 4659 | SEQ ID NO: 4690 | SEQ ID NO: 4686 | SEQ ID NO: 4694 | |
| 20-14 | SEQ ID NO: 4669 | SEQ ID NO: 4661 | SEQ ID NO: 4691 | SEQ ID NO: 4688 | SEQ ID NO: 4694 | |
| 20-15 | SEQ ID NO: 4669 | SEQ ID NO: 4662 | SEQ ID NO: 4691 | SEQ ID NO: 4689 | SEQ ID NO: 4694 | |
| 20-16 | SEQ ID NO: 4668 | SEQ ID NO: 4659 | SEQ ID NO: 4690 | SEQ ID NO: 4686 | | SEQ ID NO: 4670 |
| 20-17 | SEQ ID NO: 4669 | SEQ ID NO: 4661 | SEQ ID NO: 4691 | SEQ ID NO: 4688 | | SEQ ID NO: 4671 |
| 20-18 | SEQ ID NO: 4669 | SEQ ID NO: 4662 | SEQ ID NO: 4691 | SEQ ID NO: 4689 | | SEQ ID NO: 4671 |
| 20-19 | SEQ ID NO: 4668 | SEQ ID NO: 4672 | SEQ ID NO: 4690 | SEQ ID NO: 4686 | SEQ ID NO: 4694 | |
| 20-20 | SEQ ID NO: 4669 | SEQ ID NO: 4673 | SEQ ID NO: 4691 | SEQ ID NO: 4688 | SEQ ID NO: 4694 | |
| 20-21 | SEQ ID NO: 4669 | SEQ ID NO: 4674 | SEQ ID NO: 4691 | SEQ ID NO: 4689 | SEQ ID NO: 4694 | |
| 20-22 | SEQ ID NO: 4668 | SEQ ID NO: 4672 | SEQ ID NO: 4690 | SEQ ID NO: 4686 | | SEQ ID NO: 4670 |
| 20-23 | SEQ ID NO: 4669 | SEQ ID NO: 4673 | SEQ ID NO: 4691 | SEQ ID NO: 4688 | | SEQ ID NO: 4671 |
| 20-24 | SEQ ID NO: 4669 | SEQ ID NO: 4674 | SEQ ID NO: 4691 | SEQ ID NO: 4689 | | SEQ ID NO: 4671 |
| 20-25 | SEQ ID NO: 4675 | SEQ ID NO: 4659 | SEQ ID NO: 4692 | SEQ ID NO: 4686 | SEQ ID NO: 4694 | |
| 20-26 | SEQ ID NO: 4676 | SEQ ID NO: 4661 | SEQ ID NO: 4693 | SEQ ID NO: 4688 | SEQ ID NO: 4694 | |
| 20-27 | SEQ ID NO: 4676 | SEQ ID NO: 4662 | SEQ ID NO: 4693 | SEQ ID NO: 4689 | SEQ ID NO: 4694 | |
| 20-28 | SEQ ID NO: 4675 | SEQ ID NO: 4659 | SEQ ID NO: 4692 | SEQ ID NO: 4686 | | SEQ ID NO: 4677 |
| 20-29 | SEQ ID NO: 4676 | SEQ ID NO: 4661 | SEQ ID NO: 4693 | SEQ ID NO: 4688 | | SEQ ID NO: 4678 |
| 20-30 | SEQ ID NO: 4676 | SEQ ID NO: 4662 | SEQ ID NO: 4693 | SEQ ID NO: 4689 | | SEQ ID NO: 4678 |
| 20-31 | SEQ ID NO: 4675 | SEQ ID NO: 4679 | SEQ ID NO: 4692 | SEQ ID NO: 4686 | SEQ ID NO: 4694 | |
| 20-32 | SEQ ID NO: 4676 | SEQ ID NO: 4680 | SEQ ID NO: 4693 | SEQ ID NO: 4688 | SEQ ID NO: 4694 | |
| 20-33 | SEQ ID NO: 4676 | SEQ ID NO: 4681 | SEQ ID NO: 4693 | SEQ ID NO: 4689 | SEQ ID NO: 4694 | |
| 20-34 | SEQ ID NO: 4675 | SEQ ID NO: 4679 | SEQ ID NO: 4692 | SEQ ID NO: 4686 | | SEQ ID NO: 4677 |
| 20-35 | SEQ ID NO: 4676 | SEQ ID NO: 4680 | SEQ ID NO: 4693 | SEQ ID NO: 4688 | | SEQ ID NO: 4678 |
| 20-36 | SEQ ID NO: 4676 | SEQ ID NO: 4681 | SEQ ID NO: 4693 | SEQ ID NO: 4689 | | SEQ ID NO: 4678 |
| 20-37 | SEQ ID NO: 4658 | SEQ ID NO: 4682 | SEQ ID NO: 4685 | SEQ ID NO: 4686 | | |
| 20-38 | SEQ ID NO: 4660 | SEQ ID NO: 4683 | SEQ ID NO: 4687 | SEQ ID NO: 4688 | | |
| 20-39 | SEQ ID NO: 4660 | SEQ ID NO: 4684 | SEQ ID NO: 4687 | SEQ ID NO: 4689 | | |
| 20-40 | SEQ ID NO: 4668 | SEQ ID NO: 4682 | SEQ ID NO: 4690 | SEQ ID NO: 4686 | | |
| 20-41 | SEQ ID NO: 4669 | SEQ ID NO: 4683 | SEQ ID NO: 4691 | SEQ ID NO: 4688 | | |
| 20-42 | SEQ ID NO: 4669 | SEQ ID NO: 4684 | SEQ ID NO: 4691 | SEQ ID NO: 4689 | | |
| 20-43 | SEQ ID NO: 4675 | SEQ ID NO: 4682 | SEQ ID NO: 4692 | SEQ ID NO: 4686 | | |
| 20-44 | SEQ ID NO: 4676 | SEQ ID NO: 4683 | SEQ ID NO: 4693 | SEQ ID NO: 4688 | | |
| 20-45 | SEQ ID NO: 4676 | SEQ ID NO: 4684 | SEQ ID NO: 4693 | SEQ ID NO: 4689 | | |

TABLE 51

| Protein | | | | | | | |
|---|---|---|---|---|---|---|---|
| ID | D1-Fc | D5-Fab | D4-Fab | D3-Fab | D6-Fab | D2-Fab | D2-Fc |
| 20-01 | L234A/L235A/P329G | | Rituximab | Rituximab | SP34 | | L234A/L235A/P329G |
| 20-02 | L234A/L235A/P329G | | Rituximab | Rituximab | SP34 | | L234A/L235A/P329G |
| 20-03 | L234A/L235A/P329G | | Rituximab | Rituximab | SP34 | | L234A/L235A/P329G |
| 20-04 | L234A/L235A/P329G | Rituximab | Rituximab | Rituximab | SP34 | | L234A/L235A/P329G |
| 20-05 | L234A/L235A/P329G | Rituximab | Rituximab | Rituximab | SP34 | | L234A/L235A/P329G |
| 20-06 | L234A/L235A/P329G | Rituximab | Rituximab | Rituximab | SP34 | | L234A/L235A/P329G |
| 20-07 | L234A/L235A/P329G | | Rituximab | Rituximab | | SP34 | |
| 20-08 | L234A/L235A/P329G | | Rituximab | Rituximab | | SP34 | |
| 20-09 | L234A/L235A/P329G | | Rituximab | Rituximab | | SP34 | |
| 20-10 | L234A/L235A/P329G | Rituximab | Rituximab | Rituximab | | SP34 | |
| 20-11 | L234A/L235A/P329G | Rituximab | Rituximab | Rituximab | | SP34 | |
| 20-12 | L234A/L235A/P329G | Rituximab | Rituximab | Rituximab | | SP34 | |
| 20-13 | L234A/L235A/P329G | | FMC63 | FMC63 | SP34 | | L234A/L235A/P329G |
| 20-14 | L234A/L235A/P329G | | FMC63 | FMC63 | SP34 | | L234A/L235A/P329G |
| 20-15 | L234A/L235A/P329G | | FMC63 | FMC63 | SP34 | | L234A/L235A/P329G |
| 20-16 | L234A/L235A/P329G | FMC63 | FMC63 | FMC63 | SP34 | | L234A/L235A/P329G |
| 20-17 | L234A/L235A/P329G | FMC63 | FMC63 | FMC63 | SP34 | | L234A/L235A/P329G |
| 20-18 | L234A/L235A/P329G | FMC63 | FMC63 | FMC63 | SP34 | | L234A/L235A/P329G |
| 20-19 | L234A/L235A/P329G | | FMC63 | FMC63 | | SP34 | |
| 20-20 | L234A/L235A/P329G | | FMC63 | FMC63 | | SP34 | |
| 20-21 | L234A/L235A/P329G | | FMC63 | FMC63 | | SP34 | |
| 20-22 | L234A/L235A/P329G | FMC63 | FMC63 | FMC63 | | SP34 | |
| 20-23 | L234A/L235A/P329G | FMC63 | FMC63 | FMC63 | | SP34 | |
| 20-24 | L234A/L235A/P329G | FMC63 | FMC63 | FMC63 | | SP34 | |
| 20-25 | L234A/L235A/P329G | | Obinutuzumab | Obinutuzumab | SP34 | | L234A/L235A/P329G |
| 20-26 | L234A/L235A/P329G | | Obinutuzumab | Obinutuzumab | SP34 | | L234A/L235A/P329G |
| 20-27 | L234A/L235A/P329G | | Obinutuzumab | Obinutuzumab | SP34 | | L234A/L235A/P329G |
| 20-28 | L234A/L235A/P329G | Obinutuzumab | Obinutuzumab | Obinutuzumab | SP34 | | L234A/L235A/P329G |
| 20-29 | L234A/L235A/P329G | Obinutuzumab | Obinutuzumab | Obinutuzumab | SP34 | | L234A/L235A/P329G |
| 20-30 | L234A/L235A/P329G | Obinutuzumab | Obinutuzumab | Obinutuzumab | SP34 | | L234A/L235A/P329G |
| 20-31 | L234A/L235A/P329G | | Obinutuzumab | Obinutuzumab | | SP34 | |
| 20-32 | L234A/L235A/P329G | | Obinutuzumab | Obinutuzumab | | SP34 | |
| 20-33 | L234A/L235A/P329G | | Obinutuzumab | Obinutuzumab | | SP34 | |
| 20-34 | L234A/L235A/P329G | Obinutuzumab | Obinutuzumab | Obinutuzumab | | SP34 | |
| 20-35 | L234A/L235A/P329G | Obinutuzumab | Obinutuzumab | Obinutuzumab | | SP34 | |
| 20-36 | L234A/L235A/P329G | Obinutuzumab | Obinutuzumab | Obinutuzumab | | SP34 | |
| 20-37 | L234A/L235A/P329G | SP34 | Rituximab | Rituximab | SP34 | | L234A/L235A/P329G |
| 20-38 | L234A/L235A/P329G | SP34 | Rituximab | Rituximab | SP34 | | L234A/L235A/P329G |
| 20-39 | L234A/L235A/P329G | SP34 | Rituximab | Rituximab | SP34 | | L234A/L235A/P329G |
| 20-40 | L234A/L235A/P329G | SP34 | FMC63 | FMC63 | SP34 | | L234A/L235A/P329G |
| 20-41 | L234A/L235A/P329G | SP34 | FMC63 | FMC63 | SP34 | | L234A/L235A/P329G |
| 20-42 | L234A/L235A/P329G | SP34 | FMC63 | FMC63 | SP34 | | L234A/L235A/P329G |
| 20-43 | L234A/L235A/P329G | SP34 | Obinutuzumab | Obinutuzumab | SP34 | | L234A/L235A/P329G |
| 20-44 | L234A/L235A/P329G | SP34 | Obinutuzumab | Obinutuzumab | SP34 | | L234A/L235A/P329G |
| 20-45 | L234A/L235A/P329G | SP34 | Obinutuzumab | Obinutuzumab | SP34 | | L234A/L235A/P329G |

TABLE 52

| Protein | D1-Fc | D5-Fab | D4-Fab | D3-Fab | D6-Fab | D2-Fab | D2-Fc |
|---|---|---|---|---|---|---|---|
| ID | Specificity | Specificity | Specificity | Specificity | Specificity | Specificity | Specificity |
| 20-01 | FcgR silent | | CD20 | CD20 | CD3 | | FcgR silent |
| 20-02 | FcgR silent | | CD20 | CD20 | CD3 | | FcgR silent |
| 20-03 | FcgR silent | | CD20 | CD20 | CD3 | | FcgR silent |
| 20-04 | FcgR silent | CD20 | CD20 | CD20 | CD3 | | FcgR silent |
| 20-05 | FcgR silent | CD20 | CD20 | CD20 | CD3 | | FcgR silent |
| 20-06 | FcgR silent | CD20 | CD20 | CD20 | CD3 | | FcgR silent |
| 20-07 | FcgR silent | | CD20 | CD20 | | CD3 | |
| 20-08 | FcgR silent | | CD20 | CD20 | | CD3 | |
| 20-09 | FcgR silent | | CD20 | CD20 | | CD3 | |
| 20-10 | FcgR silent | CD20 | CD20 | CD20 | | CD3 | |
| 20-11 | FcgR silent | CD20 | CD20 | CD20 | | CD3 | |
| 20-12 | FcgR silent | CD20 | CD20 | CD20 | | CD3 | |
| 20-13 | FcgR silent | | CD19 | CD19 | CD3 | | FcgR silent |
| 20-14 | FcgR silent | | CD19 | CD19 | CD3 | | FcgR silent |
| 20-15 | FcgR silent | | CD19 | CD19 | CD3 | | FcgR silent |
| 20-16 | FcgR silent | CD19 | CD19 | CD19 | CD3 | | FcgR silent |
| 20-17 | FcgR silent | CD19 | CD19 | CD19 | CD3 | | FcgR silent |
| 20-18 | FcgR silent | CD19 | CD19 | CD19 | CD3 | | FcgR silent |
| 20-19 | FcgR silent | | CD19 | CD19 | | CD3 | |
| 20-20 | FcgR silent | | CD19 | CD19 | | CD3 | |
| 20-21 | FcgR silent | | CD19 | CD19 | | CD3 | |
| 20-22 | FcgR silent | CD19 | CD19 | CD19 | | CD3 | |
| 20-23 | FcgR silent | CD19 | CD19 | CD19 | | CD3 | |
| 20-24 | FcgR silent | CD19 | CD19 | CD19 | | CD3 | |
| 20-25 | FcgR silent | | CD20 | CD20 | CD3 | | FcgR silent |
| 20-26 | FcgR silent | | CD20 | CD20 | CD3 | | FcgR silent |
| 20-27 | FcgR silent | | CD20 | CD20 | CD3 | | FcgR silent |
| 20-28 | FcgR silent | CD20 | CD20 | CD20 | CD3 | | FcgR silent |
| 20-29 | FcgR silent | CD20 | CD20 | CD20 | CD3 | | FcgR silent |
| 20-30 | FcgR silent | CD20 | CD20 | CD20 | CD3 | | FcgR silent |
| 20-31 | FcgR silent | | CD20 | CD20 | | CD3 | |
| 20-32 | FcgR silent | | CD20 | CD20 | | CD3 | |
| 20-33 | FcgR silent | | CD20 | CD20 | | CD3 | |
| 20-34 | FcgR silent | CD20 | CD20 | CD20 | | CD3 | |
| 20-35 | FcgR silent | CD20 | CD20 | CD20 | | CD3 | |
| 20-36 | FcgR silent | CD20 | CD20 | CD20 | | CD3 | |
| 20-37 | FcgR silent | CD3 | CD20 | CD20 | CD3 | | FcgR silent |
| 20-38 | FcgR silent | CD3 | CD20 | CD20 | CD3 | | FcgR silent |
| 20-39 | FcgR silent | CD3 | CD20 | CD20 | CD3 | | FcgR silent |
| 20-40 | FcgR silent | CD3 | CD19 | CD19 | CD3 | | FcgR silent |
| 20-41 | FcgR silent | CD3 | CD19 | CD19 | CD3 | | FcgR silent |
| 20-42 | FcgR silent | CD3 | CD19 | CD19 | CD3 | | FcgR silent |
| 20-43 | FcgR silent | CD3 | CD20 | CD20 | CD3 | | FcgR silent |
| 20-44 | FcgR silent | CD3 | CD20 | CD20 | CD3 | | FcgR silent |
| 20-45 | FcgR silent | CD3 | CD20 | CD20 | CD3 | | FcgR silent |

TABLE 53

| | H1/H3 Chain | | H2 Chain | | L1 Chain | | L2 Chain | |
|---|---|---|---|---|---|---|---|---|
| Protein | V region | Amino acid | V region | Amino acid | V region | Amino acid | V region | Amino acid |
| ID | type | Substitutions | Type | Substitutions | Type | Substitutions | Type | Substitutions |
| 20-01 | VH-CH1 | K147E/K213E | VK-CH1 | | VK-CK | E123R/Q124K | VH-CK | |
| | | (H1 only) | | | | | | |
| 20-02 | VH-CH1 | Q39K/S183E | VK-CH1 | Q38E/S183K | VK-CK | Q38E/V133K | VH-CK | Q39K/V133E |
| | | (H1 only) | | | | | | |
| 20-03 | VH-CH1 | Q39K/S183E | VK-CH1 | Q38K/S183K | VK-CK | Q38E/V133K | VH-CK | Q39E/V133E |
| | | (H1 only) | | | | | | |
| 20-04 | VH-CH1 | K147E/K213E | VK-CH1 | | VK-CK | E123R/Q124K | VH-CK | |
| 20-05 | VH-CH1 | Q39K/S183E | VK-CH1 | Q38E/S183K | VK-CK | Q38E/V133K | VH-CK | Q39K/V133E |
| 20-06 | VH-CH1 | Q39K/S183E | VK-CH1 | Q38K/S183K | VK-CK | Q38E/V133K | VH-CK | Q39E/V133E |
| 20-07 | VH-CH1 | K147E/K213E | VH-CH1 | K147E/K213E | VK-CK | E123R/Q124K | VH-CK | |
| | | (H1 only) | VK-CH1 | | | | | |
| 20-08 | VH-CH1 | Q39K/S183E | VH-CH1 | Q39K/S183E | VK-CK | Q38E/V133K | VH-CK | Q39K/V133E |
| | | (H1 only) | VK-CH1 | Q38E/S183K | | | | |
| 20-09 | VH-CH1 | Q39K/S183E | VH-CH1 | Q39K/S183E | VK-CK | Q38E/V133K | VH-CK | Q39E/V133E |
| | | (H1 only) | VK-CH1 | Q38K/S183K | | | | |
| 20-10 | VH-CH1 | K147E/K213E | VH-CH1 | K147E/K213E | VK-CK | E123R/Q124K | VH-CK | |
| | | | VK-CH1 | | | | | |
| 20-11 | VH-CH1 | Q39K/S183E | VH-CH1 | Q39K/S183E | VK-CK | Q38E/V133K | VH-CK | Q39K/V133E |
| | | | VK-CH1 | Q38E/S183K | | | | |
| 20-12 | VH-CH1 | Q39K/S183E | VH-CH1 | Q39K/S183E | VK-CK | Q38E/V133K | VH-CK | Q39E/V133E |
| | | | VK-CH1 | Q38K/S183K | | | | |
| 20-13 | VH-CH1 | K147E/K213E | VK-CH1 | | VK-CK | E123R/Q124K | VH-CK | |
| | | (H1 only) | | | | | | |
| 20-14 | VH-CH1 | Q39K/S183E | VK-CH1 | Q38E/S183K | VK-CK | Q38E/V133K | VH-CK | Q39K/V133E |
| | | (H1 only) | | | | | | |
| 20-15 | VH-CH1 | Q39K/S183E | VK-CH1 | Q38K/S183K | VK-CK | Q38E/V133K | VH-CK | Q39E/V133E |
| | | (H1 only) | | | | | | |
| 20-16 | VH-CH1 | K147E/K213E | VK-CH1 | | VK-CK | E123R/Q124K | VH-CK | |
| 20-17 | VH-CH1 | Q39K/S183E | VK-CH1 | Q38E/S183K | VK-CK | Q38E/V133K | VH-CK | Q39K/V133E |
| 20-18 | VH-CH1 | Q39K/S183E | VK-CH1 | Q38K/S183K | VK-CK | Q38E/V133K | VH-CK | Q39E/V133E |
| 20-19 | VH-CH1 | K147E/K213E | VH-CH1 | K147E/K213E | VK-CK | E123R/Q124K | VH-CK | |
| | | (H1 only) | VK-CH1 | | | | | |
| 20-20 | VH-CH1 | Q39K/S183E | VH-CH1 | Q39K/S183E | VK-CK | Q38E/V133K | VH-CK | Q39K/V133E |
| | | (H1 only) | VK-CH1 | Q38E/S183K | | | | |
| 20-21 | VH-CH1 | Q39K/S183E | VH-CH1 | Q39K/S183E | VK-CK | Q38E/V133K | VH-CK | Q39E/V133E |
| | | (H1 only) | VK-CH1 | Q38K/S183K | | | | |
| 20-22 | VH-CH1 | K147E/K213E | VH-CH1 | K147E/K213E | VK-CK | E123R/Q124K | VH-CK | |
| | | | VK-CH1 | | | | | |
| 20-23 | VH-CH1 | Q39K/S183E | VH-CH1 | Q39K/S183E | VK-CK | Q38E/V133K | VH-CK | Q39K/V133E |
| | | | VK-CH1 | Q38E/S183K | | | | |
| 20-24 | VH-CH1 | Q39K/S183E | VH-CH1 | Q39K/S183E | VK-CK | Q38E/V133K | VH-CK | Q39E/V133E |
| | | | VK-CH1 | Q38K/S183K | | | | |
| 20-25 | VH-CH1 | K147E/K213E | VK-CH1 | | VK-CK | E123R/Q124K | VH-CK | |
| | | (H1 only) | | | | | | |
| 20-26 | VH-CH1 | Q39K/S183E | VK-CH1 | Q38E/S183K | VK-CK | Q38E/V133K | VH-CK | Q39K/V133E |
| | | (H1 only) | | | | | | |
| 20-27 | VH-CH1 | Q39K/S183E | VK-CH1 | Q38K/S183K | VK-CK | Q38E/V133K | VH-CK | Q39E/V133E |
| | | (H1 only) | | | | | | |
| 20-28 | VH-CH1 | K147E/K213E | VK-CH1 | | VK-CK | E123R/Q124K | VH-CK | |
| 20-29 | VH-CH1 | Q39K/S183E | VK-CH1 | Q38E/S183K | VK-CK | Q38E/V133K | VH-CK | Q39K/V133E |
| 20-30 | VH-CH1 | Q39K/S183E | VK-CH1 | Q38K/S183K | VK-CK | Q38E/V133K | VH-CK | Q39E/V133E |
| 20-31 | VH-CH1 | K147E/K213E | VH-CH1 | K147E/K213E | VK-CK | E123R/Q124K | VH-CK | |
| | | (H1 only) | VK-CH1 | | | | | |
| 20-32 | VH-CH1 | Q39K/S183E | VH-CH1 | Q39K/S183E | VK-CK | Q38E/V133K | VH-CK | Q39K/V133E |
| | | (H1 only) | VK-CH1 | Q38E/S183K | | | | |
| 20-33 | VH-CH1 | Q39K/S183E | VH-CH1 | Q39K/S183E | VK-CK | Q38E/V133K | VH-CK | Q39E/V133E |
| | | (H1 only) | VK-CH1 | Q38K/S183K | | | | |
| 20-34 | VH-CH1 | K147E/K213E | VH-CH1 | K147E/K213E | VK-CK | E123R/Q124K | VH-CK | |
| | | | VK-CH1 | | | | | |
| 20-35 | VH-CH1 | Q39K/S183E | VH-CH1 | Q39K/S183E | VK-CK | Q38E/V133K | VH-CK | Q39K/V133E |
| | | | VK-CH1 | Q38E/S183K | | | | |
| 20-36 | VH-CH1 | Q39K/S183E | VH-CH1 | Q39K/S183E | VK-CK | Q38E/V133K | VH-CK | Q39E/V133E |
| | | | VK-CH1 | Q38K/S183K | | | | |
| 20-37 | VH-CH1 | K147E/K213E | VK-CH1 | | VK-CK | E123R/Q124K | VH-CK | |
| | | (H1 only) | | | | | | |
| 20-38 | VH-CH1 | Q39K/S183E | VK-CH1 | Q38E/S183K | VK-CK | Q38E/V133K | VH-CK | Q39K/V133E |
| | | (H1 only) | | | | | | |
| 20-39 | VH-CH1 | Q39K/S183E | VK-CH1 | Q38K/S183K | VK-CK | Q38E/V133K | VH-CK | Q39E/V133E |
| | | (H1 only) | | | | | | |
| 20-40 | VH-CH1 | K147E/K213E | VK-CH1 | | VK-CK | E123R/Q124K | VH-CK | |
| | | (H1 only) | | | | | | |
| 20-41 | VH-CH1 | Q39K/S183E | VK-CH1 | Q38E/S183K | VK-CK | Q38E/V133K | VH-CK | Q39K/V133E |
| | | (H1 only) | | | | | | |
| 20-42 | VH-CH1 | Q39K/S183E | VK-CH1 | Q38K/S183K | VK-CK | Q38E/V133K | VH-CK | Q39E/V133E |
| | | (H1 only) | | | | | | |
| 20-43 | VH-CH1 | K147E/K213E | VK-CH1 | | VK-CK | E123R/Q124K | VH-CK | |
| | | (H1 only) | | | | | | |
| 20-44 | VH-CH1 | Q39K/S183E | VK-CH1 | Q38E/S183K | VK-CK | Q38E/V133K | VH-CK | Q39K/V133E |
| | | (H1 only) | | | | | | |
| 20-45 | VH-CH1 | Q39K/S183E | VK-CH1 | Q38K/S183K | VK-CK | Q38E/V133K | VH-CK | Q39E/V133E |
| | | (H1 only) | | | | | | |

### Example 23—Tetravalent, Bispecific Tetrahedral Antibodies Comprising Two Distinct Fabs that Specifically Bind CD19 and CD20, and Two Fc Domains with FcgR Enhancing Mutations

[1350] Tetrahedral antibodies were designed, expressed, and evaluated for their ability to co-engage NK cells and disease target cells for the treatment of B cell cancer and other B cell disease, particularly resistant and recurrent disease. This series of bispecific constructs employ VH and VL regions from rituximab (anti-CD20) and FMC63 (anti-CD19), or rituximab and either FMC60 or FMC59, two different humanized versions of FMC63. (Tables 54, 55). Two distinct configurations of the anti-CD20 and anti-CD19 Fabs were evaluated (Table 56). In the first, the anti-CD20 and anti-CD19 Fabs are placed in D3/D4 and D5/D6, respectively; in the second, the anti-CD20 and anti-CD19 Fabs are placed in D5/D6 and D3/D4, respectively. Additionally, the D1/D2 Fc domains were alternatively wild-type with respect to FcgR binding sequences or comprised the FcgR enhancing mutations S239D/I298E. Three distinct configurations of the FcgR enhancing mutations were evaluated (Tables 55, 56). In the first, the H1 and H2 chains each comprised the S239D and 1298E mutations (symmetric configuration). In the second, the H1 chain comprised the S239D mutation and the H2 chain comprised the I298E mutation (asymmetric configuration). In the third, the H1 chain comprised the I298E mutation and the H2 chain comprised the S239D mutation (asymmetric configuration). To optimize correct VH/VL pairing and to minimize VH/VL mispairing, V region exchange was combined with four different sets of charge pairs to ensure correct pairing of heavy and light chain V regions (Table 57). Additionally, to further facilitate purification of the correctly paired product by Protein A chromatography, the H1 chain incorporated the H435R/Y436F substitution. The constructs are then evaluated for their structural bispecificity by intact mass spectrometry as described in Example 18, and for their functional bispecificity using a variety of in vitro binding assays, cytotoxicity assays, and cytokine induction and release assays, and in vivo cancer efficacy models, known to one skilled in the art.

TABLE 54

| Protein | | | | | |
|---|---|---|---|---|---|
| ID | H1 Chain | H2 Chain | L1 Chain | L2 Chain | Fe Chain |
| 21-01 | SEQ ID NO: 4701 | SEQ ID NO: 4702 | SEQ ID NO: 4801 | SEQ ID NO: 4802 | |
| 21-02 | SEQ ID NO: 4703 | SEQ ID NO: 4704 | SEQ ID NO: 4803 | SEQ ID NO: 4804 | |
| 21-03 | SEQ ID NO: 4703 | SEQ ID NO: 4705 | SEQ ID NO: 4803 | SEQ ID NO: 4805 | |
| 21-04 | SEQ ID NO: 4706 | SEQ ID NO: 4707 | SEQ ID NO: 4806 | SEQ ID NO: 4807 | |
| 21-05 | SEQ ID NO: 4708 | SEQ ID NO: 4709 | SEQ ID NO: 4808 | SEQ ID NO: 4809 | |
| 21-06 | SEQ ID NO: 4708 | SEQ ID NO: 4710 | SEQ ID NO: 4808 | SEQ ID NO: 4810 | |
| 21-07 | SEQ ID NO: 4711 | SEQ ID NO: 4712 | SEQ ID NO: 4801 | SEQ ID NO: 4802 | |
| 21-08 | SEQ ID NO: 4713 | SEQ ID NO: 4714 | SEQ ID NO: 4803 | SEQ ID NO: 4804 | |
| 21-09 | SEQ ID NO: 4713 | SEQ ID NO: 4715 | SEQ ID NO: 4803 | SEQ ID NO: 4805 | |
| 21-10 | SEQ ID NO: 4716 | SEQ ID NO: 4717 | SEQ ID NO: 4806 | SEQ ID NO: 4807 | |
| 21-11 | SEQ ID NO: 4718 | SEQ ID NO: 4719 | SEQ ID NO: 4808 | SEQ ID NO: 4809 | |
| 21-12 | SEQ ID NO: 4718 | SEQ ID NO: 4720 | SEQ ID NO: 4808 | SEQ ID NO: 4810 | |
| 21-13 | SEQ ID NO: 4721 | SEQ ID NO: 4722 | SEQ ID NO: 4801 | SEQ ID NO: 4802 | |
| 21-14 | SEQ ID NO: 4723 | SEQ ID NO: 4724 | SEQ ID NO: 4803 | SEQ ID NO: 4804 | |
| 21-15 | SEQ ID NO: 4723 | SEQ ID NO: 4725 | SEQ ID NO: 4803 | SEQ ID NO: 4805 | |
| 21-16 | SEQ ID NO: 4726 | SEQ ID NO: 4727 | SEQ ID NO: 4806 | SEQ ID NO: 4807 | |
| 21-17 | SEQ ID NO: 4728 | SEQ ID NO: 4729 | SEQ ID NO: 4808 | SEQ ID NO: 4809 | |
| 21-18 | SEQ ID NO: 4728 | SEQ ID NO: 4730 | SEQ ID NO: 4808 | SEQ ID NO: 4810 | |
| 21-19 | SEQ ID NO: 4731 | | SEQ ID NO: 4811 | | |
| 21-20 | SEQ ID NO: 4732 | | SEQ ID NO: 4811 | | |
| 21-21 | SEQ ID NO: 4733 | SEQ ID NO: 4734 | SEQ ID NO: 4811 | | |
| 21-22 | SEQ ID NO: 4735 | SEQ ID NO: 4736 | SEQ ID NO: 4811 | | |
| 21-23 | SEQ ID NO: 4737 | SEQ ID NO: 4738 | SEQ ID NO: 4811 | | |
| 21-24 | SEQ ID NO: 4739 | SEQ ID NO: 4740 | SEQ ID NO: 4811 | | |
| 21-25 | SEQ ID NO: 4741 | | SEQ ID NO: 4812 | | |
| 21-26 | SEQ ID NO: 4742 | | SEQ ID NO: 4812 | | |
| 21-27 | SEQ ID NO: 4743 | SEQ ID NO: 4744 | SEQ ID NO: 4812 | | |
| 21-28 | SEQ ID NO: 4745 | SEQ ID NO: 4746 | SEQ ID NO: 4812 | | |
| 21-29 | SEQ ID NO: 4747 | SEQ ID NO: 4748 | SEQ ID NO: 4812 | | |
| 21-30 | SEQ ID NO: 4749 | SEQ ID NO: 4750 | SEQ ID NO: 4812 | | |
| 21-31 | SEQ ID NO: 4695 | SEQ ID NO: 4751 | SEQ ID NO: 4803 | SEQ ID NO: 4813 | |
| 21-32 | SEQ ID NO: 4695 | SEQ ID NO: 4752 | SEQ ID NO: 4803 | SEQ ID NO: 4814 | |
| 21-33 | SEQ ID NO: 4753 | SEQ ID NO: 4751 | SEQ ID NO: 4815 | SEQ ID NO: 4813 | |
| 21-34 | SEQ ID NO: 4753 | SEQ ID NO: 4752 | SEQ ID NO: 4815 | SEQ ID NO: 4814 | |
| 21-35 | SEQ ID NO: 4754 | SEQ ID NO: 4699 | SEQ ID NO: 4816 | SEQ ID NO: 4809 | |
| 21-36 | SEQ ID NO: 4754 | SEQ ID NO: 4700 | SEQ ID NO: 4816 | SEQ ID NO: 4810 | |
| 21-37 | SEQ ID NO: 4755 | SEQ ID NO: 4699 | SEQ ID NO: 4817 | SEQ ID NO: 4809 | |
| 21-38 | SEQ ID NO: 4755 | SEQ ID NO: 4700 | SEQ ID NO: 4817 | SEQ ID NO: 4810 | |
| 21-39 | SEQ ID NO: 4756 | SEQ ID NO: 4757 | SEQ ID NO: 4803 | SEQ ID NO: 4813 | |
| 21-40 | SEQ ID NO: 4756 | SEQ ID NO: 4758 | SEQ ID NO: 4803 | SEQ ID NO: 4814 | |
| 21-41 | SEQ ID NO: 4759 | SEQ ID NO: 4757 | SEQ ID NO: 4815 | SEQ ID NO: 4813 | |
| 21-42 | SEQ ID NO: 4759 | SEQ ID NO: 4758 | SEQ ID NO: 4815 | SEQ ID NO: 4814 | |
| 21-43 | SEQ ID NO: 4760 | SEQ ID NO: 4761 | SEQ ID NO: 4816 | SEQ ID NO: 4809 | |
| 21-44 | SEQ ID NO: 4760 | SEQ ID NO: 4762 | SEQ ID NO: 4816 | SEQ ID NO: 4810 | |
| 21-45 | SEQ ID NO: 4763 | SEQ ID NO: 4761 | SEQ ID NO: 4817 | SEQ ID NO: 4809 | |
| 21-46 | SEQ ID NO: 4763 | SEQ ID NO: 4762 | SEQ ID NO: 4817 | SEQ ID NO: 4810 | |
| 21-47 | SEQ ID NO: 4764 | SEQ ID NO: 4765 | SEQ ID NO: 4803 | SEQ ID NO: 4813 | |
| 21-48 | SEQ ID NO: 4764 | SEQ ID NO: 4766 | SEQ ID NO: 4803 | SEQ ID NO: 4814 | |
| 21-49 | SEQ ID NO: 4767 | SEQ ID NO: 4765 | SEQ ID NO: 4815 | SEQ ID NO: 4813 | |
| 21-50 | SEQ ID NO: 4767 | SEQ ID NO: 4766 | SEQ ID NO: 4815 | SEQ ID NO: 4814 | |
| 21-51 | SEQ ID NO: 4768 | SEQ ID NO: 4769 | SEQ ID NO: 4816 | SEQ ID NO: 4809 | |
| 21-52 | SEQ ID NO: 4768 | SEQ ID NO: 4770 | SEQ ID NO: 4816 | SEQ ID NO: 4810 | |
| 21-53 | SEQ ID NO: 4771 | SEQ ID NO: 4769 | SEQ ID NO: 4817 | SEQ ID NO: 4809 | |
| 21-54 | SEQ ID NO: 4771 | SEQ ID NO: 4770 | SEQ ID NO: 4817 | SEQ ID NO: 4810 | |
| 21-55 | SEQ ID NO: 4723 | SEQ ID NO: 4772 | SEQ ID NO: 4803 | SEQ ID NO: 4813 | |
| 21-56 | SEQ ID NO: 4723 | SEQ ID NO: 4773 | SEQ ID NO: 4803 | SEQ ID NO: 4814 | |
| 21-57 | SEQ ID NO: 4774 | SEQ ID NO: 4772 | SEQ ID NO: 4815 | SEQ ID NO: 4813 | |
| 21-58 | SEQ ID NO: 4774 | SEQ ID NO: 4773 | SEQ ID NO: 4815 | SEQ ID NO: 4814 | |
| 21-59 | SEQ ID NO: 4775 | SEQ ID NO: 4729 | SEQ ID NO: 4816 | SEQ ID NO: 4809 | |
| 21-60 | SEQ ID NO: 4775 | SEQ ID NO: 4730 | SEQ ID NO: 4816 | SEQ ID NO: 4810 | |
| 21-61 | SEQ ID NO: 4776 | SEQ ID NO: 4729 | SEQ ID NO: 4817 | SEQ ID NO: 4809 | |
| 21-62 | SEQ ID NO: 4776 | SEQ ID NO: 4730 | SEQ ID NO: 4817 | SEQ ID NO: 4810 | |
| 21-63 | SEQ ID NO: 4777 | | SEQ ID NO: 4818 | | |
| 21-64 | SEQ ID NO: 4778 | | SEQ ID NO: 4818 | | |
| 21-65 | SEQ ID NO: 4779 | SEQ ID NO: 4780 | SEQ ID NO: 4818 | | |
| 21-66 | SEQ ID NO: 4781 | SEQ ID NO: 4782 | SEQ ID NO: 4818 | | |
| 21-67 | SEQ ID NO: 4783 | SEQ ID NO: 4784 | SEQ ID NO: 4818 | | |
| 21-68 | SEQ ID NO: 4785 | SEQ ID NO: 4786 | SEQ ID NO: 4818 | | |
| 21-69 | SEQ ID NO: 4695 | SEQ ID NO: 4787 | SEQ ID NO: 4803 | SEQ ID NO: 4813 | |
| 21-70 | SEQ ID NO: 4695 | SEQ ID NO: 4788 | SEQ ID NO: 4803 | SEQ ID NO: 4814 | |
| 21-71 | SEQ ID NO: 4753 | SEQ ID NO: 4787 | SEQ ID NO: 4815 | SEQ ID NO: 4813 | |
| 21-72 | SEQ ID NO: 4753 | SEQ ID NO: 4788 | SEQ ID NO: 4815 | SEQ ID NO: 4814 | |
| 21-73 | SEQ ID NO: 4754 | SEQ ID NO: 4699 | SEQ ID NO: 4819 | SEQ ID NO: 4809 | |
| 21-74 | SEQ ID NO: 4754 | SEQ ID NO: 4700 | SEQ ID NO: 4819 | SEQ ID NO: 4810 | |
| 21-75 | SEQ ID NO: 4755 | SEQ ID NO: 4699 | SEQ ID NO: 4820 | SEQ ID NO: 4809 | |
| 21-76 | SEQ ID NO: 4755 | SEQ ID NO: 4700 | SEQ ID NO: 4820 | SEQ ID NO: 4810 | |
| 21-77 | SEQ ID NO: 4756 | SEQ ID NO: 4789 | SEQ ID NO: 4803 | SEQ ID NO: 4813 | |
| 21-78 | SEQ ID NO: 4756 | SEQ ID NO: 4790 | SEQ ID NO: 4803 | SEQ ID NO: 4814 | |
| 21-79 | SEQ ID NO: 4759 | SEQ ID NO: 4789 | SEQ ID NO: 4815 | SEQ ID NO: 4813 | |
| 21-80 | SEQ ID NO: 4759 | SEQ ID NO: 4790 | SEQ ID NO: 4815 | SEQ ID NO: 4814 | |
| 21-81 | SEQ ID NO: 4760 | SEQ ID NO: 4761 | SEQ ID NO: 4819 | SEQ ID NO: 4809 | |
| 21-82 | SEQ ID NO: 4760 | SEQ ID NO: 4762 | SEQ ID NO: 4819 | SEQ ID NO: 4810 | |
| 21-83 | SEQ ID NO: 4763 | SEQ ID NO: 4761 | SEQ ID NO: 4820 | SEQ ID NO: 4809 | |
| 21-84 | SEQ ID NO: 4763 | SEQ ID NO: 4762 | SEQ ID NO: 4820 | SEQ ID NO: 4810 | |
| 21-85 | SEQ ID NO: 4764 | SEQ ID NO: 4791 | SEQ ID NO: 4803 | SEQ ID NO: 4813 | |
| 21-86 | SEQ ID NO: 4764 | SEQ ID NO: 4792 | SEQ ID NO: 4803 | SEQ ID NO: 4814 | |
| 21-87 | SEQ ID NO: 4767 | SEQ ID NO: 4791 | SEQ ID NO: 4815 | SEQ ID NO: 4813 | |
| 21-88 | SEQ ID NO: 4767 | SEQ ID NO: 4792 | SEQ ID NO: 4815 | SEQ ID NO: 4814 | |
| 21-89 | SEQ ID NO: 4768 | SEQ ID NO: 4769 | SEQ ID NO: 4819 | SEQ ID NO: 4809 | |
| 21-90 | SEQ ID NO: 4768 | SEQ ID NO: 4770 | SEQ ID NO: 4819 | SEQ ID NO: 4810 | |
| 21-91 | SEQ ID NO: 4771 | SEQ ID NO: 4769 | SEQ ID NO: 4820 | SEQ ID NO: 4809 | |
| 21-92 | SEQ ID NO: 4771 | SEQ ID NO: 4770 | SEQ ID NO: 4820 | SEQ ID NO: 4810 | |
| 21-93 | SEQ ID NO: 4723 | SEQ ID NO: 4793 | SEQ ID NO: 4803 | SEQ ID NO: 4813 | |
| 21-94 | SEQ ID NO: 4723 | SEQ ID NO: 4794 | SEQ ID NO: 4803 | SEQ ID NO: 4814 | |
| 21-95 | SEQ ID NO: 4774 | SEQ ID NO: 4793 | SEQ ID NO: 4815 | SEQ ID NO: 4813 | |
| 21-96 | SEQ ID NO: 4774 | SEQ ID NO: 4794 | SEQ ID NO: 4815 | SEQ ID NO: 4814 | |
| 21-97 | SEQ ID NO: 4775 | SEQ ID NO: 4729 | SEQ ID NO: 4819 | SEQ ID NO: 4809 | |
| 21-98 | SEQ ID NO: 4775 | SEQ ID NO: 4730 | SEQ ID NO: 4819 | SEQ ID NO: 4810 | |
| 21-99 | SEQ ID NO: 4776 | SEQ ID NO: 4729 | SEQ ID NO: 4820 | SEQ ID NO: 4809 | |
| 21-100 | SEQ ID NO: 4776 | SEQ ID NO: 4730 | SEQ ID NO: 4820 | SEQ ID NO: 4810 | |
| 21-101 | SEQ ID NO: 4777 | | SEQ ID NO: 4821 | | |
| 21-102 | SEQ ID NO: 4778 | | SEQ ID NO: 4821 | | |
| 21-103 | SEQ ID NO: 4779 | SEQ ID NO: 4780 | SEQ ID NO: 4821 | | |
| 21-104 | SEQ ID NO: 4781 | SEQ ID NO: 4782 | SEQ ID NO: 4821 | | |
| 21-105 | SEQ ID NO: 4783 | SEQ ID NO: 4784 | SEQ ID NO: 4821 | | |
| 21-106 | SEQ ID NO: 4785 | SEQ ID NO: 4786 | SEQ ID NO: 4821 | | |
| 21-107 | SEQ ID NO: 4695 | SEQ ID NO: 4799 | SEQ ID NO: 4803 | SEQ ID NO: 4826 | |
| 21-108 | SEQ ID NO: 4695 | SEQ ID NO: 4800 | SEQ ID NO: 4803 | SEQ ID NO: 4827 | |
| 21-109 | SEQ ID NO: 4698 | SEQ ID NO: 4799 | SEQ ID NO: 4808 | SEQ ID NO: 4826 | |
| 21-110 | SEQ ID NO: 4698 | SEQ ID NO: 4800 | SEQ ID NO: 4808 | SEQ ID NO: 4827 | |
| 21-111 | SEQ ID NO: 4795 | SEQ ID NO: 4699 | SEQ ID NO: 4822 | SEQ ID NO: 4809 | |
| 21-112 | SEQ ID NO: 4795 | SEQ ID NO: 4700 | SEQ ID NO: 4822 | SEQ ID NO: 4810 | |
| 21-113 | SEQ ID NO: 4795 | SEQ ID NO: 4696 | SEQ ID NO: 4822 | SEQ ID NO: 4804 | |
| 21-114 | SEQ ID NO: 4795 | SEQ ID NO: 4697 | SEQ ID NO: 4822 | SEQ ID NO: 4805 | |
| 21-115 | SEQ ID NO: 4695 | SEQ ID NO: 4796 | SEQ ID NO: 4803 | SEQ ID NO: 4823 | |
| 21-116 | SEQ ID NO: 4695 | SEQ ID NO: 4797 | SEQ ID NO: 4803 | SEQ ID NO: 4824 | |
| 21-117 | SEQ ID NO: 4698 | SEQ ID NO: 4796 | SEQ ID NO: 4808 | SEQ ID NO: 4823 | |
| 21-118 | SEQ ID NO: 4698 | SEQ ID NO: 4797 | SEQ ID NO: 4808 | SEQ ID NO: 4824 | |
| 21-119 | SEQ ID NO: 4798 | SEQ ID NO: 4699 | SEQ ID NO: 4825 | SEQ ID NO: 4809 | |
| 21-120 | SEQ ID NO: 4798 | SEQ ID NO: 4700 | SEQ ID NO: 4825 | SEQ ID NO: 4810 | |
| 21-121 | SEQ ID NO: 4798 | SEQ ID NO: 4696 | SEQ ID NO: 4825 | SEQ ID NO: 4804 | |
| 21-122 | SEQ ID NO: 4798 | SEQ ID NO: 4697 | SEQ ID NO: 4825 | SEQ ID NO: 4805 | |
| 21-123 | SEQ ID NO: 4733 | | SEQ ID NO: 4811 | | SEQ ID NO: 4828 |
| 21-124 | SEQ ID NO: 4743 | | SEQ ID NO: 4812 | | SEQ ID NO: 4828 |
| 21-125 | SEQ ID NO: 4779 | | SEQ ID NO: 4818 | | SEQ ID NO: 4828 |
| 21-126 | SEQ ID NO: 4779 | | SEQ ID NO: 4821 | | SEQ ID NO: 4828 |
| 21-127 | SEQ ID NO: 4739 | | SEQ ID NO: 4811 | | SEQ ID NO: 4829 |
| 21-128 | SEQ ID NO: 4749 | | SEQ ID NO: 4812 | | SEQ ID NO: 4829 |
| 21-129 | SEQ ID NO: 4785 | | SEQ ID NO: 4818 | | SEQ ID NO: 4829 |
| 21-130 | SEQ ID NO: 4785 | | SEQ ID NO: 4821 | | SEQ ID NO: 4829 |

TABLE 55

| Protein | | | | | | | |
|---|---|---|---|---|---|---|---|
| ID | D1-Fc | D5-Fab | D4-Fab | D3-Fab | D6-Fab | D2-Fc | Other |
| 21-01 | S239D (H1), I298E | FMC63 | Rituximab | Rituximab | FMC63 | S239D (H1), I298E | |
| 21-02 | S239D (H1), I298E | FMC63 | Rituximab | Rituximab | FMC63 | S239D (H1), I298E | |
| 21-03 | S239D (H1), I298E | FMC63 | Rituximab | Rituximab | FMC63 | S239D (H1), I298E | |
| 21-04 | S239D (H1), I298E | Rituximab | FMC63 | FMC63 | Rituximab | S239D (H1), I298E | |
| 21-05 | S239D (H1), I298E | Rituximab | FMC63 | FMC63 | Rituximab | S239D (H1), I298E | |
| 21-06 | S239D (H1), I298E | Rituximab | FMC63 | FMC63 | Rituximab | S239D (H1), I298E | |
| 21-07 | I298E (H1), S239D | FMC63 | Rituximab | Rituximab | FMC63 | I298E (H1), S239D | |
| 21-08 | I298E (H1), S239D | FMC63 | Rituximab | Rituximab | FMC63 | I298E (H1), S239D | |
| 21-09 | I298E (H1), S239D | FMC63 | Rituximab | Rituximab | FMC63 | I298E (H1), S239D | |
| 21-10 | I298E (H1), S239D | Rituximab | FMC63 | FMC63 | Rituximab | I298E (H1), S239D | |
| 21-11 | I298E (H1), S239D | Rituximab | FMC63 | FMC63 | Rituximab | I298E (H1), S239D | |
| 21-12 | I298E (H1), S239D | Rituximab | FMC63 | FMC63 | Rituximab | I298E (H1), S239D | |
| 21-13 | S239D/I298E (H1, | FMC63 | Rituximab | Rituximab | FMC63 | S239D/I298E (H1, | |
| 21-14 | S239D/I298E (H1, | FMC63 | Rituximab | Rituximab | FMC63 | S239D/I298E (H1, | |
| 21-15 | S239D/I298E (H1, | FMC63 | Rituximab | Rituximab | FMC63 | S239D/I298E (H1, | |
| 21-16 | S239D/I298E (H1, | Rituximab | FMC63 | FMC63 | Rituximab | S239D/I298E (H1, | |
| 21-17 | S239D/I298E (H1, | Rituximab | FMC63 | FMC63 | Rituximab | S239D/I298E (H1, | |
| 21-18 | S239D/I298E (H1, | Rituximab | FMC63 | FMC63 | Rituximab | S239D/I298E (H1, | |
| 21-19 | | | | | | | mAb |
| 21-20 | | | | | | | mAb |
| 21-21 | wild-type | Rituximab | Rituximab | Rituximab | Rituximab | wild-type | |
| 21-22 | S239D (H1), I298E | Rituximab | Rituximab | Rituximab | Rituximab | S239D (H1), I298E | |
| 21-23 | I298E (H1), S239D | Rituximab | Rituximab | Rituximab | Rituximab | I298E (H1), S239D | |
| 21-24 | S239D/I298E (H1, | Rituximab | Rituximab | Rituximab | Rituximab | S239D/I298E (H1, | |
| 21-25 | | | | | | | mAb |
| 21-26 | | | | | | | mAb |
| 21-27 | wild-type | FMC63 | FMC63 | FMC63 | FMC63 | wild-type | |
| 21-28 | S239D (H1), I298E | FMC63 | FMC63 | FMC63 | FMC63 | S239D (H1), I298E | |
| 21-29 | I298E (H1), S239D | FMC63 | FMC63 | FMC63 | FMC63 | I298E (H1), S239D | |
| 21-30 | S239D/I298E (H1, | FMC63 | FMC63 | FMC63 | FMC63 | S239D/I298E (H1, | |
| 21-31 | wild-type | FMC60 | Rituximab | Rituximab | FMC60 | wild-type | |
| 21-32 | wild-type | FMC60 | Rituximab | Rituximab | FMC60 | wild-type | |
| 21-33 | wild-type | FMC60 | Rituximab | Rituximab | FMC60 | wild-type | |
| 21-34 | wild-type | FMC60 | Rituximab | Rituximab | FMC60 | wild-type | |
| 21-35 | wild-type | Rituximab | FMC60 | FMC60 | Rituximab | wild-type | |
| 21-36 | wild-type | Rituximab | FMC60 | FMC60 | Rituximab | wild-type | |
| 21-37 | wild-type | Rituximab | FMC60 | FMC60 | Rituximab | wild-type | |
| 21-38 | wild-type | Rituximab | FMC60 | FMC60 | Rituximab | wild-type | |
| 21-39 | S239D (H1), I298E | FMC60 | Rituximab | Rituximab | FMC60 | S239D (H1), I298E | |
| 21-40 | S239D (H1), I298E | FMC60 | Rituximab | Rituximab | FMC60 | S239D (H1), I298E | |
| 21-41 | S239D (H1), I298E | FMC60 | Rituximab | Rituximab | FMC60 | S239D (H1), I298E | |
| 21-42 | S239D (H1), I298E | FMC60 | Rituximab | Rituximab | FMC60 | S239D (H1), I298E | |
| 21-43 | S239D (H1), I298E | Rituximab | FMC60 | FMC60 | Rituximab | S239D (H1), I298E | |
| 21-44 | S239D (H1), I298E | Rituximab | FMC60 | FMC60 | Rituximab | S239D (H1), I298E | |
| 21-45 | S239D (H1), I298E | Rituximab | FMC60 | FMC60 | Rituximab | S239D (H1), I298E | |
| 21-46 | S239D (H1), I298E | Rituximab | FMC60 | FMC60 | Rituximab | S239D (H1), I298E | |
| 21-47 | I298E (H1), S239D | FMC60 | Rituximab | Rituximab | FMC60 | I298E (H1), S239D | |
| 21-48 | I298E (H1), S239D | FMC60 | Rituximab | Rituximab | FMC60 | I298E (H1), S239D | |
| 21-49 | I298E (H1), S239D | FMC60 | Rituximab | Rituximab | FMC60 | I298E (H1), S239D | |
| 21-50 | I298E (H1), S239D | FMC60 | Rituximab | Rituximab | FMC60 | I298E (H1), S239D | |
| 21-51 | I298E (H1), S239D | Rituximab | FMC60 | FMC60 | Rituximab | I298E (H1), S239D | |
| 21-52 | I298E (H1), S239D | Rituximab | FMC60 | FMC60 | Rituximab | I298E (H1), S239D | |
| 21-53 | I298E (H1), S239D | Rituximab | FMC60 | FMC60 | Rituximab | I298E (H1), S239D | |
| 21-54 | I298E (H1), S239D | Rituximab | FMC60 | FMC60 | Rituximab | I298E (H1), S239D | |
| 21-55 | S239D/I298E (H1, | FMC60 | Rituximab | Rituximab | FMC60 | S239D/I298E (H1, | |
| 21-56 | S239D/I298E (H1, | FMC60 | Rituximab | Rituximab | FMC60 | S239D/I298E (H1, | |
| 21-57 | S239D/I298E (H1, | FMC60 | Rituximab | Rituximab | FMC60 | S239D/I298E (H1, | |
| 21-58 | S239D/I298E (H1, | FMC60 | Rituximab | Rituximab | FMC60 | S239D/I298E (H1, | |
| 21-59 | S239D/I298E (H1, | Rituximab | FMC60 | FMC60 | Rituximab | S239D/I298E (H1, | |
| 21-60 | S239D/I298E (H1, | Rituximab | FMC60 | FMC60 | Rituximab | S239D/I298E (H1, | |
| 21-61 | S239D/I298E (H1, | Rituximab | FMC60 | FMC60 | Rituximab | S239D/I298E (H1, | |
| 21-62 | S239D/I298E (H1, | Rituximab | FMC60 | FMC60 | Rituximab | S239D/I298E (H1, | |
| 21-63 | | | | | | | mAb |
| 21-64 | | | | | | | mAb |
| 21-65 | wild-type | FMC60 | FMC60 | FMC60 | FMC60 | wild-type | |
| 21-66 | S239D (H1), I298E | FMC60 | FMC60 | FMC60 | FMC60 | S239D (H1), I298E | |
| 21-67 | I298E (H1), S239D | FMC60 | FMC60 | FMC60 | FMC60 | I298E (H1), S239D | |
| 21-68 | S239D/I298E (H1, | FMC60 | FMC60 | FMC60 | FMC60 | S239D/I298E (H1, | |
| 21-69 | wild-type | FMC59 | Rituximab | Rituximab | FMC59 | wild-type | |
| 21-70 | wild-type | FMC59 | Rituximab | Rituximab | FMC59 | wild-type | |
| 21-71 | wild-type | FMC59 | Rituximab | Rituximab | FMC59 | wild-type | |
| 21-72 | wild-type | FMC59 | Rituximab | Rituximab | FMC59 | wild-type | |
| 21-73 | wild-type | Rituximab | FMC59 | FMC59 | Rituximab | wild-type | |
| 21-74 | wild-type | Rituximab | FMC59 | FMC59 | Rituximab | wild-type | |
| 21-75 | wild-type | Rituximab | FMC59 | FMC59 | Rituximab | wild-type | |
| 21-76 | wild-type | Rituximab | FMC59 | FMC59 | Rituximab | wild-type | |
| 21-77 | S239D (H1), I298E | FMC59 | Rituximab | Rituximab | FMC59 | S239D (H1), I298E | |
| 21-78 | S239D (H1), I298E | FMC59 | Rituximab | Rituximab | FMC59 | S239D (H1), I298E | |
| 21-79 | S239D (H1), I298E | FMC59 | Rituximab | Rituximab | FMC59 | S239D (H1), I298E | |
| 21-80 | S239D (H1), I298E | FMC59 | Rituximab | Rituximab | FMC59 | S239D (H1), I298E | |
| 21-81 | S239D (H1), I298E | Rituximab | FMC59 | FMC59 | Rituximab | S239D (H1), I298E | |
| 21-82 | S239D (H1), I298E | Rituximab | FMC59 | FMC59 | Rituximab | S239D (H1), I298E | |
| 21-83 | S239D (H1), I298E | Rituximab | FMC59 | FMC59 | Rituximab | S239D (H1), I298E | |
| 21-84 | S239D (H1), I298E | Rituximab | FMC59 | FMC59 | Rituximab | S239D (H1), I298E | |
| 21-85 | I298E (H1), S239D | FMC59 | Rituximab | Rituximab | FMC59 | I298E (H1), S239D | |
| 21-86 | I298E (H1), S239D | FMC59 | Rituximab | Rituximab | FMC59 | I298E (H1), S239D | |
| 21-87 | I298E (H1), S239D | FMC59 | Rituximab | Rituximab | FMC59 | I298E (H1), S239D | |
| 21-88 | I298E (H1), S239D | FMC59 | Rituximab | Rituximab | FMC59 | I298E (H1), S239D | |
| 21-89 | I298E (H1), S239D | Rituximab | FMC59 | FMC59 | Rituximab | I298E (H1), S239D | |
| 21-90 | I298E (H1), S239D | Rituximab | FMC59 | FMC59 | Rituximab | I298E (H1), S239D | |
| 21-91 | I298E (H1), S239D | Rituximab | FMC59 | FMC59 | Rituximab | I298E (H1), S239D | |
| 21-92 | I298E (H1), S239D | Rituximab | FMC59 | FMC59 | Rituximab | I298E (H1), S239D | |
| 21-93 | S239D/I298E (H1, | FMC59 | Rituximab | Rituximab | FMC59 | S239D/I298E (H1, | |
| 21-94 | S239D/I298E (H1, | FMC59 | Rituximab | Rituximab | FMC59 | S239D/I298E (H1, | |
| 21-95 | S239D/I298E (H1, | FMC59 | Rituximab | Rituximab | FMC59 | S239D/I298E (H1, | |
| 21-96 | S239D/I298E (H1, | FMC59 | Rituximab | Rituximab | FMC59 | S239D/I298E (H1, | |
| 21-97 | S239D/I298E (H1, | Rituximab | FMC59 | FMC59 | Rituximab | S239D/I298E (H1, | |
| 21-98 | S239D/I298E (H1, | Rituximab | FMC59 | FMC59 | Rituximab | S239D/I298E (H1, | |
| 21-99 | S239D/I298E (H1, | Rituximab | FMC59 | FMC59 | Rituximab | S239D/I298E (H1, | |
| 21-100 | S239D/I298E (H1, | Rituximab | FMC59 | FMC59 | Rituximab | S239D/I298E (H1, | |
| 21-101 | | | | | | | mAb |
| 21-102 | | | | | | | mAb |
| 21-103 | wild-type | FMC59 | FMC59 | FMC59 | FMC59 | wild-type | |
| 21-104 | S239D (H1), I298E | FMC59 | FMC59 | FMC59 | FMC59 | S239D (H1), I298E | |
| 21-105 | I298E (H1), S239D | FMC59 | FMC59 | FMC59 | FMC59 | I298E (H1), S239D | |
| 21-106 | S239D/I298E (H1, | FMC59 | FMC59 | FMC59 | FMC59 | S239D/I298E (H1, | |
| 21-107 | wild-type | B13 | Rituximab | Rituximab | B13 | wild-type | |
| 21-108 | wild-type | B13 | Rituximab | Rituximab | B13 | wild-type | |
| 21-109 | wild-type | B13 | FMC63 | FMC63 | B13 | wild-type | |
| 21-110 | wild-type | B13 | FMC63 | FMC63 | B13 | wild-type | |
| 21-111 | wild-type | Rituximab | B13 | B13 | Rituximab | wild-type | |
| 21-112 | wild-type | Rituximab | B13 | B13 | Rituximab | wild-type | |
| 21-113 | wild-type | FMC63 | B13 | B13 | FMC63 | wild-type | |
| 21-114 | wild-type | FMC63 | B13 | B13 | FMC63 | wild-type | |
| 21-115 | wild-type | O24 | Rituximab | Rituximab | O24 | wild-type | |
| 21-116 | wild-type | O24 | Rituximab | Rituximab | O24 | wild-type | |
| 21-117 | wild-type | O24 | FMC63 | FMC63 | O24 | wild-type | |
| 21-118 | wild-type | O24 | FMC63 | FMC63 | O24 | wild-type | |
| 21-119 | wild-type | Rituximab | O24 | O24 | Rituximab | wild-type | |
| 21-120 | wild-type | Rituximab | O24 | O24 | Rituximab | wild-type | |
| 21-121 | wild-type | FMC63 | O24 | O24 | FMC63 | wild-type | |
| 21-122 | wild-type | FMC63 | O24 | O24 | FMC63 | wild-type | |
| 21-123 | wild-type | | Rituximab | Rituximab | | wild-type | |
| 21-124 | wild-type | | FMC63 | FMC63 | | wild-type | |
| 21-125 | wild-type | | FMC60 | FMC60 | | wild-type | |
| 21-126 | wild-type | | FMC59 | FMC59 | | wild-type | |
| 21-127 | S239D/I298E (H1, | | Rituximab | Rituximab | | S239D/I298E (H1, | |
| 21-128 | S239D/I298E (H1, | | FMC63 | FMC63 | | S239D/I298E (H1, | |
| 21-129 | S239D/I298E (H1, | | FMC60 | FMC60 | | S239D/I298E (H1, | |
| 21-130 | S239D/I298E (H1, | | FMC59 | FMC59 | | S239D/I298E (H1, | |

TABLE 56

| Protein | D1-Fc | D5-Fab | D4-Fab | D3-Fab | D6-Fab | | |
|---|---|---|---|---|---|---|---|
| ID | Specificity | Specificity | Specificity | Specificity | Specificity | D2-Fc Specificity | Other |
| 21-01 | FcgR enhanced | CD19 | CD20 | CD20 | CD19 | FcgR enhanced | |
| 21-02 | FcgR enhanced | CD19 | CD20 | CD20 | CD19 | FcgR enhanced | |
| 21-03 | FcgR enhanced | CD19 | CD20 | CD20 | CD19 | FcgR enhanced | |
| 21-04 | FcgR enhanced | CD20 | CD19 | CD19 | CD20 | FcgR enhanced | |
| 21-05 | FcgR enhanced | CD20 | CD19 | CD19 | CD20 | FcgR enhanced | |
| 21-06 | FcgR enhanced | CD20 | CD19 | CD19 | CD20 | FcgR enhanced | |
| 21-07 | FcgR enhanced | CD19 | CD20 | CD20 | CD19 | FcgR enhanced | |
| 21-08 | FcgR enhanced | CD19 | CD20 | CD20 | CD19 | FcgR enhanced | |
| 21-09 | FcgR enhanced | CD19 | CD20 | CD20 | CD19 | FcgR enhanced | |
| 21-10 | FcgR enhanced | CD20 | CD19 | CD19 | CD20 | FcgR enhanced | |
| 21-11 | FcgR enhanced | CD20 | CD19 | CD19 | CD20 | FcgR enhanced | |
| 21-12 | FcgR enhanced | CD20 | CD19 | CD19 | CD20 | FcgR enhanced | |
| 21-13 | FcgR enhanced | CD19 | CD20 | CD20 | CD19 | FcgR enhanced | |
| 21-14 | FcgR enhanced | CD19 | CD20 | CD20 | CD19 | FcgR enhanced | |
| 21-15 | FcgR enhanced | CD19 | CD20 | CD20 | CD19 | FcgR enhanced | |
| 21-16 | FcgR enhanced | CD20 | CD19 | CD19 | CD20 | FcgR enhanced | |
| 21-17 | FcgR enhanced | CD20 | CD19 | CD19 | CD20 | FcgR enhanced | |
| 21-18 | FcgR enhanced | CD20 | CD19 | CD19 | CD20 | FcgR enhanced | |
| 21-19 | | | | | | | mAh |
| 21-20 | | | | | | | mAh |
| 21-21 | FcgR wild-type | CD20 | CD20 | CD20 | CD20 | FcgR wild-type | |
| 21-22 | FcgR enhanced | CD20 | CD20 | CD20 | CD20 | FcgR enhanced | |
| 21-23 | FcgR enhanced | CD20 | CD20 | CD20 | CD20 | FcgR enhanced | |
| 21-24 | FcgR enhanced | CD20 | CD20 | CD20 | CD20 | FcgR enhanced | |
| 21-25 | | | | | | | mAh |
| 21-26 | | | | | | | mAh |
| 21-27 | FcgR wild-type | CD19 | CD19 | CD19 | CD19 | FcgR wild-type | |
| 21-28 | FcgR enhanced | CD19 | CD19 | CD19 | CD19 | FcgR enhanced | |
| 21-29 | FcgR enhanced | CD19 | CD19 | CD19 | CD19 | FcgR enhanced | |
| 21-30 | FcgR enhanced | CD19 | CD19 | CD19 | CD19 | FcgR enhanced | |
| 21-31 | FcgR wild-type | CD19 | CD20 | CD20 | CD19 | FcgR wild-type | |
| 21-32 | FcgR wild-type | CD19 | CD20 | CD20 | CD19 | FcgR wild-type | |
| 21-33 | FcgR wild-type | CD19 | CD20 | CD20 | CD19 | FcgR wild-type | |
| 21-34 | FcgR wild-type | CD19 | CD20 | CD20 | CD19 | FcgR wild-type | |
| 21-35 | FcgR wild-type | CD20 | CD19 | CD19 | CD20 | FcgR wild-type | |
| 21-36 | FcgR wild-type | CD20 | CD19 | CD19 | CD20 | FcgR wild-type | |
| 21-37 | FcgR wild-type | CD20 | CD19 | CD19 | CD20 | FcgR wild-type | |
| 21-38 | FcgR wild-type | CD20 | CD19 | CD19 | CD20 | FcgR wild-type | |
| 21-39 | FcgR enhanced | CD19 | CD20 | CD20 | CD19 | FcgR enhanced | |
| 21-40 | FcgR enhanced | CD19 | CD20 | CD20 | CD19 | FcgR enhanced | |
| 21-41 | FcgR enhanced | CD19 | CD20 | CD20 | CD19 | FcgR enhanced | |
| 21-42 | FcgR enhanced | CD19 | CD20 | CD20 | CD19 | FcgR enhanced | |
| 21-43 | FcgR enhanced | CD20 | CD19 | CD19 | CD20 | FcgR enhanced | |
| 21-44 | FcgR enhanced | CD20 | CD19 | CD19 | CD20 | FcgR enhanced | |
| 21-45 | FcgR enhanced | CD20 | CD19 | CD19 | CD20 | FcgR enhanced | |
| 21-46 | FcgR enhanced | CD20 | CD19 | CD19 | CD20 | FcgR enhanced | |
| 21-47 | FcgR enhanced | CD19 | CD20 | CD20 | CD19 | FcgR enhanced | |
| 21-48 | FcgR enhanced | CD19 | CD20 | CD20 | CD19 | FcgR enhanced | |
| 21-49 | FcgR enhanced | CD19 | CD20 | CD20 | CD19 | FcgR enhanced | |
| 21-50 | FcgR enhanced | CD19 | CD20 | CD20 | CD19 | FcgR enhanced | |
| 21-51 | FcgR enhanced | CD20 | CD19 | CD19 | CD20 | FcgR enhanced | |
| 21-52 | FcgR enhanced | CD20 | CD19 | CD19 | CD20 | FcgR enhanced | |
| 21-53 | FcgR enhanced | CD20 | CD19 | CD19 | CD20 | FcgR enhanced | |
| 21-54 | FcgR enhanced | CD20 | CD19 | CD19 | CD20 | FcgR enhanced | |
| 21-55 | FcgR enhanced | CD19 | CD20 | CD20 | CD19 | FcgR enhanced | |
| 21-56 | FcgR enhanced | CD19 | CD20 | CD20 | CD19 | FcgR enhanced | |
| 21-57 | FcgR enhanced | CD19 | CD20 | CD20 | CD19 | FcgR enhanced | |
| 21-58 | FcgR enhanced | CD19 | CD20 | CD20 | CD19 | FcgR enhanced | |
| 21-59 | FcgR enhanced | CD20 | CD19 | CD19 | CD20 | FcgR enhanced | |
| 21-60 | FcgR enhanced | CD20 | CD19 | CD19 | CD20 | FcgR enhanced | |
| 21-61 | FcgR enhanced | CD20 | CD19 | CD19 | CD20 | FcgR enhanced | |
| 21-62 | FcgR enhanced | CD20 | CD19 | CD19 | CD20 | FcgR enhanced | |
| 21-63 | | | | | | | mAh |
| 21-64 | | | | | | | mAh |
| 21-65 | FcgR wild-type | CD19 | CD19 | CD19 | CD19 | FcgR wild-type | |
| 21-66 | FcgR enhanced | CD19 | CD19 | CD19 | CD19 | FcgR enhanced | |
| 21-67 | FcgR enhanced | CD19 | CD19 | CD19 | CD19 | FcgR enhanced | |
| 21-68 | FcgR enhanced | CD19 | CD19 | CD19 | CD19 | FcgR enhanced | |
| 21-69 | FcgR wild-type | CD19 | CD19 | CD19 | CD19 | FcgR wild-type | |
| 21-70 | FcgR wild-type | CD19 | CD19 | CD19 | CD19 | FcgR wild-type | |
| 21-71 | FcgR wild-type | CD19 | CD19 | CD19 | CD19 | FcgR wild-type | |
| 21-72 | FcgR wild-type | CD19 | CD19 | CD19 | CD19 | FcgR wild-type | |
| 21-73 | FcgR wild-type | CD20 | CD19 | CD19 | CD20 | FcgR wild-type | |
| 21-74 | FcgR wild-type | CD20 | CD19 | CD19 | CD20 | FcgR wild-type | |
| 21-75 | FcgR wild-type | CD20 | CD19 | CD19 | CD20 | FcgR wild-type | |
| 21-76 | FcgR wild-type | CD20 | CD19 | CD19 | CD20 | FcgR wild-type | |
| 21-77 | FcgR enhanced | CD19 | CD20 | CD20 | CD20 | FcgR enhanced | |
| 21-78 | FcgR enhanced | CD19 | CD20 | CD20 | CD19 | FcgR enhanced | |
| 21-79 | FcgR enhanced | CD19 | CD20 | CD20 | CD19 | FcgR enhanced | |
| 21-80 | FcgR enhanced | CD19 | CD20 | CD20 | CD19 | FcgR enhanced | |
| 21-81 | FcgR enhanced | CD20 | CD19 | CD19 | CD20 | FcgR enhanced | |
| 21-82 | FcgR enhanced | CD20 | CD19 | CD19 | CD20 | FcgR enhanced | |
| 21-83 | FcgR enhanced | CD20 | CD19 | CD19 | CD20 | FcgR enhanced | |
| 21-84 | FcgR enhanced | CD20 | CD19 | CD19 | CD20 | FcgR enhanced | |
| 21-85 | FcgR enhanced | CD19 | CD20 | CD20 | CD19 | FcgR enhanced | |
| 21-86 | FcgR enhanced | CD19 | CD20 | CD20 | CD19 | FcgR enhanced | |
| 21-87 | FcgR enhanced | CD19 | CD20 | CD20 | CD19 | FcgR enhanced | |
| 21-88 | FcgR enhanced | CD19 | CD20 | CD20 | CD19 | FcgR enhanced | |
| 21-89 | FcgR enhanced | CD20 | CD19 | CD19 | CD20 | FcgR enhanced | |
| 21-90 | FcgR enhanced | CD20 | CD19 | CD19 | CD20 | FcgR enhanced | |
| 21-91 | FcgR enhanced | CD20 | CD19 | CD19 | CD20 | FcgR enhanced | |
| 21-92 | FcgR enhanced | CD20 | CD19 | CD19 | CD20 | FcgR enhanced | |
| 21-93 | FcgR enhanced | CD19 | CD20 | CD20 | CD19 | FcgR enhanced | |
| 21-94 | FcgR enhanced | CD19 | CD20 | CD20 | CD19 | FcgR enhanced | |
| 21-95 | FcgR enhanced | CD19 | CD20 | CD20 | CD19 | FcgR enhanced | |
| 21-96 | FcgR enhanced | CD19 | CD20 | CD20 | CD19 | FcgR enhanced | |
| 21-97 | FcgR enhanced | CD20 | CD19 | CD19 | CD20 | FcgR enhanced | |
| 21-98 | FcgR enhanced | CD20 | CD19 | CD19 | CD20 | FcgR enhanced | |
| 21-99 | FcgR enhanced | CD20 | CD19 | CD19 | CD20 | FcgR enhanced | |
| 21-100 | FcgR enhanced | CD20 | CD19 | CD19 | CD20 | FcgR enhanced | |
| 21-101 | | | | | | | mAh |
| 21-102 | | | | | | | mAh |
| 21-103 | FcgR wild-type | CD19 | CD19 | CD19 | CD19 | FcgR wild-type | |
| 21-104 | FcgR enhanced | CD19 | CD19 | CD19 | CD19 | FcgR enhanced | |
| 21-105 | FcgR enhanced | CD19 | CD19 | CD19 | CD19 | FcgR enhanced | |
| 21-106 | FcgR enhanced | CD19 | CD19 | CD19 | CD19 | FcgR enhanced | |
| 21-107 | FcgR wild-type | SARS-CoV-2 | CD20 | CD20 | SARS-CoV-2 | FcgR wild-type | |
| 21-108 | FcgR wild-type | SARS-CoV-2 | CD20 | CD20 | SARS-CoV-2 | FcgR wild-type | |
| 21-109 | FcgR wild-type | SARS-CoV-2 | CD19 | CD19 | SARS-CoV-2 | FcgR wild-type | |
| 21-110 | FcgR wild-type | SARS-CoV-2 | CD19 | CD19 | SARS-CoV-2 | FcgR wild-type | |
| 21-111 | FcgR wild-type | CD20 | SARS-CoV-2 | SARS-CoV-2 | CD20 | FcgR wild-type | |
| 21-112 | FcgR wild-type | CD20 | SARS-CoV-2 | SARS-CoV-2 | CD20 | FcgR wild-type | |
| 21-113 | FcgR wild-type | CD19 | SARS-CoV-2 | SARS-CoV-2 | CD19 | FcgR wild-type | |
| 21-114 | FcgR wild-type | CD19 | SARS-CoV-2 | SARS-CoV-2 | CD19 | FcgR wild-type | |
| 21-115 | FcgR wild-type | SARS-CoV-2 | CD20 | CD20 | SARS-CoV-2 | FcgR wild-type | |
| 21-116 | FcgR wild-type | SARS-CoV-2 | CD20 | CD20 | SARS-CoV-2 | FcgR wild-type | |
| 21-117 | FcgR wild-type | SARS-CoV-2 | CD19 | CD19 | SARS-CoV-2 | FcgR wild-type | |
| 21-118 | FcgR wild-type | SARS-CoV-2 | CD19 | CD19 | SARS-CoV-2 | FcgR wild-type | |
| 21-119 | FcgR wild-type | CD20 | SARS-CoV-2 | SARS-CoV-2 | CD20 | FcgR wild-type | |
| 21-120 | FcgR wild-type | CD20 | SARS-CoV-2 | SARS-CoV-2 | CD20 | FcgR wild-type | |
| 21-121 | FcgR wild-type | CD19 | SARS-CoV-2 | SARS-CoV-2 | CD19 | FcgR wild-type | |
| 21-122 | FcgR wild-type | CD19 | SARS-CoV-2 | SARS-CoV-2 | CD19 | FcgR wild-type | |
| 21-123 | FcgR wild-type | | CD20 | CD20 | | FcgR wild-type | |
| 21-124 | FcgR wild-type | | CD19 | CD19 | | FcgR wild-type | |
| 21-125 | FcgR wild-type | | CD19 | CD19 | | FcgR wild-type | |
| 21-126 | FcgR wild-type | | CD19 | CD19 | | FcgR wild-type | |
| 21-127 | FcgR enhanced | | CD20 | CD20 | | FcgR enhanced | |
| 21-128 | FcgR enhanced | | CD19 | CD19 | | FcgR enhanced | |
| 21-129 | FcgR enhanced | | CD19 | CD19 | | FcgR enhanced | |
| 21-130 | FcgR enhanced | | CD19 | CD19 | | FcgR enhanced | |

TABLE 57

| | H1 Chain | | H2 Chain | | L1 Chain | | L2 Chain | | |
|---|---|---|---|---|---|---|---|---|---|
| Protein | V region | Amino acid | V region | Amino acid | V region | Amino acid | V region | Amino acid | |
| ID | type | Substitutions | Type | Substitutions | Type | Substitutions | Type | Substitutions | Other |
| 21-01 | VH-CH1 | K147E/K213E | VK-CH1 | | VK-CK | E123R/Q124K | VH-CK | | |
| 21-02 | VH-CH1 | Q39K/S183E | VK-CH1 | Q38E/S183K | VK-CK | Q38E/V133K | VH-CK | Q39K/V133E | |
| 21-03 | VH-CH1 | Q39K/S183E | VK-CH1 | Q38K/S183K | VK-CK | Q38E/V133K | VH-CK | Q39E/V133E | |
| 21-04 | VH-CH1 | K147E/K213E | VK-CH1 | | VK-CK | E123R/Q124K | VH-CK | | |
| 21-05 | VH-CH1 | Q39K/S183E | VK-CH1 | Q38E/S183K | VK-CK | Q38E/V133K | VH-CK | Q39K/V133E | |
| 21-06 | VH-CH1 | Q39K/S183E | VK-CH1 | Q38K/S183K | VK-CK | Q38E/V133K | VH-CK | Q39E/V133E | |
| 21-07 | VH-CH1 | K147E/K213E | VK-CH1 | | VK-CK | E123R/Q124K | VH-CK | | |
| 21-08 | VH-CH1 | Q39K/S183E | VK-CH1 | Q38E/S183K | VK-CK | Q38E/V133K | VH-CK | Q39K/V133E | |
| 21-09 | VH-CH1 | Q39K/S183E | VK-CH1 | Q38K/S183K | VK-CK | Q38E/V133K | VH-CK | Q39E/V133E | |
| 21-10 | VH-CH1 | K147E/K213E | VK-CH1 | | VK-CK | E123R/Q124K | VH-CK | | |
| 21-11 | VH-CH1 | Q39K/S183E | VK-CH1 | Q38E/S183K | VK-CK | Q38E/V133K | VH-CK | Q39K/V133E | |
| 21-12 | VH-CH1 | Q39K/S183E | VK-CH1 | Q38K/S183K | VK-CK | Q38E/V133K | VH-CK | Q39E/V133E | |
| 21-13 | VH-CH1 | K147E/K213E | VK-CH1 | | VK-CK | E123R/Q124K | VH-CK | | |
| 21-14 | VH-CH1 | Q39K/S183E | VK-CH1 | Q38E/S183K | VK-CK | Q38E/V133K | VH-CK | Q39K/V133E | |
| 21-15 | VH-CH1 | Q39K/S183E | VK-CH1 | Q38K/S183K | VK-CK | Q38E/V133K | VH-CK | Q39E/V133E | |
| 21-16 | VH-CH1 | K147E/K213E | VK-CH1 | | VK-CK | E123R/Q124K | VH-CK | | |
| 21-17 | VH-CH1 | Q39K/S183E | VK-CH1 | Q38E/S183K | VK-CK | Q38E/V133K | VH-CK | Q39K/V133E | |
| 21-18 | VH-CH1 | Q39K/S183E | VK-CH1 | Q38K/S183K | VK-CK | Q38E/V133K | VH-CK | Q39E/V133E | |
| 21-19 | | | | | | | | | mAb |
| 21-20 | | | | | | | | | mAb |
| 21-21 | VH-CH1 | | VH-CH1 | | VK-CK | | | | |
| 21-22 | VH-CH1 | | VH-CH1 | | VK-CK | | | | |
| 21-23 | VH-CH1 | | VH-CH1 | | VK-CK | | | | |
| 21-24 | VH-CH1 | | VH-CH1 | | VK-CK | | | | |
| 21-25 | | | | | | | | | mAb |
| 21-26 | | | | | | | | | mAb |
| 21-27 | VH-CH1 | | VH-CH1 | | VK-CK | | | | |
| 21-28 | VH-CH1 | | VH-CH1 | | VK-CK | | | | |
| 21-29 | VH-CH1 | | VH-CH1 | | VK-CK | | | | |
| 21-30 | VH-CH1 | | VH-CH1 | | VK-CK | | | | |
| 21-31 | VH-CH1 | Q39K/S183E | VK-CH1 | Q38E/S183K | VK-CK | Q38E/V133K | VH-CK | Q39K/V133E | |
| 21-32 | VH-CH1 | Q39K/S183E | VK-CH1 | Q38K/S183K | VK-CK | Q38E/V133K | VH-CK | Q39E/V133E | |
| 21-33 | VH-CH1 | Q39E/S183E | VK-CH1 | Q38E/S183K | VK-CK | Q38K/V133K | VH-CK | Q39K/V133E | |
| 21-34 | VH-CH1 | Q39E/S183E | VK-CH1 | Q38K/S183K | VK-CK | Q38K/V133K | VH-CK | Q39E/V133E | |
| 21-35 | VH-CH1 | Q39K/S183E | VK-CH1 | Q38E/S183K | VK-CK | Q38E/V133K | VH-CK | Q39K/V133E | |
| 21-36 | VH-CH1 | Q39K/S183E | VK-CH1 | Q38K/S183K | VK-CK | Q38E/V133K | VH-CK | Q39E/V133E | |
| 21-37 | VH-CH1 | Q39E/S183E | VK-CH1 | Q38E/S183K | VK-CK | Q38K/V133K | VH-CK | Q39K/V133E | |
| 21-38 | VH-CH1 | Q39E/S183E | VK-CH1 | Q38K/S183K | VK-CK | Q38K/V133K | VH-CK | Q39E/V133E | |
| 21-39 | VH-CH1 | Q39K/S183E | VK-CH1 | Q38E/S183K | VK-CK | Q38E/V133K | VH-CK | Q39K/V133E | |
| 21-40 | VH-CH1 | Q39K/S183E | VK-CH1 | Q38K/S183K | VK-CK | Q38E/V133K | VH-CK | Q39E/V133E | |
| 21-41 | VH-CH1 | Q39E/S183E | VK-CH1 | Q38E/S183K | VK-CK | Q38K/V133K | VH-CK | Q39K/V133E | |
| 21-42 | VH-CH1 | Q39E/S183E | VK-CH1 | Q38K/S183K | VK-CK | Q38K/V133K | VH-CK | Q39E/V133E | |
| 21-43 | VH-CH1 | Q39K/S183E | VK-CH1 | Q38E/S183K | VK-CK | Q38E/V133K | VH-CK | Q39K/V133E | |
| 21-44 | VH-CH1 | Q39K/S183E | VK-CH1 | Q38K/S183K | VK-CK | Q38E/V133K | VH-CK | Q39E/V133E | |
| 21-45 | VH-CH1 | Q39E/S183E | VK-CH1 | Q38E/S183K | VK-CK | Q38K/V133K | VH-CK | Q39K/V133E | |
| 21-46 | VH-CH1 | Q39E/S183E | VK-CH1 | Q38K/S183K | VK-CK | Q38K/V133K | VH-CK | Q39E/V133E | |
| 21-47 | VH-CH1 | Q39K/S183E | VK-CH1 | Q38E/S183K | VK-CK | Q38E/V133K | VH-CK | Q39K/V133E | |
| 21-48 | VH-CH1 | Q39K/S183E | VK-CH1 | Q38K/S183K | VK-CK | Q38E/V133K | VH-CK | Q39E/V133E | |
| 21-49 | VH-CH1 | Q39E/S183E | VK-CH1 | Q38E/S183K | VK-CK | Q38K/V133K | VH-CK | Q39K/V133E | |
| 21-50 | VH-CH1 | Q39E/S183E | VK-CH1 | Q38K/S183K | VK-CK | Q38K/V133K | VH-CK | Q39E/V133E | |
| 21-51 | VH-CH1 | Q39K/S183E | VK-CH1 | Q38E/S183K | VK-CK | Q38E/V133K | VH-CK | Q39K/V133E | |
| 21-52 | VH-CH1 | Q39K/S183E | VK-CH1 | Q38K/S183K | VK-CK | Q38E/V133K | VH-CK | Q39E/V133E | |
| 21-53 | VH-CH1 | Q39E/S183E | VK-CH1 | Q38E/S183K | VK-CK | Q38K/V133K | VH-CK | Q39K/V133E | |
| 21-54 | VH-CH1 | Q39E/S183E | VK-CH1 | Q38K/S183K | VK-CK | Q38K/V133K | VH-CK | Q39E/V133E | |
| 21-55 | VH-CH1 | Q39K/S183E | VK-CH1 | Q38E/S183K | VK-CK | Q38E/V133K | VH-CK | Q39K/V133E | |
| 21-56 | VH-CH1 | Q39K/S183E | VK-CH1 | Q38K/S183K | VK-CK | Q38E/V133K | VH-CK | Q39E/V133E | |
| 21-57 | VH-CH1 | Q39E/S183E | VK-CH1 | Q38E/S183K | VK-CK | Q38K/V133K | VH-CK | Q39K/V133E | |
| 21-58 | VH-CH1 | Q39E/S183E | VK-CH1 | Q38K/S183K | VK-CK | Q38K/V133K | VH-CK | Q39E/V133E | |
| 21-59 | VH-CH1 | Q39K/S183E | VK-CH1 | Q38E/S183K | VK-CK | Q38E/V133K | VH-CK | Q39K/V133E | |
| 21-60 | VH-CH1 | Q39K/S183E | VK-CH1 | Q38K/S183K | VK-CK | Q38E/V133K | VH-CK | Q39E/V133E | |
| 21-61 | VH-CH1 | Q39E/S183E | VK-CH1 | Q38E/S183K | VK-CK | Q38K/V133K | VH-CK | Q39K/V133E | |
| 21-62 | VH-CH1 | Q39E/S183E | VK-CH1 | Q38K/S183K | VK-CK | Q38K/V133K | VH-CK | Q39E/V133E | |
| 21-63 | | | | | | | | | mAb |
| 21-64 | | | | | | | | | mAb |
| 21-65 | VH-CH1 | | VH-CH1 | | VK-CK | | | | |
| 21-66 | VH-CH1 | | VH-CH1 | | VK-CK | | | | |
| 21-67 | VH-CH1 | | VH-CH1 | | VK-CK | | | | |
| 21-68 | VH-CH1 | | VH-CH1 | | VK-CK | | | | |
| 21-69 | VH-CH1 | Q39K/S183E | VK-CH1 | Q38E/S183K | VK-CK | Q38E/V133K | VH-CK | Q39K/V133E | |
| 21-70 | VH-CH1 | Q39K/S183E | VK-CH1 | Q38K/S183K | VK-CK | Q38E/V133K | VH-CK | Q39E/V133E | |
| 21-71 | VH-CH1 | Q39E/S183E | VK-CH1 | Q38E/S183K | VK-CK | Q38K/V133K | VH-CK | Q39K/V133E | |
| 21-72 | VH-CH1 | Q39E/S183E | VK-CH1 | Q38K/S183K | VK-CK | Q38K/V133K | VH-CK | Q39E/V133E | |
| 21-73 | VH-CH1 | Q39K/S183E | VK-CH1 | Q38E/S183K | VK-CK | Q38E/V133K | VH-CK | Q39K/V133E | |
| 21-74 | VH-CH1 | Q39K/S183E | VK-CH1 | Q38K/S183K | VK-CK | Q38E/V133K | VH-CK | Q39E/V133E | |
| 21-75 | VH-CH1 | Q39E/S183E | VK-CH1 | Q38E/S183K | VK-CK | Q38K/V133K | VH-CK | Q39K/V133E | |
| 21-76 | VH-CH1 | Q39E/S183E | VK-CH1 | Q38K/S183K | VK-CK | Q38K/V133K | VH-CK | Q39E/V133E | |
| 21-77 | VH-CH1 | Q39K/S183E | VK-CH1 | Q38E/S183K | VK-CK | Q38E/V133K | VH-CK | Q39K/V133E | |
| 21-78 | VH-CH1 | Q39K/S183E | VK-CH1 | Q38K/S183K | VK-CK | Q38E/V133K | VH-CK | Q39E/V133E | |
| 21-79 | VH-CH1 | Q39E/S183E | VK-CH1 | Q38E/S183K | VK-CK | Q38K/V133K | VH-CK | Q39K/V133E | |
| 21-80 | VH-CH1 | Q39E/S183E | VK-CH1 | Q38K/S183K | VK-CK | Q38K/V133K | VH-CK | Q39E/V133E | |
| 21-81 | VH-CH1 | Q39K/S183E | VK-CH1 | Q38E/S183K | VK-CK | Q38E/V133K | VH-CK | Q39K/V133E | |
| 21-82 | VH-CH1 | Q39K/S183E | VK-CH1 | Q38K/S183K | VK-CK | Q38E/V133K | VH-CK | Q39E/V133E | |
| 21-83 | VH-CH1 | Q39E/S183E | VK-CH1 | Q38E/S183K | VK-CK | Q38K/V133K | VH-CK | Q39K/V133E | |
| 21-84 | VH-CH1 | Q39E/S183E | VK-CH1 | Q38K/S183K | VK-CK | Q38K/V133K | VH-CK | Q39E/V133E | |
| 21-85 | VH-CH1 | Q39K/S183E | VK-CH1 | Q38E/S183K | VK-CK | Q38E/V133K | VH-CK | Q39K/V133E | |
| 21-86 | VH-CH1 | Q39K/S183E | VK-CH1 | Q38K/S183K | VK-CK | Q38E/V133K | VH-CK | Q39E/V133E | |
| 21-87 | VH-CH1 | Q39E/S183E | VK-CH1 | Q38E/S183K | VK-CK | Q38K/V133K | VH-CK | Q39K/V133E | |
| 21-88 | VH-CH1 | Q39E/S183E | VK-CH1 | Q38K/S183K | VK-CK | Q38K/V133K | VH-CK | Q39E/V133E | |
| 21-89 | VH-CH1 | Q39K/S183E | VK-CH1 | Q38E/S183K | VK-CK | Q38E/V133K | VH-CK | Q39K/V133E | |
| 21-90 | VH-CH1 | Q39K/S183E | VK-CH1 | Q38K/S183K | VK-CK | Q38E/V133K | VH-CK | Q39E/V133E | |
| 21-91 | VH-CH1 | Q39E/S183E | VK-CH1 | Q38E/S183K | VK-CK | Q38K/V133K | VH-CK | Q39K/V133E | |
| 21-92 | VH-CH1 | Q39E/S183E | VK-CH1 | Q38K/S183K | VK-CK | Q38K/V133K | VH-CK | Q39E/V133E | |
| 21-93 | VH-CH1 | Q39K/S183E | VK-CH1 | Q38E/S183K | VK-CK | Q38E/V133K | VH-CK | Q39K/V133E | |
| 21-94 | VH-CH1 | Q39K/S183E | VK-CH1 | Q38K/S183K | VK-CK | Q38E/V133K | VH-CK | Q39E/V133E | |
| 21-95 | VH-CH1 | Q39E/S183E | VK-CH1 | Q38E/S183K | VK-CK | Q38K/V133K | VH-CK | Q39K/V133E | |
| 21-96 | VH-CH1 | Q39E/S183E | VK-CH1 | Q38K/S183K | VK-CK | Q38K/V133K | VH-CK | Q39E/V133E | |
| 21-97 | VH-CH1 | Q39K/S183E | VK-CH1 | Q38E/S183K | VK-CK | Q38E/V133K | VH-CK | Q39K/V133E | |
| 21-98 | VH-CH1 | Q39K/S183E | VK-CH1 | Q38K/S183K | VK-CK | Q38E/V133K | VH-CK | Q39E/V133E | |
| 21-99 | VH-CH1 | Q39E/S183E | VK-CH1 | Q38E/S183K | VK-CK | Q38K/V133K | VH-CK | Q39K/V133E | |
| 21-100 | VH-CH1 | Q39E/S183E | VK-CH1 | Q38K/S183K | VK-CK | Q38K/V133K | VH-CK | Q39E/V133E | |
| 21-101 | | | | | | | | | mAb |
| 21-102 | | | | | | | | | mAb |
| 21-103 | VH-CH1 | | VH-CH1 | | VK-CK | | | | |
| 21-104 | VH-CH1 | | VH-CH1 | | VK-CK | | | | |
| 21-105 | VH-CH1 | | VH-CH1 | | VK-CK | | | | |
| 21-106 | VH-CH1 | | VH-CH1 | | VK-CK | | | | |
| 21-107 | VH-CH1 | Q39K/S183E | VK-CH1 | Q38E/S183K | VK-CK | Q38E/V133K | VH-CK | Q39K/V133E | |
| 21-108 | VH-CH1 | Q39K/S183E | VK-CH1 | Q38K/S183K | VK-CK | Q38E/V133K | VH-CK | Q39E/V133E | |
| 21-109 | VH-CH1 | Q39K/S183E | VK-CH1 | Q38E/S183K | VK-CK | Q38E/V133K | VH-CK | Q39K/V133E | |
| 21-110 | VH-CH1 | Q39K/S183E | VK-CH1 | Q38K/S183K | VK-CK | Q38E/V133K | VH-CK | Q39E/V133E | |
| 21-111 | VH-CH1 | Q39K/S183E | VK-CH1 | Q38E/S183K | VK-CK | Q38E/V133K | VH-CK | Q39K/V133E | |
| 21-112 | VH-CH1 | Q39K/S183E | VK-CH1 | Q38K/S183K | VK-CK | Q38E/V133K | VH-CK | Q39E/V133E | |
| 21-113 | VH-CH1 | Q39K/S183E | VK-CH1 | Q38E/S183K | VK-CK | Q38E/V133K | VH-CK | Q39K/V133E | |
| 21-114 | VH-CH1 | Q39K/S183E | VK-CH1 | Q38K/S183K | VK-CK | Q38E/V133K | VH-CK | Q39E/V133E | |
| 21-115 | VH-CH1 | Q39K/S183E | VK-CH1 | Q38E/S183K | VK-CK | Q38E/V133K | VH-CK | Q39K/V133E | |
| 21-116 | VH-CH1 | Q39K/S183E | VK-CH1 | Q38K/S183K | VK-CK | Q38E/V133K | VH-CK | Q39E/V133E | |
| 21-117 | VH-CH1 | Q39K/S183E | VK-CH1 | Q38E/S183K | VK-CK | Q38E/V133K | VH-CK | Q39K/V133E | |
| 21-118 | VH-CH1 | Q39K/S183E | VK-CH1 | Q38K/S183K | VK-CK | Q38E/V133K | VH-CK | Q39E/V133E | |
| 21-119 | VH-CH1 | Q39K/S183E | VK-CH1 | Q38E/S183K | VK-CK | Q38E/V133K | VH-CK | Q39K/V133E | |
| 21-120 | VH-CH1 | Q39K/S183E | VK-CH1 | Q38K/S183K | VK-CK | Q38E/V133K | VH-CK | Q39E/V133E | |
| 21-121 | VH-CH1 | Q39K/S183E | VK-CH1 | Q38E/S183K | VK-CK | Q38E/V133K | VH-CK | Q39K/V133E | |
| 21-122 | VH-CH1 | Q39K/S183E | VK-CH1 | Q38K/S183K | VK-CK | Q38E/V133K | VH-CK | Q39E/V133E | |
| 21-123 | VH-CH1 | | | | VK-CK | | | | Fc |
| | | | | | | | | | chain |
| 21-124 | VH-CH1 | | | | VK-CK | | | | Fc |
| | | | | | | | | | chain |
| 21-125 | VH-CH1 | | | | VK-CK | | | | Fc |
| | | | | | | | | | chain |
| 21-126 | VH-CH1 | | | | VK-CK | | | | Fc |
| | | | | | | | | | chain |
| 21-127 | VH-CH1 | | | | VK-CK | | | | Fc |
| | | | | | | | | | chain |
| 21-128 | VH-CH1 | | | | VK-CK | | | | Fc |
| | | | | | | | | | chain |
| 21-129 | VH-CH1 | | | | VK-CK | | | | Fc |
| | | | | | | | | | chain |
| 21-130 | VH-CH1 | | | | VK-CK | | | | Fc |
| | | | | | | | | | chain |

### Example 24—Production of Control Antibodies and Fc Fusion Proteins

[1351] Twenty-six antibodies and Fc fusion proteins are produced according to Table 58 to evaluate their relative effectiveness to tetrahedral antibodies.

TABLE 58

| Protein | | | | | | |
|---|---|---|---|---|---|---|
| ID | Antibody Name | Target | H1 Chain | H2 Chain | L1 Chain | L2 Chain |
| 22-01 | Adintrevimab | SARS-CoV-2 | SEQ ID NO: 4830 | | SEQ ID NO: 4849 | |
| 22-02 | Tafasitamab-cxix | CD19 | SEQ ID NO: 4831 | | SEQ ID NO: 4850 | |
| 22-03 | M971 | CD22 | SEQ ID NO: 4832 | | SEQ ID NO: 4851 | |
| 22-04 | M971/SIDE | CD22 | SEQ ID NO: 4833 | | SEQ ID NO: 4851 | |
| 22-05 | Ofatumumab | CD20 | SEQ ID NO: 4834 | | SEQ ID NO: 4852 | |
| 22-06 | Ocrelizumab | CD20 | SEQ ID NO: 4835 | | SEQ ID NO: 4853 | |
| 22-07 | Mosunetuzumab | CD20/CD3 | SEQ ID NO: 4836 | SEQ ID NO: 4837 | SEQ ID NO: 4854 | SEQ ID NO: 4855 |
| 22-08 | Etanercept | INF-α | SEQ ID NO: 4838 | | | |
| 22-09 | Adalimumab | INF-α | SEQ ID NO: 4839 | | SEQ ID NO: 4856 | |
| 22-10 | Vedolizumab | α4β7 | SEQ ID NO: 4840 | | SEQ ID NO: 4857 | |
| 22-11 | Ustekinumab | IL-12/23 | SEQ ID NO: 4841 | | SEQ ID NO: 4858 | |
| 22-12 | Secukinumab | IL-17A | SEQ ID NO: 4842 | | SEQ ID NO: 4859 | |
| 22-13 | Pembrolizumab | PD-1 | SEQ ID NO: 4843 | | SEQ ID NO: 4860 | |
| 22-14 | Ipilimumab | CTLA-4 | SEQ ID NO: 4844 | | SEQ ID NO: 4861 | |
| 22-15 | 388D4-3 | PD-1 | SEQ ID NO: 4845 | | SEQ ID NO: 4862 | |
| 22-16 | 244C8-2 | PD-1 | SEQ ID NO: 4846 | | SEQ ID NO: 4863 | |
| 22-17 | Atezolizumab | PD-L1 | SEQ ID NO: 4847 | | SEQ ID NO: 4864 | |
| 22-18 | B6055 | PD-L1 | SEQ ID NO: 4848 | | SEQ ID NO: 4865 | |
| 22-19 | Trastuzumab | ERBB2 | SEQ ID NO: 5091 | | SEQ ID NO: 5099 | |
| 22-20 | Cetuximab | EGFR | SEQ ID NO: 5092 | | SEQ IDNO: 5100 | |
| 22-21 | Pertuzumab | ERBB2 | SEQ ID NO: 5093 | | SEQ IDNO: 5101 | |
| 22-22 | Cergutuzumab | CEACAM5 | SEQ ID NO: 5094 | | SEQ IDNO: 5102 | |
| 22-23 | Bevacizumab | VEGF-A | SEQ ID NO: 5095 | | SEQ IDNO: 5103 | |
| 22-24 | Ramucirumab | VEGFR2 | SEQ ID NO: 5096 | | SEQ IDNO: 5104 | |
| 22-25 | Ontorpacept | CD47 | SEQ ID NO: 5097 | | | |
| 22-26 | Efmarodocokin alfa | IL-22R | SEQ ID NO: 5098 | | | |

### Example 25—Tetravalent, Bispecific Tetrahedral Antibodies Comprising Two Distinct Fabs or Cytokine Receptors that Specifically Bind Pro-Inflammatory Cytokines and Integrins

[1352] Tetrahedral antibodies were designed, expressed, and evaluated for their ability to neutralize pro-inflammatory cytokines and adhesion molecules for the treatment of inflammation and autoimmune disease. This series of bispecific constructs employ VH and VL regions from adalimumab (anti-TNFα), ustekinumab (anti-IL-12/23), secukinumab (anti-LI-17A) and vedolizumab (anti-α4b7 integrin), and portions of the TNFR1B receptor extracellular domain (Tables 59, 60). Two distinct configurations were evaluated (Table 61). In the first configuration, a first type of Fab is placed in D3/D4, and a second type of Fab is placed in D5/D6. The various Fab pairings are adalimumab/ustekinumab, adalimumab/secukinumab, ustekinumab/secukinumab and adalimumab/vedolizumab, each placed in either orientation with respect to D3/D4 and D5/D6. In the second configuration, the TNFR1B receptor extracellular domain is placed in D3/D4, and a Fab-Fc fusion, Fab/c, is placed in D1/D2. The various pairings are TNFR1B/adalimumab-Fab/c, TNFR1B/secukinumab-Fab/c, TNFR1B/secukinumab-Fab/c and TNFR1B/vedolizumab-Fab/c. To optimize correct VH/VL pairing and to minimize VH/VL mispairing, V region exchange is combined with four different sets of charge pairs to ensure correct pairing of heavy and light chain V regions (Table 62). Additionally, to further facilitate purification of the correctly paired product by Protein A chromatography, the H1 chain incorporates the H435R/Y436F substitution. The constructs are then evaluated for their structural bispecificity by intact mass spectrometry as described in Example 18, and for their functional bispecificity using a variety of in vitro binding assays, cytokine neutralization assays, adhesion inhibition assays, and in vivo inflammatory and autoimmune disease efficacy models, known to one skilled in the art.

TABLE 59

| Protein | | | | | |
|---|---|---|---|---|---|
| ID | H1 Chain | H2 Chain | L1 Chain | L2 Chain | Fc chain |
| 23-01 | SEQ ID NO: 4866 | SEQ ID NO: 4867 | SEQ ID NO: 4894 | SEQ ID NO: 4895 | |
| 23-02 | SEQ ID NO: 4866 | SEQ ID NO: 4868 | SEQ ID NO: 4894 | SEQ ID NO: 4896 | |
| 23-03 | SEQ ID NO: 4869 | SEQ ID NO: 4867 | SEQ ID NO: 4897 | SEQ ID NO: 4895 | |
| 23-04 | SEQ ID NO: 4869 | SEQ ID NO: 4868 | SEQ ID NO: 4897 | SEQ ID NO: 4896 | |
| 23-05 | SEQ ID NO: 4870 | SEQ ID NO: 4871 | SEQ ID NO: 4898 | SEQ ID NO: 4899 | |
| 23-06 | SEQ ID NO: 4870 | SEQ ID NO: 4872 | SEQ ID NO: 4898 | SEQ ID NO: 4900 | |
| 23-07 | SEQ ID NO: 4873 | SEQ ID NO: 4871 | SEQ ID NO: 4901 | SEQ ID NO: 4899 | |
| 23-08 | SEQ ID NO: 4873 | SEQ ID NO: 4872 | SEQ ID NO: 4901 | SEQ ID NO: 4900 | |
| 23-09 | SEQ ID NO: 4866 | SEQ ID NO: 4874 | SEQ ID NO: 4894 | SEQ ID NO: 4902 | |
| 23-10 | SEQ ID NO: 4866 | SEQ ID NO: 4875 | SEQ ID NO: 4894 | SEQ ID NO: 4903 | |
| 23-11 | SEQ ID NO: 4869 | SEQ ID NO: 4874 | SEQ ID NO: 4897 | SEQ ID NO: 4902 | |
| 23-12 | SEQ ID NO: 4869 | SEQ ID NO: 4875 | SEQ ID NO: 4897 | SEQ ID NO: 4903 | |
| 23-13 | SEQ ID NO: 4876 | SEQ ID NO: 4871 | SEQ ID NO: 4904 | SEQ ID NO: 4899 | |
| 23-14 | SEQ ID NO: 4876 | SEQ ID NO: 4872 | SEQ ID NO: 4904 | SEQ ID NO: 4900 | |
| 23-15 | SEQ ID NO: 4877 | SEQ ID NO: 4871 | SEQ ID NO: 4905 | SEQ ID NO: 4899 | |
| 23-16 | SEQ ID NO: 4877 | SEQ ID NO: 4872 | SEQ ID NO: 4905 | SEQ ID NO: 4900 | |
| 23-17 | SEQ ID NO: 4870 | SEQ ID NO: 4874 | SEQ ID NO: 4898 | SEQ ID NO: 4902 | |
| 23-18 | SEQ ID NO: 4870 | SEQ ID NO: 4875 | SEQ ID NO: 4898 | SEQ ID NO: 4903 | |
| 23-19 | SEQ ID NO: 4873 | SEQ ID NO: 4874 | SEQ ID NO: 4901 | SEQ ID NO: 4902 | |
| 23-20 | SEQ ID NO: 4873 | SEQ ID NO: 4875 | SEQ ID NO: 4901 | SEQ ID NO: 4903 | |
| 23-21 | SEQ ID NO: 4876 | SEQ ID NO: 4867 | SEQ ID NO: 4904 | SEQ ID NO: 4895 | |
| 23-22 | SEQ ID NO: 4876 | SEQ ID NO: 4868 | SEQ ID NO: 4904 | SEQ ID NO: 4896 | |
| 23-23 | SEQ ID NO: 4877 | SEQ ID NO: 4867 | SEQ ID NO: 4905 | SEQ ID NO: 4895 | |
| 23-24 | SEQ ID NO: 4877 | SEQ ID NO: 4868 | SEQ ID NO: 4905 | SEQ ID NO: 4896 | |
| 23-25 | SEQ ID NO: 4878 | SEQ ID NO: 4879 | SEQ ID NO: 4894 | SEQ ID NO: 4906 | |
| 23-26 | SEQ ID NO: 4878 | SEQ ID NO: 4880 | SEQ ID NO: 4894 | SEQ ID NO: 4907 | |
| 23-27 | SEQ ID NO: 4881 | SEQ ID NO: 4879 | SEQ ID NO: 4897 | SEQ ID NO: 4906 | |
| 23-28 | SEQ ID NO: 4881 | SEQ ID NO: 4880 | SEQ ID NO: 4897 | SEQ ID NO: 4907 | |
| 23-29 | SEQ ID NO: 4882 | SEQ ID NO: 4883 | SEQ ID NO: 4908 | SEQ ID NO: 4899 | |
| 23-30 | SEQ ID NO: 4882 | SEQ ID NO: 4884 | SEQ ID NO: 4908 | SEQ ID NO: 4900 | |
| 23-31 | SEQ ID NO: 4885 | SEQ ID NO: 4883 | SEQ ID NO: 4909 | SEQ ID NO: 4899 | |
| 23-32 | SEQ ID NO: 4885 | SEQ ID NO: 4884 | SEQ ID NO: 4909 | SEQ ID NO: 4900 | |
| 23-33 | SEQ ID NO: 4886 | | SEQ ID NO: 4910 | | SEQ ID NO: 4918 |
| 23-34 | SEQ ID NO: 4887 | | SEQ ID NO: 4911 | | SEQ ID NO: 4918 |
| 23-35 | SEQ ID NO: 4888 | | SEQ ID NO: 4912 | | SEQ ID NO: 4918 |
| 23-36 | SEQ ID NO: 4889 | | SEQ ID NO: 4913 | | SEQ ID NO: 4918 |
| 23-37 | SEQ ID NO: 4890 | | SEQ ID NO: 4914 | | SEQ ID NO: 4918 |
| 23-38 | SEQ ID NO: 4891 | | SEQ ID NO: 4915 | | SEQ ID NO: 4918 |
| 23-39 | SEQ ID NO: 4892 | | SEQ ID NO: 4916 | | SEQ ID NO: 4919 |
| 23-40 | SEQ ID NO: 4893 | | SEQ ID NO: 4917 | | SEQ ID NO: 4919 |

TABLE 60

| Protein | | | | | | | | |
|---|---|---|---|---|---|---|---|---|
| ID | D1-Fc | D1-Fab/c | D5-Fab | D4-Fab | D3-Fab | D6-Fab | D2-Fab/c | D2-Fc |
| 23-01 | wild-type | | Ustekinum | Adalimum | Adalimum | Ustekinum | | wild-type |
| 23-02 | wild-type | | Ustekinum | Adalimum | Adalimum | Ustekinum | | wild-type |
| 23-03 | wild-type | | Ustekinum | Adalimum | Adalimum | Ustekinum | | wild-type |
| 23-04 | wild-type | | Ustekinum | Adalimum | Adalimum | Ustekinum | | wild-type |
| 23-05 | wild-type | | Adalimum | Ustekinum | Ustekinum | Adalimum | | wild-type |
| 23-06 | wild-type | | Adalimum | Ustekinum | Ustekinum | Adalimum | | wild-type |
| 23-07 | wild-type | | Adalimum | Ustekinum | Ustekinum | Adalimum | | wild-type |
| 23-08 | wild-type | | Adalimum | Ustekinum | Ustekinum | Adalimum | | wild-type |
| 23-09 | wild-type | | Secukinum | Adalimum | Adalimum | Secukinum | | wild-type |
| 23-10 | wild-type | | Secukinum | Adalimum | Adalimum | Secukinum | | wild-type |
| 23-11 | wild-type | | Secukinum | Adalimum | Adalimum | Secukinum | | wild-type |
| 23-12 | wild-type | | Secukinum | Adalimum | Adalimum | Secukinum | | wild-type |
| 23-13 | wild-type | | Adalimum | Secukinum | Secukinum | Adalimum | | wild-type |
| 23-14 | wild-type | | Adalimum | Secukinum | Secukinum | Adalimum | | wild-type |
| 23-15 | wild-type | | Adalimum | Secukinum | Secukinum | Adalimum | | wild-type |
| 23-16 | wild-type | | Adalimum | Secukinum | Secukinum | Adalimum | | wild-type |
| 23-17 | wild-type | | Secukinum | Ustekinum | Ustekinum | Secukinum | | wild-type |
| 23-18 | wild-type | | Secukinum | Ustekinum | Ustekinum | Secukinum | | wild-type |
| 23-19 | wild-type | | Secukinum | Ustekinum | Ustekinum | Secukinum | | wild-type |
| 23-20 | wild-type | | Secukinum | Ustekinum | Ustekinum | Secukinum | | wild-type |
| 23-21 | wild-type | | Ustekinum | Secukinum | Secukinum | Ustekinum | | wild-type |
| 23-22 | wild-type | | Ustekinum | Secukinum | Secukinum | Ustekinum | | wild-type |
| 23-23 | wild-type | | Ustekinum | Secukinum | Secukinum | Ustekinum | | wild-type |
| 23-24 | wild-type | | Ustekinum | Secukinum | Secukinum | Ustekinum | | wild-type |
| 23-25 | L234A/L23 | | Vedolizum | Adalimum | Adalimum | Vedolizum | | L234A/L23 |
| 23-26 | L234A/L23 | | Vedolizum | Adalimum | Adalimum | Vedolizum | | L234A/L23 |
| 23-27 | L234A/L23 | | Vedolizum | Adalimum | Adalimum | Vedolizum | | L234A/L23 |
| 23-28 | L234A/L23 | | Vedolizum | Adalimum | Adalimum | Vedolizum | | L234A/L23 |
| 23-29 | L234A/L23 | | Adalimum | Vedolizum | Vedolizum | Adalimum | | L234A/L23 |
| 23-30 | L234A/L23 | | Adalimum | Vedolizum | Vedolizum | Adalimum | | L234A/L23 |
| 23-31 | L234A/L23 | | Adalimum | Vedolizum | Vedolizum | Adalimum | | L234A/L23 |
| 23-32 | L234A/L23 | | Adalimum | Vedolizum | Vedolizum | Adalimum | | L234A/L23 |
| 23-33 | wild-type | Adalimum | | Etanercept | Etanercept | | Adalimum | wild-type |
| 23-34 | wild-type | Adalimum | | Etanercept | Etanercept | | Adalimum | wild-type |
| 23-35 | wild-type | Ustekinum | | Etanercept | Etanercept | | Ustekinum | wild-type |
| 23-36 | wild-type | Ustekinum | | Etanercept | Etanercept | | Ustekinum | wild-type |
| 23-37 | wild-type | Secukinum | | Etanercept | Etanercept | | Secukinum | wild-type |
| 23-38 | wild-type | Secukinum | | Etanercept | Etanercept | | Secukinum | wild-type |
| 23-39 | L234A/L23 | Vedolizum | | Etanercept | Etanercept | | Vedolizum | L234A/L23 |
| 23-40 | L234A/L23 | Vedolizum | | Etanercept | Etanercept | | Vedolizum | L234A/L23 |

TABLE 61

| Protein | D1-Fc | D1-Fab/c | D5-Fab | D4 | D3 | D6-Fab | D2-Fab/c | D2-Fc |
|---|---|---|---|---|---|---|---|---|
| ID | Specificity | Specificity | Specificity | Specificity | Specificity | Specificity | Specificity | Specificity |
| 23-01 | FcgR | | IL-12/23 | TNFα | TNFα | IL-12/23 | | FcgR |
| 23-02 | FcgR | | IL-12/23 | TNFα | TNFα | IL-12/23 | | FcgR |
| 23-03 | FcgR | | IL-12/23 | TNFα | TNFα | IL-12/23 | | FcgR |
| 23-04 | FcgR | | IL-12/23 | TNFα | TNFα | IL-12/23 | | FcgR |
| 23-05 | FcgR | | TNFα | IL-12/23 | IL-12/23 | TNFα | | FcgR |
| 23-06 | FcgR | | TNFα | IL-12/23 | IL-12/23 | TNFα | | FcgR |
| 23-07 | FcgR | | TNFα | IL-12/23 | IL-12/23 | TNFα | | FcgR |
| 23-08 | FcgR | | TNFα | IL-12/23 | IL-12/23 | TNFα | | FcgR |
| 23-09 | FcgR | | IL-17A | TNFα | TNFα | IL-17A | | FcgR |
| 23-10 | FcgR | | IL-17A | TNFα | TNFα | IL-17A | | FcgR |
| 23-11 | FcgR | | IL-17A | TNFα | TNFα | IL-17A | | FcgR |
| 23-12 | FcgR | | IL-17A | TNFα | TNFα | IL-17A | | FcgR |
| 23-13 | FcgR | | TNFα | IL-17A | IL-17A | TNFα | | FcgR |
| 23-14 | FcgR | | TNFα | IL-17A | IL-17A | TNFα | | FcgR |
| 23-15 | FcgR | | TNFα | IL-17A | IL-17A | TNFα | | FcgR |
| 23-16 | FcgR | | TNFα | IL-17A | IL-17A | TNFα | | FcgR |
| 23-17 | FcgR | | IL-17A | IL-12/23 | IL-12/23 | IL-17A | | FcgR |
| 23-18 | FcgR | | IL-17A | IL-12/23 | IL-12/23 | IL-17A | | FcgR |
| 23-19 | FcgR | | IL-17A | IL-12/23 | IL-12/23 | IL-17A | | FcgR |
| 23-20 | FcgR | | IL-17A | IL-12/23 | IL-12/23 | IL-17A | | FcgR |
| 23-21 | FcgR | | IL-12/23 | IL-17A | IL-17A | IL-12/23 | | FcgR |
| 23-22 | FcgR | | IL-12/23 | IL-17A | IL-17A | IL-12/23 | | FcgR |
| 23-23 | FcgR | | IL-12/23 | IL-17A | IL-17A | IL-12/23 | | FcgR |
| 23-24 | FcgR | | IL-12/23 | IL-17A | IL-17A | IL-12/23 | | FcgR |
| 23-25 | FcgR silent | | α4β7 | TNFα | TNFα | α4β7 | | FcgR silent |
| 23-26 | FcgR silent | | α4β7 | TNFα | TNFα | α4β7 | | FcgR silent |
| 23-27 | FcgR silent | | α4β7 | TNFα | TNFα | α4β7 | | FcgR silent |
| 23-28 | FcgR silent | | α4β7 | TNFα | TNFα | α4β7 | | FcgR silent |
| 23-29 | FcgR silent | | TNFα | α4β7 | α4β7 | TNFα | | FcgR silent |
| 23-30 | FcgR silent | | TNFα | α4β7 | α4β7 | TNFα | | FcgR silent |
| 23-31 | FcgR silent | | TNFα | α4β7 | α4β7 | TNFα | | FcgR silent |
| 23-32 | FcgR silent | | TNFα | α4β7 | α4β7 | TNFα | | FcgR silent |
| 23-33 | FcgR | TNFα | | TNFα | TNFα | | TNFα | FcgR |
| 23-34 | FcgR | TNFα | | TNFα | TNFα | | TNFα | FcgR |
| 23-35 | FcgR | IL-12/23 | | TNFα | TNFα | | IL-12/23 | FcgR |
| 23-36 | FcgR | IL-12/23 | | TNFα | TNFα | | IL-12/23 | FcgR |
| 23-37 | FcgR | IL-17A | | TNFα | TNFα | | IL-17A | FcgR |
| 23-38 | FcgR | IL-17A | | TNFα | TNFα | | IL-17A | FcgR |
| 23-39 | FcgR silent | α4β7 | | TNFα | TNFα | | α4β7 | FcgR silent |
| 23-40 | FcgR silent | α4β7 | | TNFα | TNFα | | α4β7 | FcgR silent |

TABLE 62

| | H1 Chain | | H2 Chain | | L1 Chain | | L2 Chain | |
|---|---|---|---|---|---|---|---|---|
| Protein | V region | Amino acid | V region | Amino acid | V region | Amino acid | V region | Amino acid |
| ID | type | Substitutions | Type | Substitutions | Type | Substitutions | Type | Substitutions |
| 23-01 | VH-CH1 | Q39K/S183E | VK-CH1 | Q38E/S183K | VK-CK | Q38E/V133K | VH-CK | Q39K/V133E |
| 23-02 | VH-CH1 | Q39K/S183E | VK-CH1 | Q38K/S183K | VK-CK | Q38E/V133K | VH-CK | Q39E/V133E |
| 23-03 | VH-CH1 | Q39E/S183E | VK-CH1 | Q38E/S183K | VK-CK | Q38K/V133K | VH-CK | Q39K/V133E |
| 23-04 | VH-CH1 | Q39E/S183E | VK-CH1 | Q38K/S183K | VK-CK | Q38K/V133K | VH-CK | Q39E/V133E |
| 23-05 | VH-CH1 | Q39K/S183E | VK-CH1 | Q38E/S183K | VK-CK | Q38E/V133K | VH-CK | Q39K/V133E |
| 23-06 | VH-CH1 | Q39K/S183E | VK-CH1 | Q38K/S183K | VK-CK | Q38E/V133K | VH-CK | Q39E/V133E |
| 23-07 | VH-CH1 | Q39E/S183E | VK-CH1 | Q38E/S183K | VK-CK | Q38K/V133K | VH-CK | Q39K/V133E |
| 23-08 | VH-CH1 | Q39E/S183E | VK-CH1 | Q38K/S183K | VK-CK | Q38K/V133K | VH-CK | Q39E/V133E |
| 23-09 | VH-CH1 | Q39K/S183E | VK-CH1 | Q38E/S183K | VK-CK | Q38E/V133K | VH-CK | Q39K/V133E |
| 23-10 | VH-CH1 | Q39K/S183E | VK-CH1 | Q38K/S183K | VK-CK | Q38E/V133K | VH-CK | Q39E/V133E |
| 23-11 | VH-CH1 | Q39E/S183E | VK-CH1 | Q38E/S183K | VK-CK | Q38K/V133K | VH-CK | Q39K/V133E |
| 23-12 | VH-CH1 | Q39E/S183E | VK-CH1 | Q38K/S183K | VK-CK | Q38K/V133K | VH-CK | Q39E/V133E |
| 23-13 | VH-CH1 | Q39K/S183E | VK-CH1 | Q38E/S183K | VK-CK | Q38E/V133K | VH-CK | Q39K/V133E |
| 23-14 | VH-CH1 | Q39K/S183E | VK-CH1 | Q38K/S183K | VK-CK | Q38E/V133K | VH-CK | Q39E/V133E |
| 23-15 | VH-CH1 | Q39E/S183E | VK-CH1 | Q38E/S183K | VK-CK | Q38K/V133K | VH-CK | Q39K/V133E |
| 23-16 | VH-CH1 | Q39E/S183E | VK-CH1 | Q38K/S183K | VK-CK | Q38K/V133K | VH-CK | Q39E/V133E |
| 23-17 | VH-CH1 | Q39K/S183E | VK-CH1 | Q38E/S183K | VK-CK | Q38E/V133K | VH-CK | Q39K/V133E |
| 23-18 | VH-CH1 | Q39K/S183E | VK-CH1 | Q38K/S183K | VK-CK | Q38E/V133K | VH-CK | Q39E/V133E |
| 23-19 | VH-CH1 | Q39E/S183E | VK-CH1 | Q38E/S183K | VK-CK | Q38K/V133K | VH-CK | Q39K/V133E |
| 23-20 | VH-CH1 | Q39E/S183E | VK-CH1 | Q38K/S183K | VK-CK | Q38K/V133K | VH-CK | Q39E/V133E |
| 23-21 | VH-CH1 | Q39K/S183E | VK-CH1 | Q38E/S183K | VK-CK | Q38E/V133K | VH-CK | Q39K/V133E |
| 23-22 | VH-CH1 | Q39K/S183E | VK-CH1 | Q38K/S183K | VK-CK | Q38E/V133K | VH-CK | Q39E/V133E |
| 23-23 | VH-CH1 | Q39E/S183E | VK-CH1 | Q38E/S183K | VK-CK | Q38K/V133K | VH-CK | Q39K/V133E |
| 23-24 | VH-CH1 | Q39E/S183E | VK-CH1 | Q38K/S183K | VK-CK | Q38K/V133K | VH-CK | Q39E/V133E |
| 23-25 | VH-CH1 | Q39K/S183E | VK-CH1 | Q38E/S183K | VK-CK | Q38E/V133K | VH-CK | Q39K/V133E |
| 23-26 | VH-CH1 | Q39K/S183E | VK-CH1 | Q38K/S183K | VK-CK | Q38E/V133K | VH-CK | Q39E/V133E |
| 23-27 | VH-CH1 | Q39E/S183E | VK-CH1 | Q38E/S183K | VK-CK | Q38K/V133K | VH-CK | Q39K/V133E |
| 23-28 | VH-CH1 | Q39E/S183E | VK-CH1 | Q38K/S183K | VK-CK | Q38K/V133K | VH-CK | Q39E/V133E |
| 23-29 | VH-CH1 | Q39K/S183E | VK-CH1 | Q38E/S183K | VK-CK | Q38E/V133K | VH-CK | Q39K/V133E |
| 23-30 | VH-CH1 | Q39K/S183E | VK-CH1 | Q38K/S183K | VK-CK | Q38E/V133K | VH-CK | Q39E/V133E |
| 23-31 | VH-CH1 | Q39E/S183E | VK-CH1 | Q38E/S183K | VK-CK | Q38K/V133K | VH-CK | Q39K/V133E |
| 23-32 | VH-CH1 | Q39E/S183E | VK-CH1 | Q38K/S183K | VK-CK | Q38K/V133K | VH-CK | Q39E/V133E |
| 23-33 | VH-CH1 | | | | VK-CK | | | |
| 23-34 | VK-CH1 | | | | VH-CK | | | |
| 23-35 | VH-CH1 | | | | VK-CK | | | |
| 23-36 | VK-CH1 | | | | VH-CK | | | |
| 23-37 | VH-CH1 | | | | VK-CK | | | |
| 23-38 | VK-CH1 | | | | VH-CK | | | |
| 23-39 | VH-CH1 | | | | VK-CK | | | |
| 23-40 | VK-CH1 | | | | VH-CK | | | |

### Example 26—Trivalent/Tetravalent, Bispecific Tetrahedral Antibodies Comprising Two Distinct Fabs that Specifically Bind PD-1 and CTLA-4, or PD-1 Biparatopically

[1353] Tetrahedral antibodies were designed, expressed, and evaluated for their ability to act as checkpoint inhibitors for the treatment of cancer and other disease. This series of bispecific constructs employ VH and VL regions from pembrolizumab (anti-PD-1), ipilimumab (anti-CTLA-4), 388D4 (anti-PD-1) and 244C8 (anti-PD-1) (Tables 63, 64). The epitope recognized by 388D4, an orthostatic inhibitor of PD-1, overlaps with that of pembrolizumab, while the epitope recognized by 244C8, an allosteric inhibitor of PD-1, is at a distinct site. The various Fab pairings are pembrolizumab/ipilimumab, 388D4/ipilimumab, and 388D4/244C8, each placed in either orientation with respect to D3/D4 and D5/D6. Two tetrahedral antibody configurations were employed (Table 65). In the first configuration, the anti-PD-1 Fab domain is placed in either of D3/D4 or D5/D6 (bivalent), and the CTLA-4 targeting Fab domain or second anti-PD-L1 Fab domain is placed in the other of D5/D6 or D3/D4 (bivalent). In the second configuration, the anti-PD-1 Fab domain is placed in D3/D4 (bivalent) and the CTLA-4 targeting Fab domain is placed in D6 (monovalent). To optimize correct VH/VL pairing and to minimize VH/VL mispairing, V region exchange is combined with four different sets of charge pairs to ensure correct pairing of heavy and light chain V regions (Table 66). Additionally, to further facilitate purification of the correctly paired product by Protein A chromatography, the H1 chain incorporates the H435R/Y436F substitution. The constructs are then evaluated for their structural bispecificity by intact mass spectrometry as described in Example 18, and for their functional bispecificity using a variety of in vitro binding assays, checkpoint inhibition assays, and in vivo cancer and related disease efficacy models, known to one skilled in the art.

TABLE 63

| Protein | | | | | |
|---|---|---|---|---|---|
| ID | H1 Chain | H2 Chain | L1 Chain | L2 Chain | Fc chain |
| 24-01 | SEQ ID NO: 4920 | SEQ ID NO: 4921 | SEQ ID NO: 4938 | SEQ ID NO: 4939 | |
| 24-02 | SEQ ID NO: 4920 | SEQ ID NO: 4922 | SEQ ID NO: 4938 | SEQ ID NO: 4940 | |
| 24-03 | SEQ ID NO: 4923 | SEQ ID NO: 4921 | SEQ ID NO: 4941 | SEQ ID NO: 4939 | |
| 24-04 | SEQ ID NO: 4923 | SEQ ID NO: 4922 | SEQ ID NO: 4941 | SEQ ID NO: 4940 | |
| 24-05 | SEQ ID NO: 4920 | SEQ ID NO: 4924 | SEQ ID NO: 4938 | SEQ ID NO: 4939 | SEQ ID NO: 4954 |
| 24-06 | SEQ ID NO: 4920 | SEQ ID NO: 4925 | SEQ ID NO: 4938 | SEQ ID NO: 4940 | SEQ ID NO: 4954 |
| 24-07 | SEQ ID NO: 4923 | SEQ ID NO: 4924 | SEQ ID NO: 4941 | SEQ ID NO: 4939 | SEQ ID NO: 4954 |
| 24-08 | SEQ ID NO: 4923 | SEQ ID NO: 4925 | SEQ ID NO: 4941 | SEQ ID NO: 4940 | SEQ ID NO: 4954 |
| 24-09 | SEQ ID NO: 4926 | SEQ ID NO: 4927 | SEQ ID NO: 4942 | SEQ ID NO: 4943 | |
| 24-10 | SEQ ID NO: 4926 | SEQ ID NO: 4928 | SEQ ID NO: 4942 | SEQ ID NO: 4944 | |
| 24-11 | SEQ ID NO: 4929 | SEQ ID NO: 4927 | SEQ ID NO: 4945 | SEQ ID NO: 4943 | |
| 24-12 | SEQ ID NO: 4929 | SEQ ID NO: 4928 | SEQ ID NO: 4945 | SEQ ID NO: 4944 | |
| 24-13 | SEQ ID NO: 4930 | SEQ ID NO: 4921 | SEQ ID NO: 4946 | SEQ ID NO: 4939 | |
| 24-14 | SEQ ID NO: 4930 | SEQ ID NO: 4922 | SEQ ID NO: 4946 | SEQ ID NO: 4940 | |
| 24-15 | SEQ ID NO: 4931 | SEQ ID NO: 4921 | SEQ ID NO: 4947 | SEQ ID NO: 4939 | |
| 24-16 | SEQ ID NO: 4931 | SEQ ID NO: 4922 | SEQ ID NO: 4947 | SEQ ID NO: 4940 | |
| 24-17 | SEQ ID NO: 4930 | SEQ ID NO: 4924 | SEQ ID NO: 4946 | SEQ ID NO: 4939 | SEQ ID NO: 4954 |
| 24-18 | SEQ ID NO: 4930 | SEQ ID NO: 4925 | SEQ ID NO: 4946 | SEQ ID NO: 4940 | SEQ ID NO: 4954 |
| 24-19 | SEQ ID NO: 4931 | SEQ ID NO: 4924 | SEQ ID NO: 4947 | SEQ ID NO: 4939 | SEQ ID NO: 4954 |
| 24-20 | SEQ ID NO: 4931 | SEQ ID NO: 4925 | SEQ ID NO: 4947 | SEQ ID NO: 4940 | SEQ ID NO: 4954 |
| 24-21 | SEQ ID NO: 4926 | SEQ ID NO: 4932 | SEQ ID NO: 4942 | SEQ ID NO: 4948 | |
| 24-22 | SEQ ID NO: 4926 | SEQ ID NO: 4933 | SEQ ID NO: 4942 | SEQ ID NO: 4949 | |
| 24-23 | SEQ ID NO: 4929 | SEQ ID NO: 4932 | SEQ ID NO: 4945 | SEQ ID NO: 4948 | |
| 24-24 | SEQ ID NO: 4929 | SEQ ID NO: 4933 | SEQ ID NO: 4945 | SEQ ID NO: 4949 | |
| 24-25 | SEQ ID NO: 4930 | SEQ ID NO: 4934 | SEQ ID NO: 4946 | SEQ ID NO: 4950 | |
| 24-26 | SEQ ID NO: 4930 | SEQ ID NO: 4935 | SEQ ID NO: 4946 | SEQ ID NO: 4951 | |
| 24-27 | SEQ ID NO: 4931 | SEQ ID NO: 4934 | SEQ ID NO: 4947 | SEQ ID NO: 4950 | |
| 24-28 | SEQ ID NO: 4931 | SEQ ID NO: 4935 | SEQ ID NO: 4947 | SEQ ID NO: 4951 | |
| 24-29 | SEQ ID NO: 4936 | SEQ ID NO: 4932 | SEQ ID NO: 4952 | SEQ ID NO: 4948 | |
| 24-30 | SEQ ID NO: 4936 | SEQ ID NO: 4933 | SEQ ID NO: 4952 | SEQ ID NO: 4949 | |
| 24-31 | SEQ ID NO: 4937 | SEQ ID NO: 4932 | SEQ ID NO: 4953 | SEQ ID NO: 4948 | |
| 24-32 | SEQ ID NO: 4937 | SEQ ID NO: 4933 | SEQ ID NO: 4953 | SEQ ID NO: 4949 | |

TABLE 64

| Protein | | | | | | |
|---|---|---|---|---|---|---|
| ID | D1-Fc | D5-Fab | D4-Fab | D3-Fab | D6-Fab | D2-Fc |
| 24-01 | L234A/L235A/P329G | Ipilimumab | Pembrolizumab | Pembrolizumab | Ipilimumab | L234A/L235A/P329G |
| 24-02 | L234A/L235A/P329G | Ipilimumab | Pembrolizumab | Pembrolizumab | Ipilimumab | L234A/L235A/P329G |
| 24-03 | L234A/L235A/P329G | Ipilimumab | Pembrolizumab | Pembrolizumab | Ipilimumab | L234A/L235A/P329G |
| 24-04 | L234A/L235A/P329G | Ipilimumab | Pembrolizumab | Pembrolizumab | Ipilimumab | L234A/L235A/P329G |
| 24-05 | L234A/L235A/P329G | | Pembrolizumab | Pembrolizumab | Ipilimumab | L234A/L235A/P329G |
| 24-06 | L234A/L235A/P329G | | Pembrolizumab | Pembrolizumab | Ipilimumab | L234A/L235A/P329G |
| 24-07 | L234A/L235A/P329G | | Pembrolizumab | Pembrolizumab | Ipilimumab | L234A/L235A/P329G |
| 24-08 | L234A/L235A/P329G | | Pembrolizumab | Pembrolizumab | Ipilimumab | L234A/L235A/P329G |
| 24-09 | L234A/L235A/P329G | Pembrolizumab | Ipilimumab | Ipilimumab | Pembrolizumab | L234A/L235A/P329G |
| 24-10 | L234A/L235A/P329G | Pembrolizumab | Ipilimumab | Ipilimumab | Pembrolizumab | L234A/L235A/P329G |
| 24-11 | L234A/L235A/P329G | Pembrolizumab | Ipilimumab | Ipilimumab | Pembrolizumab | L234A/L235A/P329G |
| 24-12 | L234A/L235A/P329G | Pembrolizumab | Ipilimumab | Ipilimumab | Pembrolizumab | L234A/L235A/P329G |
| 24-13 | L234A/L235A/P329G | Ipilimumab | 388D4 | 388D4 | Ipilimumab | L234A/L235A/P329G |
| 24-14 | L234A/L235A/P329G | Ipilimumab | 388D4 | 388D4 | Ipilimumab | L234A/L235A/P329G |
| 24-15 | L234A/L235A/P329G | Ipilimumab | 388D4 | 388D4 | Ipilimumab | L234A/L235A/P329G |
| 24-16 | L234A/L235A/P329G | Ipilimumab | 388D4 | 388D4 | Ipilimumab | L234A/L235A/P329G |
| 24-17 | L234A/L235A/P329G | | 388D4 | 388D4 | Ipilimumab | L234A/L235A/P329G |
| 24-18 | L234A/L235A/P329G | | 388D4 | 388D4 | Ipilimumab | L234A/L235A/P329G |
| 24-19 | L234A/L235A/P329G | | 388D4 | 388D4 | Ipilimumab | L234A/L235A/P329G |
| 24-20 | L234A/L235A/P329G | | 388D4 | 388D4 | Ipilimumab | L234A/L235A/P329G |
| 24-21 | L234A/L235A/P329G | 388D4 | Ipilimumab | Ipilimumab | 388D4 | L234A/L235A/P329G |
| 24-22 | L234A/L235A/P329G | 388D4 | Ipilimumab | Ipilimumab | 388D4 | L234A/L235A/P329G |
| 24-23 | L234A/L235A/P329G | 388D4 | Ipilimumab | Ipilimumab | 388D4 | L234A/L235A/P329G |
| 24-24 | L234A/L235A/P329G | 388D4 | Ipilimumab | Ipilimumab | 388D4 | L234A/L235A/P329G |
| 24-25 | L234A/L235A/P329G | 244C8 | 388D4 | 388D4 | 244C8 | L234A/L235A/P329G |
| 24-26 | L234A/L235A/P329G | 244C8 | 388D4 | 388D4 | 244C8 | L234A/L235A/P329G |
| 24-27 | L234A/L235A/P329G | 244C8 | 388D4 | 388D4 | 244C8 | L234A/L235A/P329G |
| 24-28 | L234A/L235A/P329G | 244C8 | 388D4 | 388D4 | 244C8 | L234A/L235A/P329G |
| 24-29 | L234A/L235A/P329G | 388D4 | 244C8 | 244C8 | 388D4 | L234A/L235A/P329G |
| 24-30 | L234A/L235A/P329G | 388D4 | 244C8 | 244C8 | 388D4 | L234A/L235A/P329G |
| 24-31 | L234A/L235A/P329G | 388D4 | 244C8 | 244C8 | 388D4 | L234A/L235A/P329G |
| 24-32 | L234A/L235A/P329G | 388D4 | 244C8 | 244C8 | 388D4 | L234A/L235A/P329G |

TABLE 65

| Protein | D1-Fc | D5-Fab | D4-Fab | D3-Fab | D6-Fab | D2-Fc |
|---|---|---|---|---|---|---|
| ID | Specificity | Specificity | Specificity | Specificity | Specificity | Specificity |
| 24-01 | FcgR silent | CTLA-4 | PD-1 | PD-1 | CTLA-4 | FcgR silent |
| 24-02 | FcgR silent | CTLA-4 | PD-1 | PD-1 | CTLA-4 | FcgR silent |
| 24-03 | FcgR silent | CTLA-4 | PD-1 | PD-1 | CTLA-4 | FcgR silent |
| 24-04 | FcgR silent | CTLA-4 | PD-1 | PD-1 | CTLA-4 | FcgR silent |
| 24-05 | FcgR silent | | PD-1 | PD-1 | CTLA-4 | FcgR silent |
| 24-06 | FcgR silent | | PD-1 | PD-1 | CTLA-4 | FcgR silent |
| 24-07 | FcgR silent | | PD-1 | PD-1 | CTLA-4 | FcgR silent |
| 24-08 | FcgR silent | | PD-1 | PD-1 | CTLA-4 | FcgR silent |
| 24-09 | FcgR silent | PD-1 | CTLA-4 | CTLA-4 | PD-1 | FcgR silent |
| 24-10 | FcgR silent | PD-1 | CTLA-4 | CTLA-4 | PD-1 | FcgR silent |
| 24-11 | FcgR silent | PD-1 | CTLA-4 | CTLA-4 | PD-1 | FcgR silent |
| 24-12 | FcgR silent | PD-1 | CTLA-4 | CTLA-4 | PD-1 | FcgR silent |
| 24-13 | FcgR silent | CTLA-4 | PD-1 | PD-1 | CTLA-4 | FcgR silent |
| 24-14 | FcgR silent | CTLA-4 | PD-1 | PD-1 | CTLA-4 | FcgR silent |
| 24-15 | FcgR silent | CTLA-4 | PD-1 | PD-1 | CTLA-4 | FcgR silent |
| 24-16 | FcgR silent | CTLA-4 | PD-1 | PD-1 | CTLA-4 | FcgR silent |
| 24-17 | FcgR silent | | PD-1 | PD-1 | CTLA-4 | FcgR silent |
| 24-18 | FcgR silent | | PD-1 | PD-1 | CTLA-4 | FcgR silent |
| 24-19 | FcgR silent | | PD-1 | PD-1 | CTLA-4 | FcgR silent |
| 24-20 | FcgR silent | | PD-1 | PD-1 | CTLA-4 | FcgR silent |
| 24-21 | FcgR silent | PD-1 | CTLA-4 | CTLA-4 | PD-1 | FcgR silent |
| 24-22 | FcgR silent | PD-1 | CTLA-4 | CTLA-4 | PD-1 | FcgR silent |
| 24-23 | FcgR silent | PD-1 | CTLA-4 | CTLA-4 | PD-1 | FcgR silent |
| 24-24 | FcgR silent | PD-1 | CTLA-4 | CTLA-4 | PD-1 | FcgR silent |
| 24-25 | FcgR silent | PD-1 (allosteric) | PD-1 | PD-1 | PD-1 (allosteric) | FcgR silent |
| 24-26 | FcgR silent | PD-1 (allosteric) | PD-1 | PD-1 | PD-1 (allosteric) | FcgR silent |
| 24-27 | FcgR silent | PD-1 (allosteric) | PD-1 | PD-1 | PD-1 (allosteric) | FcgR silent |
| 24-28 | FcgR silent | PD-1 (allosteric) | PD-1 | PD-1 | PD-1 (allosteric) | FcgR silent |
| 24-29 | FcgR silent | PD-1 | PD-1 (allosteric) | PD-1 (allosteric) | PD-1 | FcgR silent |
| 24-30 | FcgR silent | PD-1 | PD-1 (allosteric) | PD-1 (allosteric) | PD-1 | FcgR silent |
| 24-31 | FcgR silent | PD-1 | PD-1 (allosteric) | PD-1 (allosteric) | PD-1 | FcgR silent |
| 24-32 | FcgR silent | PD-1 | PD-1 (allosteric) | PD-1 (allosteric) | PD-1 | FcgR silent |

TABLE 66

| | H1 Chain | | H2 Chain | | L1 Chain | | L2 Chain | |
|---|---|---|---|---|---|---|---|---|
| Protein | V region | Amino acid | V region | Amino acid | V region | Amino acid | V region | Amino acid |
| ID | type | Substitutions | Type | Substitutions | Type | Substitutions | Type | Substitutions |
| 24-01 | VH-CH1 | Q39K/S183E | VK-CH1 | Q38E/S183K | VK-CK | Q38E/V133K | VH-CK | Q39K/V133E |
| 24-02 | VH-CH1 | Q39K/S183E | VK-CH1 | Q38K/S183K | VK-CK | Q38E/V133K | VH-CK | Q39E/V133E |
| 24-03 | VH-CH1 | Q39E/S183E | VK-CH1 | Q38E/S183K | VK-CK | Q38K/V133K | VH-CK | Q39K/V133E |
| 24-04 | VH-CH1 | Q39E/S183E | VK-CH1 | Q38K/S183K | VK-CK | Q38K/V133K | VH-CK | Q39E/V133E |
| 24-05 | VH-CH1 | Q39K/S183E | VK-CH1 | Q38E/S183K | VK-CK | Q38E/V133K | VH-CK | Q39K/V133E |
| 24-06 | VH-CH1 | Q39K/S183E | VK-CH1 | Q38K/S183K | VK-CK | Q38E/V133K | VH-CK | Q39E/V133E |
| 24-07 | VH-CH1 | Q39E/S183E | VK-CH1 | Q38E/S183K | VK-CK | Q38K/V133K | VH-CK | Q39K/V133E |
| 24-08 | VH-CH1 | Q39E/S183E | VK-CH1 | Q38K/S183K | VK-CK | Q38K/V133K | VH-CK | Q39E/V133E |
| 24-09 | VH-CH1 | Q39K/S183E | VK-CH1 | Q38E/S183K | VK-CK | Q38E/V133K | VH-CK | Q39K/V133E |
| 24-10 | VH-CH1 | Q39K/S183E | VK-CH1 | Q38K/S183K | VK-CK | Q38E/V133K | VH-CK | Q39E/V133E |
| 24-11 | VH-CH1 | Q39E/S183E | VK-CH1 | Q38E/S183K | VK-CK | Q38K/V133K | VH-CK | Q39K/V133E |
| 24-12 | VH-CH1 | Q39E/S183E | VK-CH1 | Q38K/S183K | VK-CK | Q38K/V133K | VH-CK | Q39E/V133E |
| 24-13 | VH-CH1 | Q39K/S183E | VK-CH1 | Q38E/S183K | VK-CK | Q38E/V133K | VH-CK | Q39K/V133E |
| 24-14 | VH-CH1 | Q39K/S183E | VK-CH1 | Q38K/S183K | VK-CK | Q38E/V133K | VH-CK | Q39E/V133E |
| 24-15 | VH-CH1 | Q39E/S183E | VK-CH1 | Q38E/S183K | VK-CK | Q38K/V133K | VH-CK | Q39K/V133E |
| 24-16 | VH-CH1 | Q39E/S183E | VK-CH1 | Q38K/S183K | VK-CK | Q38K/V133K | VH-CK | Q39E/V133E |
| 24-17 | VH-CH1 | Q39K/S183E | VK-CH1 | Q38E/S183K | VK-CK | Q38E/V133K | VH-CK | Q39K/V133E |
| 24-18 | VH-CH1 | Q39K/S183E | VK-CH1 | Q38K/S183K | VK-CK | Q38E/V133K | VH-CK | Q39E/V133E |
| 24-19 | VH-CH1 | Q39E/S183E | VK-CH1 | Q38E/S183K | VK-CK | Q38K/V133K | VH-CK | Q39K/V133E |
| 24-20 | VH-CH1 | Q39E/S183E | VK-CH1 | Q38K/S183K | VK-CK | Q38K/V133K | VH-CK | Q39E/V133E |
| 24-21 | VH-CH1 | Q39K/S183E | VK-CH1 | Q38E/S183K | VK-CK | Q38E/V133K | VH-CK | Q39K/V133E |
| 24-22 | VH-CH1 | Q39K/S183E | VK-CH1 | Q38K/S183K | VK-CK | Q38E/V133K | VH-CK | Q39E/V133E |
| 24-23 | VH-CH1 | Q39E/S183E | VK-CH1 | Q38E/S183K | VK-CK | Q38K/V133K | VH-CK | Q39K/V133E |
| 24-24 | VH-CH1 | Q39E/S183E | VK-CH1 | Q38K/S183K | VK-CK | Q38K/V133K | VH-CK | Q39E/V133E |
| 24-25 | VH-CH1 | Q39K/S183E | VK-CH1 | Q38E/S183K | VK-CK | Q38E/V133K | VH-CK | Q39K/V133E |
| 24-26 | VH-CH1 | Q39K/S183E | VK-CH1 | Q38K/S183K | VK-CK | Q38E/V133K | VH-CK | Q39E/V133E |
| 24-27 | VH-CH1 | Q39E/S183E | VK-CH1 | Q38E/S183K | VK-CK | Q38K/V133K | VH-CK | Q39K/V133E |
| 24-28 | VH-CH1 | Q39E/S183E | VK-CH1 | Q38K/S183K | VK-CK | Q38K/V133K | VH-CK | Q39E/V133E |
| 24-29 | VH-CH1 | Q39K/S183E | VK-CH1 | Q38E/S183K | VK-CK | Q38E/V133K | VH-CK | Q39K/V133E |
| 24-30 | VH-CH1 | Q39K/S183E | VK-CH1 | Q38K/S183K | VK-CK | Q38E/V133K | VH-CK | Q39E/V133E |
| 24-31 | VH-CH1 | Q39E/S183E | VK-CH1 | Q38E/S183K | VK-CK | Q38K/V133K | VH-CK | Q39K/V133E |
| 24-32 | VH-CH1 | Q39E/S183E | VK-CH1 | Q38K/S183K | VK-CK | Q38K/V133K | VH-CK | Q39E/V133E |

### Example 27—Tetravalent, Bispecific Tetrahedral Antibodies Comprising Two Distinct Fabs that Specifically Bind PD-1 and PD-L1

[1354] Tetrahedral antibodies were designed, expressed, and evaluated for their ability to act as checkpoint inhibitors for the treatment of cancer and other disease. This series of bispecific constructs employ VH and VL regions from pembrolizumab (anti-PD-1), 388D4 (anti-PD-1), atezolizumab (anti-PD-L1), and B6055 (anti-PD-L1) (Tables 67, 68). The various Fab pairings are pembrolizumab/atezolizumab, 388D4/atezolizumab, pembrolizumab/B6055, and 388D4/B6055 (all anti-PD-1/anti-PD-L1), each placed in either orientation with respect to D3/D4 and D5/D6 (Table 69). To optimize correct VH/VL pairing and to minimize VH/VL mispairing, V region exchange is combined with four different sets of charge pairs to ensure correct pairing of heavy and light chain V regions (Table 70). Additionally, to further facilitate purification of the correctly paired product by Protein A chromatography, the H1 chain incorporates the H435R/Y436F substitution. The constructs are then evaluated for their structural bispecificity by intact mass spectrometry as described in Example 18, and for their functional bispecificity using a variety of in vitro binding assays, cytotoxicity assays, and cytokine induction and release assays, and in vivo cancer efficacy models, known to one skilled in the art.

TABLE 67

| Protein ID | H1 Chain | H2 Chain | L1 Chain | L2 Chain |
|---|---|---|---|---|
| 25-01 | SEQ ID NO: 4955 | SEQ ID NO: 4956 | SEQ ID NO: 4971 | SEQ ID NO: 4972 |
| 25-02 | SEQ ID NO: 4955 | SEQ ID NO: 4957 | SEQ ID NO: 4971 | SEQ ID NO: 4973 |
| 25-03 | SEQ ID NO: 4958 | SEQ ID NO: 4956 | SEQ ID NO: 4974 | SEQ ID NO: 4972 |
| 25-04 | SEQ ID NO: 4958 | SEQ ID NO: 4957 | SEQ ID NO: 4974 | SEQ ID NO: 4973 |
| 25-05 | SEQ ID NO: 4959 | SEQ ID NO: 4960 | SEQ ID NO: 4975 | SEQ ID NO: 4976 |
| 25-06 | SEQ ID NO: 4959 | SEQ ID NO: 4961 | SEQ ID NO: 4975 | SEQ ID NO: 4977 |
| 25-07 | SEQ ID NO: 4962 | SEQ ID NO: 4960 | SEQ ID NO: 4978 | SEQ ID NO: 4976 |
| 25-08 | SEQ ID NO: 4962 | SEQ ID NO: 4961 | SEQ ID NO: 4978 | SEQ ID NO: 4977 |
| 25-09 | SEQ ID NO: 4963 | SEQ ID NO: 4956 | SEQ ID NO: 4979 | SEQ ID NO: 4972 |
| 25-10 | SEQ ID NO: 4963 | SEQ ID NO: 4957 | SEQ ID NO: 4979 | SEQ ID NO: 4973 |
| 25-11 | SEQ ID NO: 4964 | SEQ ID NO: 4956 | SEQ ID NO: 4980 | SEQ ID NO: 4972 |
| 25-12 | SEQ ID NO: 4964 | SEQ ID NO: 4957 | SEQ ID NO: 4980 | SEQ ID NO: 4973 |
| 25-13 | SEQ ID NO: 4959 | SEQ ID NO: 4965 | SEQ ID NO: 4975 | SEQ ID NO: 4981 |
| 25-14 | SEQ ID NO: 4959 | SEQ ID NO: 4966 | SEQ ID NO: 4975 | SEQ ID NO: 4982 |
| 25-15 | SEQ ID NO: 4962 | SEQ ID NO: 4965 | SEQ ID NO: 4978 | SEQ ID NO: 4981 |
| 25-16 | SEQ ID NO: 4962 | SEQ ID NO: 4966 | SEQ ID NO: 4978 | SEQ ID NO: 4982 |
| 25-17 | SEQ ID NO: 4955 | SEQ ID NO: 4967 | SEQ ID NO: 4971 | SEQ ID NO: 4983 |
| 25-18 | SEQ ID NO: 4955 | SEQ ID NO: 4968 | SEQ ID NO: 4971 | SEQ ID NO: 4984 |
| 25-19 | SEQ ID NO: 4958 | SEQ ID NO: 4967 | SEQ ID NO: 4974 | SEQ ID NO: 4983 |
| 25-20 | SEQ ID NO: 4958 | SEQ ID NO: 4968 | SEQ ID NO: 4974 | SEQ ID NO: 4984 |
| 25-21 | SEQ ID NO: 4969 | SEQ ID NO: 4960 | SEQ ID NO: 4985 | SEQ ID NO: 4976 |
| 25-22 | SEQ ID NO: 4969 | SEQ ID NO: 4961 | SEQ ID NO: 4985 | SEQ ID NO: 4977 |
| 25-23 | SEQ ID NO: 4970 | SEQ ID NO: 4960 | SEQ ID NO: 4986 | SEQ ID NO: 4976 |
| 25-24 | SEQ ID NO: 4970 | SEQ ID NO: 4961 | SEQ ID NO: 4986 | SEQ ID NO: 4977 |
| 25-25 | SEQ ID NO: 4963 | SEQ ID NO: 4967 | SEQ ID NO: 4979 | SEQ ID NO: 4983 |
| 25-26 | SEQ ID NO: 4963 | SEQ ID NO: 4968 | SEQ ID NO: 4979 | SEQ ID NO: 4984 |
| 25-27 | SEQ ID NO: 4964 | SEQ ID NO: 4967 | SEQ ID NO: 4980 | SEQ ID NO: 4983 |
| 25-28 | SEQ ID NO: 4964 | SEQ ID NO: 4968 | SEQ ID NO: 4980 | SEQ ID NO: 4984 |
| 25-29 | SEQ ID NO: 4969 | SEQ ID NO: 4965 | SEQ ID NO: 4985 | SEQ ID NO: 4981 |
| 25-30 | SEQ ID NO: 4969 | SEQ ID NO: 4966 | SEQ ID NO: 4985 | SEQ ID NO: 4982 |
| 25-31 | SEQ ID NO: 4970 | SEQ ID NO: 4965 | SEQ ID NO: 4986 | SEQ ID NO: 4981 |
| 25-32 | SEQ ID NO: 4970 | SEQ ID NO: 4966 | SEQ ID NO: 4986 | SEQ ID NO: 4982 |

TABLE 68

| Protein | | | | | | |
|---|---|---|---|---|---|---|
| ID | D1-Fc | D5-Fab | D4-Fab | D3-Fab | D6-Fab | D2-Fc |
| 25-01 | L234A/L235A/P329 | Atezolizumab | Pembrolizuma | Pembrolizuma | Atezolizumab | L234A/L235A/P329 |
| 25-02 | L234A/L235A/P329 | Atezolizumab | Pembrolizuma | Pembrolizuma | Atezolizumab | L234A/L235A/P329 |
| 25-03 | L234A/L235A/P329 | Atezolizumab | Pembrolizuma | Pembrolizuma | Atezolizumab | L234A/L235A/P329 |
| 25-04 | L234A/L235A/P329 | Atezolizumab | Pembrolizuma | Pembrolizuma | Atezolizumab | L234A/L235A/P329 |
| 25-05 | L234A/L235A/P329 | Pembrolizuma | Atezolizumab | Atezolizumab | Pembrolizuma | L234A/L235A/P329 |
| 25-06 | L234A/L235A/P329 | Pembrolizuma | Atezolizumab | Atezolizumab | Pembrolizuma | L234A/L235A/P329 |
| 25-07 | L234A/L235A/P329 | Pembrolizuma | Atezolizumab | Atezolizumab | Pembrolizuma | L234A/L235A/P329 |
| 25-08 | L234A/L235A/P329 | Pembrolizuma | Atezolizumab | Atezolizumab | Pembrolizuma | L234A/L235A/P329 |
| 25-09 | L234A/L235A/P329 | Atezolizumab | 388D4 | 388D4 | Atezolizumab | L234A/L235A/P329 |
| 25-10 | L234A/L235A/P329 | Atezolizumab | 388D4 | 388D4 | Atezolizumab | L234A/L235A/P329 |
| 25-11 | L234A/L235A/P329 | Atezolizumab | 388D4 | 388D4 | Atezolizumab | L234A/L235A/P329 |
| 25-12 | L234A/L235A/P329 | Atezolizumab | 388D4 | 388D4 | Atezolizumab | L234A/L235A/P329 |
| 25-13 | L234A/L235A/P329 | 388D4 | Atezolizumab | Atezolizumab | 388D4 | L234A/L235A/P329 |
| 25-14 | L234A/L235A/P329 | 388D4 | Atezolizumab | Atezolizumab | 388D4 | L234A/L235A/P329 |
| 25-15 | L234A/L235A/P329 | 388D4 | Atezolizumab | Atezolizumab | 388D4 | L234A/L235A/P329 |
| 25-16 | L234A/L235A/P329 | 388D4 | Atezolizumab | Atezolizumab | 388D4 | L234A/L235A/P329 |
| 25-17 | L234A/L235A/P329 | B6055 | Pembrolizuma | Pembrolizuma | B6055 | L234A/L235A/P329 |
| 25-18 | L234A/L235A/P329 | B6055 | Pembrolizuma | Pembrolizuma | B6055 | L234A/L235A/P329 |
| 25-19 | L234A/L235A/P329 | B6055 | Pembrolizuma | Pembrolizuma | B6055 | L234A/L235A/P329 |
| 25-20 | L234A/L235A/P329 | B6055 | Pembrolizuma | Pembrolizuma | B6055 | L234A/L235A/P329 |
| 25-21 | L234A/L235A/P329 | Pembrolizuma | B6055 | B6055 | Pembrolizuma | L234A/L235A/P329 |
| 25-22 | L234A/L235A/P329 | Pembrolizuma | B6055 | B6055 | Pembrolizuma | L234A/L235A/P329 |
| 25-23 | L234A/L235A/P329 | Pembrolizuma | B6055 | B6055 | Pembrolizuma | L234A/L235A/P329 |
| 25-24 | L234A/L235A/P329 | Pembrolizuma | B6055 | B6055 | Pembrolizuma | L234A/L235A/P329 |
| 25-25 | L234A/L235A/P329 | B6055 | 388D4 | 388D4 | B6055 | L234A/L235A/P329 |
| 25-26 | L234A/L235A/P329 | B6055 | 388D4 | 388D4 | B6055 | L234A/L235A/P329 |
| 25-27 | L234A/L235A/P329 | B6055 | 388D4 | 388D4 | B6055 | L234A/L235A/P329 |
| 25-28 | L234A/L235A/P329 | B6055 | 388D4 | 388D4 | B6055 | L234A/L235A/P329 |
| 25-29 | L234A/L235A/P329 | 388D4 | B6055 | B6055 | 388D4 | L234A/L235A/P329 |
| 25-30 | L234A/L235A/P329 | 388D4 | B6055 | B6055 | 388D4 | L234A/L235A/P329 |
| 25-31 | L234A/L235A/P329 | 388D4 | B6055 | B6055 | 388D4 | L234A/L235A/P329 |
| 25-32 | L234A/L235A/P329 | 388D4 | B6055 | B6055 | 388D4 | L234A/L235A/P329 |

TABLE 69

| Protein | D1-Fc | D5-Fab | D4-Fab | D3-Fab | D6-Fab | D2-Fc |
|---|---|---|---|---|---|---|
| ID | Specificity | Specificity | Specificity | Specificity | Specificity | Specificity |
| 25-01 | FcgR silent | PD-L1 | PD-1 | PD-1 | PD-L1 | FcgR silent |
| 25-02 | FcgR silent | PD-L1 | PD-1 | PD-1 | PD-L1 | FcgR silent |
| 25-03 | FcgR silent | PD-L1 | PD-1 | PD-1 | PD-L1 | FcgR silent |
| 25-04 | FcgR silent | PD-L1 | PD-1 | PD-1 | PD-L1 | FcgR silent |
| 25-05 | FcgR silent | PD-1 | PD-L1 | PD-L1 | PD-1 | FcgR silent |
| 25-06 | FcgR silent | PD-1 | PD-L1 | PD-L1 | PD-1 | FcgR silent |
| 25-07 | FcgR silent | PD-1 | PD-L1 | PD-L1 | PD-1 | FcgR silent |
| 25-08 | FcgR silent | PD-1 | PD-L1 | PD-L1 | PD-1 | FcgR silent |
| 25-09 | FcgR silent | PD-L1 | PD-1 | PD-1 | PD-L1 | FcgR silent |
| 25-10 | FcgR silent | PD-L1 | PD-1 | PD-1 | PD-L1 | FcgR silent |
| 25-11 | FcgR silent | PD-L1 | PD-1 | PD-1 | PD-L1 | FcgR silent |
| 25-12 | FcgR silent | PD-L1 | PD-1 | PD-1 | PD-L1 | FcgR silent |
| 25-13 | FcgR silent | PD-1 | PD-L1 | PD-L1 | PD-1 | FcgR silent |
| 25-14 | FcgR silent | PD-1 | PD-L1 | PD-L1 | PD-1 | FcgR silent |
| 25-15 | FcgR silent | PD-1 | PD-L1 | PD-L1 | PD-1 | FcgR silent |
| 25-16 | FcgR silent | PD-1 | PD-L1 | PD-L1 | PD-1 | FcgR silent |
| 25-17 | FcgR silent | PD-L1 | PD-1 | PD-1 | PD-L1 | FcgR silent |
| 25-18 | FcgR silent | PD-L1 | PD-1 | PD-1 | PD-L1 | FcgR silent |
| 25-19 | FcgR silent | PD-L1 | PD-1 | PD-1 | PD-L1 | FcgR silent |
| 25-20 | FcgR silent | PD-L1 | PD-1 | PD-1 | PD-L1 | FcgR silent |
| 25-21 | FcgR silent | PD-1 | PD-L1 | PD-L1 | PD-1 | FcgR silent |
| 25-22 | FcgR silent | PD-1 | PD-L1 | PD-L1 | PD-1 | FcgR silent |
| 25-23 | FcgR silent | PD-1 | PD-L1 | PD-L1 | PD-1 | FcgR silent |
| 25-24 | FcgR silent | PD-1 | PD-L1 | PD-L1 | PD-1 | FcgR silent |
| 25-25 | FcgR silent | PD-L1 | PD-1 | PD-1 | PD-L1 | FcgR silent |
| 25-26 | FcgR silent | PD-L1 | PD-1 | PD-1 | PD-L1 | FcgR silent |
| 25-27 | FcgR silent | PD-L1 | PD-1 | PD-1 | PD-L1 | FcgR silent |
| 25-28 | FcgR silent | PD-L1 | PD-1 | PD-1 | PD-L1 | FcgR silent |
| 25-29 | FcgR silent | PD-1 | PD-L1 | PD-L1 | PD-1 | FcgR silent |
| 25-30 | FcgR silent | PD-1 | PD-L1 | PD-L1 | PD-1 | FcgR silent |
| 25-31 | FcgR silent | PD-1 | PD-L1 | PD-L1 | PD-1 | FcgR silent |
| 25-32 | FcgR silent | PD-1 | PD-L1 | PD-L1 | PD-1 | FcgR silent |

TABLE 70

| | H1 Chain | | H2 Chain | | L1 Chain | | L2 Chain | |
|---|---|---|---|---|---|---|---|---|
| Protein | V region | Amino acid | V region | Amino acid | V region | Amino acid | V region | Amino acid |
| ID | type | Substitutions | Type | Substitutions | Type | Substitutions | Type | Substitutions |
| 25-01 | VH-CH1 | Q39K/S183E | VK-CH1 | Q38E/S183K | VK-CK | Q38E/V133K | VH-CK | Q39K/V133E |
| 25-02 | VH-CH1 | Q39K/S183E | VK-CH1 | Q38K/S183K | VK-CK | Q38E/V133K | VH-CK | Q39E/V133E |
| 25-03 | VH-CH1 | Q39E/S183E | VK-CH1 | Q38E/S183K | VK-CK | Q38K/V133K | VH-CK | Q39K/V133E |
| 25-04 | VH-CH1 | Q39E/S183E | VK-CH1 | Q38K/S183K | VK-CK | Q38K/V133K | VH-CK | Q39E/V133E |
| 25-05 | VH-CH1 | Q39K/S183E | VK-CH1 | Q38E/S183K | VK-CK | Q38E/V133K | VH-CK | Q39K/V133E |
| 25-06 | VH-CH1 | Q39K/S183E | VK-CH1 | Q38K/S183K | VK-CK | Q38E/V133K | VH-CK | Q39E/V133E |
| 25-07 | VH-CH1 | Q39E/S183E | VK-CH1 | Q38E/S183K | VK-CK | Q38K/V133K | VH-CK | Q39K/V133E |
| 25-08 | VH-CH1 | Q39E/S183E | VK-CH1 | Q38K/S183K | VK-CK | Q38K/V133K | VH-CK | Q39E/V133E |
| 25-09 | VH-CH1 | Q39K/S183E | VK-CH1 | Q38E/S183K | VK-CK | Q38E/V133K | VH-CK | Q39K/V133E |
| 25-10 | VH-CH1 | Q39K/S183E | VK-CH1 | Q38K/S183K | VK-CK | Q38E/V133K | VH-CK | Q39E/V133E |
| 25-11 | VH-CH1 | Q39E/S183E | VK-CH1 | Q38E/S183K | VK-CK | Q38K/V133K | VH-CK | Q39K/V133E |
| 25-12 | VH-CH1 | Q39E/S183E | VK-CH1 | Q38K/S183K | VK-CK | Q38K/V133K | VH-CK | Q39E/V133E |
| 25-13 | VH-CH1 | Q39K/S183E | VK-CH1 | Q38E/S183K | VK-CK | Q38E/V133K | VH-CK | Q39K/V133E |
| 25-14 | VH-CH1 | Q39K/S183E | VK-CH1 | Q38K/S183K | VK-CK | Q38E/V133K | VH-CK | Q39E/V133E |
| 25-15 | VH-CH1 | Q39E/S183E | VK-CH1 | Q38E/S183K | VK-CK | Q38K/V133K | VH-CK | Q39K/V133E |
| 25-16 | VH-CH1 | Q39E/S183E | VK-CH1 | Q38K/S183K | VK-CK | Q38K/V133K | VH-CK | Q39E/V133E |
| 25-17 | VH-CH1 | Q39K/S183E | VK-CH1 | Q38E/S183K | VK-CK | Q38E/V133K | VH-CK | Q39K/V133E |
| 25-18 | VH-CH1 | Q39K/S183E | VK-CH1 | Q38K/S183K | VK-CK | Q38E/V133K | VH-CK | Q39E/V133E |
| 25-19 | VH-CH1 | Q39E/S183E | VK-CH1 | Q38E/S183K | VK-CK | Q38K/V133K | VH-CK | Q39K/V133E |
| 25-20 | VH-CH1 | Q39E/S183E | VK-CH1 | Q38K/S183K | VK-CK | Q38K/V133K | VH-CK | Q39E/V133E |
| 25-21 | VH-CH1 | Q39K/S183E | VK-CH1 | Q38E/S183K | VK-CK | Q38E/V133K | VH-CK | Q39K/V133E |
| 25-22 | VH-CH1 | Q39K/S183E | VK-CH1 | Q38K/S183K | VK-CK | Q38E/V133K | VH-CK | Q39E/V133E |
| 25-23 | VH-CH1 | Q39E/S183E | VK-CH1 | Q38E/S183K | VK-CK | Q38K/V133K | VH-CK | Q39K/V133E |
| 25-24 | VH-CH1 | Q39E/S183E | VK-CH1 | Q38K/S183K | VK-CK | Q38K/V133K | VH-CK | Q39E/V133E |
| 25-25 | VH-CH1 | Q39K/S183E | VK-CH1 | Q38E/S183K | VK-CK | Q38E/V133K | VH-CK | Q39K/V133E |
| 25-26 | VH-CH1 | Q39K/S183E | VK-CH1 | Q38K/S183K | VK-CK | Q38E/V133K | VH-CK | Q39E/V133E |
| 25-27 | VH-CH1 | Q39E/S183E | VK-CH1 | Q38E/S183K | VK-CK | Q38K/V133K | VH-CK | Q39K/V133E |
| 25-28 | VH-CH1 | Q39E/S183E | VK-CH1 | Q38K/S183K | VK-CK | Q38K/V133K | VH-CK | Q39E/V133E |
| 25-29 | VH-CH1 | Q39K/S183E | VK-CH1 | Q38E/S183K | VK-CK | Q38E/V133K | VH-CK | Q39K/V133E |
| 25-30 | VH-CH1 | Q39K/S183E | VK-CH1 | Q38K/S183K | VK-CK | Q38E/V133K | VH-CK | Q39E/V133E |
| 25-31 | VH-CH1 | Q39E/S183E | VK-CH1 | Q38E/S183K | VK-CK | Q38K/V133K | VH-CK | Q39K/V133E |
| 25-32 | VH-CH1 | Q39E/S183E | VK-CH1 | Q38K/S183K | VK-CK | Q38K/V133K | VH-CK | Q39E/V133E |

### Example 28—Tetravalent, Bispecific Tetrahedral Antibodies Comprising Two Distinct Fabs that Specifically Bind ERBB2, EGFR, PD-1, and/or PD-L1

[1355] Tetrahedral antibodies were designed, expressed, and evaluated for their ability to act as tumor-targeted checkpoint inhibitors for the treatment of cancer and other disease. This series of bispecific constructs employ VH and VL regions from trastuzumab (anti-ERBB2), pertuzumab (anti-ERBB2), cetuximab (anti-EGFR), 388D4 (anti-PD-1), and B6055 (anti-PD-L1) (Tables 71, 72). The various tumor-targeted checkpoint inhibitor Fab pairings are trastuzumab/388D4, cetuximab/388D4, trastuzumab/B6055, and cetuximab/B6055, each placed in either orientation with respect to D3/D4 and D5/D6 (Table 73). In addition, several tumor-specific Fab pairings are evaluated: trastuzumab/pertuzumab, cetuximab/pertuzumab, and trastuzumab/cetuximab, each placed in either orientation with respect to D3/D4 and D5/D6 (Table 73). To optimize correct VH/VL pairing and to minimize VH/VL mispairing, V region exchange is combined with four different sets of charge pairs to ensure correct pairing of heavy and light chain V regions (Table 74). Additionally, to further facilitate purification of the correctly paired product by Protein A chromatography, the H1 chain incorporates the H435R/Y436F substitution. The constructs are then evaluated for their structural bispecificity by intact mass spectrometry as described in Example 18, and for their functional bispecificity using a variety of in vitro binding assays, checkpoint inhibition assays, cytotoxicity assays, and cytokine induction and release assays, and in vivo cancer efficacy models, known to one skilled in the art.

TABLE 71

| Protein ID | H1 Chain | H2 Chain | L1 Chain | L2 Chain |
|---|---|---|---|---|
| 26-01 | SEQ ID NO: 4987 | SEQ ID NO: 4988 | SEQ ID NO: 5015 | SEQ ID NO: 5016 |
| 26-02 | SEQ ID NO: 4987 | SEQ ID NO: 4989 | SEQ ID NO: 5015 | SEQ ID NO: 5017 |
| 26-03 | SEQ ID NO: 4990 | SEQ ID NO: 4988 | SEQ ID NO: 5018 | SEQ ID NO: 5016 |
| 26-04 | SEQ ID NO: 4990 | SEQ ID NO: 4989 | SEQ ID NO: 5018 | SEQ ID NO: 5017 |
| 26-05 | SEQ ID NO: 4991 | SEQ ID NO: 4992 | SEQ ID NO: 5019 | SEQ ID NO: 5020 |
| 26-06 | SEQ ID NO: 4991 | SEQ ID NO: 4993 | SEQ ID NO: 5019 | SEQ ID NO: 5021 |
| 26-07 | SEQ ID NO: 4994 | SEQ ID NO: 4992 | SEQ ID NO: 5022 | SEQ ID NO: 5020 |
| 26-08 | SEQ ID NO: 4994 | SEQ ID NO: 4993 | SEQ ID NO: 5022 | SEQ ID NO: 5021 |
| 26-09 | SEQ ID NO: 4995 | SEQ ID NO: 4988 | SEQ ID NO: 5023 | SEQ ID NO: 5016 |
| 26-10 | SEQ ID NO: 4995 | SEQ ID NO: 4989 | SEQ ID NO: 5023 | SEQ ID NO: 5017 |
| 26-11 | SEQ ID NO: 4996 | SEQ ID NO: 4988 | SEQ ID NO: 5024 | SEQ ID NO: 5016 |
| 26-12 | SEQ ID NO: 4996 | SEQ ID NO: 4989 | SEQ ID NO: 5024 | SEQ ID NO: 5017 |
| 26-13 | SEQ ID NO: 4991 | SEQ ID NO: 4997 | SEQ ID NO: 5019 | SEQ ID NO: 5025 |
| 26-14 | SEQ ID NO: 4991 | SEQ ID NO: 4998 | SEQ ID NO: 5019 | SEQ ID NO: 5026 |
| 26-15 | SEQ ID NO: 4994 | SEQ ID NO: 4997 | SEQ ID NO: 5022 | SEQ ID NO: 5025 |
| 26-16 | SEQ ID NO: 4994 | SEQ ID NO: 4998 | SEQ ID NO: 5022 | SEQ ID NO: 5026 |
| 26-17 | SEQ ID NO: 4999 | SEQ ID NO: 5000 | SEQ ID NO: 5015 | SEQ ID NO: 5027 |
| 26-18 | SEQ ID NO: 4999 | SEQ ID NO: 5001 | SEQ ID NO: 5015 | SEQ ID NO: 5028 |
| 26-19 | SEQ ID NO: 5002 | SEQ ID NO: 5000 | SEQ ID NO: 5018 | SEQ ID NO: 5027 |
| 26-20 | SEQ ID NO: 5002 | SEQ ID NO: 5001 | SEQ ID NO: 5018 | SEQ ID NO: 5028 |
| 26-21 | SEQ ID NO: 5003 | SEQ ID NO: 5004 | SEQ ID NO: 5029 | SEQ ID NO: 5020 |
| 26-22 | SEQ ID NO: 5003 | SEQ ID NO: 5005 | SEQ ID NO: 5029 | SEQ ID NO: 5021 |
| 26-23 | SEQ ID NO: 5006 | SEQ ID NO: 5004 | SEQ ID NO: 5030 | SEQ ID NO: 5020 |
| 26-24 | SEQ ID NO: 5006 | SEQ ID NO: 5005 | SEQ ID NO: 5030 | SEQ ID NO: 5021 |
| 26-25 | SEQ ID NO: 5007 | SEQ ID NO: 5000 | SEQ ID NO: 5023 | SEQ ID NO: 5027 |
| 26-26 | SEQ ID NO: 5007 | SEQ ID NO: 5001 | SEQ ID NO: 5023 | SEQ ID NO: 5028 |
| 26-27 | SEQ ID NO: 5008 | SEQ ID NO: 5000 | SEQ ID NO: 5024 | SEQ ID NO: 5027 |
| 26-28 | SEQ ID NO: 5008 | SEQ ID NO: 5001 | SEQ ID NO: 5024 | SEQ ID NO: 5028 |
| 26-29 | SEQ ID NO: 5003 | SEQ ID NO: 5009 | SEQ ID NO: 5029 | SEQ ID NO: 5025 |
| 26-30 | SEQ ID NO: 5003 | SEQ ID NO: 5010 | SEQ ID NO: 5029 | SEQ ID NO: 5026 |
| 26-31 | SEQ ID NO: 5006 | SEQ ID NO: 5009 | SEQ ID NO: 5030 | SEQ ID NO: 5025 |
| 26-32 | SEQ ID NO: 5006 | SEQ ID NO: 5010 | SEQ ID NO: 5030 | SEQ ID NO: 5026 |
| 26-33 | SEQ ID NO: 4999 | SEQ ID NO: 5011 | SEQ ID NO: 5015 | SEQ ID NO: 5031 |
| 26-34 | SEQ ID NO: 4999 | SEQ ID NO: 5012 | SEQ ID NO: 5015 | SEQ ID NO: 5032 |
| 26-35 | SEQ ID NO: 5002 | SEQ ID NO: 5011 | SEQ ID NO: 5018 | SEQ ID NO: 5031 |
| 26-36 | SEQ ID NO: 5002 | SEQ ID NO: 5012 | SEQ ID NO: 5018 | SEQ ID NO: 5032 |
| 26-37 | SEQ ID NO: 5013 | SEQ ID NO: 5004 | SEQ ID NO: 5033 | SEQ ID NO: 5020 |
| 26-38 | SEQ ID NO: 5013 | SEQ ID NO: 5005 | SEQ ID NO: 5033 | SEQ ID NO: 5021 |
| 26-39 | SEQ ID NO: 5014 | SEQ ID NO: 5004 | SEQ ID NO: 5034 | SEQ ID NO: 5020 |
| 26-40 | SEQ ID NO: 5014 | SEQ ID NO: 5005 | SEQ ID NO: 5034 | SEQ ID NO: 5021 |
| 26-41 | SEQ ID NO: 5007 | SEQ ID NO: 5011 | SEQ ID NO: 5023 | SEQ ID NO: 5031 |
| 26-42 | SEQ ID NO: 5007 | SEQ ID NO: 5012 | SEQ ID NO: 5023 | SEQ ID NO: 5032 |
| 26-43 | SEQ ID NO: 5008 | SEQ ID NO: 5011 | SEQ ID NO: 5024 | SEQ ID NO: 5031 |
| 26-44 | SEQ ID NO: 5008 | SEQ ID NO: 5012 | SEQ ID NO: 5024 | SEQ ID NO: 5032 |
| 26-45 | SEQ ID NO: 5013 | SEQ ID NO: 5009 | SEQ ID NO: 5033 | SEQ ID NO: 5025 |
| 26-46 | SEQ ID NO: 5013 | SEQ ID NO: 5010 | SEQ ID NO: 5033 | SEQ ID NO: 5026 |
| 26-47 | SEQ ID NO: 5014 | SEQ ID NO: 5009 | SEQ ID NO: 5034 | SEQ ID NO: 5025 |
| 26-48 | SEQ ID NO: 5014 | SEQ ID NO: 5010 | SEQ ID NO: 5034 | SEQ ID NO: 5026 |
| 26-49 | SEQ ID NO: 4987 | SEQ ID NO: 4997 | SEQ ID NO: 5015 | SEQ ID NO: 5025 |
| 26-50 | SEQ ID NO: 4987 | SEQ ID NO: 4998 | SEQ ID NO: 5015 | SEQ ID NO: 5026 |
| 26-51 | SEQ ID NO: 4990 | SEQ ID NO: 4997 | SEQ ID NO: 5018 | SEQ ID NO: 5025 |
| 26-52 | SEQ ID NO: 4990 | SEQ ID NO: 4998 | SEQ ID NO: 5018 | SEQ ID NO: 5026 |
| 26-53 | SEQ ID NO: 4995 | SEQ ID NO: 4992 | SEQ ID NO: 5023 | SEQ ID NO: 5020 |
| 26-54 | SEQ ID NO: 4995 | SEQ ID NO: 4993 | SEQ ID NO: 5023 | SEQ ID NO: 5021 |
| 26-55 | SEQ ID NO: 4996 | SEQ ID NO: 4992 | SEQ ID NO: 5024 | SEQ ID NO: 5020 |
| 26-56 | SEQ ID NO: 4996 | SEQ ID NO: 4993 | SEQ ID NO: 5024 | SEQ ID NO: 5021 |

TABLE 72

| Protein | | | | | | |
|---|---|---|---|---|---|---|
| ID | D1-Fc | D5-Fab | D4-Fab | D3-Fab | D6-Fab | D2-Fc |
| 26-01 | wild-type | Pertuzumab | Trastuzumab | Trastuzumab | Pertuzumab | wild-type |
| 26-02 | wild-type | Pertuzumab | Trastuzumab | Trastuzumab | Pertuzumab | wild-type |
| 26-03 | wild-type | Pertuzumab | Trastuzumab | Trastuzumab | Pertuzumab | wild-type |
| 26-04 | wild-type | Pertuzumab | Trastuzumab | Trastuzumab | Pertuzumab | wild-type |
| 26-05 | wild-type | Trastuzumab | Pertuzumab | Pertuzumab | Trastuzumab | wild-type |
| 26-06 | wild-type | Trastuzumab | Pertuzumab | Pertuzumab | Trastuzumab | wild-type |
| 26-07 | wild-type | Trastuzumab | Pertuzumab | Pertuzumab | Trastuzumab | wild-type |
| 26-08 | wild-type | Trastuzumab | Pertuzumab | Pertuzumab | Trastuzumab | wild-type |
| 26-09 | wild-type | Pertuzumab | Cetuximab | Cetuximab | Pertuzumab | wild-type |
| 26-10 | wild-type | Pertuzumab | Cetuximab | Cetuximab | Pertuzumab | wild-type |
| 26-11 | wild-type | Pertuzumab | Cetuximab | Cetuximab | Pertuzumab | wild-type |
| 26-12 | wild-type | Pertuzumab | Cetuximab | Cetuximab | Pertuzumab | wild-type |
| 26-13 | wild-type | Cetuximab | Pertuzumab | Pertuzumab | Cetuximab | wild-type |
| 26-14 | wild-type | Cetuximab | Pertuzumab | Pertuzumab | Cetuximab | wild-type |
| 26-15 | wild-type | Cetuximab | Pertuzumab | Pertuzumab | Cetuximab | wild-type |
| 26-16 | wild-type | Cetuximab | Pertuzumab | Pertuzumab | Cetuximab | wild-type |
| 26-17 | L234A/L235A/P329G | 388D4 | Trastuzumab | Trastuzumab | 388D4 | L234A/L235A/P329G |
| 26-18 | L234A/L235A/P329G | 388D4 | Trastuzumab | Trastuzumab | 388D4 | L234A/L235A/P329G |
| 26-19 | L234A/L235A/P329G | 388D4 | Trastuzumab | Trastuzumab | 388D4 | L234A/L235A/P329G |
| 26-20 | L234A/L235A/P329G | 388D4 | Trastuzumab | Trastuzumab | 388D4 | L234A/L235A/P329G |
| 26-21 | L234A/L235A/P329G | Trastuzumab | 388D4 | 388D4 | Trastuzumab | L234A/L235A/P329G |
| 26-22 | L234A/L235A/P329G | Trastuzumab | 388D4 | 388D4 | Trastuzumab | L234A/L235A/P329G |
| 26-23 | L234A/L235A/P329G | Trastuzumab | 388D4 | 388D4 | Trastuzumab | L234A/L235A/P329G |
| 26-24 | L234A/L235A/P329G | Trastuzumab | 388D4 | 388D4 | Trastuzumab | L234A/L235A/P329G |
| 26-25 | L234A/L235A/P329G | 388D4 | Cetuximab | Cetuximab | 388D4 | L234A/L235A/P329G |
| 26-26 | L234A/L235A/P329G | 388D4 | Cetuximab | Cetuximab | 388D4 | L234A/L235A/P329G |
| 26-27 | L234A/L235A/P329G | 388D4 | Cetuximab | Cetuximab | 388D4 | L234A/L235A/P329G |
| 26-28 | L234A/L235A/P329G | 388D4 | Cetuximab | Cetuximab | 388D4 | L234A/L235A/P329G |
| 26-29 | L234A/L235A/P329G | Cetuximab | 388D4 | 388D4 | Cetuximab | L234A/L235A/P329G |
| 26-30 | L234A/L235A/P329G | Cetuximab | 388D4 | 388D4 | Cetuximab | L234A/L235A/P329G |
| 26-31 | L234A/L235A/P329G | Cetuximab | 388D4 | 388D4 | Cetuximab | L234A/L235A/P329G |
| 26-32 | L234A/L235A/P329G | Cetuximab | 388D4 | 388D4 | Cetuximab | L234A/L235A/P329G |
| 26-33 | L234A/L235A/P329G | B6055 | Trastuzumab | Trastuzumab | B6055 | L234A/L235A/P329G |
| 26-34 | L234A/L235A/P329G | B6055 | Trastuzumab | Trastuzumab | B6055 | L234A/L235A/P329G |
| 26-35 | L234A/L235A/P329G | B6055 | Trastuzumab | Trastuzumab | B6055 | L234A/L235A/P329G |
| 26-36 | L234A/L235A/P329G | B6055 | Trastuzumab | Trastuzumab | B6055 | L234A/L235A/P329G |
| 26-37 | L234A/L235A/P329G | Trastuzumab | B6055 | B6055 | Trastuzumab | L234A/L235A/P329G |
| 26-38 | L234A/L235A/P329G | Trastuzumab | B6055 | B6055 | Trastuzumab | L234A/L235A/P329G |
| 26-39 | L234A/L235A/P329G | Trastuzumab | B6055 | B6055 | Trastuzumab | L234A/L235A/P329G |
| 26-40 | L234A/L235A/P329G | Trastuzumab | B6055 | B6055 | Trastuzumab | L234A/L235A/P329G |
| 26-41 | L234A/L235A/P329G | B6055 | Cetuximab | Cetuximab | B6055 | L234A/L235A/P329G |
| 26-42 | L234A/L235A/P329G | B6055 | Cetuximab | Cetuximab | B6055 | L234A/L235A/P329G |
| 26-43 | L234A/L235A/P329G | B6055 | Cetuximab | Cetuximab | B6055 | L234A/L235A/P329G |
| 26-44 | L234A/L235A/P329G | B6055 | Cetuximab | Cetuximab | B6055 | L234A/L235A/P329G |
| 26-45 | L234A/L235A/P329G | Cetuximab | B6055 | B6055 | Cetuximab | L234A/L235A/P329G |
| 26-46 | L234A/L235A/P329G | Cetuximab | B6055 | B6055 | Cetuximab | L234A/L235A/P329G |
| 26-47 | L234A/L235A/P329G | Cetuximab | B6055 | B6055 | Cetuximab | L234A/L235A/P329G |
| 26-48 | L234A/L235A/P329G | Cetuximab | B6055 | B6055 | Cetuximab | L234A/L235A/P329G |
| 26-49 | wild-type | Cetuximab | Trastuzumab | Trastuzumab | Cetuximab | wild-type |
| 26-50 | wild-type | Cetuximab | Trastuzumab | Trastuzumab | Cetuximab | wild-type |
| 26-51 | wild-type | Cetuximab | Trastuzumab | Trastuzumab | Cetuximab | wild-type |
| 26-52 | wild-type | Cetuximab | Trastuzumab | Trastuzumab | Cetuximab | wild-type |
| 26-53 | wild-type | Trastuzumab | Cetuximab | Cetuximab | Trastuzumab | wild-type |
| 26-54 | wild-type | Trastuzumab | Cetuximab | Cetuximab | Trastuzumab | wild-type |
| 26-55 | wild-type | Trastuzumab | Cetuximab | Cetuximab | Trastuzumab | wild-type |
| 26-56 | wild-type | Trastuzumab | Cetuximab | Cetuximab | Trastuzumab | wild-type |

TABLE 73

| Protein | D1-Fc | D5-Fab | D4-Fab | D3-Fab | D6-Fab | D2-Fc |
|---|---|---|---|---|---|---|
| ID | Specificity | Specificity | Specificity | Specificity | Specificity | Specificity |
| 26-01 | FcgR | ERBB2 (II) | ERBB2 (I) | ERBB2 (I) | ERBB2 (II) | FcgR |
| 26-02 | FcgR | ERBB2 (II) | ERBB2 (I) | ERBB2 (I) | ERBB2 (II) | FcgR |
| 26-03 | FcgR | ERBB2 (II) | ERBB2 (I) | ERBB2 (I) | ERBB2 (II) | FcgR |
| 26-04 | FcgR | ERBB2 (II) | ERBB2 (I) | ERBB2 (I) | ERBB2 (II) | FcgR |
| 26-05 | FcgR | ERBB2 (I) | ERBB2 (II) | ERBB2 (II) | ERBB2 (I) | FcgR |
| 26-06 | FcgR | ERBB2 (I) | ERBB2 (II) | ERBB2 (II) | ERBB2 (I) | FcgR |
| 26-07 | FcgR | ERBB2 (I) | ERBB2 (II) | ERBB2 (II) | ERBB2 (I) | FcgR |
| 26-08 | FcgR | ERBB2 (I) | ERBB2 (II) | ERBB2 (II) | ERBB2 (I) | FcgR |
| 26-09 | FcgR | ERBB2 (II) | EGFR | EGFR | ERBB2 (II) | FcgR |
| 26-10 | FcgR | ERBB2 (II) | EGFR | EGFR | ERBB2 (II) | FcgR |
| 26-11 | FcgR | ERBB2 (II) | EGFR | EGFR | ERBB2 (II) | FcgR |
| 26-12 | FcgR | ERBB2 (II) | EGFR | EGFR | ERBB2 (II) | FcgR |
| 26-13 | FcgR | EGFR | ERBB2 (II) | ERBB2 (II) | EGFR | FcgR |
| 26-14 | FcgR | EGFR | ERBB2 (II) | ERBB2 (II) | EGFR | FcgR |
| 26-15 | FcgR | EGFR | ERBB2 (II) | ERBB2 (II) | EGFR | FcgR |
| 26-16 | FcgR | EGFR | ERBB2 (II) | ERBB2 (II) | EGFR | FcgR |
| 26-17 | FcgR silent | PD-1 | ERBB2 (I) | ERBB2 (I) | PD-1 | FcgR silent |
| 26-18 | FcgR silent | PD-1 | ERBB2 (I) | ERBB2 (I) | PD-1 | FcgR silent |
| 26-19 | FcgR silent | PD-1 | ERBB2 (I) | ERBB2 (I) | PD-1 | FcgR silent |
| 26-20 | FcgR silent | PD-1 | ERBB2 (I) | ERBB2 (I) | PD-1 | FcgR silent |
| 26-21 | FcgR silent | ERBB2 (I) | PD-1 | PD-1 | ERBB2 (I) | FcgR silent |
| 26-22 | FcgR silent | ERBB2 (I) | PD-1 | PD-1 | ERBB2 (I) | FcgR silent |
| 26-23 | FcgR silent | ERBB2 (I) | PD-1 | PD-1 | ERBB2 (I) | FcgR silent |
| 26-24 | FcgR silent | ERBB2 (I) | PD-1 | PD-1 | ERBB2 (I) | FcgR silent |
| 26-25 | FcgR silent | PD-1 | EGFR | EGFR | PD-1 | FcgR silent |
| 26-26 | FcgR silent | PD-1 | EGFR | EGFR | PD-1 | FcgR silent |
| 26-27 | FcgR silent | PD-1 | EGFR | EGFR | PD-1 | FcgR silent |
| 26-28 | FcgR silent | PD-1 | EGFR | EGFR | PD-1 | FcgR silent |
| 26-29 | FcgR silent | EGFR | PD-1 | PD-1 | EGFR | FcgR silent |
| 26-30 | FcgR silent | EGFR | PD-1 | PD-1 | EGFR | FcgR silent |
| 26-31 | FcgR silent | EGFR | PD-1 | PD-1 | EGFR | FcgR silent |
| 26-32 | FcgR silent | EGFR | PD-1 | PD-1 | EGFR | FcgR silent |
| 26-33 | FcgR silent | PD-L1 | ERBB2 (I) | ERBB2 (I) | PD-L1 | FcgR silent |
| 26-34 | FcgR silent | PD-L1 | ERBB2 (I) | ERBB2 (I) | PD-L1 | FcgR silent |
| 26-35 | FcgR silent | PD-L1 | ERBB2 (I) | ERBB2 (I) | PD-L1 | FcgR silent |
| 26-36 | FcgR silent | PD-L1 | ERBB2 (I) | ERBB2 (I) | PD-L1 | FcgR silent |
| 26-37 | FcgR silent | ERBB2 (I) | PD-L1 | PD-L1 | ERBB2 (I) | FcgR silent |
| 26-38 | FcgR silent | ERBB2 (I) | PD-L1 | PD-L1 | ERBB2 (I) | FcgR silent |
| 26-39 | FcgR silent | ERBB2 (I) | PD-L1 | PD-L1 | ERBB2 (I) | FcgR silent |
| 26-40 | FcgR silent | ERBB2 (I) | PD-L1 | PD-L1 | ERBB2 (I) | FcgR silent |
| 26-41 | FcgR silent | PD-L1 | EGFR | EGFR | PD-L1 | FcgR silent |
| 26-42 | FcgR silent | PD-L1 | EGFR | EGFR | PD-L1 | FcgR silent |
| 26-43 | FcgR silent | PD-L1 | EGFR | EGFR | PD-L1 | FcgR silent |
| 26-44 | FcgR silent | PD-L1 | EGFR | EGFR | PD-L1 | FcgR silent |
| 26-45 | FcgR silent | EGFR | PD-L1 | PD-L1 | EGFR | FcgR silent |
| 26-46 | FcgR silent | EGFR | PD-L1 | PD-L1 | EGFR | FcgR silent |
| 26-47 | FcgR silent | EGFR | PD-L1 | PD-L1 | EGFR | FcgR silent |
| 26-48 | FcgR silent | EGFR | PD-L1 | PD-L1 | EGFR | FcgR silent |
| 26-49 | FcgR | α-EGFR | α-ERBB2 (I) | α-ERBB2 (I) | α-EGFR | FcgR |
| 26-50 | FcgR | α-EGFR | α-ERBB2 (I) | α-ERBB2 (I) | α-EGFR | FcgR |
| 26-51 | FcgR | α-EGFR | α-ERBB2 (I) | α-ERBB2 (I) | α-EGFR | FcgR |
| 26-52 | FcgR | α-EGFR | α-ERBB2 (I) | α-ERBB2 (I) | α-EGFR | FcgR |
| 26-53 | FcgR | α-ERBB2 (I) | α-EGFR | α-EGFR | α-ERBB2 (I) | FcgR |
| 26-54 | FcgR | α-ERBB2 (I) | α-EGFR | α-EGFR | α-ERBB2 (I) | FcgR |
| 26-55 | FcgR | α-ERBB2 (I) | α-EGFR | α-EGFR | α-ERBB2 (I) | FcgR |
| 26-56 | FcgR | α-ERBB2 (I) | α-EGFR | α-EGFR | α-ERBB2 (I) | FcgR |

TABLE 74

| | H1 Chain | | H2 Chain | | L1 Chain | | L2 Chain | |
|---|---|---|---|---|---|---|---|---|
| Protein | V region | Amino acid | V region | Amino acid | V region | Amino acid | V region | Amino acid |
| ID | type | Substitutions | Type | Substitutions | Type | Substitutions | Type | Substitutions |
| 26-01 | VH-CH1 | Q39K/S183E | VK-CH1 | Q38E/S183K | VK-CK | Q38E/V133K | VH-CK | Q39K/V133E |
| 26-02 | VH-CH1 | Q39K/S183E | VK-CH1 | Q38K/S183K | VK-CK | Q38E/V133K | VH-CK | Q39E/V133E |
| 26-03 | VH-CH1 | Q39E/S183E | VK-CH1 | Q38E/S183K | VK-CK | Q38K/V133K | VH-CK | Q39K/V133E |
| 26-04 | VH-CH1 | Q39E/S183E | VK-CH1 | Q38K/S183K | VK-CK | Q38K/V133K | VH-CK | Q39E/V133E |
| 26-05 | VH-CH1 | Q39K/S183E | VK-CH1 | Q38E/S183K | VK-CK | Q38E/V133K | VH-CK | Q39K/V133E |
| 26-06 | VH-CH1 | Q39K/S183E | VK-CH1 | Q38K/S183K | VK-CK | Q38E/V133K | VH-CK | Q39E/V133E |
| 26-07 | VH-CH1 | Q39E/S183E | VK-CH1 | Q38E/S183K | VK-CK | Q38K/V133K | VH-CK | Q39K/V133E |
| 26-08 | VH-CH1 | Q39E/S183E | VK-CH1 | Q38K/S183K | VK-CK | Q38K/V133K | VH-CK | Q39E/V133E |
| 26-09 | VH-CH1 | Q39K/S183E | VK-CH1 | Q38E/S183K | VK-CK | Q38E/V133K | VH-CK | Q39K/V133E |
| 26-10 | VH-CH1 | Q39K/S183E | VK-CH1 | Q38K/S183K | VK-CK | Q38E/V133K | VH-CK | Q39E/V133E |
| 26-11 | VH-CH1 | Q39E/S183E | VK-CH1 | Q38E/S183K | VK-CK | Q38K/V133K | VH-CK | Q39K/V133E |
| 26-12 | VH-CH1 | Q39E/S183E | VK-CH1 | Q38K/S183K | VK-CK | Q38K/V133K | VH-CK | Q39E/V133E |
| 26-13 | VH-CH1 | Q39K/S183E | VK-CH1 | Q38E/S183K | VK-CK | Q38E/V133K | VH-CK | Q39K/V133E |
| 26-14 | VH-CH1 | Q39K/S183E | VK-CH1 | Q38K/S183K | VK-CK | Q38E/V133K | VH-CK | Q39E/V133E |
| 26-15 | VH-CH1 | Q39E/S183E | VK-CH1 | Q38E/S183K | VK-CK | Q38K/V133K | VH-CK | Q39K/V133E |
| 26-16 | VH-CH1 | Q39E/S183E | VK-CH1 | Q38K/S183K | VK-CK | Q38K/V133K | VH-CK | Q39E/V133E |
| 26-17 | VH-CH1 | Q39K/S183E | VK-CH1 | Q38E/S183K | VK-CK | Q38E/V133K | VH-CK | Q39K/V133E |
| 26-18 | VH-CH1 | Q39K/S183E | VK-CH1 | Q38K/S183K | VK-CK | Q38E/V133K | VH-CK | Q39E/V133E |
| 26-19 | VH-CH1 | Q39E/S183E | VK-CH1 | Q38E/S183K | VK-CK | Q38K/V133K | VH-CK | Q39K/V133E |
| 26-20 | VH-CH1 | Q39E/S183E | VK-CH1 | Q38K/S183K | VK-CK | Q38K/V133K | VH-CK | Q39E/V133E |
| 26-21 | VH-CH1 | Q39K/S183E | VK-CH1 | Q38E/S183K | VK-CK | Q38E/V133K | VH-CK | Q39K/V133E |
| 26-22 | VH-CH1 | Q39K/S183E | VK-CH1 | Q38K/S183K | VK-CK | Q38E/V133K | VH-CK | Q39E/V133E |
| 26-23 | VH-CH1 | Q39E/S183E | VK-CH1 | Q38E/S183K | VK-CK | Q38K/V133K | VH-CK | Q39K/V133E |
| 26-24 | VH-CH1 | Q39E/S183E | VK-CH1 | Q38K/S183K | VK-CK | Q38K/V133K | VH-CK | Q39E/V133E |
| 26-25 | VH-CH1 | Q39K/S183E | VK-CH1 | Q38E/S183K | VK-CK | Q38E/V133K | VH-CK | Q39K/V133E |
| 26-26 | VH-CH1 | Q39K/S183E | VK-CH1 | Q38K/S183K | VK-CK | Q38E/V133K | VH-CK | Q39E/V133E |
| 26-27 | VH-CH1 | Q39E/S183E | VK-CH1 | Q38E/S183K | VK-CK | Q38K/V133K | VH-CK | Q39K/V133E |
| 26-28 | VH-CH1 | Q39E/S183E | VK-CH1 | Q38K/S183K | VK-CK | Q38K/V133K | VH-CK | Q39E/V133E |
| 26-29 | VH-CH1 | Q39K/S183E | VK-CH1 | Q38E/S183K | VK-CK | Q38E/V133K | VH-CK | Q39K/V133E |
| 26-30 | VH-CH1 | Q39K/S183E | VK-CH1 | Q38K/S183K | VK-CK | Q38E/V133K | VH-CK | Q39E/V133E |
| 26-31 | VH-CH1 | Q39E/S183E | VK-CH1 | Q38E/S183K | VK-CK | Q38K/V133K | VH-CK | Q39K/V133E |
| 26-32 | VH-CH1 | Q39E/S183E | VK-CH1 | Q38K/S183K | VK-CK | Q38K/V133K | VH-CK | Q39E/V133E |
| 26-33 | VH-CH1 | Q39K/S183E | VK-CH1 | Q38E/S183K | VK-CK | Q38E/V133K | VH-CK | Q39K/V133E |
| 26-34 | VH-CH1 | Q39K/S183E | VK-CH1 | Q38K/S183K | VK-CK | Q38E/V133K | VH-CK | Q39E/V133E |
| 26-35 | VH-CH1 | Q39E/S183E | VK-CH1 | Q38E/S183K | VK-CK | Q38K/V133K | VH-CK | Q39K/V133E |
| 26-36 | VH-CH1 | Q39E/S183E | VK-CH1 | Q38K/S183K | VK-CK | Q38K/V133K | VH-CK | Q39E/V133E |
| 26-37 | VH-CH1 | Q39K/S183E | VK-CH1 | Q38E/S183K | VK-CK | Q38E/V133K | VH-CK | Q39K/V133E |
| 26-38 | VH-CH1 | Q39K/S183E | VK-CH1 | Q38K/S183K | VK-CK | Q38E/V133K | VH-CK | Q39E/V133E |
| 26-39 | VH-CH1 | Q39E/S183E | VK-CH1 | Q38E/S183K | VK-CK | Q38K/V133K | VH-CK | Q39K/V133E |
| 26-40 | VH-CH1 | Q39E/S183E | VK-CH1 | Q38K/S183K | VK-CK | Q38K/V133K | VH-CK | Q39E/V133E |
| 26-41 | VH-CH1 | Q39K/S183E | VK-CH1 | Q38E/S183K | VK-CK | Q38E/V133K | VH-CK | Q39K/V133E |
| 26-42 | VH-CH1 | Q39K/S183E | VK-CH1 | Q38K/S183K | VK-CK | Q38E/V133K | VH-CK | Q39E/V133E |
| 26-43 | VH-CH1 | Q39E/S183E | VK-CH1 | Q38E/S183K | VK-CK | Q38K/V133K | VH-CK | Q39K/V133E |
| 26-44 | VH-CH1 | Q39E/S183E | VK-CH1 | Q38K/S183K | VK-CK | Q38K/V133K | VH-CK | Q39E/V133E |
| 26-45 | VH-CH1 | Q39K/S183E | VK-CH1 | Q38E/S183K | VK-CK | Q38E/V133K | VH-CK | Q39K/V133E |
| 26-46 | VH-CH1 | Q39K/S183E | VK-CH1 | Q38K/S183K | VK-CK | Q38E/V133K | VH-CK | Q39E/V133E |
| 26-47 | VH-CH1 | Q39E/S183E | VK-CH1 | Q38E/S183K | VK-CK | Q38K/V133K | VH-CK | Q39K/V133E |
| 26-48 | VH-CH1 | Q39E/S183E | VK-CH1 | Q38K/S183K | VK-CK | Q38K/V133K | VH-CK | Q39E/V133E |
| 26-49 | VH-CH1 | Q39K/S183E | VK-CH1 | Q38E/S183K | VK-CK | Q38E/V133K | VH-CK | Q39K/V133E |
| 26-50 | VH-CH1 | Q39K/S183E | VK-CH1 | Q38K/S183K | VK-CK | Q38E/V133K | VH-CK | Q39E/V133E |
| 26-51 | VH-CH1 | Q39E/S183E | VK-CH1 | Q38E/S183K | VK-CK | Q38K/V133K | VH-CK | Q39K/V133E |
| 26-52 | VH-CH1 | Q39E/S183E | VK-CH1 | Q38K/S183K | VK-CK | Q38K/V133K | VH-CK | Q39E/V133E |
| 26-53 | VH-CH1 | Q39K/S183E | VK-CH1 | Q38E/S183K | VK-CK | Q38E/V133K | VH-CK | Q39K/V133E |
| 26-54 | VH-CH1 | Q39K/S183E | VK-CH1 | Q38K/S183K | VK-CK | Q38E/V133K | VH-CK | Q39E/V133E |
| 26-55 | VH-CH1 | Q39E/S183E | VK-CH1 | Q38E/S183K | VK-CK | Q38K/V133K | VH-CK | Q39K/V133E |
| 26-56 | VH-CH1 | Q39E/S183E | VK-CH1 | Q38K/S183K | VK-CK | Q38K/V133K | VH-CK | Q39E/V133E |

### Example 29—Pentavalent/Hexavalent, Trispecific Tetrahedral Antibodies Comprising Two Distinct Fabs that Specifically Bind CD3 and Either CD20, ERBB2, or CEACAM5, and the 4-1BB Ligand (4-1BBL)

[1356] Tetrahedral antibodies incorporating an anti-CD3 domain were designed, expressed, and evaluated for their ability to co-engage T cells and disease target cells, and activate immune cellular signaling via the 4-1BB ligand-receptor interaction, for the treatment of cancer and other disease. This series of bispecific constructs employ VH and VL regions from rituximab (anti-CD20), trastuzumab (anti-ERBB2), or cergutuzumab (anti-CEACAM5) to engage target cells, together with VH and VL regions from SP34 (anti-CD3) to engage T cells, and the 4-1BB ligand to activate T cells (Tables 75, 76). Two tetrahedral antibody configurations were employed (Table 77). In the first configuration, the disease targeting Fab domain (anti-CD20, anti-ERBB2, or anti-CEACAM5) is placed in D3/D4 (bivalent), the T cell engaging Fab domain is placed in D6 (monovalent) and/or D5/D6 (bivalent), D1/D2 are Fc domains, and the 4-1BB ligand is placed in D7/D8. In the second configuration, the disease targeting Fab domain (anti-CD19 or anti-CD20) is placed in D3/D4 (bivalent), the T cell engaging Fab domain is placed in D2 (monovalent), D1 is an Fc domain, and the 4-1BB ligand is placed in D7/D8. To achieve placement of the 4-1BB ligand, it is variously attached at the C-terminus of the H1, H2, Fc, or Fab chains (Table 77). To optimize correct VH/VL pairing and to minimize VH/VL mispairing, V region exchange is combined with four different sets of charge pairs to ensure correct pairing of heavy and light chain V regions (Table 78). Additionally, to further facilitate purification of the correctly paired product by Protein A chromatography, for bivalent CD3, the H1 chain incorporates the H435R/Y436F substitution (for bivalent CD3); for monovalent CD3, both the H1 and H2 chains incorporate the H435R/Y436F substitution. The constructs are then evaluated for their structural bispecificity by intact mass spectrometry as described in Example 18, and for their functional bispecificity using a variety of in vitro binding assays, cytotoxicity assays, and cytokine induction and release assays, and in vivo cancer efficacy models, known to one skilled in the art.

TABLE 75

| Protein | | | | | |
|---|---|---|---|---|---|
| ID | H1 Chain | H2 Chain | L1 Chain | L2 Chain | Fc Chain |
| 27-01 | SEQ ID NO: 5035 | SEQ ID NO: 5036 | SEQ ID NO: 5061 | SEQ ID NO: 5062 | SEQ ID NO: 5068 |
| 27-02 | SEQ ID NO: 5035 | SEQ ID NO: 5037 | SEQ ID NO: 5061 | SEQ ID NO: 5063 | SEQ ID NO: 5068 |
| 27-03 | SEQ ID NO: 5038 | SEQ ID NO: 5039 | SEQ ID NO: 5061 | SEQ ID NO: 5062 | SEQ ID NO: 5068 |
| 27-04 | SEQ ID NO: 5038 | SEQ ID NO: 5040 | SEQ ID NO: 5061 | SEQ ID NO: 5063 | SEQ ID NO: 5068 |
| 27-05 | SEQ ID NO: 5038 | SEQ ID NO: 5036 | SEQ ID NO: 5061 | SEQ ID NO: 5062 | SEQ ID NO: 5069 |
| 27-06 | SEQ ID NO: 5038 | SEQ ID NO. 5037 | SEQ ID NO. 5061 | SEQ ID NO. 5063 | SEQ ID NO: 5069 |
| 27-07 | SEQ ID NO: 5035 | SEQ ID NO. 5041 | SEQ ID NO. 5061 | SEQ ID NO. 5062 | SEQ ID NO: 5068 |
| 27-08 | SEQ ID NO: 5035 | SEQ ID NO. 5042 | SEQ ID NO. 5061 | SEQ ID NO. 5063 | SEQ ID NO: 5068 |
| 27-09 | SEQ ID NO: 5038 | SEQ ID NO. 5043 | SEQ ID NO. 5061 | SEQ ID NO. 5062 | SEQ ID NO: 5068 |
| 27-10 | SEQ ID NO: 5038 | SEQ ID NO. 5044 | SEQ ID NO. 5061 | SEQ ID NO. 5063 | SEQ ID NO: 5068 |
| 27-11 | SEQ ID NO: 5038 | SEQ ID NO. 5041 | SEQ ID NO. 5061 | SEQ ID NO. 5062 | SEQ ID NO: 5069 |
| 27-12 | SEQ ID NO: 5038 | SEQ ID NO. 5042 | SEQ ID NO. 5061 | SEQ ID NO. 5063 | SEQ ID NO: 5069 |
| 27-13 | SEQ ID NO: 5038 | SEQ ID NO. 5041 | SEQ ID NO. 5061 | SEQ ID NO. 5064 | SEQ ID NO: 5068 |
| 27-14 | SEQ ID NO: 5038 | SEQ ID NO. 5042 | SEQ ID NO. 5061 | SEQ ID NO. 5065 | SEQ ID NO: 5068 |
| 27-15 | SEQ ID NO: 5035 | SEQ ID NO. 5045 | SEQ ID NO. 5061 | SEQ ID NO. 5062 | |
| 27-16 | SEQ ID NO: 5035 | SEQ ID NO. 5046 | SEQ ID NO. 5061 | SEQ ID NO. 5063 | |
| 27-17 | SEQ ID NO: 5038 | SEQ ID NO. 5047 | SEQ ID NO. 5061 | SEQ ID NO. 5062 | |
| 27-18 | SEQ ID NO: 5038 | SEQ ID NO. 5048 | SEQ ID NO. 5061 | SEQ ID NO. 5063 | |
| 27-19 | SEQ ID NO: 5049 | SEQ ID NO. 5036 | SEQ ID NO. 5066 | SEQ ID NO. 5062 | SEQ ID NO: 5068 |
| 27-20 | SEQ ID NO: 5049 | SEQ ID NO. 5037 | SEQ ID NO. 5066 | SEQ ID NO. 5063 | SEQ ID NO: 5068 |
| 27-21 | SEQ ID NO: 5050 | SEQ ID NO. 5039 | SEQ ID NO. 5066 | SEQ ID NO. 5062 | SEQ ID NO: 5068 |
| 27-22 | SEQ ID NO: 5050 | SEQ ID NO. 5040 | SEQ ID NO. 5066 | SEQ ID NO. 5063 | SEQ ID NO: 5068 |
| 27-23 | SEQ ID NO: 5050 | SEQ ID NO. 5036 | SEQ ID NO. 5066 | SEQ ID NO. 5062 | SEQ ID NO: 5069 |
| 27-24 | SEQ ID NO: 5050 | SEQ ID NO. 5037 | SEQ ID NO. 5066 | SEQ ID NO. 5063 | SEQ ID NO: 5069 |
| 27-25 | SEQ ID NO: 5049 | SEQ ID NO. 5051 | SEQ ID NO. 5066 | SEQ ID NO. 5062 | SEQ ID NO: 5068 |
| 27-26 | SEQ ID NO: 5049 | SEQ ID NO. 5052 | SEQ ID NO. 5066 | SEQ ID NO. 5063 | SEQ ID NO: 5068 |
| 27-27 | SEQ ID NO: 5050 | SEQ ID NO. 5053 | SEQ ID NO. 5066 | SEQ ID NO. 5062 | SEQ ID NO: 5068 |
| 27-28 | SEQ ID NO: 5050 | SEQ ID NO. 5054 | SEQ ID NO. 5066 | SEQ ID NO. 5063 | SEQ ID NO: 5068 |
| 27-29 | SEQ ID NO: 5050 | SEQ ID NO. 5051 | SEQ ID NO. 5066 | SEQ ID NO. 5062 | SEQ ID NO: 5069 |
| 27-30 | SEQ ID NO: 5050 | SEQ ID NO. 5052 | SEQ ID NO. 5066 | SEQ ID NO. 5063 | SEQ ID NO: 5069 |
| 27-31 | SEQ ID NO: 5050 | SEQ ID NO. 5051 | SEQ ID NO. 5066 | SEQ ID NO. 5064 | SEQ ID NO: 5068 |
| 27-32 | SEQ ID NO: 5050 | SEQ ID NO. 5052 | SEQ ID NO. 5066 | SEQ ID NO. 5065 | SEQ ID NO: 5068 |
| 27-33 | SEQ ID NO: 5049 | SEQ ID NO. 5045 | SEQ ID NO. 5066 | SEQ ID NO. 5062 | |
| 27-34 | SEQ ID NO: 5049 | SEQ ID NO. 5046 | SEQ ID NO. 5066 | SEQ ID NO. 5063 | |
| 27-35 | SEQ ID NO: 5050 | SEQ ID NO. 5047 | SEQ ID NO. 5066 | SEQ ID NO. 5062 | |
| 27-36 | SEQ ID NO: 5050 | SEQ ID NO. 5048 | SEQ ID NO. 5066 | SEQ ID NO. 5063 | |
| 27-37 | SEQ ID NO: 5055 | SEQ ID NO. 5036 | SEQ ID NO. 5067 | SEQ ID NO. 5062 | SEQ ID NO: 5068 |
| 27-38 | SEQ ID NO: 5055 | SEQ ID NO. 5037 | SEQ ID NO. 5067 | SEQ ID NO. 5063 | SEQ ID NO: 5068 |
| 27-39 | SEQ ID NO: 5056 | SEQ ID NO. 5039 | SEQ ID NO. 5067 | SEQ ID NO. 5062 | SEQ ID NO: 5068 |
| 27-40 | SEQ ID NO: 5056 | SEQ ID NO. 5040 | SEQ ID NO. 5067 | SEQ ID NO. 5063 | SEQ ID NO: 5068 |
| 27-41 | SEQ ID NO: 5056 | SEQ ID NO. 5036 | SEQ ID NO. 5067 | SEQ ID NO. 5062 | SEQ ID NO: 5069 |
| 27-42 | SEQ ID NO: 5056 | SEQ ID NO. 5037 | SEQ ID NO. 5067 | SEQ ID NO. 5063 | SEQ ID NO: 5069 |
| 27-43 | SEQ ID NO: 5055 | SEQ ID NO. 5057 | SEQ ID NO. 5067 | SEQ ID NO. 5062 | SEQ ID NO: 5068 |
| 27-44 | SEQ ID NO: 5055 | SEQ ID NO. 5058 | SEQ ID NO. 5067 | SEQ ID NO. 5063 | SEQ ID NO: 5068 |
| 27-45 | SEQ ID NO: 5056 | SEQ ID NO. 5059 | SEQ ID NO. 5067 | SEQ ID NO. 5062 | SEQ ID NO: 5068 |
| 27-46 | SEQ ID NO: 5056 | SEQ ID NO. 5060 | SEQ ID NO. 5067 | SEQ ID NO. 5063 | SEQ ID NO: 5068 |
| 27-47 | SEQ ID NO: 5056 | SEQ ID NO. 5057 | SEQ ID NO. 5067 | SEQ ID NO. 5062 | SEQ ID NO: 5069 |
| 27-48 | SEQ ID NO: 5056 | SEQ ID NO. 5058 | SEQ ID NO. 5067 | SEQ ID NO. 5063 | SEQ ID NO: 5069 |
| 27-49 | SEQ ID NO: 5056 | SEQ ID NO. 5057 | SEQ ID NO. 5067 | SEQ ID NO. 5064 | SEQ ID NO: 5068 |
| 27-50 | SEQ ID NO: 5056 | SEQ ID NO. 5058 | SEQ ID NO. 5067 | SEQ ID NO. 5065 | SEQ ID NO: 5068 |
| 27-51 | SEQ ID NO: 5055 | SEQ ID NO. 5045 | SEQ ID NO. 5067 | SEQ ID NO. 5062 | |
| 27-52 | SEQ ID NO: 5055 | SEQ ID NO. 5046 | SEQ ID NO. 5067 | SEQ ID NO. 5063 | |
| 27-53 | SEQ ID NO: 5056 | SEQ ID NO. 5047 | SEQ ID NO. 5067 | SEQ ID NO. 5062 | |
| 27-54 | SEQ ID NO: 5056 | SEQ ID NO. 5048 | SEQ ID NO. 5067 | SEQ ID NO. 5063 | |

TABLE 76

| Protein | | D7 (4- | D5- | | | D6- | D2- | D8 (4- | |
|---|---|---|---|---|---|---|---|---|---|
| ID | D1-Fc | 1BBL) | Fab | D4-Fab | D3-Fab | Fab | Fab | 1BBL) | D2-Fc |
| 27-01 | L234A/L235A/P329G | H1 chain | | Rituximab | Rituximab | SP34 | | H1 chain | L234A/L235A/P329G |
| 27-02 | L234A/L235A/P329G | H1 chain | | Rituximab | Rituximab | SP34 | | H1 chain | L234A/L235A/P329G |
| 27-03 | L234A/L235A/P329G | H2 chain | | Rituximab | Rituximab | SP34 | | H2 chain | L234A/L235A/P329G |
| 27-04 | L234A/L235A/P329G | H2 chain | | Rituximab | Rituximab | SP34 | | H2 chain | L234A/L235A/P329G |
| 27-05 | L234A/L235A/P329G | Fc chain | | Rituximab | Rituximab | SP34 | | Fc chain | L234A/L235A/P329G |
| 27-06 | L234A/L235A/P329G | Fc chain | | Rituximab | Rituximab | SP34 | | Fc chain | L234A/L235A/P329G |
| 27-07 | L234A/L235A/P329G | H1 chain | | Rituximab | Rituximab | | SP34 | H1 chain | |
| 27-08 | L234A/L235A/P329G | H1 chain | | Rituximab | Rituximab | | SP34 | H1 chain | |
| 27-09 | L234A/L235A/P329G | H2 chain | | Rituximab | Rituximab | | SP34 | H2 chain | |
| 27-10 | L234A/L235A/P329G | H2 chain | | Rituximab | Rituximab | | SP34 | H2 chain | |
| 27-11 | L234A/L235A/P329G | Fc chain | | Rituximab | Rituximab | | SP34 | Fc chain | |
| 27-12 | L234A/L235A/P329G | Fc chain | | Rituximab | Rituximab | | SP34 | Fc chain | |
| 27-13 | L234A/L235A/P329G | Fab chain | | Rituximab | Rituximab | | SP34 | Fab chain | |
| 27-14 | L234A/L235A/P329G | Fab chain | | Rituximab | Rituximab | | SP34 | Fab chain | |
| 27-15 | L234A/L235A/P329G | H1 chain | SP34 | Rituximab | Rituximab | SP34 | | H1 chain | L234A/L235A/P329G |
| 27-16 | L234A/L235A/P329G | H1 chain | SP34 | Rituximab | Rituximab | SP34 | | H1 chain | L234A/L235A/P329G |
| 27-17 | L234A/L235A/P329G | H2 chain | SP34 | Rituximab | Rituximab | SP34 | | H2 chain | L234A/L235A/P329G |
| 27-18 | L234A/L235A/P329G | H2 chain | SP34 | Rituximab | Rituximab | SP34 | | H2 chain | L234A/L235A/P329G |
| 27-19 | L234A/L235A/P329G | H1 chain | | Trastuzumab | Trastuzumab | SP34 | | H1 chain | L234A/L235A/P329G |
| 27-20 | L234A/L235A/P329G | H1 chain | | Trastuzumab | Trastuzumab | SP34 | | H1 chain | L234A/L235A/P329G |
| 27-21 | L234A/L235A/P329G | H2 chain | | Trastuzumab | Trastuzumab | SP34 | | H2 chain | L234A/L235A/P329G |
| 27-22 | L234A/L235A/P329G | H2 chain | | Trastuzumab | Trastuzumab | SP34 | | H2 chain | L234A/L235A/P329G |
| 27-23 | L234A/L235A/P329G | Fc chain | | Trastuzumab | Trastuzumab | SP34 | | Fc chain | L234A/L235A/P329G |
| 27-24 | L234A/L235A/P329G | Fc chain | | Trastuzumab | Trastuzumab | SP34 | | Fc chain | L234A/L235A/P329G |
| 27-25 | L234A/L235A/P329G | H1 chain | | Trastuzumab | Trastuzumab | | SP34 | H1 chain | |
| 27-26 | L234A/L235A/P329G | H1 chain | | Trastuzumab | Trastuzumab | | SP34 | H1 chain | |
| 27-27 | L234A/L235A/P329G | H2 chain | | Trastuzumab | Trastuzumab | | SP34 | H2 chain | |
| 27-28 | L234A/L235A/P329G | H2 chain | | Trastuzumab | Trastuzumab | | SP34 | H2 chain | |
| 27-29 | L234A/L235A/P329G | Fc chain | | Trastuzumab | Trastuzumab | | SP34 | Fc chain | |
| 27-30 | L234A/L235A/P329G | Fc chain | | Trastuzumab | Trastuzumab | | SP34 | Fc chain | |
| 27-31 | L234A/L235A/P329G | Fab chain | | Trastuzumab | Trastuzumab | | SP34 | Fab chain | |
| 27-32 | L234A/L235A/P329G | Fab chain | | Trastuzumab | Trastuzumab | | SP34 | Fab chain | |
| 27-33 | L234A/L235A/P329G | H1 chain | SP34 | Trastuzumab | Trastuzumab | SP34 | | H1 chain | L234A/L235A/P329G |
| 27-34 | L234A/L235A/P329G | H1 chain | SP34 | Trastuzumab | Trastuzumab | SP34 | | H1 chain | L234A/L235A/P329G |
| 27-35 | L234A/L235A/P329G | H2 chain | SP34 | Trastuzumab | Trastuzumab | SP34 | | H2 chain | L234A/L235A/P329G |
| 27-36 | L234A/L235A/P329G | H2 chain | SP34 | Trastuzumab | Trastuzumab | SP34 | | H2 chain | L234A/L235A/P329G |
| 27-37 | L234A/L235A/P329G | H1 chain | | Cergutuzumab | Cergutuzumab | SP34 | | H1 chain | L234A/L235A/P329G |
| 27-38 | L234A/L235A/P329G | H1 chain | | Cergutuzumab | Cergutuzumab | SP34 | | H1 chain | L234A/L235A/P329G |
| 27-39 | L234A/L235A/P329G | H2 chain | | Cergutuzumab | Cergutuzumab | SP34 | | H2 chain | L234A/L235A/P329G |
| 27-40 | L234A/L235A/P329G | H2 chain | | Cergutuzumab | Cergutuzumab | SP34 | | H2 chain | L234A/L235A/P329G |
| 27-41 | L234A/L235A/P329G | Fc chain | | Cergutuzumab | Cergutuzumab | SP34 | | Fc chain | L234A/L235A/P329G |
| 27-42 | L234A/L235A/P329G | Fc chain | | Cergutuzumab | Cergutuzumab | SP34 | | Fc chain | L234A/L235A/P329G |
| 27-43 | L234A/L235A/P329G | H1 chain | | Cergutuzumab | Cergutuzumab | | SP34 | H1 chain | |
| 27-44 | L234A/L235A/P329G | H1 chain | | Cergutuzumab | Cergutuzumab | | SP34 | H1 chain | |
| 27-45 | L234A/L235A/P329G | H2 chain | | Cergutuzumab | Cergutuzumab | | SP34 | H2 chain | |
| 27-46 | L234A/L235A/P329G | H2 chain | | Cergutuzumab | Cergutuzumab | | SP34 | H2 chain | |
| 27-47 | L234A/L235A/P329G | Fc chain | | Cergutuzumab | Cergutuzumab | | SP34 | Fc chain | |
| 27-48 | L234A/L235A/P329G | Fc chain | | Cergutuzumab | Cergutuzumab | | SP34 | Fc chain | |
| 27-49 | L234A/L235A/P329G | Fab chain | | Cergutuzumab | Cergutuzumab | | SP34 | Fab chain | |
| 27-50 | L234A/L235A/P329G | Fab chain | | Cergutuzumab | Cergutuzumab | | SP34 | Fab chain | |
| 27-51 | L234A/L235A/P329G | H1 chain | SP34 | Cergutuzumab | Cergutuzumab | SP34 | | H1 chain | L234A/L235A/P329G |
| 27-52 | L234A/L235A/P329G | H1 chain | SP34 | Cergutuzumab | Cergutuzumab | SP34 | | H1 chain | L234A/L235A/P329G |
| 27-53 | L234A/L235A/P329G | H2 chain | SP34 | Cergutuzumab | Cergutuzumab | SP34 | | H2 chain | L234A/L235A/P329G |
| 27-54 | L234A/L235A/P329G | H2 chain | SP34 | Cergutuzumab | Cergutuzumab | SP34 | | H2 chain | L234A/L235A/P329G |

TABLE 77

| Protein | D1-Fc | D7 | D5-Fab | D4-Fab | D3-Fab | D6-Fab | D2-Fab | D8 | D2-Fc |
|---|---|---|---|---|---|---|---|---|---|
| ID | Specificity | Specificity | Specificity | Specificity | Specificity | Specificity | Specificity | Specificity | Specificity |
| 27-01 | FcgR silent | 4-1BB | | CD20 | CD20 | CD3 | | 4-1BB | FcgR silent |
| 27-02 | FcgR silent | 4-1BB | | CD20 | CD20 | CD3 | | 4-1BB | FcgR silent |
| 27-03 | FcgR silent | 4-1BB | | CD20 | CD20 | CD3 | | 4-1BB | FcgR silent |
| 27-04 | FcgR silent | 4-1BB | | CD20 | CD20 | CD3 | | 4-1BB | FcgR silent |
| 27-05 | FcgR silent | 4-1BB | | CD20 | CD20 | CD3 | | 4-1BB | FcgR silent |
| 27-06 | FcgR silent | 4-1BB | | CD20 | CD20 | CD3 | | 4-1BB | FcgR silent |
| 27-07 | FcgR silent | 4-1BB | | CD20 | CD20 | | CD3 | 4-1BB | FcgR silent |
| 27-08 | FcgR silent | 4-1BB | | CD20 | CD20 | | CD3 | 4-1BB | FcgR silent |
| 27-09 | FcgR silent | 4-1BB | | CD20 | CD20 | | CD3 | 4-1BB | FcgR silent |
| 27-10 | FcgR silent | 4-1BB | | CD20 | CD20 | | CD3 | 4-1BB | FcgR silent |
| 27-11 | FcgR silent | 4-1BB | | CD20 | CD20 | | CD3 | 4-1BB | FcgR silent |
| 27-12 | FcgR silent | 4-1BB | | CD20 | CD20 | | CD3 | 4-1BB | FcgR silent |
| 27-13 | FcgR silent | 4-1BB | | CD20 | CD20 | | CD3 | 4-1BB | FcgR silent |
| 27-14 | FcgR silent | 4-1BB | | CD20 | CD20 | | CD3 | 4-1BB | FcgR silent |
| 27-15 | FcgR silent | 4-1BB | CD3 | CD20 | CD20 | CD3 | | 4-1BB | FcgR silent |
| 27-16 | FcgR silent | 4-1BB | CD3 | CD20 | CD20 | CD3 | | 4-1BB | FcgR silent |
| 27-17 | FcgR silent | 4-1BB | CD3 | CD20 | CD20 | CD3 | | 4-1BB | FcgR silent |
| 27-18 | FcgR silent | 4-1BB | CD3 | CD20 | CD20 | CD3 | | 4-1BB | FcgR silent |
| 27-19 | FcgR silent | 4-1BB | | ERBB2 | ERBB2 | CD3 | | 4-1BB | FcgR silent |
| 27-20 | FcgR silent | 4-1BB | | ERBB2 | ERBB2 | CD3 | | 4-1BB | FcgR silent |
| 27-21 | FcgR silent | 4-1BB | | ERBB2 | ERBB2 | CD3 | | 4-1BB | FcgR silent |
| 27-22 | FcgR silent | 4-1BB | | ERBB2 | ERBB2 | CD3 | | 4-1BB | FcgR silent |
| 27-23 | FcgR silent | 4-1BB | | ERBB2 | ERBB2 | CD3 | | 4-1BB | FcgR silent |
| 27-24 | FcgR silent | 4-1BB | | ERBB2 | ERBB2 | CD3 | | 4-1BB | FcgR silent |
| 27-25 | FcgR silent | 4-1BB | | ERBB2 | ERBB2 | | CD3 | 4-1BB | FcgR silent |
| 27-26 | FcgR silent | 4-1BB | | ERBB2 | ERBB2 | | CD3 | 4-1BB | FcgR silent |
| 27-27 | FcgR silent | 4-1BB | | ERBB2 | ERBB2 | | CD3 | 4-1BB | FcgR silent |
| 27-28 | FcgR silent | 4-1BB | | ERBB2 | ERBB2 | | CD3 | 4-1BB | FcgR silent |
| 27-29 | FcgR silent | 4-1BB | | ERBB2 | ERBB2 | | CD3 | 4-1BB | FcgR silent |
| 27-30 | FcgR silent | 4-1BB | | ERBB2 | ERBB2 | | CD3 | 4-1BB | FcgR silent |
| 27-31 | FcgR silent | 4-1BB | | ERBB2 | ERBB2 | | CD3 | 4-1BB | FcgR silent |
| 27-32 | FcgR silent | 4-1BB | | ERBB2 | ERBB2 | | CD3 | 4-1BB | FcgR silent |
| 27-33 | FcgR silent | 4-1BB | CD3 | ERBB2 | ERBB2 | CD3 | | 4-1BB | FcgR silent |
| 27-34 | FcgR silent | 4-1BB | CD3 | ERBB2 | ERBB2 | CD3 | | 4-1BB | FcgR silent |
| 27-35 | FcgR silent | 4-1BB | CD3 | ERBB2 | ERBB2 | CD3 | | 4-1BB | FcgR silent |
| 27-36 | FcgR silent | 4-1BB | CD3 | ERBB2 | ERBB2 | CD3 | | 4-1BB | FcgR silent |
| 27-37 | FcgR silent | 4-1BB | | CEACAM5 | CEACAM5 | CD3 | | 4-1BB | FcgR silent |
| 27-38 | FcgR silent | 4-1BB | | CEACAM5 | CEACAM5 | CD3 | | 4-1BB | FcgR silent |
| 27-39 | FcgR silent | 4-1BB | | CEACAM5 | CEACAM5 | CD3 | | 4-1BB | FcgR silent |
| 27-40 | FcgR silent | 4-1BB | | CEACAM5 | CEACAM5 | CD3 | | 4-1BB | FcgR silent |
| 27-41 | FcgR silent | 4-1BB | | CEACAM5 | CEACAM5 | CD3 | | 4-1BB | FcgR silent |
| 27-42 | FcgR silent | 4-1BB | | CEACAM5 | CEACAM5 | CD3 | | 4-1BB | FcgR silent |
| 27-43 | FcgR silent | 4-1BB | | CEACAM5 | CEACAM5 | | CD3 | 4-1BB | FcgR silent |
| 27-44 | FcgR silent | 4-1BB | | CEACAM5 | CEACAM5 | | CD3 | 4-1BB | FcgR silent |
| 27-45 | FcgR silent | 4-1BB | | CEACAM5 | CEACAM5 | | CD3 | 4-1BB | FcgR silent |
| 27-46 | FcgR silent | 4-1BB | | CEACAM5 | CEACAM5 | | CD3 | 4-1BB | FcgR silent |
| 27-47 | FcgR silent | 4-1BB | | CEACAM5 | CEACAM5 | | CD3 | 4-1BB | FcgR silent |
| 27-48 | FcgR silent | 4-1BB | | CEACAM5 | CEACAM5 | | CD3 | 4-1BB | FcgR silent |
| 27-49 | FcgR silent | 4-1BB | | CEACAM5 | CEACAM5 | | CD3 | 4-1BB | FcgR silent |
| 27-50 | FcgR silent | 4-1BB | | CEACAM5 | CEACAM5 | | CD3 | 4-1BB | FcgR silent |
| 27-51 | FcgR silent | 4-1BB | CD3 | CEACAM5 | CEACAM5 | CD3 | | 4-1BB | FcgR silent |
| 27-52 | FcgR silent | 4-1BB | CD3 | CEACAM5 | CEACAM5 | CD3 | | 4-1BB | FcgR silent |
| 27-53 | FcgR silent | 4-1BB | CD3 | CEACAM5 | CEACAM5 | CD3 | | 4-1BB | FcgR silent |
| 27-54 | FcgR silent | 4-1BB | CD3 | CEACAM5 | CEACAM5 | CD3 | | 4-1BB | FcgR silent |

TABLE 78

| | H1 Chain | | H2 Chain | | L1 Chain | | L2 Chain | |
|---|---|---|---|---|---|---|---|---|
| Protein | V region | Amino acid | V region | Amino acid | V region | Amino acid | V region | Amino acid |
| ID | type | Substitutions | Type | Substitutions | Type | Substitutions | Type | Substitutions |
| 27-01 | VH-CH1 | Q39K/S183E | VK-CH1 | Q38E/S183K | VK-CK | Q38E/V133K | VH-CK | Q39K/V133E |
| 27-02 | VH-CH1 | Q39K/S183E | VK-CH1 | Q38K/S183K | VK-CK | Q38E/V133K | VH-CK | Q39E/V133E |
| 27-03 | VH-CH1 | Q39K/S183E | VK-CH1 | Q38E/S183K | VK-CK | Q38E/V133K | VH-CK | Q39K/V133E |
| 27-04 | VH-CH1 | Q39K/S183E | VK-CH1 | Q38K/S183K | VK-CK | Q38E/V133K | VH-CK | Q39E/V133E |
| 27-05 | VH-CH1 | Q39K/S183E | VK-CH1 | Q38E/S183K | VK-CK | Q38E/V133K | VH-CK | Q39K/V133E |
| 27-06 | VH-CH1 | Q39K/S183E | VK-CH1 | Q38K/S183K | VK-CK | Q38E/V133K | VH-CK | Q39E/V133E |
| 27-07 | VH-CH1 | Q39K/S183E | VH-CH1 | Q39K/S183E | VK-CK | Q38E/V133K | VH-CK | Q39K/V133E |
| | | | VK-CH1 | Q38E/S183K | | | | |
| 27-08 | VH-CH1 | Q39K/S183E | VH-CH1 | Q39K/S183E | VK-CK | Q38E/V133K | VH-CK | Q39E/V133E |
| | | | VK-CH1 | Q38K/S183K | | | | |
| 27-09 | VH-CH1 | Q39K/S183E | VH-CH1 | Q39K/S183E | VK-CK | Q38E/V133K | VH-CK | Q39K/V133E |
| | | | VK-CH1 | Q38E/S183K | | | | |
| 27-10 | VH-CH1 | Q39K/S183E | VH-CH1 | Q39K/S183E | VK-CK | Q38E/V133K | VH-CK | Q39E/V133E |
| | | | VK-CH1 | Q38K/S183K | | | | |
| 27-11 | VH-CH1 | Q39K/S183E | VH-CH1 | Q39K/S183E | VK-CK | Q38E/V133K | VH-CK | Q39K/V133E |
| | | | VK-CH1 | Q38E/S183K | | | | |
| 27-12 | VH-CH1 | Q39K/S183E | VH-CH1 | Q39K/S183E | VK-CK | Q38E/V133K | VH-CK | Q39E/V133E |
| | | | VK-CH1 | Q38K/S183K | | | | |
| 27-13 | VH-CH1 | Q39K/S183E | VH-CH1 | Q39K/S183E | VK-CK | Q38E/V133K | VH-CK | Q39K/V133E |
| | | | VK-CH1 | Q38E/S183K | | | | |
| 27-14 | VH-CH1 | Q39K/S183E | VH-CH1 | Q39K/S183E | VK-CK | Q38E/V133K | VH-CK | Q39E/V133E |
| | | | VK-CH1 | Q38K/S183K | | | | |
| 27-15 | VH-CH1 | Q39K/S183E | VK-CH1 | Q38E/S183K | VK-CK | Q38E/V133K | VH-CK | Q39K/V133E |
| 27-16 | VH-CH1 | Q39K/S183E | VK-CH1 | Q38K/S183K | VK-CK | Q38E/V133K | VH-CK | Q39E/V133E |
| 27-17 | VH-CH1 | Q39K/S183E | VK-CH1 | Q38E/S183K | VK-CK | Q38E/V133K | VH-CK | Q39K/V133E |
| 27-18 | VH-CH1 | Q39K/S183E | VK-CH1 | Q38K/S183K | VK-CK | Q38E/V133K | VH-CK | Q39E/V133E |
| 27-19 | VH-CH1 | Q39K/S183E | VK-CH1 | Q38E/S183K | VK-CK | Q38E/V133K | VH-CK | Q39K/V133E |
| 27-20 | VH-CH1 | Q39K/S183E | VK-CH1 | Q38K/S183K | VK-CK | Q38E/V133K | VH-CK | Q39E/V133E |
| 27-21 | VH-CH1 | Q39K/S183E | VK-CH1 | Q38E/S183K | VK-CK | Q38E/V133K | VH-CK | Q39K/V133E |
| 27-22 | VH-CH1 | Q39K/S183E | VK-CH1 | Q38K/S183K | VK-CK | Q38E/V133K | VH-CK | Q39E/V133E |
| 27-23 | VH-CH1 | Q39K/S183E | VK-CH1 | Q38E/S183K | VK-CK | Q38E/V133K | VH-CK | Q39K/V133E |
| 27-24 | VH-CH1 | Q39K/S183E | VK-CH1 | Q38K/S183K | VK-CK | Q38E/V133K | VH-CK | Q39E/V133E |
| 27-25 | VH-CH1 | Q39K/S183E | VH-CH1 | Q39K/S183E | VK-CK | Q38E/V133K | VH-CK | Q39K/V133E |
| | | | VK-CH1 | Q38E/S183K | | | | |
| 27-26 | VH-CH1 | Q39K/S183E | VH-CH1 | Q39K/S183E | VK-CK | Q38E/V133K | VH-CK | Q39E/V133E |
| | | | VK-CH1 | Q38K/S183K | | | | |
| 27-27 | VH-CH1 | Q39K/S183E | VH-CH1 | Q39K/S183E | VK-CK | Q38E/V133K | VH-CK | Q39K/V133E |
| | | | VK-CH1 | Q38E/S183K | | | | |
| 27-28 | VH-CH1 | Q39K/S183E | VH-CH1 | Q39K/S183E | VK-CK | Q38E/V133K | VH-CK | Q39E/V133E |
| | | | VK-CH1 | Q38K/S183K | | | | |
| 27-29 | VH-CH1 | Q39K/S183E | VH-CH1 | Q39K/S183E | VK-CK | Q38E/V133K | VH-CK | Q39K/V133E |
| | | | VK-CH1 | Q38E/S183K | | | | |
| 27-30 | VH-CH1 | Q39K/S183E | VH-CH1 | Q39K/S183E | VK-CK | Q38E/V133K | VH-CK | Q39E/V133E |
| | | | VK-CH1 | Q38K/S183K | | | | |
| 27-31 | VH-CH1 | Q39K/S183E | VH-CH1 | Q39K/S183E | VK-CK | Q38E/V133K | VH-CK | Q39K/V133E |
| | | | VK-CH1 | Q38E/S183K | | | | |
| 27-32 | VH-CH1 | Q39K/S183E | VH-CH1 | Q39K/S183E | VK-CK | Q38E/V133K | VH-CK | Q39E/V133E |
| | | | VK-CH1 | Q38K/S183K | | | | |
| 27-33 | VH-CH1 | Q39K/S183E | VK-CH1 | Q38E/S183K | VK-CK | Q38E/V133K | VH-CK | Q39K/V133E |
| 27-34 | VH-CH1 | Q39K/S183E | VK-CH1 | Q38K/S183K | VK-CK | Q38E/V133K | VH-CK | Q39E/V133E |
| 27-35 | VH-CH1 | Q39K/S183E | VK-CH1 | Q38E/S183K | VK-CK | Q38E/V133K | VH-CK | Q39K/V133E |
| 27-36 | VH-CH1 | Q39K/S183E | VK-CH1 | Q38K/S183K | VK-CK | Q38E/V133K | VH-CK | Q39E/V133E |
| 27-37 | VH-CH1 | Q39K/S183E | VK-CH1 | Q38E/S183K | VK-CK | Q38E/V133K | VH-CK | Q39K/V133E |
| 27-38 | VH-CH1 | Q39K/S183E | VK-CH1 | Q38K/S183K | VK-CK | Q38E/V133K | VH-CK | Q39E/V133E |
| 27-39 | VH-CH1 | Q39K/S183E | VK-CH1 | Q38E/S183K | VK-CK | Q38E/V133K | VH-CK | Q39K/V133E |
| 27-40 | VH-CH1 | Q39K/S183E | VK-CH1 | Q38K/S183K | VK-CK | Q38E/V133K | VH-CK | Q39E/V133E |
| 27-41 | VH-CH1 | Q39K/S183E | VK-CH1 | Q38E/S183K | VK-CK | Q38E/V133K | VH-CK | Q39K/V133E |
| 27-42 | VH-CH1 | Q39K/S183E | VK-CH1 | Q38K/S183K | VK-CK | Q38E/V133K | VH-CK | Q39E/V133E |
| 27-43 | VH-CH1 | Q39K/S183E | VH-CH1 | Q39K/S183E | VK-CK | Q38E/V133K | VH-CK | Q39K/V133E |
| | | | VK-CH1 | Q38E/S183K | | | | |
| 27-44 | VH-CH1 | Q39K/S183E | VH-CH1 | Q39K/S183E | VK-CK | Q38E/V133K | VH-CK | Q39E/V133E |
| | | | VK-CH1 | Q38K/S183K | | | | |
| 27-45 | VH-CH1 | Q39K/S183E | VH-CH1 | Q39K/S183E | VK-CK | Q38E/V133K | VH-CK | Q39K/V133E |
| | | | VK-CH1 | Q38E/S183K | | | | |
| 27-46 | VH-CH1 | Q39K/S183E | VH-CH1 | Q39K/S183E | VK-CK | Q38E/V133K | VH-CK | Q39E/V133E |
| | | | VK-CH1 | Q38K/S183K | | | | |
| 27-47 | VH-CH1 | Q39K/S183E | VH-CH1 | Q39K/S183E | VK-CK | Q38E/V133K | VH-CK | Q39K/V133E |
| | | | VK-CH1 | Q38E/S183K | | | | |
| 27-48 | VH-CH1 | Q39K/S183E | VH-CH1 | Q39K/S183E | VK-CK | Q38E/V133K | VH-CK | Q39E/V133E |
| | | | VK-CH1 | Q38K/S183K | | | | |
| 27-49 | VH-CH1 | Q39K/S183E | VH-CH1 | Q39K/S183E | VK-CK | Q38E/V133K | VH-CK | Q39K/V133E |
| | | | VK-CH1 | Q38E/S183K | | | | |
| 27-50 | VH-CH1 | Q39K/S183E | VH-CH1 | Q39K/S183E | VK-CK | Q38E/V133K | VH-CK | Q39E/V133E |
| | | | VK-CH1 | Q38K/S183K | | | | |
| 27-51 | VH-CH1 | Q39K/S183E | VK-CH1 | Q38E/S183K | VK-CK | Q38E/V133K | VH-CK | Q39K/V133E |
| 27-52 | VH-CH1 | Q39K/S183E | VK-CH1 | Q38K/S183K | VK-CK | Q38E/V133K | VH-CK | Q39E/V133E |
| 27-53 | VH-CH1 | Q39K/S183E | VK-CH1 | Q38E/S183K | VK-CK | Q38E/V133K | VH-CK | Q39K/V133E |
| 27-54 | VH-CH1 | Q39K/S183E | VK-CH1 | Q38K/S183K | VK-CK | Q38E/V133K | VH-CK | Q39E/V133E |

### Example 30—Hexavalent, Trispecific Tetrahedral Antibodies Comprising the SIRPα Extracellular Domain (V2 Form), a Fab that Specifically Binds CD20, CD38, ERBB2, EGFR, or CEACAM5, and the CD40 Ligand (CD40L)

[1357] Tetrahedral antibodies were designed, expressed, and evaluated for their ability to bind and block the CD47-SIRPα interaction, target CD20, CD38, ERBB2, EGFR, or CEACAM5-expressing cancer cells, and activate immune cellular signaling via the CD40 ligand-receptor interaction, for the treatment of cancer and related disease. This series of bispecific/trispecific constructs employ portions of the SIRPα extracellular region (V2 form), VH and VL regions from rituximab (anti-CD20), daratumumab (anti-CD38), trastuzumab (anti-ERBB2), cetuximab (anti-EGFR) and cergutuzumab (anti-CEACAM5), and optionally, a single-chain CD40 ligand trimer (CD40L) (Tables 79, 80). Three distinct configurations were evaluated (Table 81). In the first configuration, a portion of the SIRPα V2 form extracellular domain is placed in D3/D4, the cancer-targeting Fab, when present, is placed in D5/D6. In the second configuration, a portion of the SIRPα V2 form extracellular domain is placed in D3/D4, the cancer-targeting Fab, when present, is placed in D5/D6, and the CD40L is placed in D7/D8 by fusion to the H1 chain. In the third configuration, a portion of the SIRPα V2 form extracellular domain is placed in D3/D4, the cancer-targeting Fab, when present, is placed in D5/D6, and the CD40L is placed in D7/D8 by fusion to the Fc or H2 chain. To further facilitate purification of the correctly paired product by Protein A chromatography, for bivalent CD3, the H1 chain incorporates the H435R/Y436F substitution (for bivalent CD3); for monovalent CD3, both the H1 and H2 chains incorporate the H435R/Y436F substitution. The constructs are then evaluated for their structural bispecificity by intact mass spectrometry as described in Example 18, and for their functional bispecificity using a variety of in vitro binding assays, cytotoxicity assays, and cytokine induction and release assays, and in vivo cancer efficacy models, known to one skilled in the art.

TABLE 79

| Protein ID | H1 Chain | H2 Chain | L2 Chain | Fc Chain |
|---|---|---|---|---|
| 28-01 | SEQ ID NO: 5070 | | | SEQ ID NO: 5089 |
| 28-02 | SEQ ID NO: 5071 | | | SEQ ID NO: 5089 |
| 28-03 | SEQ ID NO: 5070 | SEQ ID NO: 5072 | SEQ ID NO: 5084 | |
| 28-04 | SEQ ID NO: 5071 | SEQ ID NO: 5072 | SEQ ID NO: 5084 | |
| 28-05 | SEQ ID NO: 5070 | SEQ ID NO: 5073 | SEQ ID NO: 5085 | |
| 28-06 | SEQ ID NO: 5071 | SEQ ID NO: 5073 | SEQ ID NO: 5085 | |
| 28-07 | SEQ ID NO: 5070 | SEQ ID NO: 5074 | SEQ ID NO: 5086 | |
| 28-08 | SEQ ID NO: 5071 | SEQ ID NO: 5074 | SEQ ID NO: 5086 | |
| 28-09 | SEQ ID NO: 5070 | SEQ ID NO: 5075 | SEQ ID NO: 5087 | |
| 28-10 | SEQ ID NO: 5071 | SEQ ID NO: 5075 | SEQ ID NO: 5087 | |
| 28-11 | SEQ ID NO: 5070 | SEQ ID NO: 5076 | SEQ ID NO: 5088 | |
| 28-12 | SEQ ID NO: 5071 | SEQ ID NO: 5076 | SEQ ID NO: 5088 | |
| 28-13 | SEQ ID NO: 5077 | | | SEQ ID NO: 5089 |
| 28-14 | SEQ ID NO: 5078 | | | SEQ ID NO: 5089 |
| 28-15 | SEQ ID NO: 5077 | SEQ ID NO: 5072 | SEQ ID NO: 5084 | |
| 28-16 | SEQ ID NO: 5078 | SEQ ID NO: 5072 | SEQ ID NO: 5084 | |
| 28-17 | SEQ ID NO: 5077 | SEQ ID NO: 5073 | SEQ ID NO: 5085 | |
| 28-18 | SEQ ID NO: 5078 | SEQ ID NO: 5073 | SEQ ID NO: 5085 | |
| 28-19 | SEQ ID NO: 5077 | SEQ ID NO: 5074 | SEQ ID NO: 5086 | |
| 28-20 | SEQ ID NO: 5078 | SEQ ID NO: 5074 | SEQ ID NO: 5086 | |
| 28-21 | SEQ ID NO: 5077 | SEQ ID NO: 5075 | SEQ ID NO: 5087 | |
| 28-22 | SEQ ID NO: 5078 | SEQ ID NO: 5075 | SEQ ID NO: 5087 | |
| 28-23 | SEQ ID NO: 5077 | SEQ ID NO: 5076 | SEQ ID NO: 5088 | |
| 28-24 | SEQ ID NO: 5078 | SEQ ID NO: 5076 | SEQ ID NO: 5088 | |
| 28-25 | SEQ ID NO: 5070 | | | SEQ ID NO: 5090 |
| 28-26 | SEQ ID NO: 5071 | | | SEQ ID NO: 5090 |
| 28-27 | SEQ ID NO: 5070 | SEQ ID NO: 5079 | SEQ ID NO: 5084 | |
| 28-28 | SEQ ID NO: 5071 | SEQ ID NO: 5079 | SEQ ID NO: 5084 | |
| 28-29 | SEQ ID NO: 5070 | SEQ ID NO: 5080 | SEQ ID NO: 5085 | |
| 28-30 | SEQ ID NO: 5071 | SEQ ID NO: 5080 | SEQ ID NO: 5085 | |
| 28-31 | SEQ ID NO: 5070 | SEQ ID NO: 5081 | SEQ ID NO: 5086 | |
| 28-32 | SEQ ID NO: 5071 | SEQ ID NO: 5081 | SEQ ID NO: 5086 | |
| 28-33 | SEQ ID NO: 5070 | SEQ ID NO: 5082 | SEQ ID NO: 5087 | |
| 28-34 | SEQ ID NO: 5071 | SEQ ID NO: 5082 | SEQ ID NO: 5087 | |
| 28-35 | SEQ ID NO: 5070 | SEQ ID NO: 5083 | SEQ ID NO: 5088 | |
| 28-36 | SEQ ID NO: 5071 | SEQ ID NO: 5083 | SEQ ID NO: 5088 | |

TABLE 80

| Protein | | D7- | | | | | D8- | |
|---|---|---|---|---|---|---|---|---|
| ID | D1-Fc | CD40L | D5-Fab | D4 | D3 | D6-Fab | CD40L | D2-Fc |
| 28-01 | wild-type | | | SIRPα | SIRPα | | | wild-type |
| 28-02 | wild-type | | | SIRPα | SIRPα | | | wild-type |
| 28-03 | wild-type | | Rituximab | SIRPα | SIRPα | Rituximab | | wild-type |
| 28-04 | wild-type | | Rituximab | SIRPα | SIRPα | Rituximab | | wild-type |
| 28-05 | wild-type | | Daratumumab | SIRPα | SIRPα | Daratumumab | | wild-type |
| 28-06 | wild-type | | Daratumumab | SIRPα | SIRPα | Daratumumab | | wild-type |
| 28-07 | wild-type | | Trastuzumab | SIRPα | SIRPα | Trastuzumab | | wild-type |
| 28-08 | wild-type | | Trastuzumab | SIRPα | SIRPα | Trastuzumab | | wild-type |
| 28-09 | wild-type | | Cetuximab | SIRPα | SIRPα | Cetuximab | | wild-type |
| 28-10 | wild-type | | Cetuximab | SIRPα | SIRPα | Cetuximab | | wild-type |
| 28-11 | wild-type | | Cergutuzumab | SIRPα | SIRPα | Cergutuzumab | | wild-type |
| 28-12 | wild-type | | Cergutuzumab | SIRPα | SIRPα | Cergutuzumab | | wild-type |
| 28-13 | wild-type | H1 chain | | SIRPα | SIRPα | | H1 chain | wild-type |
| 28-14 | wild-type | H1 chain | | SIRPα | SIRPα | | H1 chain | wild-type |
| 28-15 | wild-type | H1 chain | Rituximab | SIRPα | SIRPα | Rituximab | H1 chain | wild-type |
| 28-16 | wild-type | H1 chain | Rituximab | SIRPα | SIRPα | Rituximab | H1 chain | wild-type |
| 28-17 | wild-type | H1 chain | Daratumumab | SIRPα | SIRPα | Daratumumab | H1 chain | wild-type |
| 28-18 | wild-type | H1 chain | Daratumumab | SIRPα | SIRPα | Daratumumab | H1 chain | wild-type |
| 28-19 | wild-type | H1 chain | Trastuzumab | SIRPα | SIRPα | Trastuzumab | H1 chain | wild-type |
| 28-20 | wild-type | H1 chain | Trastuzumab | SIRPα | SIRPα | Trastuzumab | H1 chain | wild-type |
| 28-21 | wild-type | H1 chain | Cetuximab | SIRPα | SIRPα | Cetuximab | H1 chain | wild-type |
| 28-22 | wild-type | H1 chain | Cetuximab | SIRPα | SIRPα | Cetuximab | H1 chain | wild-type |
| 28-23 | wild-type | H1 chain | Cergutuzumab | SIRPα | SIRPα | Cergutuzumab | H1 chain | wild-type |
| 28-24 | wild-type | H1 chain | Cergutuzumab | SIRPα | SIRPα | Cergutuzumab | H1 chain | wild-type |
| 28-25 | wild-type | Fc chain | | SIRPα | SIRPα | | Fc chain | wild-type |
| 28-26 | wild-type | Fc chain | | SIRPα | SIRPα | | Fc chain | wild-type |
| 28-27 | wild-type | H2 chain | Rituximab | SIRPα | SIRPα | Rituximab | H2 chain | wild-type |
| 28-28 | wild-type | H2 chain | Rituximab | SIRPα | SIRPα | Rituximab | H2 chain | wild-type |
| 28-29 | wild-type | H2 chain | Daratumumab | SIRPα | SIRPα | Daratumumab | H2 chain | wild-type |
| 28-30 | wild-type | H2 chain | Daratumumab | SIRPα | SIRPα | Daratumumab | H2 chain | wild-type |
| 28-31 | wild-type | H2 chain | Trastuzumab | SIRPα | SIRPα | Trastuzumab | H2 chain | wild-type |
| 28-32 | wild-type | H2 chain | Trastuzumab | SIRPα | SIRPα | Trastuzumab | H2 chain | wild-type |
| 28-33 | wild-type | H2 chain | Cetuximab | SIRPα | SIRPα | Cetuximab | H2 chain | wild-type |
| 28-34 | wild-type | H2 chain | Cetuximab | SIRPα | SIRPα | Cetuximab | H2 chain | wild-type |
| 28-35 | wild-type | H2 chain | Cergutuzumab | SIRPα | SIRPα | Cergutuzumab | H2 chain | wild-type |
| 28-36 | wild-type | H2 chain | Cergutuzumab | SIRPα | SIRPα | Cergutuzumab | H2 chain | wild-type |

TABLE 81

| Protein | D1-Fc | D7 | D5-Fab | D4 | D3 | D6-Fab | D8 | D2-Fc |
|---|---|---|---|---|---|---|---|---|
| ID | Specificity | Specificity | Specificity | Specificity | Specificity | Specificity | Specificity | Specificity |
| 28-01 | FcgR | | | CD47 | CD47 | | | FcgR |
| 28-02 | FcgR | | | CD47 | CD47 | | | FcgR |
| 28-03 | FcgR | | CD20 | CD47 | CD47 | CD20 | | FcgR |
| 28-04 | FcgR | | CD20 | CD47 | CD47 | CD20 | | FcgR |
| 28-05 | FcgR | | CD38 | CD47 | CD47 | CD38 | | FcgR |
| 28-06 | FcgR | | CD38 | CD47 | CD47 | CD38 | | FcgR |
| 28-07 | FcgR | | ERBB1 | CD47 | CD47 | ERBB1 | | FcgR |
| 28-08 | FcgR | | ERBB1 | CD47 | CD47 | ERBB1 | | FcgR |
| 28-09 | FcgR | | EGFR | CD47 | CD47 | EGFR | | FcgR |
| 28-10 | FcgR | | EGFR | CD47 | CD47 | EGFR | | FcgR |
| 28-11 | FcgR | | CEACAM5 | CD47 | CD47 | CEACAM5 | | FcgR |
| 28-12 | FcgR | | CEACAM5 | CD47 | CD47 | CEACAM5 | | FcgR |
| 28-13 | FcgR | CD40 | | CD47 | CD47 | | CD40 | FcgR |
| 28-14 | FcgR | CD40 | | CD47 | CD47 | | CD40 | FcgR |
| 28-15 | FcgR | CD40 | CD20 | CD47 | CD47 | CD20 | CD40 | FcgR |
| 28-16 | FcgR | CD40 | CD20 | CD47 | CD47 | CD20 | CD40 | FcgR |
| 28-17 | FcgR | CD40 | CD38 | CD47 | CD47 | CD38 | CD40 | FcgR |
| 28-18 | FcgR | CD40 | CD38 | CD47 | CD47 | CD38 | CD40 | FcgR |
| 28-19 | FcgR | CD40 | ERBB1 | CD47 | CD47 | ERBB1 | CD40 | FcgR |
| 28-20 | FcgR | CD40 | ERBB1 | CD47 | CD47 | ERBB1 | CD40 | FcgR |
| 28-21 | FcgR | CD40 | EGFR | CD47 | CD47 | EGFR | CD40 | FcgR |
| 28-22 | FcgR | CD40 | EGFR | CD47 | CD47 | EGFR | CD40 | FcgR |
| 28-23 | FcgR | CD40 | CEACAM5 | CD47 | CD47 | CEACAM5 | CD40 | FcgR |
| 28-24 | FcgR | CD40 | CEACAM5 | CD47 | CD47 | CEACAM5 | CD40 | FcgR |
| 28-25 | FcgR | CD40 | | CD47 | CD47 | | CD40 | FcgR |
| 28-26 | FcgR | CD40 | | CD47 | CD47 | | CD40 | FcgR |
| 28-27 | FcgR | CD40 | CD20 | CD47 | CD47 | CD20 | CD40 | FcgR |
| 28-28 | FcgR | CD40 | CD20 | CD47 | CD47 | CD20 | CD40 | FcgR |
| 28-29 | FcgR | CD40 | CD38 | CD47 | CD47 | CD38 | CD40 | FcgR |
| 28-30 | FcgR | CD40 | CD38 | CD47 | CD47 | CD38 | CD40 | FcgR |
| 28-31 | FcgR | CD40 | ERBB1 | CD47 | CD47 | ERBB1 | CD40 | FcgR |
| 28-32 | FcgR | CD40 | ERBB1 | CD47 | CD47 | ERBB1 | CD40 | FcgR |
| 28-33 | FcgR | CD40 | EGFR | CD47 | CD47 | EGFR | CD40 | FcgR |
| 28-34 | FcgR | CD40 | EGFR | CD47 | CD47 | EGFR | CD40 | FcgR |
| 28-35 | FcgR | CD40 | CEACAM5 | CD47 | CD47 | CEACAM5 | CD40 | FcgR |
| 28-36 | FcgR | CD40 | CEACAM5 | CD47 | CD47 | CEACAM5 | CD40 | FcgR |

What is claimed is:

1. A tetrahedral antibody comprising a first, second, third, and fourth domain, wherein:
a) each of the first and second domains are selected from the group consisting of a Fab domain and an Fc domain,
b) each of the first and second domains comprise:
i) a first polypeptide chain comprising a first N-terminus and a first C-terminus of the domain, and
ii) a second polypeptide chain comprising a second N-terminus and a second C-terminus of the domain,
c) the first domain and the second domain are joined to each other by a non-peptidyl linkage wherein the non-peptidyl linkage is:
i) a covalent linkage
(1) attached to the first N-terminus of the first domain and the first N-terminus of the second domain,
(2) attached to the first C-terminus of the first domain and the first C-terminus of the second domain,
(3) attached to the first N-terminus of the first domain and the first C-terminus of the second domain, or
(4) attached to the first C-terminus of the first domain and the first N-terminus of the second domain, or
ii) a non-covalent linkage
(1) between a first dimerizing polypeptide attached by a peptide bond or via a peptide linker to the first N-terminus of the first domain, and a second dimerizing polypeptide attached by a peptide bond or via a peptide linker to the first N-terminus of the second domain,
(2) between a first dimerizing polypeptide attached by a peptide bond or via a peptide linker to the first C-terminus of the first domain, and a second dimerizing polypeptide attached by a peptide bond or via a peptide linker to the first C-terminus of the second domain,
(3) between a first dimerizing polypeptide attached by a peptide bond or via a peptide linker to the first N-terminus of the first domain, and a second dimerizing polypeptide attached by a peptide bond or via a peptide linker to the first C-terminus of the second domain, or
(4) between a first dimerizing polypeptide attached by a peptide bond or via a peptide linker to the first C-terminus of the first domain, and a second dimerizing polypeptide attached by a peptide bond or via a peptide linker to the first N-terminus of the second domain,
wherein the first and second dimerizing polypeptides are not immunoglobulin polypeptides,
d) if the first domain is joined to the second domain via a covalent linkage attached to the first N-terminus of the first domain, then the third domain is attached at its C-terminus to the second N-terminus of the first domain by a peptide bond or via a peptide linker,
e) if the first domain is joined to the second domain via a covalent linkage attached to the first C-terminus of the first domain then the third domain is attached at its N-terminus to the second C-terminus of the first domain by a peptide bond or via a peptide linker,
f) if the first domain is joined to the second domain via a first dimerizing polypeptide attached to the first N-terminus of the first domain, then the third domain is attached at its C-terminus by a peptide bond or via a peptide linker to
i) the N-terminus of the first dimerizing polypeptide,
ii) the second N-terminus of the first domain, or
iii) the N-terminus of a third dimerizing polypeptide, wherein the third dimerizing polypeptide is attached at its C-terminus by a peptide bond or via a peptide linker to the second N-terminus of the first domain,
g) if the first domain is joined to the second domain via a first dimerizing polypeptide attached to the first C-terminus of the first domain, then the third domain is attached at its N-terminus by a peptide bond or via a peptide linker to
i) the C-terminus of the first dimerizing polypeptide,
ii) the second C-terminus of the first domain, or
iii) the C-terminus of a third dimerizing polypeptide, wherein the third dimerizing polypeptide is attached at its N-terminus by a peptide bond or via a peptide linker to the second C-terminus of the first domain,
h) if the second domain is joined to the first domain via a covalent linkage attached to the first N-terminus of the second domain, then the fourth domain is attached at its C-terminus to the second N-terminus of the second domain by a peptide bond or via a peptide linker,
i) if the second domain is joined to the first domain via a covalent linkage attached to the first C-terminus of the second domain then the fourth domain is attached at its N-terminus to the second C-terminus of the second domain by a peptide bond or via a peptide linker,
j) if the second domain is joined to the first domain via a second dimerizing polypeptide attached to the first N-terminus of the second domain, then the fourth domain is attached at its C-terminus by a peptide bond or via a peptide linker to
i) the N-terminus of the second dimerizing polypeptide,
ii) the second N-terminus of the second domain, or
iii) the N-terminus of a fourth dimerizing polypeptide, wherein the third dimerizing polypeptide is attached at its C-terminus by a peptide bond or via a peptide linker to the second N-terminus of the second domain,
k) if the second domain is joined to the first domain via a second dimerizing polypeptide attached to the first C-terminus of the second domain, then the fourth domain is attached at its N-terminus by a peptide bond or via a peptide linker to
i) the C-terminus of the second dimerizing polypeptide,
ii) the second C-terminus of the second domain, or
iii) the C-terminus of a fourth dimerizing polypeptide, wherein the fourth dimerizing polypeptide is attached at its N-terminus by a peptide bond or via a peptide linker to the second C-terminus of the second domain.

2. The tetrahedral antibody of claim 1, wherein:
a) the first domain is an Fc domain and the second domain is a Fab domain,
b) the first and second domains are Fc domains,
c) the first and second domains are Fab domains,
d) the third and fourth domains are Fab domains,
e) the third and/or fourth domain are selected from the group consisting of (i) a secreted protein, and (ii) the extracellular domain of a transmembrane protein,
f) the third domain is selected from the group of (i) a secreted protein, and (ii) the extracellular domain of a transmembrane protein, and the fourth domain is a Fab,
g) the third domain is IL-15,
h) the third domain is IL-15 and the fourth domain is an IL-15Rα sushi domain,
i) the third domain is IL-15 and the fourth domain is a Fab,
j) the third and fourth domains are each the ACE2 peptidase domain (PD),
k) the first and second domains are Fc domains, and the third and fourth domains are selected from the group consisting of (i) a secreted protein, and (ii) the extracellular domain of a transmembrane protein,
l) the first and second domains are Fc domains, the third domain is selected from the group consisting of (i) a secreted protein, and (ii) the extracellular domain of a transmembrane protein, and the fourth domain is Fab,
m) the first and second domains are Fc domains and the third and fourth domains are Fab domains,
n) the first and second domains are Fc domains and the third and fourth domains are each the ACE2 peptidase domain (PD),
o) the first domain is an Fc domain and the second, third and fourth domains are Fab domains,
p) the first domain is an Fc domain, the second domain is a Fab domain, the third domain is IL-15, and the fourth domain is an IL-15Rα sushi domain, or
q) the first domain is an Fc domain, the second domain is a Fab domain, the third domain is IL-15, and the fourth domain is a Fab.

3. The tetrahedral antibody of claim 1 or claim 1.k) iii), wherein the non-peptidyl linkage between first domain and the second domain is a covalent linkage.

4. The tetrahedral antibody of claim 3, wherein the covalent linkage comprises the structure:
a) [chemical structure]
b) [chemical structure]
or
c) [chemical structure]
wherein R₂ represents an organic structure which connects to the first or second domain and R₄ represents an organic structure which connects to the other of the first or second domain, wherein R₁ is H or is part of an additional structure that is a cyclic structure, wherein the additional cyclic structure comprises R₁ or a portion of R₁, and may also comprise R₂ or a portion of R₂, and the carbon between R₂ and the alkene double bond.

5. The tetrahedral antibody of claim 4, wherein R₁ and R₂ are linked via at least one direct bond so as to form a cyclic structure comprising
a) a portion of R₁,
b) a portion of R₂,
c) the carbon between R₂ and the alkene double bond, and
d) the alkene double bond.

6. The tetrahedral antibody of claim 5, wherein R₁ is selected from the group consisting of:
a) [chemical structure]
b) [chemical structure]
and
c) [chemical structure]
which is optionally substituted at any position.

7. The tetrahedral antibody of any one of claims 4 to 6, wherein the carbon between R₂ and the alkene double bond is directly bonded to R₂ via a double bond and a single bond.

8. The tetrahedral antibody of claim 7, wherein R₂ is
a) [chemical structure]
b) [chemical structure]
or
c) [chemical structure]
which is optionally substituted at any position,
wherein R₂ is attached to R₁ via the nitrogen atom of R₂, and
wherein J is a bond or an organic structure comprising or consisting of a chain of 2, 3, 4, 5, 6, 7, 8, 9, 10 or more moieties selected from the group consisting of [PEG(y)]z, polyalkylene glycol, polyoxyalkylated polyol, polyvinyl alcohol, polyvinyl alkyl ether, poly(lactic acid), poly(lactic-glycolic acid), polysaccharide, a branched residue, C₁-C₄ alkyl, amine, sulfur, oxygen, succinimide, maleimide, glycerol, triazole, isoxazolidine, C₁-C₄ acyl, succinyl, malonyl, glutaryl, phthalyl, adipoyl and an amino acid,
wherein [PEG(y)]z is: [chemical structure]
wherein y=1-100 and z=1-10.

9. The tetrahedral antibody of claim 7, wherein R₁ and R₂ taken together are: [chemical structure]
which is optionally substituted at any position,
wherein J is a bond or an organic structure comprising or consisting of a chain of 2, 3, 4, 5, 6, 7, 8, 9, 10 or more moieties selected from the group consisting of [PEG(y)]z, polyalkylene glycol, polyoxyalkylated polyol, polyvinyl alcohol, polyvinyl alkyl ether, poly(lactic acid), poly(lactic-glycolic acid), polysaccharide, a branched residue, C₁-C₄ alkyl, amine, sulfur, oxygen, succinimide, maleimide, glycerol, triazole, isoxazolidine, C₁-C₄ acyl, succinyl, malonyl, glutaryl, phthalyl, adipoyl and an amino acid,
wherein [PEG(y)]z is: [chemical structure]
wherein y=1-100 and z=1-10.

10. The tetrahedral antibody of any one of claim 4 to 7 or 9, wherein the covalent linkage comprises the structure: [chemical structure]
which is optionally substituted at any position,
wherein J is a bond or an organic structure comprising or consisting of a chain of 2, 3, 4, 5, 6, 7, 8, 9, 10 or more moieties selected from the group consisting of [PEG(y)]z, polyalkylene glycol, polyoxyalkylated polyol, polyvinyl alcohol, polyvinyl alkyl ether, poly(lactic acid), poly(lactic-glycolic acid), polysaccharide, a branched residue, C₁-C₄ alkyl, amine, sulfur, oxygen, succinimide, maleimide, glycerol, triazole, isoxazolidine, C₁-C₄ acyl, succinyl, malonyl, glutaryl, phthalyl, adipoyl and an amino acid,
wherein [PEG(y)]z is: [chemical structure]
wherein y=1-100 and z=1-10.

11. The tetrahedral antibody of claim 3, wherein the covalent linkage comprises the structure: [chemical structure]
wherein:
a) Xₐ is a chemical structure selected from the group consisting of:
i) a chemical structure which comprises a cyclooctane fused to a dihydropyridazine,
ii) a chemical structure which comprises a cyclooctene fused to a pyridazine,
b) Rₐ is a bond or a chemical structure which connects Xₐ to the first N-terminus of the first domain, and
c) R_{b} is a bond or a chemical structure which connects Xₐ to the first N-terminus of the second domain.

12. The tetrahedral antibody of claim 11, wherein Xₐ comprises the structure [chemical structure]
wherein R_{c} is H, alkyl, or aryl, or a tautomer thereof.

13. The tetrahedral antibody of any of claims 11-12, wherein the covalent linkage comprises
the structure [chemical structure]
wherein R_{c} is H, alkyl, or aryl, or a tautomer thereof.

14. The tetrahedral antibody of any of claims 11-13, wherein Rₐ and R_{b} are, independently, a bond, or a chemical structure comprising or consisting of a chain of 1, 2, 3, 4, 5, 6, 7, 8, 9, 10 or more moieties, wherein each moiety is independently selected from the group consisting of [PEG(y)]z, polyalkylene glycol, polyoxyalkylated polyol, polyvinyl alcohol, polyvinyl alkyl ether, poly(lactic acid), poly(lactic-glycolic acid), polysaccharide, a branched residue, C₁-C₁₀ alkyl, C₃-C₁₀ cycloalkane, C₂-C₁₀ alkene, C₅-C₁₀ cycloalkene, amine, sulfur, oxygen, succinimide, maleimide, glycerol, triazole, isoxazolidine, C₂-C₅ acyl, C₂-C₅ acylamino, C₂-C₅ acyloxy, succinyl, malonyl, glutaryl, phthalyl, adipoyl, an amino acid, an aryl group, a heteroaryl group, a carbamate, a chemical structure containing a cyclooctane fused to a dihydropyridazine, a chemical structure containing a cyclooctene fused to a triazole, a chemical structure containing a cyclooctene fused to a isoxazolidine, a dibenzocyclooctyne, a dibenzoazacyclooctene, [chemical structure] [chemical structure]
wherein X₁ is CH or N, X₂ is CH₂ or a carbonyl group, and R₅ is an aryl or alkyl group, wherein [PEG(y)]z is: [chemical structure]
wherein y=1-100 and z=1-10.

15. The tetrahedral antibody of claim 14, wherein Rₐ and/or R_{b} each independently:
a) comprise a [PEG(y)]z group;
b) comprise a polyalkylene glycol, polyoxyalkylated polyol, polyvinyl alcohol, polyvinyl alkyl ether, poly(lactic acid), poly(lactic-glycolic acid), or polysaccharide group;
c) comprise a C₁-C₄ alkyl group;
d) comprise a succinimide;
e) comprise an amine;
f) comprise a succinyl, malonyl, glutaryl, phthalyl or adipoyl;
g) comprise a malonyl;
h) comprise an amino acid;
i) comprise a cysteine;
j) comprise a lysine;
k) consist of a chain of 3 moieties selected from the group consisting of [PEG(y)]z, polyalkylene glycol, polyoxyalkylated polyol, polyvinyl alcohol, polyvinyl alkyl ether, poly(lactic acid), poly(lactic-glycolic acid), polysaccharide, a branched residue, C₁-C₁₀ alkyl, C₃-C₁₀ cycloalkane, C₂-C₁₀ alkene, C₅-C₁₀ cycloalkene, amine, sulfur, oxygen, succinimide, maleimide, glycerol, triazole, isoxazolidine, C₂-C₅ acyl, C₂-C₅ acylamino, C₂-C₅ acyloxy, succinyl, malonyl, glutaryl, phthalyl, adipoyl, an amino acid, an aryl group, a heteroaryl group, a carbamate, a chemical structure containing a cyclooctane fused to a dihydropyridazine, a chemical structure containing a cyclooctene fused to a triazole, a chemical structure containing a cyclooctene fused to a isoxazolidine, a dibenzocyclooctene, a dibenzoazacyclooctene, [chemical structure] [chemical structure]
l) consist of a chain of 4 moieties selected from the group consisting of [PEG(y)]z, polyalkylene glycol, polyoxyalkylated polyol, polyvinyl alcohol, polyvinyl alkyl ether, poly(lactic acid), poly(lactic-glycolic acid), polysaccharide, a branched residue, C₁-C₁₀ alkyl, C₃-C₁₀ cycloalkane, C₂-C₁₀ alkene, C₅-C₁₀ cycloalkene, amine, sulfur, oxygen, succinimide, maleimide, glycerol, triazole, isoxazolidine, C₂-C₅ acyl, C₂-C₅ acylamino, C₂-C₅ acyloxy, succinyl, malonyl, glutaryl, phthalyl, adipoyl, an amino acid, an aryl group, a heteroaryl group, a carbamate, a chemical structure containing a cyclooctane fused to a dihydropyridazine, a chemical structure containing a cyclooctene fused to a triazole, a chemical structure containing a cyclooctene fused to a isoxazolidine, a dibenzocyclooctene, a dibenzoazacyclooctene, [chemical structure] [chemical structure]
m) consist of a chain of 5 moieties selected from the group consisting of [PEG(y)]z, polyalkylene glycol, polyoxyalkylated polyol, polyvinyl alcohol, polyvinyl alkyl ether, poly(lactic acid), poly(lactic-glycolic acid), polysaccharide, a branched residue, C₁-C₁₀ alkyl, C₃-C₁₀ cycloalkane, C₂-C₁₀ alkene, C₅-C₁₀ cycloalkene, amine, sulfur, oxygen, succinimide, maleimide, glycerol, triazole, isoxazolidine, C₂-C₅ acyl, C₂-C₅ acylamino, C₂-C₅ acyloxy, succinyl, malonyl, glutaryl, phthalyl, adipoyl, an amino acid, an aryl group, a heteroaryl group, a carbamate, a chemical structure containing a cyclooctane fused to a dihydropyridazine, a chemical structure containing a cyclooctene fused to a triazole, a chemical structure containing a cyclooctene fused to a isoxazolidine, a dibenzocyclooctene, a dibenzoazacyclooctene, [chemical structure] [chemical structure]
n) comprise a [PEG(y)]z group bonded to a lysine;
o) comprise a C₁-C₄ acyl group bonded to a succinimide group;
p) comprise a lysine bonded to a C₁-C₄ acyl
q) comprise a [PEG(y)]z group, which is bonded to a glutaryl;
r) consist of a chain of three, four or five moieties selected from the group consisting of [PEG(y)]z, C₂-C₅ acyl, succinyl, malonyl, glutaryl, an amino acid, a chemical structure containing a cyclooctane fused to a dihydropyridazine, a chemical structure containing a cyclooctene fused to a triazole, a chemical structure containing a cyclooctene fused to a isoxazolidine, a dibenzocyclooctene, a dibenzoazacyclooctene, [chemical structure] [chemical structure]
wherein X₁ is CH or N, X₂ is CH₂ or a carbonyl group, and R₅ is an aryl or alkyl group, wherein [PEG(y)]z is: [chemical structure]
wherein y=1-100 and z=1-10;
s) is a bond;
t) is a cysteine;
u) has a linear structure; or
v) has a branched structure;
w) has the structure: [chemical structure]
x) is: [chemical structure]
wherein n is 1, 2, 3, 4, 5, 6, 7, 8, 9, 10, 11, 12, 13, 14, 15, 16, 17, 18, 19, 20, 1-30, 1-40, or 1-50;
y) is: [chemical structure]
wherein n is 1, 2, 3, 4, 5, 6, 7, 8, 9, 10, 11, 12, 13, 14, 15, 16, 17, 18, 19, 20, 1-30, 1-40, or 1-50, x is 1, 2, 3, 4, 5, 6, 7, 8, 9, 10, 11, 12, 13, 14, 15, 16, 17, 18, 19, 20, 1-30, 1-40, or 1-50 and z is 1, 2, 3, 4, 5, 6, 7, 8, 9, 10, 11, 12, 13, 14, 15, 16, 17, 18, 19, 20, 1-30, 1-40, or 1-50;
z) is: [chemical structure]
wherein x is 1, 2, 3, 4, 5, 6, 7, 8, 9, 10, 11, 12, 13, 14, 15, 16, 17, 18, 19, 20, 1-30, 1-40, or 1-50 and z is 1, 2, 3, 4, 5, 6, 7, 8, 9, 10, 11, 12, 13, 14, 15, 16, 17, 18, 19, 20, 1-30, 1-40, or 1-50; or
aa) is: [chemical structure]
wherein n is 1, 2, 3, 4, 5, 6, 7, 8, 9, 10, 11, 12, 13, 14, 15, 16, 17, 18, 19, 20, 1-30, 1-40, or 1-50.

16. The tetrahedral antibody of claim 14 or 15, wherein Rₐ and/or R_{b} comprise the moiety [chemical structure]
wherein X₁ is CH or N and X₂ is CH₂ or a carbonyl group.

17. The tetrahedral antibody of claim 1 or claim 1.k) iii), wherein the non-peptidyl linkage is a non-covalent linkage between a first dimerizing polypeptide attached to the first domain and a second dimerizing polypeptide attached to the second domain.

18. The tetrahedral antibody of claim 17, wherein the first and second dimerizing polypeptides are selected from the group consisting of:
a) dimerizing domains of an extracellular protein dimer, and
b) dimerizing domains of an intracellular protein dimer.

19. The tetrahedral antibody of claim 17, wherein the first and second dimerizing polypeptides are selected from the group consisting of:
a) a leucine zipper domain,
b) a collectrin-like domain (CLD),
c) a collectrin domain (CD),
d) a CD8 alpha extracellular domain, and
e) a CD8 beta extracellular domain.

20. The tetrahedral antibody of any one of claims 17 to 19, wherein:
a) the first dimerizing polypeptide is the same as the second dimerizing polypeptide, and
b) the dimerizing polypeptides form a homodimer.

21. The tetrahedral antibody of any one of claims 17 to 19, wherein:
a) the first dimerizing polypeptide is different than the second dimerizing polypeptide, and
b) the first and second dimerizing polypeptides form a heterodimer.

22. The tetrahedral antibody of claim 17, wherein:
a) the first and second dimerizing polypeptides are selected from the group consisting of:
i) a T cell receptor alpha and T cell receptor beta extracellular domain,
ii) a T cell receptor gamma and T cell receptor extracellular domain,
iii) an WIC class I alpha extracellular domain and beta-2 microglobulin
iv) an WIC class II alpha and WIC class II beta extracellular domain, and
v) a CD8 alpha and CD8 beta extracellular domain,
b) the first dimerizing polypeptide is different from the second dimerizing polypeptide, and
c) the first and second dimerizing polypeptides form a heterodimer.

23. The tetrahedral antibody of claim 21 or 22, wherein the first and second dimerizing polypeptides, when in the presence of each other, form less than 30%, 20%, 10%, 5%, 4%, 3%, 2%, or 1% homodimers.

24. The tetrahedral antibody of any of claims 17-20, wherein:
a) the third and fourth domains are each the ACE2 peptidase domain (PD), and
b) the first and second dimerizing polypeptides are each the ACE2 collectrin-like domain (CLD)
preferably wherein the first and second domains are Fc domains and wherein each polypeptide chain of the tetrahedral antibody comprises the amino acid sequence set forth in any one of SEQ ID NOs: 74-119, more preferably SEQ ID NO: 78.

25. The tetrahedral antibody of claim 17-24, wherein the first and second domains are Fc domains.

26. The tetrahedral antibody of any of claims 17-24, wherein:
a) the first and second domains are Fc domains and the third domain is a first type of Fab domain,
b) the first and second domains are Fc domains and the third and fourth domains are independently selected from the group consisting of a first type of Fab domain and a second type of Fab domain,
c) the first domain is an Fc domain, and the second and third domains are independently selected from the group consisting of a first type of Fab domain and a second type of Fab domain, or
d) the first domain is an Fc domain, and the second, third, and fourth domains are independently selected from the group consisting of a first type of Fab domain, a second type of Fab domain, and a third type of Fab domain.

27. The tetrahedral antibody of any of claims 17-26, additionally comprising a fifth domain, wherein the fifth domain is attached at its C-terminus by a peptide bond or via a peptide linker to:
a) the N-terminus of the first dimerizing polypeptide,
b) the second N-terminus of the first domain, or
c) the N-terminus of a third dimerizing polypeptide, wherein the third dimerizing polypeptide is attached at its C-terminus by a peptide bond or via a peptide linker to the second N-terminus of the first domain.

28. The tetrahedral antibody of claim 27, wherein:
a) the first and second domains are Fc domains and the fifth domain is a first type of Fab domain,
b) the first and second domains are Fc domains, and the third and fifth domains are independently selected from the group consisting of a first type of Fab domain and a second type of Fab domain,
c) the first and second domains are Fc domains, and the fourth and fifth domains are independently selected from the group consisting of a first type of Fab domain and a second type of Fab domain,
d) the first and second domains are Fc domains, and the third, fourth, and fifth domains are independently selected from the group consisting of a first type of Fab domain, a second type of Fab domain, and a third type of Fab domain,
e) the first domain is an Fc domain, and the second and fifth domains are independently selected from the group consisting of a first type of Fab domain and a second type of Fab domain,
f) the first domain is an Fc domain, and the second, third, and fifth domains are independently selected from the group consisting of a first type of Fab domain, a second type of Fab domain, and a third type of Fab domain,
g) the first domain is an Fc domain, and the second, fourth, and fifth domains are independently selected from the group consisting of a first type of Fab domain, a second type of Fab domain, and a third type of Fab domain, or
h) the first domain is an Fc domain, and the second, third, fourth, and fifth domains are independently selected from the group consisting of a first type of Fab domain, a second type of Fab domain, a third type of Fab domain, and a fourth type of Fab domain.

29. The tetrahedral antibody of any of claims 17-28, additionally comprising a fifth and/or sixth domain, wherein:
a) the first domain is joined to the second domain via a first dimerizing polypeptide attached to the first N-terminus of the first domain, and wherein
i) the fifth domain is attached at its C-terminus by a peptide bond or via a peptide linker to:
(1) the N-terminus of the first dimerizing polypeptide,
(2) the second N-terminus of the first domain, or
(3) the N-terminus of a third dimerizing polypeptide, wherein the third dimerizing polypeptide is attached at its C-terminus by a peptide bond or via a peptide linker to the second N-terminus of the first domain,
b) the first domain is joined to the second domain via a first dimerizing polypeptide attached to the first C-terminus of the first domain, and wherein
i) the fifth domain is attached at its N-terminus by a peptide bond or via a peptide linker to:
(1) the C-terminus of the first dimerizing polypeptide,
(2) the second C-terminus of the first domain, or
(3) the C-terminus of a third dimerizing polypeptide, wherein the third dimerizing polypeptide is attached at its N-terminus by a peptide bond or via a peptide linker to the second C-terminus of the first domain,
c) the second domain is joined to the first domain via a second dimerizing polypeptide attached to the first N-terminus of the second domain, and wherein
i) the sixth domain is attached at its C-terminus by a peptide bond or via a peptide linker to:
(1) the N-terminus of the second dimerizing polypeptide,
(2) the second N-terminus of the second domain, or
(3) the N-terminus of a fourth dimerizing polypeptide, wherein the fourth dimerizing polypeptide is attached at its C-terminus by a peptide bond or via a peptide linker to the second N-terminus of the second domain, or
d) the second domain is joined to the first domain via a second dimerizing polypeptide attached to the first C-terminus of the second domain, and wherein
i) the sixth domain is attached at its N-terminus by a peptide bond or via a peptide linker to:
(1) the C-terminus of the second dimerizing polypeptide,
(2) the second C-terminus of the second domain, or
(3) the C-terminus of a fourth dimerizing polypeptide, wherein the fourth dimerizing polypeptide is attached at its N-terminus by a peptide bond or via a peptide linker to the second C-terminus of the second domain.

30. The tetrahedral antibody of claim 29, wherein:
a) the first and second domains are Fc domains and the fifth domain is a first type of Fab domain,
b) the first and second domains are Fc domains, and the third and fifth domains are independently selected from the group consisting of a first type of Fab domain and a second type of Fab domain,
c) the first and second domains are Fc domains, and the fourth and fifth domains are independently selected from the group consisting of a first type of Fab domain and a second type of Fab domain,
d) the first and second domains are Fc domains, and the third, fourth, and fifth domains are independently selected from the group consisting of a first type of Fab domain, a second type of Fab domain, and a third type of Fab domain,
e) the first domain is an Fc domain, and the second and fifth domains are independently selected from the group consisting of a first type of Fab domain and a second type of Fab domain,
f) the first domain is an Fc domain, and the second, third, and fifth domains are independently selected from the group consisting of a first type of Fab domain, a second type of Fab domain, and a third type of Fab domain,
g) the first domain is an Fc domain, and the second, fourth, and fifth domains are independently selected from the group consisting of a first type of Fab domain, a second type of Fab domain, and a third type of Fab domain,
h) the first domain is an Fc domain, and the second, third, fourth, and fifth domains are independently selected from the group consisting of a first type of Fab domain, a second type of Fab domain, a third type of Fab domain, and a fourth type of Fab domain, or
i) the first and second domains are Fc domains, the third and fourth domains are the ACE2 peptidase domain (PD), and the fifth and sixth domains are Fab domains.

31. The tetrahedral antibody of claim 29, wherein:
a) the third, fourth, fifth and sixth domains are each the ACE2 PD and the dimerizing polypeptides are each the ACE2 CLD,
b) the first and second domains are Fc domains, the third, fourth, fifth and sixth domains are each the ACE2 PD and the dimerizing polypeptides are each the ACE2 CLD, preferably wherein the first and second domains are each connected to their respective dimerizing polypeptides via a peptide linker,
c) the third and fourth domains are each the ACE2 PD, the fifth and sixth domains are each Fab domains, and the dimerizing polypeptides are each the ACE2 CLD,
d) the first and second domains are Fc domains, the third and fourth domains are each the ACE2 PD, the fifth and sixth domains are each Fab domains, and the dimerizing polypeptides are each the ACE2 CLD, preferably wherein the first and second domains are each connected to their respective dimerizing polypeptides via a peptide linker,
e) the third and fourth domains are each Fab domains, the fifth and sixth domains are each the ACE2 PD, and the dimerizing polypeptides are each the ACE2 CLD,
f) the first and second domains are Fc domains, the third and fourth domains are each Fab domains, the fifth and sixth domains are each the ACE2 PD, and the dimerizing polypeptides are each the ACE2 CLD, preferably wherein the first and second domains are each connected to their respective dimerizing polypeptides via a peptide linker, or
g) the first and second domains are Fc domains, the third and fourth domains are the ACE2 PD, the fifth and sixth domains are Fab domains, the dimerizing polypeptides are each the ACE2 CLD, and the first and second domains are each connected to their respective dimerizing polypeptides via a peptide linker,
preferably wherein such domains and linkers, if present, are characterized by one or more or all of the following features:
i) the Fc domains are characterized by one or more or all of the following features:
(1) are heterodimers,
(2) are IgG1 Fc domains,
(3) comprise a silencing mutation such that the Fc domain lacks Fc gamma receptor binding activity, preferably wherein such mutation is one of the following combinations of mutations:
(a) P329G/L234A/L235A (PGLALA),
(b) L234A/L235A (LALA),
(c) P331 S/L234A/L235A,
(d) L234F/L235E/P331S, and
(e) L234F/L235E/P329G,
(4) comprise a mutation that enhances FcRn activity, preferably wherein such mutation extends the half-life of the tetrahedral antibody, preferably wherein the mutation is:
(a) a combination the following mutations: L309D/Q311H/N434S (DHS),
(b) a combination of the following mutations: S239D/I298E,
(c) S239D, preferably wherein the other Fc domain of the tetrahedral antibody, if present, comprises the I298E mutation, or
(d) I298E, preferably wherein the other Fc domain of the tetrahedral antibody, if present, comprises the S239D mutation, and
(5) comprise a mutation that ablates their Protein A binding site, preferably wherein such mutation is H435R/Y436F (HY/RF),
ii) the ACE2 peptidase domains comprise a mutation which blocks its angiotensin converting enzyme activity, preferably wherein such mutation is an H378A mutation,
iii) the Fab domains are chimeric Fab domains comprising a murine variable region, and
iv) the peptide linkers each have a length of 23 amino acids and are derived from the stalk region of a TNF receptor, preferably wherein the TNF receptor is TNF receptor 1B, still more preferably wherein the peptide linker consists of the amino acid sequence set forth in SEQ ID NO: 4468, and
v) such domains and peptide linkers are formed by two or three different types of polypeptide chains.

32. The tetrahedral antibody of claim 29, wherein:
a) the third and fourth domains are each the ACE2 PD,
b) the fifth domain, if present, is attached at its C-terminus by a peptide bond or via a peptide linker to the N-terminus of a third dimerizing polypeptide, wherein the third dimerizing polypeptide is attached at its C-terminus by a peptide bond or via a peptide linker to the second N-terminus of the first domain,
c) the sixth domain, if present, is attached at its C-terminus by a peptide bond or via a peptide linker to the N-terminus of a fourth dimerizing polypeptide, wherein the fourth dimerizing polypeptide is attached at its C-terminus by a peptide bond or via a peptide linker to the second N-terminus of the second domain, and
d) the first, second, third, and fourth dimerizing polypeptides are each the ACE2 CLD.

33. The tetrahedral antibody of any of claims 24 and 31-32, wherein the ACE2 PD comprises or consists of amino acids 18-615 of the ACE2 protein or a portion thereof.

34. The tetrahedral antibody of any of claims 24 and 31-32, wherein the ACE2 CLD comprises or consists of amino acids 616-740 of the ACE2 protein or a portion thereof.

35. The tetrahedral antibody of any of claims 24 and 31-34, wherein the ACE2 PD is catalytically active.

36. The tetrahedral antibody of any of claims 24 and 31-34, wherein ACE2 PD is catalytically inactive.

37. The tetrahedral antibody of claim 36, wherein ACE2 PD comprises a R273Q or a H378A mutation.

38. The tetrahedral antibody of any of claims 25, 26, 28 and 30-37, wherein the Fc domains lack Fc gamma receptor binding activity.

39. The tetrahedral antibody of claim 38, wherein the Fc domains comprise:
a) a P329G mutation, a L234A mutation and a L235A mutation (PGLALA);
b) a L234A mutation and a L235A mutation (LALA),
c) a P331S mutation, a L234A mutation, and a L235A mutation,
d) a L234F mutation, a L235E mutation, and a P331S mutation, or
e) a L234F mutation, a L235E mutation, and a P329G mutation.

40. The tetrahedral antibody of any of claims 24-39, wherein the tetrahedral antibody comprises one or more Fab domains and the one or more Fab domains comprise the complementarity-determining region (CDR) of the Fab domain of the B13A antibody.

41. The tetrahedral antibody of claim 40, wherein the one or more Fab domains comprise the VH and VL regions from the B13A antibody, preferably wherein the VH and VL regions comprise the amino acid sequences set forth in SEQ ID NOs 463 and 464 or variants thereof with at least 90%, preferably at least 95%, more preferably at least 98% identity to said sequences.

42. The tetrahedral antibody of claim 40 or 41, wherein the one or more Fab domains are humanized.

43. The tetrahedral antibody of claim 31, wherein the first and second domains are Fc domains, the third and fourth domains are the ACE2 PD, the fifth and sixth domains are Fab domains, the dimerizing polypeptides are each the ACE2 CLD, and the first and second domains are each connected to their respective dimerizing polypeptides via a peptide linker, and wherein the domains and peptide linkers of the tetrahedral antibody are formed by three different types of polypeptide chains.

44. The tetrahedral antibody of claim 43, wherein the three different types of polypeptide chains are denoted H1, L2, and H2, and wherein:
a) the H1 chain comprises the amino acid sequence set forth in SEQ ID NO: 524, the L2 chain comprises the amino acid sequence set forth in SEQ ID NO: 465, and the H2 chain comprises the amino acid sequence set forth in SEQ ID NO: 535, or wherein the H1, L2 and H2 chains are variants with at least 90%, preferably at least 95%, more preferably at least 98% identity to said sequences;
b) the H1 chain comprises the amino acid sequence set forth in SEQ ID NO: 473, the L2 chain comprises the amino acid sequence set forth in SEQ ID NO: 465, and the H2 chain comprises the amino acid sequence set forth in SEQ ID NO: 485, or wherein the H1, L2 and H2 chains are variants with at least 90%, preferably at least 95%, more preferably at least 98% identity to said sequences;
c) the H1 chain comprises the amino acid sequence set forth in SEQ ID NO: 526, the L2 chain comprises the amino acid sequence set forth in SEQ ID NO: 465, and the H2 chain comprises the amino acid sequence set forth in SEQ ID NO: 527, or wherein the H1, L2 and H2 chains are variants with at least 90%, preferably at least 95%, more preferably at least 98% identity to said sequences;
d) the H1 chain comprises the amino acid sequence set forth in SEQ ID NO: 514, the L2 chain comprises the amino acid sequence set forth in SEQ ID NO: 465, and the H2 chain comprises the amino acid sequence set forth in SEQ ID NO: 528, or wherein the H1, L2 and H2 chains are variants with at least 90%, preferably at least 95%, more preferably at least 98% identity to said sequences;
e) the H1 chain comprises the amino acid sequence set forth in SEQ ID NO: 529, the L2 chain comprises the amino acid sequence set forth in SEQ ID NO: 465, and the H2 chain comprises the amino acid sequence set forth in SEQ ID NO: 530, or wherein the H1, L2 and H2 chains are variants with at least 90%, preferably at least 95%, more preferably at least 98% identity to said sequences;
f) the H1 chain comprises the amino acid sequence set forth in SEQ ID NO: 518, the L2 chain comprises the amino acid sequence set forth in SEQ ID NO: 465, and the H2 chain comprises the amino acid sequence set forth in SEQ ID NO: 531; or wherein the H1, L2 and H2 chains are variants with at least 90%, preferably at least 95%, more preferably at least 98% identity to said sequences,
g) the H1 chain comprises the amino acid sequence set forth in SEQ ID NO: 532, the L2 chain comprises the amino acid sequence set forth in SEQ ID NO: 465, and the H2 chain comprises the amino acid sequence set forth in SEQ ID NO: 533, or wherein the H1, L2 and H2 chains are variants with at least 90%, preferably at least 95%, more preferably at least 98% identity to said sequences; or
h) the H1 chain comprises the amino acid sequence set forth in SEQ ID NO: 522, the L2 chain comprises the amino acid sequence set forth in SEQ ID NO: 465, and the H2 chain comprises the amino acid sequence set forth in SEQ ID NO: 534, or wherein the H1, L2 and H2 chains are variants with at least 90%, preferably at least 95%, more preferably at least 98% identity to said sequences.

45. The tetrahedral antibody of claim 31, wherein the first and second domains are Fc domains, the third, fourth, fifth and sixth domains are each the ACE2 PD and the dimerizing polypeptides are each the ACE2 CLD, wherein the first and second domains are each connected to their respective dimerizing polypeptides via a peptide linker, and wherein the domains and peptide linkers of the tetrahedral antibody are formed by two different types of polypeptide chains.

46. The tetrahedral antibody of claim 45, wherein the two different types of polypeptide chains are denoted H1 and H2, and wherein:
a) the H1 chain comprises the amino acid sequence set forth in SEQ ID NO: 509, and the H2 chain comprises the amino acid sequence set forth in SEQ ID NO: 510 or wherein the H1 and H2 chains are variants with at least 90%, preferably at least 95%, more preferably at least 98% identity to said sequences;
b) the H1 chain comprises the amino acid sequence set forth in SEQ ID NO: 512, and the H2 chain comprises the amino acid sequence set forth in SEQ ID NO: 513 or wherein the H1 and H2 chains are variants with at least 90%, preferably at least 95%, more preferably at least 98% identity to said sequences;
c) the H1 chain comprises the amino acid sequence set forth in SEQ ID NO: 516, and the H2 chain comprises the amino acid sequence set forth in SEQ ID NO: 517 or wherein the H1 and H2 chains are variants with at least 90%, preferably at least 95%, more preferably at least 98% identity to said sequences;
d) the H1 chain comprises the amino acid sequence set forth in SEQ ID NO: 520, and the H2 chain comprises the amino acid sequence set forth in SEQ ID NO: 521 or wherein the H1 and H2 chains are variants with at least 90%, preferably at least 95%, more preferably at least 98% identity to said sequences;
e) the H1 chain comprises the amino acid sequence set forth in SEQ ID NO: 542, and the H2 chain comprises the amino acid sequence set forth in SEQ ID NO: 543 or wherein the H1 and H2 chains are variants with at least 90%, preferably at least 95%, more preferably at least 98% identity to said sequences;
f) the H1 chain comprises the amino acid sequence set forth in SEQ ID NO: 545, and the H2 chain comprises the amino acid sequence set forth in SEQ ID NO: 546 or wherein the H1 and H2 chains are variants with at least 90%, preferably at least 95%, more preferably at least 98% identity to said sequences;
g) the H1 chain comprises the amino acid sequence set forth in SEQ ID NO: 548, and the H2 chain comprises the amino acid sequence set forth in SEQ ID NO: 549 or wherein the H1 and H2 chains are variants with at least 90%, preferably at least 95%, more preferably at least 98% identity to said sequences; or
h) the H1 chain comprises the amino acid sequence set forth in SEQ ID NO: 551, and the H2 chain comprises the amino acid sequence set forth in SEQ ID NO: 552 or wherein the H1 and H2 chains are variants with at least 90%, preferably at least 95%, more preferably at least 98% identity to said sequences.

47. The tetrahedral antibody of claim 32, wherein:
a) the third domain, first dimerizing polypeptide, and first polypeptide chain of the first domain are part of a first stretch of consecutive amino acids,
b) the fourth domain, second dimerizing polypeptide, and first polypeptide chain of the second domain are part of a second stretch of consecutive amino acids,
c) the fifth domain, third dimerizing polypeptide, and second polypeptide chain of the first domain are part of a third stretch of consecutive amino acids, and
d) the sixth domain, fourth dimerizing polypeptide, and second polypeptide chain of the second domain are part of a fourth stretch of consecutive amino acids,
wherein each stretch of consecutive amino acids consists of the sequence of amino acids selected from the group consisting of SEQ ID NOs: 74-119 or wherein each such stretch of consecutive amino acids are variants with at least 90%, preferably at least 95%, more preferably at least 98% identity to said sequences.

48. A polynucleotide which encodes a polypeptide of claim 24, wherein the polypeptide comprises the amino acid sequence set forth in any one of SEQ ID NOs: 74-119.

49. A polynucleotide which encodes a polypeptide comprising any one of the polypeptide chains of claim 44 or 46.

50. A polynucleotide which encodes a polypeptide comprising any one of the stretches of consecutive amino acids of claim 47.

51. A vector comprising polynucleotides which encode polypeptides comprising the three different types of polypeptide chains of claim 44, wherein each polynucleotide is operably linked to a promoter which directs expression of the polynucleotide in a host cell.

52. A vector comprising polynucleotides which encode polypeptides comprising the two different types of polypeptide chains of claim 46, wherein each polynucleotide is operably linked to a promoter which directs expression of the polynucleotide in a host cell.

53. A vector comprising one or more polynucleotides of any one of claims 48 to 50, wherein each polynucleotide is operably linked to a promoter which directs expression of the polynucleotide in a host cell.

54. A host cell comprising the vector of any one of claims 51 to 53.

55. The host cell of claim 54 for use in a method of producing a tetrahedral antibody.

56. A method of producing a tetrahedral antibody, the method comprising recombinantly expressing the two different types of polypeptide chains of claim 44 in a host cell.

57. A method of producing a tetrahedral antibody, the method comprising recombinantly expressing the two different types of polypeptide chains of claim 46 in a host cell.

58. A method of producing a tetrahedral antibody, the method comprising recombinantly expressing the vector of any one of claims 51 to 53 in a host cell.

59. A method of producing a tetrahedral antibody comprising two, three, or four different types of polypeptide chains, the method comprising expressing the two, three, or four different types of polypeptide chains in the host cell of claim 54.

60. A pharmaceutical composition comprising any one of the tetrahedral antibodies of claims 24 and 31-46 and one or more pharmaceutically acceptable excipients.

61. A method of treating Covid-19 in a subject, the method comprising administering to the subject a therapeutically effective amount of the pharmaceutical composition of claim 60.

62. The tetrahedral antibody of any of claims 1 to 30, further comprising a seventh and/or eight domain, wherein:
a) the first domain is joined to the second domain via a covalent linkage attached to the first N-terminus of the first domain or via a first dimerizing polypeptide attached to the first N-terminus of the first domain, and wherein
i) the seventh domain is attached at its N-terminus by a peptide bond or via a peptide linker to:
(1) the first C-terminus of the first domain, or
(2) the second C-terminus of the first domain,
b) the first domain is joined to the second domain via a covalent linkage attached to the first C-terminus of the first domain or via a first dimerizing polypeptide attached to the first C-terminus of the first domain, and wherein
i) the seventh domain is attached at its C-terminus by a peptide bond or via a peptide linker to:
(1) the first N-terminus of the first domain, or
(2) the second N-terminus of the first domain,
c) the second domain is joined to the first domain via a covalent linkage attached to the first N-terminus of the second domain or via a second dimerizing polypeptide attached to the first N-terminus of the second domain, and wherein
i) the eighth domain is attached at its N-terminus by a peptide bond or via a peptide linker to:
(1) the first C-terminus of the second domain, or
(2) the second C-terminus of the second domain, or
d) the second domain is joined to the first domain via a covalent linkage attached to the first C-terminus of the second domain or via a second dimerizing polypeptide attached to the first C-terminus of the second domain, and wherein
i) the eighth domain is attached at its C-terminus by a peptide bond or via a peptide linker to:
(1) the first N-terminus of the second domain, or
(2) the second N-terminus of the second domain.

63. The tetrahedral antibody of claim 29, wherein:
a) the first and second domains are Fc domains, the third and fourth domains are anti-CD20 Fab domains and the fifth and sixth domains are anti-CD19 Fab domains;
b) the first and second domains are Fc domains, the third and fourth domains are anti-CD19 Fab domains and the fifth and sixth domains are anti-CD20 Fab domains;
c) the first and second domains are Fc domains, the third and fourth domains are anti-CD20 Fab domains, the fifth and sixth domains are anti-CD19 Fab domains, and each dimerizing polypeptide is an ACE2 CLD;
d) the first and second domains are Fc domains, the third and fourth domains are anti-CD19 Fab domains and the fifth and sixth domains are anti-CD20 Fab domains, and each dimerizing polypeptide is an ACE2 CLD;
e) the first and second domains are Fc domains, the third and fourth domains are anti-CD20 Fab domains, the fifth and sixth domains are anti-CD19 Fab domains, each dimerizing polypeptide is an ACE2 CLD, and the first and second domains are each connected to their respective dimerizing polypeptides via a peptide linker;
f) the first and second domains are Fc domains, the third and fourth domains are anti-CD19 Fab domains and the fifth and sixth domains are anti-CD20 Fab domains, each dimerizing polypeptide is an ACE2 CLD, and the first and second domains are each connected to their respective dimerizing polypeptides via a peptide linker.

64. The tetrahedral antibody of claim 63, wherein:
a) the first and second domains are Fc domains, the third and fourth domains are anti-CD20 Fab domains and the fifth and sixth domains are anti-CD19 Fab domains, and the seventh and eighth domains are single chain 4-1BB ligands;
b) the first and second domains are Fc domains, the third and fourth domains are anti-CD19 Fab domains, the fifth and sixth domains are anti-CD20 Fab domains, and the seventh and eighth domains are single chain 4-1BB ligands;
c) the first and second domains are Fc domains, the third and fourth domains are anti-CD20 Fab domains, the fifth and sixth domains are anti-CD19 Fab domains, the seventh and eighth domains are single chain 4-1BB ligands, and each dimerizing polypeptide is an ACE2 CLD;
d) the first and second domains are Fc domains, the third and fourth domains are anti-CD19 Fab domains and the fifth and sixth domains are anti-CD20 Fab domains, the seventh and eighth domains are single chain 4-1BB ligands, and each dimerizing polypeptide is an ACE2 CLD;
e) the first and second domains are Fc domains, the third and fourth domains are anti-CD20 Fab domains, the fifth and sixth domains are anti-CD19 Fab domains, the seventh and eighth domains are single chain 4-1BB ligands, each dimerizing polypeptide is an ACE2 CLD, and the first and second domains are each connected to their respective dimerizing polypeptides via a peptide linker; or
f) the first and second domains are Fc domains, the third and fourth domains are anti-CD19 Fab domains and the fifth and sixth domains are anti-CD20 Fab domains, the seventh and eighth domains are single chain 4-1BB ligands, each dimerizing polypeptide is an ACE2 CLD, and the first and second domains are each connected to their respective dimerizing polypeptides via a peptide linker.

65. The tetrahedral antibody of claim 63 or 64, wherein:
a) the anti-CD19 Fab domain comprises
i) the CDRs of each of the heavy and lights chains of FMC63, preferably wherein the anti-CD19 Fab is the Fab domain of FMC63;
ii) the CDRs of each of the heavy and lights chains of FMC60, preferably wherein the anti-CD19 Fab is the Fab domain of FMC60; or
iii) the CDRs of each of the heavy and lights chains of FMC59, preferably wherein the anti-CD19 Fab is the Fab domain of FMC59; and/or
b) the anti-CD20 Fab domain comprises the CDR of rituximab, preferably wherein the anti-CD20 Fab is the Fab domain of rituximab.

66. The tetrahedral antibody of any one of claims 63 to 65, wherein the Fc domains are characterized by one or more or all of the following features:
a) are heterodimers,
b) are IgG1 Fc domains,
c) comprise a silencing mutation such that the Fc domain lacks Fc gamma receptor binding activity, preferably wherein such mutation is one of the following combinations of mutations:
i) P329G/L234A/L235A (PGLALA),
ii) L234A/L235A (LALA),
iii) P331S/L234A/L235A,
iv) L234F/L235E/P331S, and
v) L234F/L235E/P329G,
d) comprise a mutation that enhances FcRn activity, preferably wherein such mutation extends the half-life of the tetrahedral antibody, preferably wherein the mutation is a combination the following mutations: L309D/Q311H/N434S (DHS), and
e) comprise a mutation that ablates their Protein A binding site, preferably wherein such mutation is H435R/Y436F (HY/RF).

67. The tetrahedral antibody of any one of claims 63 to 66, wherein the peptide linkers each have a length of 23 amino acids and are derived from the stalk region of a TNF receptor, preferably wherein the TNF receptor is TNF receptor 1B, still more preferably wherein the peptide linker consists of the amino acid sequence set forth in SEQ ID NO: 4468, and

68. The tetrahedral antibody of any one of claims 63 to 67, wherein the dimerizing polypeptides are each an ACE2 CLD, and wherein each ACE2 CLD comprises or consists of amino acids 616-740 of the ACE2 protein.

69. The tetrahedral antibody of claim 63, wherein such domains and peptide linkers are formed by four different types of polypeptide chains, preferably wherein the four different types of polypeptide chains are denoted L1, H1, L2, and H2, and wherein:
a) the L1 chain comprises the amino acid sequence set forth in SEQ ID NO: 733, the H1 chain comprises the amino acid sequence set forth in SEQ ID NO: 707, the L2 chain comprises the amino acid sequence set forth in SEQ ID NO: 734, and the H2 chain comprises the amino acid sequence set forth in SEQ ID NO: 708, or wherein the L1, H1, L2, and H2 chains are variants with at least 90%, preferably at least 95%, more preferably at least 98% identity to said sequences;
b) the L1 chain comprises the amino acid sequence set forth in SEQ ID NO: 735, the H1 chain comprises the amino acid sequence set forth in SEQ ID NO: 709, the L2 chain comprises the amino acid sequence set forth in SEQ ID NO: 736, and the H2 chain comprises the amino acid sequence set forth in SEQ ID NO: 710, or wherein the L1, H1, L2, and H2 chains are variants with at least 90%, preferably at least 95%, more preferably at least 98% identity to said sequences;
c) the L1 chain comprises the amino acid sequence set forth in SEQ ID NO: 735, the H1 chain comprises the amino acid sequence set forth in SEQ ID NO: 709, the L2 chain comprises the amino acid sequence set forth in SEQ ID NO: 737, and the H2 chain comprises the amino acid sequence set forth in SEQ ID NO: 711, or wherein the L1, H1, L2, and H2 chains are variants with at least 90%, preferably at least 95%, more preferably at least 98% identity to said sequences;
d) the L1 chain comprises the amino acid sequence set forth in SEQ ID NO: 738, the H1 chain comprises the amino acid sequence set forth in SEQ ID NO: 712, the L2 chain comprises the amino acid sequence set forth in SEQ ID NO: 739, and the H2 chain comprises the amino acid sequence set forth in SEQ ID NO: 713, or wherein the L1, H1, L2, and H2 chains are variants with at least 90%, preferably at least 95%, more preferably at least 98% identity to said sequences;
e) the L1 chain comprises the amino acid sequence set forth in SEQ ID NO: 740, the H1 chain comprises the amino acid sequence set forth in SEQ ID NO: 714, the L2 chain comprises the amino acid sequence set forth in SEQ ID NO: 741, and the H2 chain comprises the amino acid sequence set forth in SEQ ID NO: 715, or wherein the L1, H1, L2, and H2 chains are variants with at least 90%, preferably at least 95%, more preferably at least 98% identity to said sequences; or
f) the L1 chain comprises the amino acid sequence set forth in SEQ ID NO: 740, the H1 chain comprises the amino acid sequence set forth in SEQ ID NO: 714, the L2 chain comprises the amino acid sequence set forth in SEQ ID NO: 742, and the H2 chain comprises the amino acid sequence set forth in SEQ ID NO: 716, or wherein the L1, H1, L2, and H2 chains are variants with at least 90%, preferably at least 95%, more preferably at least 98% identity to said sequences;
g) the L1 chain comprises the amino acid sequence set forth in SEQ ID NO: 4801, the H1 chain comprises the amino acid sequence set forth in SEQ ID NO: 4721, the L2 chain comprises the amino acid sequence set forth in SEQ ID NO: 4802, and the H2 chain comprises the amino acid sequence set forth in SEQ ID NO: 4722, or wherein the L1, H1, L2, and H2 chains are variants with at least 90%, preferably at least 95%, more preferably at least 98% identity to said sequences;
h) the L1 chain comprises the amino acid sequence set forth in SEQ ID NO: 4803, the H1 chain comprises the amino acid sequence set forth in SEQ ID NO: 4723, the L2 chain comprises the amino acid sequence set forth in SEQ ID NO: 4804, and the H2 chain comprises the amino acid sequence set forth in SEQ ID NO: 4724, or wherein the L1, H1, L2, and H2 chains are variants with at least 90%, preferably at least 95%, more preferably at least 98% identity to said sequences;
i) the L1 chain comprises the amino acid sequence set forth in SEQ ID NO: 4803, the H1 chain comprises the amino acid sequence set forth in SEQ ID NO: 4723, the L2 chain comprises the amino acid sequence set forth in SEQ ID NO: 4805, and the H2 chain comprises the amino acid sequence set forth in SEQ ID NO: 4725, or wherein the L1, H1, L2, and H2 chains are variants with at least 90%, preferably at least 95%, more preferably at least 98% identity to said sequences;
j) the L1 chain comprises the amino acid sequence set forth in SEQ ID NO: 4806, the H1 chain comprises the amino acid sequence set forth in SEQ ID NO: 4726, the L2 chain comprises the amino acid sequence set forth in SEQ ID NO: 4807, and the H2 chain comprises the amino acid sequence set forth in SEQ ID NO: 4727, or wherein the L1, H1, L2, and H2 chains are variants with at least 90%, preferably at least 95%, more preferably at least 98% identity to said sequences;
k) the L1 chain comprises the amino acid sequence set forth in SEQ ID NO: 4808, the H1 chain comprises the amino acid sequence set forth in SEQ ID NO: 4728, the L2 chain comprises the amino acid sequence set forth in SEQ ID NO: 4809, and the H2 chain comprises the amino acid sequence set forth in SEQ ID NO: 4729, or wherein the L1, H1, L2, and H2 chains are variants with at least 90%, preferably at least 95%, more preferably at least 98% identity to said sequences;
l) the L1 chain comprises the amino acid sequence set forth in SEQ ID NO: 4808, the H1 chain comprises the amino acid sequence set forth in SEQ ID NO: 4728, the L2 chain comprises the amino acid sequence set forth in SEQ ID NO: 4810, and the H2 chain comprises the amino acid sequence set forth in SEQ ID NO: 4730, or wherein the L1, H1, L2, and H2 chains are variants with at least 90%, preferably at least 95%, more preferably at least 98% identity to said sequences;
m) the L1 chain comprises the amino acid sequence set forth in SEQ ID NO: 4803, the H1 chain comprises the amino acid sequence set forth in SEQ ID NO: 4723, the L2 chain comprises the amino acid sequence set forth in SEQ ID NO: 4813, and the H2 chain comprises the amino acid sequence set forth in SEQ ID NO: 4772, or wherein the L1, H1, L2, and H2 chains are variants with at least 90%, preferably at least 95%, more preferably at least 98% identity to said sequences;
n) the L1 chain comprises the amino acid sequence set forth in SEQ ID NO: 4803, the H1 chain comprises the amino acid sequence set forth in SEQ ID NO: 4723, the L2 chain comprises the amino acid sequence set forth in SEQ ID NO: 4814, and the H2 chain comprises the amino acid sequence set forth in SEQ ID NO: 4773, or wherein the L1, H1, L2, and H2 chains are variants with at least 90%, preferably at least 95%, more preferably at least 98% identity to said sequences;
o) the L1 chain comprises the amino acid sequence set forth in SEQ ID NO: 4815, the H1 chain comprises the amino acid sequence set forth in SEQ ID NO: 4774, the L2 chain comprises the amino acid sequence set forth in SEQ ID NO: 4813, and the H2 chain comprises the amino acid sequence set forth in SEQ ID NO: 4772, or wherein the L1, H1, L2, and H2 chains are variants with at least 90%, preferably at least 95%, more preferably at least 98% identity to said sequences;
p) the L1 chain comprises the amino acid sequence set forth in SEQ ID NO: 4815, the H1 chain comprises the amino acid sequence set forth in SEQ ID NO: 4774, the L2 chain comprises the amino acid sequence set forth in SEQ ID NO: 4814, and the H2 chain comprises the amino acid sequence set forth in SEQ ID NO: 4773, or wherein the L1, H1, L2, and H2 chains are variants with at least 90%, preferably at least 95%, more preferably at least 98% identity to said sequences;
q) the L1 chain comprises the amino acid sequence set forth in SEQ ID NO: 4816, the H1 chain comprises the amino acid sequence set forth in SEQ ID NO: 4775, the L2 chain comprises the amino acid sequence set forth in SEQ ID NO: 4809, and the H2 chain comprises the amino acid sequence set forth in SEQ ID NO: 4729, or wherein the L1, H1, L2, and H2 chains are variants with at least 90%, preferably at least 95%, more preferably at least 98% identity to said sequences;
r) the L1 chain comprises the amino acid sequence set forth in SEQ ID NO: 4816, the H1 chain comprises the amino acid sequence set forth in SEQ ID NO: 4775, the L2 chain comprises the amino acid sequence set forth in SEQ ID NO: 4810, and the H2 chain comprises the amino acid sequence set forth in SEQ ID NO: 4730, or wherein the L1, H1, L2, and H2 chains are variants with at least 90%, preferably at least 95%, more preferably at least 98% identity to said sequences;
s) the L1 chain comprises the amino acid sequence set forth in SEQ ID NO: 4817, the H1 chain comprises the amino acid sequence set forth in SEQ ID NO: 4776, the L2 chain comprises the amino acid sequence set forth in SEQ ID NO: 4809, and the H2 chain comprises the amino acid sequence set forth in SEQ ID NO: 4729, or wherein the L1, H1, L2, and H2 chains are variants with at least 90%, preferably at least 95%, more preferably at least 98% identity to said sequences;
t) the L1 chain comprises the amino acid sequence set forth in SEQ ID NO: 4817, the H1 chain comprises the amino acid sequence set forth in SEQ ID NO: 4776, the L2 chain comprises the amino acid sequence set forth in SEQ ID NO: 4810, and the H2 chain comprises the amino acid sequence set forth in SEQ ID NO: 4730, or wherein the L1, H1, L2, and H2 chains are variants with at least 90%, preferably at least 95%, more preferably at least 98% identity to said sequences;
u) the L1 chain comprises the amino acid sequence set forth in SEQ ID NO: 4803, the H1 chain comprises the amino acid sequence set forth in SEQ ID NO: 4723, the L2 chain comprises the amino acid sequence set forth in SEQ ID NO: 4814, and the H2 chain comprises the amino acid sequence set forth in SEQ ID NO: 4794, or wherein the L1, H1, L2, and H2 chains are variants with at least 90%, preferably at least 95%, more preferably at least 98% identity to said sequences;
v) the L1 chain comprises the amino acid sequence set forth in SEQ ID NO: 4815, the H1 chain comprises the amino acid sequence set forth in SEQ ID NO: 4774, the L2 chain comprises the amino acid sequence set forth in SEQ ID NO: 4813, and the H2 chain comprises the amino acid sequence set forth in SEQ ID NO: 4793, or wherein the L1, H1, L2, and H2 chains are variants with at least 90%, preferably at least 95%, more preferably at least 98% identity to said sequences;
w) the L1 chain comprises the amino acid sequence set forth in SEQ ID NO: 4815, the H1 chain comprises the amino acid sequence set forth in SEQ ID NO: 4774, the L2 chain comprises the amino acid sequence set forth in SEQ ID NO: 4814, and the H2 chain comprises the amino acid sequence set forth in SEQ ID NO: 4794, or wherein the L1, H1, L2, and H2 chains are variants with at least 90%, preferably at least 95%, more preferably at least 98% identity to said sequences;
x) the L1 chain comprises the amino acid sequence set forth in SEQ ID NO: 4819, the H1 chain comprises the amino acid sequence set forth in SEQ ID NO: 4775, the L2 chain comprises the amino acid sequence set forth in SEQ ID NO: 4809, and the H2 chain comprises the amino acid sequence set forth in SEQ ID NO: 4729, or wherein the L1, H1, L2, and H2 chains are variants with at least 90%, preferably at least 95%, more preferably at least 98% identity to said sequences
y) the L1 chain comprises the amino acid sequence set forth in SEQ ID NO: 4819, the H1 chain comprises the amino acid sequence set forth in SEQ ID NO: 4775, the L2 chain comprises the amino acid sequence set forth in SEQ ID NO: 4810, and the H2 chain comprises the amino acid sequence set forth in SEQ ID NO: 4730, or wherein the L1, H1, L2, and H2 chains are variants with at least 90%, preferably at least 95%, more preferably at least 98% identity to said sequences;
z) the L1 chain comprises the amino acid sequence set forth in SEQ ID NO: 4820, the H1 chain comprises the amino acid sequence set forth in SEQ ID NO: 4776, the L2 chain comprises the amino acid sequence set forth in SEQ ID NO: 4809, and the H2 chain comprises the amino acid sequence set forth in SEQ ID NO: 4729, or wherein the L1, H1, L2, and H2 chains are variants with at least 90%, preferably at least 95%, more preferably at least 98% identity to said sequences; or
aa) the L1 chain comprises the amino acid sequence set forth in SEQ ID NO: 4820, the H1 chain comprises the amino acid sequence set forth in SEQ ID NO: 4776, the L2 chain comprises the amino acid sequence set forth in SEQ ID NO: 4810, and the H2 chain comprises the amino acid sequence set forth in SEQ ID NO: 4730, or wherein the L1, H1, L2, and H2 chains are variants with at least 90%, preferably at least 95%, more preferably at least 98% identity to said sequences.

70. The tetrahedral antibody of claim 64, wherein such domains and peptide linkers are formed by four different types of polypeptide chains, preferably wherein the four different types of polypeptide chains are denoted L1, H1, L2, and H2, and wherein:
a) the L1 chain comprises the amino acid sequence set forth in SEQ ID NO: 733, the H1 chain comprises the amino acid sequence set forth in SEQ ID NO: 707, the L2 chain comprises the amino acid sequence set forth in SEQ ID NO: 734, and the H2 chain comprises the amino acid sequence set forth in SEQ ID NO: 717, or wherein the L1, H1, L2, and H2 chains are variants with at least 90%, preferably at least 95%, more preferably at least 98% identity to said sequences;
b) the L1 chain comprises the amino acid sequence set forth in SEQ ID NO: 735, the H1 chain comprises the amino acid sequence set forth in SEQ ID NO: 709, the L2 chain comprises the amino acid sequence set forth in SEQ ID NO: 736, and the H2 chain comprises the amino acid sequence set forth in SEQ ID NO: 718, or wherein the L1, H1, L2, and H2 chains are variants with at least 90%, preferably at least 95%, more preferably at least 98% identity to said sequences;
c) the L1 chain comprises the amino acid sequence set forth in SEQ ID NO: 735, the H1 chain comprises the amino acid sequence set forth in SEQ ID NO: 709, the L2 chain comprises the amino acid sequence set forth in SEQ ID NO: 737, and the H2 chain comprises the amino acid sequence set forth in SEQ ID NO: 719, or wherein the L1, H1, L2, and H2 chains are variants with at least 90%, preferably at least 95%, more preferably at least 98% identity to said sequences;
d) the L1 chain comprises the amino acid sequence set forth in SEQ ID NO: 738, the H1 chain comprises the amino acid sequence set forth in SEQ ID NO: 712, the L2 chain comprises the amino acid sequence set forth in SEQ ID NO: 739, and the H2 chain comprises the amino acid sequence set forth in SEQ ID NO: 720, or wherein the L1, H1, L2, and H2 chains are variants with at least 90%, preferably at least 95%, more preferably at least 98% identity to said sequences;
e) the L1 chain comprises the amino acid sequence set forth in SEQ ID NO: 740, the H1 chain comprises the amino acid sequence set forth in SEQ ID NO: 714, the L2 chain comprises the amino acid sequence set forth in SEQ ID NO: 741, and the H2 chain comprises the amino acid sequence set forth in SEQ ID NO: 721, or wherein the L1, H1, L2, and H2 chains are variants with at least 90%, preferably at least 95%, more preferably at least 98% identity to said sequences;
f) the L1 chain comprises the amino acid sequence set forth in SEQ ID NO: 740, the H1 chain comprises the amino acid sequence set forth in SEQ ID NO: 714, the L2 chain comprises the amino acid sequence set forth in SEQ ID NO: 742, and the H2 chain comprises the amino acid sequence set forth in SEQ ID NO: 722, or wherein the L1, H1, L2, and H2 chains are variants with at least 90%, preferably at least 95%, more preferably at least 98% identity to said sequences;
g) the L1 chain comprises the amino acid sequence set forth in SEQ ID NO: 733, the H1 chain comprises the amino acid sequence set forth in SEQ ID NO: 723, the L2 chain comprises the amino acid sequence set forth in SEQ ID NO: 734, and the H2 chain comprises the amino acid sequence set forth in SEQ ID NO: 724, or wherein the L1, H1, L2, and H2 chains are variants with at least 90%, preferably at least 95%, more preferably at least 98% identity to said sequences;
h) the L1 chain comprises the amino acid sequence set forth in SEQ ID NO: 735, the H1 chain comprises the amino acid sequence set forth in SEQ ID NO: 725, the L2 chain comprises the amino acid sequence set forth in SEQ ID NO: 736, and the H2 chain comprises the amino acid sequence set forth in SEQ ID NO: 726, or wherein the L1, H1, L2, and H2 chains are variants with at least 90%, preferably at least 95%, more preferably at least 98% identity to said sequences;
i) the L1 chain comprises the amino acid sequence set forth in SEQ ID NO: 735, the H1 chain comprises the amino acid sequence set forth in SEQ ID NO: 725, the L2 chain comprises the amino acid sequence set forth in SEQ ID NO: 737, and the H2 chain comprises the amino acid sequence set forth in SEQ ID NO: 727, or wherein the L1, H1, L2, and H2 chains are variants with at least 90%, preferably at least 95%, more preferably at least 98% identity to said sequences;
j) the L1 chain comprises the amino acid sequence set forth in SEQ ID NO: 738, the H1 chain comprises the amino acid sequence set forth in SEQ ID NO: 728, the L2 chain comprises the amino acid sequence set forth in SEQ ID NO: 739, and the H2 chain comprises the amino acid sequence set forth in SEQ ID NO: 729, or wherein the L1, H1, L2, and H2 chains are variants with at least 90%, preferably at least 95%, more preferably at least 98% identity to said sequences;
k) the L1 chain comprises the amino acid sequence set forth in SEQ ID NO: 740, the H1 chain comprises the amino acid sequence set forth in SEQ ID NO: 730, the L2 chain comprises the amino acid sequence set forth in SEQ ID NO: 741, and the H2 chain comprises the amino acid sequence set forth in SEQ ID NO: 731, or wherein the L1, H1, L2, and H2 chains are variants with at least 90%, preferably at least 95%, more preferably at least 98% identity to said sequences; or
l) the L1 chain comprises the amino acid sequence set forth in SEQ ID NO: 740, the H1 chain comprises the amino acid sequence set forth in SEQ ID NO: 730, the L2 chain comprises the amino acid sequence set forth in SEQ ID NO: 742, and the H2 chain comprises the amino acid sequence set forth in SEQ ID NO: 732, or wherein the L1, H1, L2, and H2 chains are variants with at least 90%, preferably at least 95%, more preferably at least 98% identity to said sequences.

71. A polynucleotide which encodes a polypeptide comprising any one of the polypeptide chains of claim 69 or 70.

72. A vector comprising polynucleotides which encode polypeptides comprising the four different types of polypeptide chains of claim 69 or 70, wherein each polynucleotide is operably linked to a promoter which directs expression of the polynucleotide in a host cell.

73. A vector comprising one or more polynucleotides of claim 71, wherein each polynucleotide is operably linked to a promoter which directs expression of the polynucleotide in a host cell.

74. A host cell comprising the vector of claim 72 or 73.

75. The host cell of claim 74 for use in a method of producing a tetrahedral antibody.

76. A method of producing a tetrahedral antibody, the method comprising recombinantly expressing the four different types of polypeptide chains of claim 69 or 70 in a host cell.

77. A method of producing a tetrahedral antibody, the method comprising recombinantly expressing the vector of claim 72 or 73 in a host cell.

78. A method of producing a tetrahedral antibody comprising four different types of polypeptide chains, the method comprising expressing the four different types of polypeptide chains in the host cell of claim 74.

79. A pharmaceutical composition comprising any one of the tetrahedral antibodies of claims 63-70 and one or more pharmaceutically acceptable excipients.

80. A method of treating cancer or inflammatory disease in a subject, the method comprising administering to the subject a therapeutically effective amount of the pharmaceutical composition of claim 79, preferably wherein the cancer is B cell cancer.

81. A tetrahedral molecule comprising a first, second, third, and fourth domain, wherein:
a) the first and second domains each independently comprise:
i) a first polypeptide chain comprising a first N-terminus and a first C-terminus of the domain, and
ii) optionally a second polypeptide chain comprising a second N-terminus and a second C-terminus of the domain,
b) the first domain and the second domain are joined to each other by a non-covalent linkage
(1) between a first dimerizing polypeptide attached by a peptide bond or via a peptide linker to the first N-terminus of the first domain, and a second dimerizing polypeptide attached by a peptide bond or via a peptide linker to the first N-terminus of the second domain,
(2) between a first dimerizing polypeptide attached by a peptide bond or via a peptide linker to the first C-terminus of the first domain, and a second dimerizing polypeptide attached by a peptide bond or via a peptide linker to the first C-terminus of the second domain,
(3) between a first dimerizing polypeptide attached by a peptide bond or via a peptide linker to the first N-terminus of the first domain, and a second dimerizing polypeptide attached by a peptide bond or via a peptide linker to the first C-terminus of the second domain, or
(4) between a first dimerizing polypeptide attached by a peptide bond or via a peptide linker to the first C-terminus of the first domain, and a second dimerizing polypeptide attached by a peptide bond or via a peptide linker to the first N-terminus of the second domain,
wherein the first and second dimerizing polypeptides are not immunoglobulin polypeptides,
c) if the first domain is joined to the second domain via a first dimerizing polypeptide attached to the first N-terminus of the first domain, then the third domain is attached at its C-terminus by a peptide bond or via a peptide linker to
i) the N-terminus of the first dimerizing polypeptide,
ii) the second N-terminus of the first domain if present, or
iii) the N-terminus of a third dimerizing polypeptide, wherein the third dimerizing polypeptide is attached at its C-terminus by a peptide bond or via a peptide linker to the second N-terminus of the first domain if present,
d) if the first domain is joined to the second domain via a first dimerizing polypeptide attached to the first C-terminus of the first domain, then the third domain is attached at its N-terminus by a peptide bond or via a peptide linker to
i) the C-terminus of the first dimerizing polypeptide,
ii) the second C-terminus of the first domain if present, or
iii) the C-terminus of a third dimerizing polypeptide, wherein the third dimerizing polypeptide is attached at its N-terminus by a peptide bond or via a peptide linker to the second C-terminus of the first domain if present,
e) if the second domain is joined to the first domain via a second dimerizing polypeptide attached to the first N-terminus of the second domain, then the fourth domain is attached at its C-terminus by a peptide bond or via a peptide linker to
i) the N-terminus of the second dimerizing polypeptide,
ii) the second N-terminus of the second domain if present, or
iii) the N-terminus of a fourth dimerizing polypeptide, wherein the third dimerizing polypeptide is attached at its C-terminus by a peptide bond or via a peptide linker to the second N-terminus of the second domain if present,
f) if the second domain is joined to the first domain via a second dimerizing polypeptide attached to the first C-terminus of the second domain, then the fourth domain is attached at its N-terminus by a peptide bond or via a peptide linker to
i) the C-terminus of the second dimerizing polypeptide,
ii) the second C-terminus of the second domain if present, or
iii) the C-terminus of a fourth dimerizing polypeptide, wherein the fourth dimerizing polypeptide is attached at its N-terminus by a peptide bond or via a peptide linker to the second C-terminus of the second domain if present.

82. The tetrahedral molecule of claim 81, wherein
a) the first domain is an Fc domain or Fab domain,
b) the first domain is an Fc domain or Fab domain and the second domain is not an Fc domain or Fab domain,
c) the first domain is an Fc domain and the second domain is a Fab domain,
d) the first and second domains are Fc domains,
e) the first and second domains are Fab domain,
f) the second, third and/or fourth domain are selected from the group consisting of (i) a secreted protein, and (ii) the extracellular domain of a transmembrane protein,
g) the third domain is selected from the group of (i) a secreted protein, and (ii) the extracellular domain of a transmembrane protein, and the fourth domain is a Fab,
h) the third domain is IL-15,
i) the third domain is IL-15 and the fourth domain is an IL-15Rα sushi domain,
j) the third domain is IL-15 and the fourth domain is a Fab,
k) the third and fourth domains are each the ACE2 peptidase domain (PD),
l) the first and second domains are Fc domains, and the third and fourth domains are selected from the group consisting of (i) a secreted protein, and (ii) the extracellular domain of a transmembrane protein,
m) the first and second domains are Fc domains, the third domain is selected from the group consisting of (i) a secreted protein, and (ii) the extracellular domain of a transmembrane protein, and the fourth domain is Fab,
n) the first and second domains are Fc domains and the third and fourth domains are Fab domains,
o) the first and second domains are Fc domains and the third and fourth domains are each the ACE2 peptidase domain (PD),
p) the first domain is an Fc domain and the second, third and fourth domains are Fab domains,
q) the first domain is an Fc domain, the second domain is a Fab domain, the third domain is IL-15, and the fourth domain is an IL-15Rα sushi domain, or
r) the first domain is an Fc domain, the second domain is a Fab domain, the third domain is IL-15, and the fourth domain is a Fab.

83. The tetrahedral molecule of claim 81 or 82, wherein the first and second dimerizing polypeptides are selected from the group consisting of:
a) dimerizing domains of an extracellular protein dimer, and
b) dimerizing domains of an intracellular protein dimer.

84. The tetrahedral molecule of claim 81 or 82, wherein the first and second dimerizing polypeptides are selected from the group consisting of:
a) a leucine zipper domain,
b) a collectrin-like domain (CLD),
c) a collectrin domain (CD),
d) a CD8 alpha extracellular domain, and
e) a CD8 beta extracellular domain.

85. The tetrahedral molecule of any one of claims 81 to 84, wherein:
a) the first dimerizing polypeptide is the same as the second dimerizing polypeptide, and
b) the dimerizing polypeptides form a homodimer.

86. The tetrahedral molecule of any one of claims 81 to 84, wherein:
a) the first dimerizing polypeptide is different than the second dimerizing polypeptide, and
b) the first and second dimerizing polypeptides form a heterodimer.

87. The tetrahedral molecule of claim 81 or 82, wherein:
a) the first and second dimerizing polypeptides are selected from the group consisting of:
i) a T cell receptor alpha and T cell receptor beta extracellular domain,
ii) a T cell receptor gamma and T cell receptor extracellular domain,
iii) an WIC class I alpha extracellular domain and beta-2 microglobulin
iv) an WIC class II alpha and WIC class II beta extracellular domain, and
v) a CD8 alpha and CD8 beta extracellular domain,
b) the first dimerizing polypeptide is different from the second dimerizing polypeptide, and
c) the first and second dimerizing polypeptides form a heterodimer.

88. The tetrahedral molecule of claim 86 or 87, wherein the first and second dimerizing polypeptides, when in the presence of each other, form less than 30%, 20%, 10%, 5%, 4%, 3%, 2%, or 1% homodimers.

89. A non-naturally occurring fusion protein dimer comprising a dimer of a first dimerizing polypeptide and a second dimerizing polypeptide, wherein:
a) the first dimerizing polypeptide is attached by a peptide bond or via a peptide linker at its N-terminus or C-terminus to a first domain, the second dimerizing polypeptide is optionally attached by a peptide bond or via a peptide linker at its N-terminus or C-terminus to a second domain,
b) the first and second dimerizing polypeptides are selected from the group consisting of:
i) a collectrin-like domain (CLD), and
ii) a collectrin domain (CD),
c) the first dimerizing polypeptide is optionally attached by a peptide bond or via a peptide linker at its remaining free N-terminus or C-terminus to a third domain, and
d) the second dimerizing polypeptide is optionally attached by a peptide bond or via a peptide linker at its remaining free N-terminus or C-terminus to a fourth domain, and.

90. The tetrahedral molecule of any one of claims 81 to 88, or the non-naturally occurring fusion protein dimer of claim 89, which:
a) does not comprise an ACE2 PD at the N-terminal side of either dimerizing polypeptide; and/or
b) does not comprise an ACE2 transmembrane domain at the C-terminal side of either dimerizing polypeptide.

91. An octahedral antibody comprising a first, second, third, fourth, fifth and sixth domain, wherein:
a) each of the first, second and third domains are selected from the group consisting of a Fab domain and an Fc domain,
b) each of the first, second and third domains comprise:
i) a first polypeptide chain comprising a first N-terminus and a first C-terminus of the domain, and
ii) a second polypeptide chain comprising a second N-terminus and a second C-terminus of the domain,
c) the first N-terminus of the first domain, the first N-terminus of the second domain and the first N-terminus of the third domain are joined to each other by a non-peptidyl linkage wherein the non-peptidyl linkage is:
i) a branched covalent linkage, or
ii) a non-covalent linkage between
(1) a first trimerizing polypeptide attached by a peptide bond or via a peptide linker to the first N-terminus of the first domain,
(2) a second trimerizing polypeptide attached by a peptide bond or via a peptide linker to the first N-terminus of the second domain, and
(3) a third trimerizing polypeptide attached by a peptide bond or via a peptide linker to the first N-terminus of the third domain,
wherein the first, second, and third trimerizing polypeptides are not immunoglobulin polypeptides,
d) the fourth domain is attached at its C-terminus by a peptide bond or via a peptide linker to:
i) the second N-terminus of the first domain, or
ii) the N-terminus terminus of the first trimerizing polypeptide,
e) the fifth domain is attached at its C-terminus by a peptide bond or via a peptide linker to:
i) the second N-terminus of the second domain, or
ii) the N-terminus of the second trimerizing polypeptide, and
f) the sixth domain is attached at its C-terminus by a peptide bond or via a peptide linker to:
i) the second N-terminus of the third domain, or
ii) the N-terminus of the third trimerizing polypeptide.

92. The octahedral antibody of claim 91, wherein the non-peptidyl linkage is a non-covalent linkage between a first trimerizing polypeptide attached to the first N-terminus of the first domain, a second trimerizing polypeptide attached to the first N-terminus of the second domain, and a third trimerizing polypeptide attached to the first N-terminus of the third domain, wherein the first, second, and third trimerizing polypeptides are selected from the group consisting of TNF ligand superfamily members OX40L/TNFLSF4, CD40L/TNFLSF5, FASL/TNFLSF6, CD70L/TNFLSF7, CD30L/TNFLSF8, 4-1BBL/TNFLSF9, TRAIL/TNFLSF10, RANKL/TNFLSF11, TWEAK/TNFLSF12, APRIL/TNFLSF13, BAFF/TNFLSF13B, LIGHT/TNFLSF14, VEGI/TNFLSF15, GITRL/TNFLSF18, EctodyplasinATNFLSF19, TNF/TNFLSF2, lymphotoxin alpha/TNFLSF1, and lymphotoxin beta/TNFLSF3.

93. The octahedral antibody of claim 91 or 92, further comprising a seventh, eighth, and/or ninth domain, wherein:
a) the seventh domain is attached at its C-terminus by a peptide bond or via a peptide linker to the second N-terminus of the first domain,
b) the eighth domain is attached at its C-terminus by a peptide bond or via a peptide linker to the second N-terminus of the second domain, and/or
c) the ninth domain is attached at its C-terminus by a peptide bond or via a peptide linker to the second N-terminus of the third domain.

94. The octahedral antibody of any one of claims 91 to 93, further comprising a tenth, eleventh, and/or twelfth domain, wherein:
a) the tenth domain is attached at its N-terminus by a peptide bond or via a peptide linker to:
i) the first C-terminus of the first domain, or
ii) the second C-terminus of the first domain,
b) the eleventh domain is attached at its N-terminus by a peptide bond or via a peptide linker to:
i) the first C-terminus of the second domain, or
ii) the second C-terminus of the second domain,
c) the twelfth domain is attached at its N-terminus by a peptide bond or via a peptide linker to:
i) the first C-terminus of the third domain, or
ii) the second C-terminus of the third domain.

95. The tetrahedral or octahedral antibody of any of claims 1 to 94, wherein:
a) one or more of the first, second, third, fourth, fifth, sixth, seventh, and eighth domains of the tetrahedral antibody, or one or more of the first, second, third, fourth, fifth, sixth domains, seventh, eighth, ninth, tenth, eleventh, and twelfth domains of the octahedral antibody are Fc domains, wherein the one or more Fc domains are independently selected from any of the Fc domains disclosed herein,
b) one or more of the first, second, third, fourth, fifth, sixth, seventh and eighth domains of the tetrahedral antibody, or one or more of the first, second, third, fourth, fifth, sixth domains, seventh, eighth, ninth, tenth, eleventh, and twelfth domains of the octahedral antibody are Fab domains, wherein the one or more Fab domains are independently selected from any of the Fab domains disclosed herein,
c) one or more of the third, fourth, fifth, sixth, seventh, and eighth domains of the tetrahedral antibody, or one or more of the fourth, fifth, sixth, seventh, eighth, ninth, tenth, eleventh, and twelfth domains of the octahedral antibody are a secreted protein, wherein the one or more secreted protein are independently selected from any of the secreted proteins disclosed herein,
d) one or more of the third, fourth, fifth, sixth, seventh, and eighth domains of the tetrahedral antibody, or one or more of the fourth, fifth, sixth, seventh, eighth, ninth, tenth, eleventh, and twelfth domains of the octahedral antibody are extracellular domains of a transmembrane protein, wherein the one or more extracellular domains of a transmembrane protein are independently selected from any of the extracellular domains of a transmembrane protein disclosed herein,
e) one or more of the third, fourth, fifth, sixth, seventh, and eighth domains of the tetrahedral or one or more of the fourth, fifth, sixth, seventh, eighth, ninth, tenth, eleventh, and twelfth domains of the octahedral antibody:
i) comprise the structure of a compound that is a drug approved for treating a subject afflicted with a disease,
ii) comprise the structure of an organic compound having a molecular weight less than 1000 Daltons, a DNA aptamer, an RNA aptamer, an oligonucleotide, or a protein that is biologically active,
iii) comprise a primary or a secondary amine,
iv) are aripiprazole or oseltamivir,
v) are a respiratory drug, an antiasthmatic agent, an analgesic agent, an antidepressant, an antianginal agent, an antiarrhythmic agent, an antihypertensive agent, an antidiabetic agent, an antihistamine, an anti-infective agent, an antibiotic, an antiinflamatory agent, an antiparkinsonism drug, an antipsychotics, an antipyretic agent, an antiulcer agent, an attention deficit hyperactivity disorder (ADHD) drug, a central nervous system stimulant, a decongestant, or a psychostimulant,
vi) are alprenolol, acebutolol, amidephrine, amineptine, amosulalol, amoxapine, amphetaminil, atenolol, atomoxetine, balofloxacin, bamethan, befunolol, benazepril, benfluorex, benzoctamine, betahistine, betaxolol, bevantolol, bifemelane, bisoprolol, brinzolamide, bufeniode, butethamine, camylofine, carazolol, carticaine, carvedilol, cephaeline, ciprofloxacin, cloZapine, clobenZorex, clorprenaline, cyclopentamine, delapril, demexiptiline, denopamine, desipramine, desloratadine, diclofenac, dimetofrine, dioxadrol, dobutamine, dopexamine, doripenem, dorzolamide, droprenilamine, duloxetine, eltopraZine, enalapril, enoxacin, epinephrine, ertapenem, esapraZole, esmolol, etoxadrol, fasudil, fendiline, fenethylline, fenfluramine, fenoldopam, fenoterol, fenproporex, flecamide, fluoxetine, formoterol, frovatriptan, gaboxadol, garenoxacin, gatifloxacin, grepafloxacin, hexoprenaline, imidapril, indalpine, indecainide, indeloxazine hydrochloride, isoxsuprine, ispronicline, labetalol, landiolol, lapatinib, levophacetoperane, lisinopril, lomefloxacin, lotrafiban, maprotiline, mecamylamine, mefloquine, mepindolol, meropenem, metapramine, metaproterenol, methoxyphenamine, dextrorotary methylphenidate, methylphenidate, metipranolol, metoprolol, mitoxantrone, mivazerol, moexipril, moprolol, moxifloxacin, nebivolol, nifenalol, nipradilol, norfloxacin, nortriptyline, nylidrin, olanZapine, oxamniquine, oxprenolol, oxyfedrine, paroxetine, perhexyline, phenmetrazine, phenylephrine, phenylpropylmethylamine, pholedrine, picilorex, pimethylline, pindolol, pipemidic acid, piridocaine, practolol, pradofloxacin, pramipexole, pramiverin, prenalterol, prenylamine, prilocalne, procaterol, pronethalol, propafenone, propranolol, propylhexedrine, protokylol, protriptyline, pseudoephedrine, reboxetine, rasagiline, (r)-rasagiline, repinotan, reproterol, rimiterol, ritodrine, safinamide, salbutamol/albuterol, salmeterol, sarizotan, sertraline, silodosin, sotalol, soterenol, sparfloxacin, spirapril, sulfinalol, synephrine, tamsulosin, tebanicline, tianeptine, tirofiban, tretoquinol, trimetazidine, troxipide, varenicline, vildagliptin, viloxazine, viquidil or xamoterol,
vii) comprise a protein that is biologically active,
viii) are biologically active such that it has target-binding activity,
ix) are an independently-folding protein or a portion thereof,
x) are a glycosylated protein,
xi) comprise intra-chain disulfide bonds,
xii) binds a cytokine,
xiii) binds to a cytokine, wherein the cytokine is TNFα,
xiv) comprise Atrial Natriuretic Peptide (ANP), Calcitonin, Corticotropin Releasing Hormone (CRH), Endothelin, Exenatide, Gastric Inhibitory Peptide (GIP), Glucagon-Like Peptide-1 (GLP-1), Glucagon-Like Peptide-2 (GLP-2), an analog of GLP-1 or GLP-2, Glucagon Vasoactive Intestinal Peptide (GVIP), Ghrelin, Peptide YY or Secretin, or a portion thereof,
xv) comprise a stretch of consecutive amino acids in the sequence
(SEQ ID NO: 4657)
HGEGTFTSDVSSYLEEQAAKEFIAWLVKGRG,
xvi) comprise at least one stretch of consecutive amino acids which are identical to a stretch of consecutive amino acids present in the heavy chain of a Fab or a Fab′ of an antibody,
xvii) comprise at least one at least one stretch of consecutive amino acids which are identical to a stretch of consecutive amino acids present in the light chain of a Fab or a Fab′ of an antibody,
xviii) comprise at least one Fab or Fab′ of an antibody, or a portion of at least one Fab or Fab′,
xix) comprise Fab-1 or Fab′1, or a portion thereof of an antibody,
xx) comprise Fab-2 or Fab′2, or a portion thereof of an antibody,
xxi) comprise two Fab or Fab′ hands of an antibody,
xxii) comprise at least one stretch of consecutive amino acids which are identical to a stretch of consecutive amino acids present in a single chain antibody, or
xxiii) comprise at least one stretch of consecutive amino acids which are identical to a stretch of consecutive amino acids present in a TNFα receptor.
f) the tetrahedral or octahedral antibody comprises a covalent linkage, wherein the covalent linkage is selected from any covalent linkage disclosed herein, or comprises any heterobifunctional crosslinker disclosed herein, and/or
g) the tetrahedral or octahedral antibody comprises one or more peptide linkers, wherein the one or more peptide linkers are independently selected from:
i) a stretch of consecutive amino acids which is, or is present in, the sequence TSTSPTRSMAPGAVHLPQPVSTRSQHTQPTPEPSTAPSTSF LLPMGPSPPAEGSTGD (SEQ ID NO: 3227),
ii) a stretch of consecutive amino acids which is, or is present in, the sequence GGGGAGGGGAGGGGAGGGGAGGGGAGGG (SEQ ID NO: 3226), or
iii) any peptide linker disclosed herein.

96. A composition comprising at least 10%, at least 11%, at least 12%, at least 13%, at least 14%, at least 15%, at least 16%, at least 17%, at least 18%, at least 19%, at least 20%, at least 21%, at least 22%, at least 23%, at least 24%, at least 25%, at least 26%, at least 27%, at least 28%, at least 29%, at least 30%, at least 31%, at least 32%, at least 33%, at least 34%, at least 35%, at least 36%, at least 37%, at least 38%, at least 39%, at least 40%, at least 41%, at least 42%, at least 43%, at least 44%, at least 45%, at least 46%, at least 47%, at least 48%, at least 49%, at least 50%, at least 51%, at least 52%, at least 53%, at least 54%, at least 55%, at least 56%, at least 57%, at least 58%, at least 59%, at least 60%, at least 61%, at least 62%, at least 63%, at least 64%, at least 65%, at least 66%, at least 67%, at least 68%, at least 69%, at least 70%, at least 71%, at least 72%, at least 73%, at least 74%, at least 75%, at least 76%, at least 77%, at least 78%, at least 79%, at least 80%, at least 81%, at least 82%, at least 83%, at least 84%, at least 85%, at least 86%, at least 87%, at least 88%, at least 89%, at least 90%, at least 91%, at least 92%, at least 93%, at least 94%, at least 95%, at least 96%, at least 97%, at least 98%, or at least 99% of the tetrahedral or octahedral antibody of any of claims 1 to 95 as a proportion (w/w) of peptide-containing molecules in the composition.

97. A pharmaceutical composition comprising the composition of claim 96 and one or more pharmaceutically acceptable excipients.

98. A method of making the tetrahedral antibody of any one of claims 17 to 28, wherein the non-peptidyl linkage of the tetrahedral antibody is a non-covalent linkage between a first dimerizing polypeptide attached to the first N-terminus of first domain and a second dimerizing polypeptide attached to the first N-terminus of the second domain, the method comprising:
a) recombinantly expressing each of the following polypeptides in a host cell:
i) a first polypeptide comprising, from its N-terminus to its C-terminus,
(1) optionally, the third domain, which is attached at its C-terminus by a peptide bond or via a peptide linker to
(2) the N-terminus of the first dimerizing polypeptide, which is attached at its C-terminus by a peptide bond or via a peptide linker to
(3) the N-terminus of the first polypeptide chain of the first domain,
ii) a second polypeptide comprising, from its N-terminus to its C-terminus,
(1) optionally, the fourth domain, which is attached at its C-terminus by a peptide bond or via a peptide linker to
(2) the N-terminus of the second dimerizing polypeptide, which is attached at its C-terminus by a peptide bond or via a peptide linker to
(3) the N-terminus of the first polypeptide chain of the second domain,
iii) a third polypeptide comprising, from its N-terminus to its C-terminus,
(1) the third domain if not present on the first polypeptide, which is attached at its C-terminus by a peptide bond or via a peptide linker to
(a) the N-terminus of a third dimerizing polypeptide which is in turn attached at its C-terminus by a peptide bond or via a peptide linker to the N-terminus of the second polypeptide chain of the first domain, or
(b) the N-terminus of the second polypeptide chain of the first domain,
iv) a fourth polypeptide comprising, from its N-terminus to its C-terminus,
(1) the fourth domain if not present on the second polypeptide, which is attached at its C-terminus by a peptide bond or via a peptide linker to
(a) the N-terminus of a fourth dimerizing polypeptide which is in turn attached at its C-terminus by a peptide bond or via a peptide linker to the N-terminus of the second polypeptide chain of the first domain, or
(b) the N-terminus of the second polypeptide chain of the first domain, and
v) optionally one or more additional polypeptides comprising a second polypeptide chain of the third and/or fourth domains, if present.

99. A method of making the tetrahedral antibody of any one of claims 17 to 28, wherein the non-peptidyl linkage of the tetrahedral antibody is a non-covalent linkage between a first dimerizing polypeptide attached to the first C-terminus of first domain and a second dimerizing polypeptide attached to the first N-terminus of the second domain, the method comprising:
a) recombinantly expressing each of the following polypeptides in a host cell:
i) a first polypeptide comprising, from its N-terminus to its C-terminus,
(1) the first polypeptide chain of the first domain which is attached at its C-terminus by a peptide bond or via a peptide linker to
(2) the N-terminus of the first dimerizing polypeptide, which is in turn optionally attached at its C-terminus by a peptide bond or via a peptide linker to
(3) the N-terminus of the third domain,
ii) a second polypeptide comprising, from its N-terminus to its C-terminus,
(1) optionally, the fourth domain which is attached at its C-terminus by a peptide bond or via a peptide linker to
(2) the N-terminus of the second dimerizing polypeptide which is attached at its C-terminus by a peptide bond or via a peptide linker to
(3) the N-terminus of the first polypeptide chain of the second domain,
iii) a third polypeptide comprising, from its N-terminus to its C-terminus,
(1) the second polypeptide chain of the first domain, which is attached at its C-terminus by a peptide bond or via a peptide linker to
(a) the N-terminus of a third dimerizing polypeptide which is in turn attached at its C-terminus by a peptide bond or via a peptide linker to the N-terminus of the third domain if not present on the first polypeptide, or
(b) the N-terminus of the third domain if not present on the first polypeptide,
iv) a fourth polypeptide comprising, from its N-terminus to its C-terminus,
(1) the fourth domain if not present on the second polypeptide, which is attached at its C-terminus by a peptide bond or via a peptide linker to
(a) the N-terminus of a fourth dimerizing polypeptide which is in turn attached at its C-terminus by a peptide bond or via a peptide linker to the N-terminus of the second polypeptide chain of the first domain, or
(b) the N-terminus of the second polypeptide chain of the first domain, and
v) optionally one or more additional polypeptides comprising a second polypeptide chain of the third and/or fourth domains, if present.

100. A method of making the tetrahedral antibody of any one of claims 17 to 28, wherein the non-peptidyl linkage of the tetrahedral antibody is a non-covalent linkage between a first dimerizing polypeptide attached to the first N-terminus of first domain and a second dimerizing polypeptide attached to the first C-terminus of the second domain, the method comprising:
a) recombinantly expressing each of the following polypeptides in a host cell:
i) a first polypeptide comprising, from its N-terminus to its C-terminus,
(1) optionally, the third domain attached at its C-terminus by a peptide bond or via a peptide linker to
(2) the N-terminus of the first dimerizing polypeptide attached at its C-terminus by a peptide bond or via a peptide linker to
(3) the N-terminus of the first polypeptide chain of the first domain,
ii) a second polypeptide comprising, from its N-terminus to its C-terminus,
(1) the first polypeptide chain of the second domain attached at its C-terminus by a peptide bond or via a peptide linker to
(2) the N-terminus of the second dimerizing polypeptide, which is in turn optionally attached at its C-terminus by a peptide bond or via a peptide linker to
(3) the N-terminus of the third domain,
iii) a third polypeptide comprising, from its N-terminus to its C-terminus,
(1) the third domain if not present on the first polypeptide, attached at its C-terminus by a peptide bond or via a peptide linker to
(a) the N-terminus of a third dimerizing polypeptide which is in turn attached at its C-terminus by a peptide bond or via a peptide linker to the N-terminus of the second polypeptide chain of the first domain, or
(b) the N-terminus of the second polypeptide chain of the first domain,
iv) a fourth polypeptide comprising, from its N-terminus to its C-terminus,
(1) the second polypeptide chain of the first domain, which is attached at its C-terminus by a peptide bond or via a peptide linker to
(a) the N-terminus of a fourth dimerizing polypeptide which is in turn attached at its C-terminus by a peptide bond or via a peptide linker to the N-terminus of the fourth domain if not present on the second polypeptide, or
(b) the N-terminus of the fourth domain if not present on the second polypeptide, and
v) optionally one or more additional polypeptides comprising a second polypeptide chain of the third and/or fourth domains, if present.

101. A method of making the tetrahedral antibody of any one of claims 17 to 28, wherein the non-peptidyl linkage of the tetrahedral antibody is a non-covalent linkage between a first dimerizing polypeptide attached to the first C-terminus of first domain and a second dimerizing polypeptide attached to the first C-terminus of the second domain, the method comprising:
a) recombinantly expressing each of the following polypeptides in a host cell:
i) a first polypeptide comprising, from its N-terminus to its C-terminus,
(1) the first polypeptide chain of the first domain which is attached at its C-terminus by a peptide bond or via a peptide linker to
(2) the N-terminus of the first dimerizing polypeptide, which is in turn optionally attached at its C-terminus by a peptide bond or via a peptide linker to
(3) the N-terminus of the third domain,
ii) a second polypeptide comprising, from its N-terminus to its C-terminus,
(1) the first polypeptide chain of the second domain attached at its C-terminus by a peptide bond or via a peptide linker to
(2) the N-terminus of the second dimerizing polypeptide, which is in turn optionally attached at its C-terminus by a peptide bond or via a peptide linker to
(3) the N-terminus of the third domain,
iii) a third polypeptide comprising, from its N-terminus to its C-terminus,
(1) the second polypeptide chain of the first domain, which is attached at its C-terminus by a peptide bond or via a peptide linker to
(a) the N-terminus of a third dimerizing polypeptide which is in turn attached at its C-terminus by a peptide bond or via a peptide linker to the N-terminus of the third domain if not present on the first polypeptide, or
(b) the N-terminus of the third domain if not present on the first polypeptide,
iv) a fourth polypeptide comprising, from its N-terminus to its C-terminus,
(1) the second polypeptide chain of the first domain, which is attached at its C-terminus by a peptide bond or via a peptide linker to
(a) the N-terminus of a fourth dimerizing polypeptide which is in turn attached at its C-terminus by a peptide bond or via a peptide linker to the N-terminus of the fourth domain if not present on the second polypeptide, or
(b) the N-terminus of the fourth domain if not present on the second polypeptide, and
v) optionally one or more additional polypeptides comprising a second polypeptide chain of the third and/or fourth domains, if present.

102. A method of making the tetrahedral antibody of any one of claims 29 to 47, wherein the non-peptidyl linkage of the tetrahedral antibody is a non-covalent linkage between a first dimerizing polypeptide attached to the first N-terminus of first domain and a second dimerizing polypeptide attached to the first N-terminus of the second domain, the method comprising:
a) recombinantly expressing each of the following polypeptides in a host cell:
i) a first polypeptide comprising, from its N-terminus to its C-terminus,
(1) the third domain, or fifth domain if present, which is attached at its C-terminus by a peptide bond or via a peptide linker to
(2) the N-terminus of the first dimerizing polypeptide, which is attached at its C-terminus by a peptide bond or via a peptide linker to
(3) the N-terminus of the first polypeptide chain of the first domain,
ii) a second polypeptide comprising, from its N-terminus to its C-terminus,
(1) the fourth domain, or sixth domain if present, which is attached at its C-terminus by a peptide bond or via a peptide linker to
(2) the N-terminus of the second dimerizing polypeptide which is attached at its C-terminus by a peptide bond or via a peptide linker to
(3) the N-terminus of the first polypeptide chain of the second domain,
iii) a third polypeptide comprising, from its N-terminus to its C-terminus,
(1) the third domain if not present on the first polypeptide, or the fifth domain if present, which is attached at its C-terminus by a peptide bond or via a peptide linker to
(a) the N-terminus of a third dimerizing polypeptide which is in turn attached at its C-terminus by a peptide bond or via a peptide linker to the N-terminus of the second polypeptide chain of the first domain, or
(b) the N-terminus of the second polypeptide chain of the first domain,
iv) a fourth polypeptide comprising, from its N-terminus to its C-terminus,
(1) the fourth domain if not present on the second polypeptide, or the sixth domain if present, which is attached at its C-terminus by a peptide bond or via a peptide linker to
(a) the N-terminus of a fourth dimerizing polypeptide which is in turn attached at its C-terminus by a peptide bond or via a peptide linker to the N-terminus of the second polypeptide chain of the first domain, or
(b) the N-terminus of the second polypeptide chain of the first domain, and
v) optionally one or more additional polypeptides comprising a second polypeptide chain of the third, fourth, fifth, and/or sixth domains, if present.

103. A method of making the tetrahedral antibody of any one of claims 29 to 43, wherein the non-peptidyl linkage of the tetrahedral antibody is a non-covalent linkage between a first dimerizing polypeptide attached to the first C-terminus of first domain and a second dimerizing polypeptide attached to the first N-terminus of the second domain, the method comprising:
a) recombinantly expressing each of the following polypeptides in a host cell:
i) a first polypeptide comprising, from its N-terminus to its C-terminus,
(1) the first polypeptide chain of the first domain which is attached at its C-terminus by a peptide bond or via a peptide linker to
(2) the N-terminus of the first dimerizing polypeptide which is attached at its C-terminus by a peptide bond or via a peptide linker to
(3) the N-terminus of the third domain, or fifth domain if present,
ii) a second polypeptide comprising, from its N-terminus to its C-terminus,
(1) the fourth domain, or sixth domain if present, which is attached at its C-terminus by a peptide bond or via a peptide linker to
(2) the N-terminus of the second dimerizing polypeptide which is attached at its C-terminus by a peptide bond or via a peptide linker to
(3) the N-terminus of the first polypeptide chain of the second domain,
iii) a third polypeptide comprising, from its N-terminus to its C-terminus,
(1) the second polypeptide chain of the first domain which is attached at its C-terminus by a peptide bond or via a peptide linker to
(a) the N-terminus of a third dimerizing polypeptide which is in turn attached at its C-terminus by a peptide bond or via a peptide linker to the N-terminus of the third domain if not present on the first polypeptide, or the fifth domain if present, or
(b) the N-terminus of the third domain if not present on the first polypeptide, or the fifth domain if present,
iv) a fourth polypeptide comprising, from its N-terminus to its C-terminus,
(1) the fourth domain if not present on the second polypeptide, or the sixth domain if present, which is attached at its C-terminus by a peptide bond or via a peptide linker to
(a) the N-terminus of a fourth dimerizing polypeptide which is in turn attached at its C-terminus by a peptide bond or via a peptide linker to the N-terminus of the second polypeptide chain of the first domain, or
(b) the N-terminus of the second polypeptide chain of the first domain, and
v) optionally one or more additional polypeptides comprising a second polypeptide chain of the third, fourth, fifth, and/or sixth domains, if present.

104. A method of making the tetrahedral antibody of any one of claims 29 to 43, wherein the non-peptidyl linkage of the tetrahedral antibody is a non-covalent linkage between a first dimerizing polypeptide attached to the first N-terminus of first domain and a second dimerizing polypeptide attached to the first C-terminus of the second domain, the method comprising:
a) recombinantly expressing each of the following polypeptides in a host cell:
i) a first polypeptide comprising, from its N-terminus to its C-terminus,
(1) the third domain, or fifth domain if present, which is attached at its C-terminus by a peptide bond or via a peptide linker to
(2) the N-terminus of the first dimerizing polypeptide which is attached at its C-terminus by a peptide bond or via a peptide linker to
(3) the N-terminus of the first polypeptide chain of the first domain,
ii) a second polypeptide comprising, from its N-terminus to its C-terminus,
(1) the first polypeptide chain of the second domain which is attached at its C-terminus by a peptide bond or via a peptide linker to
(2) the N-terminus of the second dimerizing polypeptide which is attached at its C-terminus by a peptide bond or via a peptide linker to
(3) the N-terminus of the fourth domain, or sixth domain if present,
iii) a third polypeptide comprising, from its N-terminus to its C-terminus,
(1) the third domain if not present on the first polypeptide, or the fifth domain if present, attached at its C-terminus by a peptide bond or via a peptide linker to
(a) the N-terminus of a third dimerizing polypeptide which is in turn attached at its C-terminus by a peptide bond or via a peptide linker to the N-terminus of the second polypeptide chain of the first domain, or
(b) the N-terminus of the second polypeptide chain of the first domain, and
iv) a fourth polypeptide comprising, from its N-terminus to its C-terminus,
(1) the second polypeptide chain of the first domain, which is attached at its C-terminus by a peptide bond or via a peptide linker to
(a) the N-terminus of a fourth dimerizing polypeptide which is in turn attached at its C-terminus by a peptide bond or via a peptide linker to the N-terminus of the fourth domain if not present on the second polypeptide, or the sixth domain if present, or
(b) the N-terminus of the fourth domain if not present on the second polypeptide, or the sixth domain if present, and
v) optionally one or more additional polypeptides comprising a second polypeptide chain of the third, fourth, fifth, and/or sixth domains, if present.

105. A method of making the tetrahedral antibody of any one of claims 29 to 43, wherein the non-peptidyl linkage of the tetrahedral antibody is a non-covalent linkage between a first dimerizing polypeptide attached to the first C-terminus of first domain and a second dimerizing polypeptide attached to the first C-terminus of the second domain, the method comprising:
a) recombinantly expressing each of the following polypeptides in a host cell:
i) a first polypeptide comprising, from its N-terminus to its C-terminus,
(1) the first polypeptide chain of the first domain which is attached at its C-terminus by a peptide bond or via a peptide linker to
(2) the N-terminus of the first dimerizing polypeptide which is attached at its C-terminus by a peptide bond or via a peptide linker to
(3) the N-terminus of the third domain, or fifth domain if present,
ii) a second polypeptide comprising, from its N-terminus to its C-terminus,
(1) the first polypeptide chain of the second domain which is attached at its C-terminus by a peptide bond or via a peptide linker to
(2) the N-terminus of the second dimerizing polypeptide which is attached at its C-terminus by a peptide bond or via a peptide linker to
(3) the N-terminus of the fourth domain, or sixth domain if present,
iii) a third polypeptide comprising, from its N-terminus to its C-terminus,
(1) the second polypeptide chain of the first domain which is attached at its C-terminus by a peptide bond or via a peptide linker to
(a) the N-terminus of a third dimerizing polypeptide which is in turn attached at its C-terminus by a peptide bond or via a peptide linker to the N-terminus of the third domain if not present on the first polypeptide, or the fifth domain if present, or
(b) the N-terminus of the third domain if not present on the first polypeptide, or the fifth domain if present, and
iv) a fourth polypeptide comprising, from its N-terminus to its C-terminus,
(1) the second polypeptide chain of the first domain, which is attached at its C-terminus by a peptide bond or via a peptide linker to
(a) the N-terminus of a fourth dimerizing polypeptide which is in turn attached at its C-terminus by a peptide bond or via a peptide linker to the N-terminus of the fourth domain if not present on the second polypeptide, or the sixth domain if present, or
(b) the N-terminus of the fourth domain if not present on the second polypeptide, or the sixth domain if present, and
v) optionally one or more additional polypeptides comprising a second polypeptide chain of the third, fourth, fifth, and/or sixth domains, if present.

106. The tetrahedral antibody of any one of claims 17-23, wherein the first domain is an Fc domain, and the second, third, and fourth domains are Fab domain, wherein:
a) the third and fourth domains comprise a first type of Fab and the second domain comprise a second type of Fab,
i) the first type of Fab is formed by a VH-CH on a H1 or H2 chain, and a VL-CL on a L1 chain, and the second type of Fab is formed by a VL-CH on a H1 chain, and a VH-CL domain on a L2 chain;
ii) the first type of Fab is formed by a VL-CH on a H1 or H2 chain, and a VH-CL on a L1 chain, and the second type of Fab is formed by a VH-CH on a H2 chain, and a VL-CL domain on a L2 chain, or
iii) the first type of Fab is formed by a VH-CH on a H1 or H2 chain, and VL-CL on a L1 chain, and the second type of Fab is formed by a VH-CH on a H2 chain, and a VL-CL domain on a L2 chain,
wherein VL is a kappa and/or lambda light chain V region.

107. The tetrahedral antibody of claim 29, wherein the third, fourth, fifth, and sixth domains are Fab domains, wherein
a) the third and fourth domain comprise a first type of Fab, and the fifth and/or sixth domain comprise a second type of Fab, and
i) the first type of Fab is formed by a VH-CH on a H1 chain, and a VL-CL domain on a L1 chain, and the second type of Fab is formed by a VL-CH on a H2 chain, and a VH-CL on a L2 chain;
ii) the first type of Fab is formed by a VL-CH on a H1 chain, and a VH-CL domain on a L1 chain, and the second type of Fab is formed by a VH-CH on a H2 chain, and a VL-CL on a L2 chain; or
iii) the first type of Fab is formed by a VH-CH on a H1 chain, and a VL-CL domain on a L1 chain, and the second type of Fab is formed by a VH-CH on a H2 chain, and a VL-CL on a L2 chain,
wherein VL is a kappa and/or lambda light chain V region.

108. The tetrahedral antibody of claim 106 or 107, wherein:
a) one type of Fab comprises the mutations Q39K and S183E in its heavy chain portion, and the mutations Q38E and V133K in its light chain portion, and the other type of Fab comprises the mutations S183K and Q38E in its heavy chain portion, and the mutations V133E and Q39K in its light chain portion;
b) one type of Fab comprises the mutations Q39K and S183E in its heavy chain portion, and the mutations Q38E and V133K in its light chain portion, and the other type of Fab comprises the mutations S183K and Q38K in its heavy chain portion, and the mutations V133E and Q39E in its light chain portion;
c) one type of Fab comprises the mutations Q39E and S183E in its heavy chain portion, and the mutations Q38E and V133K in its light chain portion, and the other type of Fab comprises the mutations S183K and Q38E in its heavy chain portion, and the mutations V133E and Q39K in its light chain portion;
d) one type of Fab comprises the mutations Q39E and S183E in its heavy chain portion, and the mutations Q38K and V133K in its light chain portion, and the other type of Fab comprises the mutations S183K and Q38K in its heavy chain portion, and the mutations S176E and Q39E in its light chain portion;
e) one type of Fab comprises the mutations Q39K and S183E in its heavy chain portion, and the mutations Q38E and S176K in its light chain portion, and the other type of Fab comprises the mutations S183K and Q38E in its heavy chain portion, and the mutations S176E and Q39K in its light chain portion;
f) one type of Fab comprises the mutations Q39K and S183E in its heavy chain portion, and the mutations Q38E and S176K in its light chain portion, and the other type of Fab comprises the mutations S183K and Q38K in its heavy chain portion, and the mutations S176E and Q39E in its light chain portion;
g) one type of Fab comprises the mutations Q39E and S183E in its heavy chain portion, and the mutations Q38E and S176K in its light chain portion, and the other type of Fab comprises the mutations S183K and Q38E in its heavy chain portion, and the mutations S176E and Q39K in its light chain portion; or
h) one type of Fab comprises the mutations Q39E and S183E in its heavy chain portion, and the mutations Q38K and S176K in its light chain portion, and the other type of Fab comprises the mutations S183K and Q38K in its heavy chain portion, and the mutations S176E and Q39E in its light chain portion.

The application's sequence listing, which the Patent Office published only in electronic form, follows.

SEQUENCE LISTING (7764 sequences)

SEQ ID NO: 1 - protein, 213 aa, synthetic construct
  REGION 1..213: note = Rc6; L chain: R1
QIVLSQSPAILSASPGEKVTMTCRASSSVSYIHWFQQKPGSSPKPWIYATSNLASGVPVRFSGSGSGTSYSLTISRVEAEDAATYYCQQWTSNPPTFGGGTKLEIKRTVAAPSVFIFPPSDEQLKSGTASVVCLLNNFYPREAKVQWKVDNALQSGNSQESVTEQDSKDSTYSLSSTLTLSKADYEKHKVYACEVTHQGLSSPVTKSFNRGEC

SEQ ID NO: 2 - protein, 451 aa, synthetic construct
  REGION 1..451: note = Rc6; H chain: Rh
QVQLQQPGAELVKPGASVKMSCKASGYTFTSYNMHWVKQTPGRGLEWIGAIYPGNGDTSYNQKFKGKATLTADKSSSTAYMQLSSLTSEDSAVYYCARSTYYGGDWYFNVWGAGTTVTVSAASTKGPSVFPLAPSSKSTSGGTAALGCLVKDYFPEPVTVSWNSGALTSGVHTFPAVLQSSGLYSLSSVVTVPSSSLGTQTYICNVNHKPSNTKVDKKAEPKSCDKTHTCPPCPAPELLGGPSVFLFPPKPKDTLMISRTPEVTCVVVDVSHEDPEVKFNWYVDGVEVHNAKTKPREEQYNSTYRVVSVLTVLHQDWLNGKEYKCKVSNKALPAPIEKTISKAKGQPREPQVYTLPPSRDELTKNQVSLTCLVKGFYPSDIAVEWESNGQPENNYKTTPPVLDSDGSFFLYSKLTVDKSRWQQGNVFSCSVMHEALHNHYTQKSLSLSPGK

SEQ ID NO: 3 - protein, 222 aa, synthetic construct
  REGION 1..222: note = Rc6; Fc chain: Fc6CC
CPPCPAPELLGGPSVFLFPPKPKDTLMISRTPEVTCVVVDVSHEDPEVKFNWYVDGVEVHNAKTKPREEQYNSTYRVVSVLTVLHQDWLNGKEYKCKVSNKALPAPIEKTISKAKGQPREPQVYTLPPSRDELTKNQVSLTCLVKGFYPSDIAVEWESNGQPENNYKTTPPVLDSDGSFFLYSKLTVDKSRWQQGNVFSCSVMHEALHNHYTQKSLSLSPGK

SEQ ID NO: 4 - protein, 451 aa, synthetic construct
  REGION 1..451: note = Rc6HYRF; H chain: Rh-HYRF
QVQLQQPGAELVKPGASVKMSCKASGYTFTSYNMHWVKQTPGRGLEWIGAIYPGNGDTSYNQKFKGKATLTADKSSSTAYMQLSSLTSEDSAVYYCARSTYYGGDWYFNVWGAGTTVTVSAASTKGPSVFPLAPSSKSTSGGTAALGCLVKDYFPEPVTVSWNSGALTSGVHTFPAVLQSSGLYSLSSVVTVPSSSLGTQTYICNVNHKPSNTKVDKKAEPKSCDKTHTCPPCPAPELLGGPSVFLFPPKPKDTLMISRTPEVTCVVVDVSHEDPEVKFNWYVDGVEVHNAKTKPREEQYNSTYRVVSVLTVLHQDWLNGKEYKCKVSNKALPAPIEKTISKAKGQPREPQVYTLPPSRDELTKNQVSLTCLVKGFYPSDIAVEWESNGQPENNYKTTPPVLDSDGSFFLYSKLTVDKSRWQQGNVFSCSVMHEALHNRFTQKSLSLSPGK

SEQ ID NO: 5 - protein, 451 aa, synthetic construct; identical to SEQ ID NO: 4
  REGION 1..451: note = Rc60; H chain: Rh-knob

SEQ ID NO: 6 - protein, 222 aa, synthetic construct
  REGION 1..222: note = Rc60; Fc chain: Fc6CC-hole
CPPCPAPELLGGPSVFLFPPKPKDTLMISRTPEVTCVVVDVSHEDPEVKFNWYVDGVEVHNAKTKPREEQYNSTYRVVSVLTVLHQDWLNGKEYKCKVSNKALPAPIEKTISKAKGQPREPQVCTLPPSRDELTKNQVSLSCAVKGFYPSDIAVEWESNGQPENNYKTTPPVLDSDGSFFLVSKLTVDKSRWQQGNVFSCSVMHEALHNHYTQKSLSLSPGK

SEQ ID NO: 7 - protein, 451 aa, synthetic construct
  REGION 1..451: note = Rc66; H chain: Rh-B
QVQLQQPGAELVKPGASVKMSCKASGYTFTSYNMHWVKQTPGRGLEWIGAIYPGNGDTSYNQKFKGKATLTADKSSSTAYMQLSSLTSEDSAVYYCARSTYYGGDWYFNVWGAGTTVTVSAASTKGPSVFPLAPSSKSTSGGTAALGCLVKDYFPEPVTVSWNSGALTSGVHTFPAVLQSSGLYSLSSVVTVPSSSLGTQTYICNVNHKPSNTKVDKKAEPKSCDKTHTCPPCPAPELLGGPSVFLFPPKPKDTLMISRTPEVTCVVVDVSHEDPEVKFNWYVDGVEVHNAKTKPREEQYNSTYRVVSVLTVLHQDWLNGKEYKCKVSNKALPAPIEKTISKAKGQPREPQVYVLPPSRDELTKNQVSLLCLVKGFYPSDIAVEWESNGQPENNYLTWPPVLDSDGSFFLYSKLTVDKSRWQQGNVFSCSVMHEALHNHYTQKSLSLSPGK

SEQ ID NO: 8 - protein, 222 aa, synthetic construct
  REGION 1..222: note = Rc66; Fc chain: Fc6CC-A
CPPCPAPELLGGPSVFLFPPKPKDTLMISRTPEVTCVVVDVSHEDPEVKFNWYVDGVEVHNAKTKPREEQYNSTYRVVSVLTVLHQDWLNGKEYKCKVSNKALPAPIEKTISKAKGQPREPQVYVYPPSRDELTKNQVSLTCLVKGFYPSDIAVEWESNGQPENNYKTTPPVLDSDGSFALVSKLTVDKSRWQQGNVFSCSVMHEALHNHYTQKSLSLSPGK

SEQ ID NO: 9 - protein, 451 aa, synthetic construct
  REGION 1..451: note = Rc66SIDE; H chain: Rh-B/SIDE
QVQLQQPGAELVKPGASVKMSCKASGYTFTSYNMHWVKQTPGRGLEWIGAIYPGNGDTSYNQKFKGKATLTADKSSSTAYMQLSSLTSEDSAVYYCARSTYYGGDWYFNVWGAGTTVTVSAASTKGPSVFPLAPSSKSTSGGTAALGCLVKDYFPEPVTVSWNSGALTSGVHTFPAVLQSSGLYSLSSVVTVPSSSLGTQTYICNVNHKPSNTKVDKKAEPKSCDKTHTCPPCPAPELLGGPDVFLFPPKPKDTLMISRTPEVTCVVVDVSHEDPEVKFNWYVDGVEVHNAKTKPREEQYNSTYRVVSVLTVLHQDWLNGKEYKCKVSNKALPAPEEKTISKAKGQPREPQVYVLPPSRDELTKNQVSLLCLVKGFYPSDIAVEWESNGQPENNYLTWPPVLDSDGSFFLYSKLTVDKSRWQQGNVFSCSVMHEALHNHYTQKSLSLSPGK

SEQ ID NO: 10 - protein, 222 aa, synthetic construct
  REGION 1..222: note = Rc66SIDE; Fc chain: Fc6CC-A/SIDE
CPPCPAPELLGGPDVFLFPPKPKDTLMISRTPEVTCVVVDVSHEDPEVKFNWYVDGVEVHNAKTKPREEQYNSTYRVVSVLTVLHQDWLNGKEYKCKVSNKALPAPEEKTISKAKGQPREPQVYVYPPSRDELTKNQVSLTCLVKGFYPSDIAVEWESNGQPENNYKTTPPVLDSDGSFALVSKLTVDKSRWQQGNVFSCSVMHEALHNHYTQKSLSLSPGK

SEQ ID NO: 11 - protein, 451 aa, synthetic construct
  REGION 1..451: note = Rc66AAC9; H chain: Rh-B/AAC9
QVQLQQPGAELVKPGASVKMSCKASGYTFTSYNMHWVKQTPGRGLEWIGAIYPGNGDTSYNQKFKGKATLTADKSSSTAYMQLSSLTSEDSAVYYCARSTYYGGDWYFNVWGAGTTVTVSAASTKGPSVFPLAPSSKSTSGGTAALGCLVKDYFPEPVTVSWNSGALTSGVHTFPAVLQSSGLYSLSSVVTVPSSSLGTQTYICNVNHKPSNTKVDKKAEPKSCDKTHTCPPCPAPKRRGGPSVFLFPPKPKDTLMISRTPEVTCVVVDVSHEDPEVKFNWYVDGVEVHNAKTKPREEQYNSTYRVVSVLTVLHQDWLNGKEYKCKVSNKALPAPIEKTISKAKGQPREPQVYVLPPSRDELTKNQVSLLCLVKGFYPSDIAVEWESNGQPENNYLTWPPVLDSDGSFFLYSKLTVDKSRWQQGNVFSCSVMHEALHNHYTQKSLSLSPGK

SEQ ID NO: 12 - protein, 222 aa, synthetic construct
  REGION 1..222: note = Rc66AAC9; H chain: Rh-B/AAC9
CPPCPAPEDEGGPSVFLFPPKPKDTLMISRTPEVTCVVVDVSHEDPEVKFNWYVDGVEVHNAKTKPREEQYNSTYRVVSVLTVLHQDWLNGKEYKCKVSNKALPAPIEKTISKAKGQPREPQVYVYPPSRDELTKNQVSLTCLVKGFYPSDIAVEWESNGQPENNYKTTPPVLDSDGSFALVSKLTVDKSRWQQGNVFSCSVMHEALHNHYTQKSLSLSPGK

SEQ ID NO: 13 - protein, 684 aa, synthetic construct
  REGION 1..684: note = Rc66AAC9HA9; H chain: Rh-B/AAC9/HA9h
QVQLQQPGAELVKPGASVKMSCKASGYTFTSYNMHWVKQTPGRGLEWIGAIYPGNGDTSYNQKFKGKATLTADKSSSTAYMQLSSLTSEDSAVYYCARSTYYGGDWYFNVWGAGTTVTVSAASTKGPSVFPLAPSSKSTSGGTAALGCLVKDYFPEPVTVSWNSGALTSGVHTFPAVLQSSGLYSLSSVVTVPSSSLGTQTYICNVNHKPSNTKVDKKAEPKSCDKTHTCPPCPAPKRRGGPSVFLFPPKPKDTLMISRTPEVTCVVVDVSHEDPEVKFNWYVDGVEVHNAKTKPREEQYNSTYRVVSVLTVLHQDWLNGKEYKCKVSNKALPAPIEKTISKAKGQPREPQVYVLPPSRDELTKNQVSLLCLVKGFYPSDIAVEWESNGQPENNYLTWPPVLDSDGSFFLYSKLTVDKSRWQQGNVFSCSVMHEALHNHYTQKSLSLSPGKAAAGGGGSGGGGSEVQLQESGGGLVQPGDSLRLSCAASGFTFSNYWLGWIRQAPGKGPEWVGDIYPGGGYTNYNEKFKGRFTISADTSKNIAYLQVNSLRAEDTAVYYCARSASWYFDVWGQGTLVTVSSASTKGPSVFPLAPSSKSTSGGTAALGCLVKDYFPEPVTVSWNSGALTSGVHTFPAVLQSSGLYSLSSVVTVPSSSLGTQTYICNVNHKPSNTKVDKKVEPKSC

SEQ ID NO: 14 - protein, 452 aa, synthetic construct
  REGION 1..452: note = Rc66AAC9HA9; Fc chain: Fc6CC-A/AAC9/HA91
CPPCPAPEDEGGPSVFLFPPKPKDTLMISRTPEVTCVVVDVSHEDPEVKFNWYVDGVEVHNAKTKPREEQYNSTYRVVSVLTVLHQDWLNGKEYKCKVSNKALPAPIEKTISKAKGQPREPQVYVYPPSRDELTKNQVSLTCLVKGFYPSDIAVEWESNGQPENNYKTTPPVLDSDGSFALVSKLTVDKSRWQQGNVFSCSVMHEALHNHYTQKSLSLSPGKAAAGGGGSGGGGSDIELTQSPSSLSASVGDRVTITCRSNTGTVTTSNYASWYQQKPGKAPKGLIGHTNNRAPGVPSRFSGSLSGADATLTISSLQPEDLATYYCALWYNNHWVFGQGTKLEIKRTVAAPSVFIFPPSDEQLKSGTASVVCLLNNFYPREAKVQWKVDNALQSGNSQESVTEQDSKDSTYSLSSTLTLSKADYEKHKVYACEVTHQGLSSPVTKSFNRGEC

SEQ ID NO: 15 - protein, 455 aa, synthetic construct
  REGION 1..455: note = FcAAC9HA9; H chain: Fc6CC-B/AAC9/HA9h
CPPCPAPKRRGGPSVFLFPPKPKDTLMISRTPEVTCVVVDVSHEDPEVKFNWYVDGVEVHNAKTKPREEQYNSTYRVVSVLTVLHQDWLNGKEYKCKVSNKALPAPIEKTISKAKGQPREPQVYVLPPSRDELTKNQVSLLCLVKGFYPSDIAVEWESNGQPENNYLTWPPVLDSDGSFFLYSKLTVDKSRWQQGNVFSCSVMHEALHNHYTQKSLSLSPGKAAAGGGGSGGGGSEVQLQESGGGLVQPGDSLRLSCAASGFTFSNYWLGWIRQAPGKGPEWVGDIYPGGGYTNYNEKFKGRFTISADTSKNIAYLQVNSLRAEDTAVYYCARSASWYFDVWGQGTLVTVSSASTKGPSVFPLAPSSKSTSGGTAALGCLVKDYFPEPVTVSWNSGALTSGVHTFPAVLQSSGLYSLSSVVTVPSSSLGTQTYICNVNHKPSNTKVDKKVEPKSC

SEQ ID NO: 16 - protein, 217 aa, synthetic construct
  REGION 1..217: note = HA9c66AAC9; L chain: HA91
DIELTQSPSSLSASVGDRVTITCRSNTGTVTTSNYASWYQQKPGKAPKGLIGHTNNRAPGVPSRFSGSLSGADATLTISSLQPEDLATYYCALWYNNHWVFGQGTKLEIKRTVAAPSVFIFPPSDEQLKSGTASVVCLLNNFYPREAKVQWKVDNALQSGNSQESVTEQDSKDSTYSLSSTLTLSKADYEKHKVYACEVTHQGLSSPVTKSFNRGEC

SEQ ID NO: 17 - protein, 447 aa, synthetic construct
  REGION 1..447: note = HA9c66AAC9; H chain: HA9h-B/AAC9
EVQLQESGGGLVQPGDSLRLSCAASGFTFSNYWLGWIRQAPGKGPEWVGDIYPGGGYTNYNEKFKGRFTISADTSKNIAYLQVNSLRAEDTAVYYCARSASWYFDVWGQGTLVTVSSASTKGPSVFPLAPSSKSTSGGTAALGCLVKDYFPEPVTVSWNSGALTSGVHTFPAVLQSSGLYSLSSVVTVPSSSLGTQTYICNVNHKPSNTKVDKKVEPKSCDKTHTCPPCPAPKRRGGPSVFLFPPKPKDTLMISRTPEVTCVVVDVSHEDPEVKFNWYVDGVEVHNAKTKPREEQYNSTYRVVSVLTVLHQDWLNGKEYKCKVSNKALPAPIEKTISKAKGQPREPQVYVLPPSRDELTKNQVSLLCLVKGFYPSDIAVEWESNGQPENNYLTWPPVLDSDGSFFLYSKLTVDKSRWQQGNVFSCSVMHEALHNHYTQKSLSLSPGK

SEQ ID NO: 18 - protein, 213 aa, synthetic construct
  REGION 1..213: note = HRc66; L chain: HR-1
DIQMTQSPSSLSASVGDRVTITCRASSSVSYIHWYQQKPGKAPKPLIYATSNLASGVPSRFSGSGSGTDFTLTISSLQPEDFATYYCQQWTSNPPTFGQGTKVEIKRTVAAPSVFIFPPSDEQLKSGTASVVCLLNNFYPREAKVQWKVDNALQSGNSQESVTEQDSKDSTYSLSSTLTLSKADYEKHKVYACEVTHQGLSSPVTKSFNRGEC

SEQ ID NO: 19 - protein, 451 aa, synthetic construct
  REGION 1..451: note = HRc66; H chain: HRh-B
EVQLVESGGGLVQPGGSLRLSCAASGYTFTSYNMHWVRQAPGKGLEWVGAIYPGNGDTSYNQKFKGRFTISVDKSKNTLYLQMNSLRAEDTAVYYCARSTYYGGDWYFNVWGQGTLVTVSSASTKGPSVFPLAPSSKSTSGGTAALGCLVKDYFPEPVTVSWNSGALTSGVHTFPAVLQSSGLYSLSSVVTVPSSSLGTQTYICNVNHKPSNTKVDKKVEPKSCDKTHTCPPCPAPELLGGPSVFLFPPKPKDTLMISRTPEVTCVVVDVSHEDPEVKFNWYVDGVEVHNAKTKPREEQYNSTYRVVSVLTVLHQDWLNGKEYKCKVSNKALPAPIEKTISKAKGQPREPQVYVLPPSRDELTKNQVSLLCLVKGFYPSDIAVEWESNGQPENNYLTWPPVLDSDGSFFLYSKLTVDKSRWQQGNVFSCSVMHEALHNHYTQKSLSLSPGK

SEQ ID NO: 20 - protein, 218 aa, synthetic construct
  REGION 1..218: note = B19c66; L chain: B19l
DIQLTQSPASLAVSLGQRATISCKASQSVDYDGDSYLNWYQQIPGQPPKLLIYDASNLVSGIPPRFSGSGSGTDFTLNIHPVEKVDAATYHCQQSTEDPWTFGGGTKLEIKRTVAAPSVFIFPPSDEQLKSGTASVVCLLNNFYPREAKVQWKVDNALQSGNSQESVTEQDSKDSTYSLSSTLTLSKADYEKHKVYACEVTHQGLSSPVTKSFNRGEC

SEQ ID NO: 21 - protein, 454 aa, synthetic construct
  REGION 1..454: note = B19c66; H chain: B19h-B
QVQLQQSGAELVRPGSSVKISCKASGYAFSSYWMNWVKQRPGQGLEWIGQIWPGDGDTNYNGKFKGKATLTADESSSTAYMQLSSLASEDSAVYFCARRETTTVGRYYYAMDYWGQGTTVTVSSASTKGPSVFPLAPSSKSTSGGTAALGCLVKDYFPEPVTVSWNSGALTSGVHTFPAVLQSSGLYSLSSVVTVPSSSLGTQTYICNVNHKPSNTKVDKKVEPKSCDKTHTCPPCPAPELLGGPSVFLFPPKPKDTLMISRTPEVTCVVVDVSHEDPEVKFNWYVDGVEVHNAKTKPREEQYNSTYRVVSVLTVLHQDWLNGKEYKCKVSNKALPAPIEKTISKAKGQPREPQVYVLPPSRDELTKNQVSLLCLVKGFYPSDIAVEWESNGQPENNYLTWPPVLDSDGSFFLYSKLTVDKSRWQQGNVFSCSVMHEALHNHYTQKSLSLSPGK

SEQ ID NO: 22 - protein, 454 aa, synthetic construct
  REGION 1..454: note = B19c66AAC9; H chain: B19h-B/AAC9
QVQLQQSGAELVRPGSSVKISCKASGYAFSSYWMNWVKQRPGQGLEWIGQIWPGDGDTNYNGKFKGKATLTADESSSTAYMQLSSLASEDSAVYFCARRETTTVGRYYYAMDYWGQGTTVTVSSASTKGPSVFPLAPSSKSTSGGTAALGCLVKDYFPEPVTVSWNSGALTSGVHTFPAVLQSSGLYSLSSVVTVPSSSLGTQTYICNVNHKPSNTKVDKKVEPKSCDKTHTCPPCPAPKRRGGPSVFLFPPKPKDTLMISRTPEVTCVVVDVSHEDPEVKFNWYVDGVEVHNAKTKPREEQYNSTYRVVSVLTVLHQDWLNGKEYKCKVSNKALPAPIEKTISKAKGQPREPQVYVLPPSRDELTKNQVSLLCLVKGFYPSDIAVEWESNGQPENNYLTWPPVLDSDGSFFLYSKLTVDKSRWQQGNVFSCSVMHEALHNHYTQKSLSLSPGK

SEQ ID NO: 23 - protein, 733 aa, synthetic construct
  REGION 1..733: note = Blc6AAC9; scFv chain: BlscFvAAC9-B
DIQLTQSPASLAVSLGQRATISCKASQSVDYDGDSYLNWYQQIPGQPPKLLIYDASNLVSGIPPRFSGSGSGTDFTLNIHPVEKVDAATYHCQQSTEDPWTFGGGTKLEIKGGGGSGGGGSGGGGSQVQLQQSGAELVRPGSSVKISCKASGYAFSSYWMNWVKQRPGQGLEWIGQIWPGDGDTNYNGKFKGKATLTADESSSTAYMQLSSLASEDSAVYFCARRETTTVGRYYYAMDYWGQGTTVTVSSGGGGSDIKLQQSGAELARPGASVKMSCKTSGYTFTRYTMHWVKQRPGQGLEWIGYINPSRGYTNYNQKFKDKATLTTDKSSSTAYMQLSSLTSEDSAVYYCARYYDDHYCLDYWGQGTTLTVSSVEGGSGGSGGSGGSGGVDDIQLTQSPAIMSASPGEKVTMTCRASSSVSYMNWYQQKSGTSPKRWIYDTSKVASGVPYRFSGSGSGTSYSLTISSMEAEDAATYYCQQWSSNPLTFGAGTKLELKAAAEPKSSDKTHTCPPCPAPKRRGGPSVFLFPPKPKDTLMISRTPEVTCVVVDVSHEDPEVKFNWYVDGVEVHNAKTKPREEQYNSTYRVVSVLTVLHQDWLNGKEYKCKVSNKALPAPIEKTISKAKGQPREPQVYVLPPSRDELTKNQVSLLCLVKGFYPSDIAVEWESNGQPENNYLTWPPVLDSDGSFFLYSKLTVDKSRWQQGNVFSCSVMHEALHNHYTQKSLSLSPGK

SEQ ID NO: 24 - protein, 213 aa, synthetic construct
  REGION 1..213: note = Drc66; L chain: Dr1
SELTQDPAVSVALGQTVRITCSGDSLRSYYASWYQQKPGQAPVLVIYGANNRPSGIPDRFSGSSSGNTASLTITGAQAEDEADYYCNSADSSGNHVVFGGGTKLTVLGQPKAAPSVTLFPPSSEELQANKATLVCLISDFYPGAVTVAWKADSSPVKAGVETTTPSKQSNNKYAASSYLSLTPEQWKSHKSYSCQVTHEGSTVEKTVAPTECS

SEQ ID NO: 25 - protein, 451 aa, synthetic construct
  REGION 1..451: note = Drc66; H chain: Drh-B
EVQLVQSGGGVERPGGSLRLSCAASGFTFDDYAMSWVRQAPGKGLEWVSGINWQGGSTGYADSVKGRVTISRDNAKNSLYLQMNSLRAEDTAVYYCAKILGAGRGWYFDYWGKGTTVTVSSASTKGPSVFPLAPSSKSTSGGTAALGCLVKDYFPEPVTVSWNSGALTSGVHTFPAVLQSSGLYSLSSVVTVPSSSLGTQTYICNVNHKPSNTKVDKKVEPKSCDKTHTCPPCPAPELLGGPSVFLFPPKPKDTLMISRTPEVTCVVVDVSHEDPEVKFNWYVDGVEVHNAKTKPREEQYNSTYRVVSVLTVLHQDWLNGKEYKCKVSNKALPAPIEKTISKAKGQPREPQVYVLPPSRDELTKNQVSLLCLVKGFYPSDIAVEWESNGQPENNYLTWPPVLDSDGSFFLYSKLTVDKSRWQQGNVFSCSVMHEALHNHYTQKSLSLSPGK

SEQ ID NO: 26 - protein, 351 aa, synthetic construct
  REGION 1..351: note = 15c6AAC9; IL-15 chain: IL15-B/AAC9
NWVNVISDLKKIEDLIQSMHIDATLYTESDVHPSCKVTAMKCFLLELQVISLESGDASIHDTVENLIILANNSLSSNGNVTESGCKECEELEEKNIKEFLQSFVHIVQMFINTSGGGGSEPKSSDKTHTCPPCPAPKRRGGPSVFLFPPKPKDTLMISRTPEVTCVVVDVSHEDPEVKFNWYVDGVEVHNAKTKPREEQYNSTYRVVSVLTVLHQDWLNGKEYKCKVSNKALPAPIEKTISKAKGQPREPQVYVLPPSRDELTKNQVSLLCLVKGFYPSDIAVEWESNGQPENNYLTWPPVLDSDGSFFLYSKLTVDKSRWQQGNVFSCSVMHEALHNHYTQKSLSLSPGK

SEQ ID NO: 27 - protein, 406 aa, synthetic construct
  REGION 1..406: note = 15Rc6AAC9; IL-15R chain: IL15R-B/AAC9
ITCPPPMSVEHADIWVKSYSLYSRERYICNSGFKRKAGTSSLTECVLNKATNVAHWTTPSLKCIRDPALVHQRPAPPSTVTTAGVTPQPESLSPSGKEPAASSPSSNNTAATTAAIVPGSQLMPSKSPSTGTTEISSHESSHGTPSQTTAKNWELTASASHQPPGVYPQGGGGSEPKSSDKTHTCPPCPAPKRRGGPSVFLFPPKPKDTLMISRTPEVTCVVVDVSHEDPEVKFNWYVDGVEVHNAKTKPREEQYNSTYRVVSVLTVLHQDWLNGKEYKCKVSNKALPAPIEKTISKAKGQPREPQVYVLPPSRDELTKNQVSLLCLVKGFYPSDIAVEWESNGQPENNYLTWPPVLDSDGSFFLYSKLTVDKSRWQQGNVFSCSVMHEALHNHYTQKSLSLSPGK

SEQ ID NO: 28 - protein, 227 aa, synthetic construct
  REGION 1..227: note = Dc6AAC9; Fc chain: DKTHT-Fc6CC-B/AAC9
DKTHTCPPCPAPKRRGGPSVFLFPPKPKDTLMISRTPEVTCVVVDVSHEDPEVKFNWYVDGVEVHNAKTKPREEQYNSTYRVVSVLTVLHQDWLNGKEYKCKVSNKALPAPIEKTISKAKGQPREPQVYVLPPSRDELTKNQVSLLCLVKGFYPSDIAVEWESNGQPENNYLTWPPVLDSDGSFFLYSKLTVDKSRWQQGNVFSCSVMHEALHNHYTQKSLSLSPGK

SEQ ID NO: 29 - protein, 222 aa, synthetic construct
  REGION 1..222: note = Fc6RF; Fc chain: Fc6CC-RF
CPPCPAPELLGGPSVFLFPPKPKDTLMISRTPEVTCVVVDVSHEDPEVKFNWYVDGVEVHNAKTKPREEQYNSTYRVVSVLTVLHQDWLNGKEYKCKVSNKALPAPIEKTISKAKGQPREPQVYTLPPSRDELTKNQVSLTCLVKGFYPSDIAVEWESNGQPENNYKTTPPVLDSDGSFFLYSKLTVDKSRWQQGNVFSCSVMHEALHNRFTQKSLSLSPGK

SEQ ID NO: 30 - protein, 451 aa, synthetic construct
  REGION 1..451: note = RSIDE; H chain: Rh/SIDE
QVQLQQPGAELVKPGASVKMSCKASGYTFTSYNMHWVKQTPGRGLEWIGAIYPGNGDTSYNQKFKGKATLTADKSSSTAYMQLSSLTSEDSAVYYCARSTYYGGDWYFNVWGAGTTVTVSAASTKGPSVFPLAPSSKSTSGGTAALGCLVKDYFPEPVTVSWNSGALTSGVHTFPAVLQSSGLYSLSSVVTVPSSSLGTQTYICNVNHKPSNTKVDKKAEPKSCDKTHTCPPCPAPELLGGPDVFLFPPKPKDTLMISRTPEVTCVVVDVSHEDPEVKFNWYVDGVEVHNAKTKPREEQYNSTYRVVSVLTVLHQDWLNGKEYKCKVSNKALPAPEEKTISKAKGQPREPQVYTLPPSRDELTKNQVSLTCLVKGFYPSDIAVEWESNGQPENNYKTTPPVLDSDGSFFLYSKLTVDKSRWQQGNVFSCSVMHEALHNHYTQKSLSLSPGK

SEQ ID NO: 31 - protein, 351 aa, synthetic construct
  REGION 1..351: note = 15c6AAC9N79Q; IL-15 chain: IL15-B/AAC/N79Q
NWVNVISDLKKIEDLIQSMHIDATLYTESDVHPSCKVTAMKCFLLELQVISLESGDASIHDTVENLIILANNSLSSNGQVTESGCKECEELEEKNIKEFLQSFVHIVQMFINTSGGGGSEPKSSDKTHTCPPCPAPKRRGGPSVFLFPPKPKDTLMISRTPEVTCVVVDVSHEDPEVKFNWYVDGVEVHNAKTKPREEQYNSTYRVVSVLTVLHQDWLNGKEYKCKVSNKALPAPIEKTISKAKGQPREPQVYVLPPSRDELTKNQVSLLCLVKGFYPSDIAVEWESNGQPENNYLTWPPVLDSDGSFFLYSKLTVDKSRWQQGNVFSCSVMHEALHNHYTQKSLSLSPGK

SEQ ID NO: 32 - protein, 220 aa, synthetic construct
  REGION 1..220: note = 6Ec66; L chain: 6E10l
DIVMTQSPSSLTVTAGEKVALTCKASQSLLSSGNQKNYLTWYQQKPGQPPKLLIYWASIRESGVPDRFTGSGSGTFFTLTISSVQAEDLAVYYCQNDYNYPFTFGSGTKLEIKRTVAAPSVFIFPPSDEQLKSGTASVVCLLNNFYPREAKVQWKVDNALQSGNSQESVTEQDSKDSTYSLSSTLTLSKADYEKHKVYACEVTHQGLSSPVTKSFNRGEC

SEQ ID NO: 33 - protein, 450 aa, synthetic construct
  REGION 1..450: note = 6Ec66; H chain: 6E10h-B
EVQLQQSGAELVKPGASVKLSCTASGFNIKDTYIHWVKQRPEQGLEWIGRFDPVNVNTRYDSRFRGKATITSDASSNTAYLHLNSLTSEDTAVYYCSRSYYNGRRRFTYWGQGTLVTVSAASTKGPSVFPLAPSSKSTSGGTAALGCLVKDYFPEPVTVSWNSGALTSGVHTFPAVLQSSGLYSLSSVVTVPSSSLGTQTYICNVNHKPSNTKVDKKVEPKSCDKTHTCPPCPAPELLGGPSVFLFPPKPKDTLMISRTPEVTCVVVDVSHEDPEVKFNWYVDGVEVHNAKTKPREEQYNSTYRVVSVLTVLHQDWLNGKEYKCKVSNKALPAPIEKTISKAKGQPREPQVYVLPPSRDELTKNQVSLLCLVKGFYPSDIAVEWESNGQPENNYLTWPPVLDSDGSFFLYSKLTVDKSRWQQGNVFSCSVMHEALHNHYTQKSLSLSPGK

SEQ ID NO: 34 - protein, 450 aa, synthetic construct
  REGION 1..450: note = 6E10; H chain: 6E10h
EVQLQQSGAELVKPGASVKLSCTASGFNIKDTYIHWVKQRPEQGLEWIGRFDPVNVNTRYDSRFRGKATITSDASSNTAYLHLNSLTSEDTAVYYCSRSYYNGRRRFTYWGQGTLVTVSAASTKGPSVFPLAPSSKSTSGGTAALGCLVKDYFPEPVTVSWNSGALTSGVHTFPAVLQSSGLYSLSSVVTVPSSSLGTQTYICNVNHKPSNTKVDKKVEPKSCDKTHTCPPCPAPELLGGPSVFLFPPKPKDTLMISRTPEVTCVVVDVSHEDPEVKFNWYVDGVEVHNAKTKPREEQYNSTYRVVSVLTVLHQDWLNGKEYKCKVSNKALPAPIEKTISKAKGQPREPQVYTLPPSRDELTKNQVSLTCLVKGFYPSDIAVEWESNGQPENNYKTTPPVLDSDGSFFLYSKLTVDKSRWQQGNVFSCSVMHEALHNHYTQKSLSLSPGK

SEQ ID NO: 35 - protein, 219 aa, synthetic construct
  REGION 1..219: note = Soc66; L chain: Sol
DVVMTQSPLSLPVTLGQPASISCRSSQSLIYSDGNAYLHWFLQKPGQSPRLLIYKVSNRFSGVPDRFSGSGSGTDFTLKISRVEAEDVGVYYCSQSTHVPWTFGQGTKVEIKRTVAAPSVFIFPPSDEQLKSGTASVVCLLNNFYPREAKVQWKVDNALQSGNSQESVTEQDSKDSTYSLSSTLTLSKADYEKHKVYACEVTHQGLSSPVTKSFNRGEC

SEQ ID NO: 36 - protein, 442 aa, synthetic construct
  REGION 1..442: note = Soc66; H chain: Soh-B
EVQLVESGGGLVQPGGSLRLSCAASGFTFSRYSMSWVRQAPGKGLELVAQINSVGNSTYYPDTVKGRFTISRDNAKNTLYLQMNSLRAEDTAVYYCASGDYWGQGTLVTVSSASTKGPSVFPLAPSSKSTSGGTAALGCLVKDYFPEPVTVSWNSGALTSGVHTFPAVLQSSGLYSLSSVVTVPSSSLGTQTYICNVNHKPSNTKVDKKVEPKSCDKTHTCPPCPAPELLGGPSVFLFPPKPKDTLMISRTPEVTCVVVDVSHEDPEVKFNWYVDGVEVHNAKTKPREEQYNSTYRVVSVLTVLHQDWLNGKEYKCKVSNKALPAPIEKTISKAKGQPREPQVYVLPPSRDELTKNQVSLLCLVKGFYPSDIAVEWESNGQPENNYLTWPPVLDSDGSFFLYSKLTVDKSRWQQGNVFSCSVMHEALHNHYTQKSLSLSPGK

SEQ ID NO: 37 - protein, 442 aa, synthetic construct
  REGION 1..442: note = So; H chain: Soh
EVQLVESGGGLVQPGGSLRLSCAASGFTFSRYSMSWVRQAPGKGLELVAQINSVGNSTYYPDTVKGRFTISRDNAKNTLYLQMNSLRAEDTAVYYCASGDYWGQGTLVTVSSASTKGPSVFPLAPSSKSTSGGTAALGCLVKDYFPEPVTVSWNSGALTSGVHTFPAVLQSSGLYSLSSVVTVPSSSLGTQTYICNVNHKPSNTKVDKKVEPKSCDKTHTCPPCPAPELLGGPSVFLFPPKPKDTLMISRTPEVTCVVVDVSHEDPEVKFNWYVDGVEVHNAKTKPREEQYNSTYRVVSVLTVLHQDWLNGKEYKCKVSNKALPAPIEKTISKAKGQPREPQVYTLPPSRDELTKNQVSLTCLVKGFYPSDIAVEWESNGQPENNYKTTPPVLDSDGSFFLYSKLTVDKSRWQQGNVFSCSVMHEALHNHYTQKSLSLSPGK

SEQ ID NO: 38 - protein, 219 aa, synthetic construct
  REGION 1..219: note = Gl; L1 chain: Gl-L1 (CD20/Vk-Ck)
DIVMTQTPLSLPVTPGEPASISCRSSKSLLHSNGITYLYWYLQKPGQSPQLLIYQMSNLVSGVPDRFSGSGSGTDFTLKISRVEAEDVGVYYCAQNLELPYTFGGGTKVEIKRTVAAPSVFIFPPSDRKLKSGTASVVCLLNNFYPREAKVQWKVDNALQSGNSQESVTEQDSKDSTYSLSSTLTLSKADYEKHKVYACEVTHQGLSSPVTKSFNRGEC

SEQ ID NO: 39 - protein, 232 aa, synthetic construct
  REGION 1..232: note = Gl; L2 chain: Gl-L2 (CD3/VH-C-lambda)
EVQLLESGGGLVQPGGSLRLSCAASGFTFSTYAMNWVRQAPGKGLEWVSRIRSKYNNYATYYADSVKGRFTISRDDSKNTLYLQMNSLRAEDTAVYYCVRHGNFGNSYVSWFAYWGQGTLVTVSSASVAAPSVFIFPPSDEQLKSGTASVVCLLNNFYPREAKVQWKVDNALQSGNSQESVTEQDSKDSTYSLSSTLTLSKADYEKHKVYACEVTHQGLSSPVTKSFNRGEC

SEQ ID NO: 40 - protein, 673 aa, synthetic construct
  REGION 1..673: note = Gl; H1 chain: G1-H1 (CD20/VH-CH1)-(CD3/V-lambda-CH1)
QVQLVQSGAEVKKPGSSVKVSCKASGYAFSYSWINWVRQAPGQGLEWMGRIFPGDGDTDYNGKFKGRVTITADKSTSTAYMELSSLRSEDTAVYYCARNVFDGYWLVYWGQGTLVTVSSASTKGPSVFPLAPSSKSTSGGTAALGCLVEDYFPEPVTVSWNSGALTSGVHTFPAVLQSSGLYSLSSVVTVPSSSLGTQTYICNVNHKPSNTKVDEKVEPKSCDGGGGSGGGGSQAVVTQEPSLTVSPGGTVTLTCGSSTGAVTTSNYANWVQEKPGQAFRGLIGGTNKRAPGTPARFSGSLLGGKAALTLSGAQPEDEAEYYCALWYSNLWVFGGGTKLTVLSSASTKGPSVFPLAPSSKSTSGGTAALGCLVKDYFPEPVTVSWNSGALTSGVHTFPAVLQSSGLYSLSSVVTVPSSSLGTQTYICNVNHKPSNTKVDKKVEPKSCDKTHTCPPCPAPEAAGGPSVFLFPPKPKDTLMISRTPEVTCVVVDVSHEDPEVKFNWYVDGVEVHNAKTKPREEQYNSTYRVVSVLTVLHQDWLNGKEYKCKVSNKALGAPIEKTISKAKGQPREPQVYTLPPCRDELTKNQVSLWCLVKGFYPSDIAVEWESNGQPENNYKTTPPVLDSDGSFFLYSKLTVDKSRWQQGNVFSCSVMHEALHNHYTQKSLSLSPG

SEQ ID NO: 41 - protein, 448 aa, synthetic construct
  REGION 1..448: note = G1; H2 chain: G1-H2 (CD20/VH-CH1)
QVQLVQSGAEVKKPGSSVKVSCKASGYAFSYSWINWVRQAPGQGLEWMGRIFPGDGDTDYNGKFKGRVTITADKSTSTAYMELSSLRSEDTAVYYCARNVFDGYWLVYWGQGTLVTVSSASTKGPSVFPLAPSSKSTSGGTAALGCLVEDYFPEPVTVSWNSGALTSGVHTFPAVLQSSGLYSLSSVVTVPSSSLGTQTYICNVNHKPSNTKVDEKVEPKSCDKTHTCPPCPAPEAAGGPSVFLFPPKPKDTLMISRTPEVTCVVVDVSHEDPEVKFNWYVDGVEVHNAKTKPREEQYNSTYRVVSVLTVLHQDWLNGKEYKCKVSNKALGAPIEKTISKAKGQPREPQVCTLPPSRDELTKNQVSLSCAVKGFYPSDIAVEWESNGQPENNYKTTPPVLDSDGSFFLVSKLTVDKSRWQQGNVFSCSVMHEALHNHYTQKSLSLSPG

SEQ ID NO: 42 - protein, 221 aa, synthetic construct
  REGION 1..221: note = FcPG; Fc chain: Fc6CC-hole/PGLALA/delK
CPPCPAPEAAGGPSVFLFPPKPKDTLMISRTPEVTCVVVDVSHEDPEVKFNWYVDGVEVHNAKTKPREEQYNSTYRVVSVLTVLHQDWLNGKEYKCKVSNKALGAPIEKTISKAKGQPREPQVCTLPPSRDELTKNQVSLSCAVKGFYPSDIAVEWESNGQPENNYKTTPPVLDSDGSFFLVSKLTVDKSRWQQGNVFSCSVMHEALHNHYTQKSLSLSPG

SEQ ID NO: 43 - protein, 222 aa, synthetic construct
  REGION 1..222: note = ObSpc60PG; L1 chain Obx-L (CD20/VH-CH1)
QVQLVQSGAEVKKPGSSVKVSCKASGYAFSYSWINWVRQAPGQGLEWMGRIFPGDGDTDYNGKFKGRVTITADKSTSTAYMELSSLRSEDTAVYYCARNVFDGYWLVYWGQGTLVTVSSASTKGPSVFPLAPSSKSTSGGTAALGCLVKDYFPEPVTVSWNSGALTSGVHTFPAVLQSSGLYSLSSVVTVPSSSLGTQTYICNVNHKPSNTKVDKKVEPKSC

SEQ ID NO: 44 - protein, 216 aa, synthetic construct
  REGION 1..216: note = ObSpc60PG; L2 chain: Sp-L (CD3/V-lambda-C-lambda)
QAVVTQEPSLTVSPGGTVTLTCGSSTGAVTTSNYANWVQEKPGQAFRGLIGGTNKRAPGTPARFSGSLLGGKAALTLSGAQPEDEAEYYCALWYSNLWVFGGGTKLTVLRTVAAPSVFIFPPSDEQLKSGTASVVCLLNNFYPREAKVQWKVDNALQSGNSQESVTEQDSKDSTYSLSSTLTLSKADYEKHKVYACEVTHQGLSSPVTKSFNRGEC

SEQ ID NO: 45 - protein, 684 aa, synthetic construct
  REGION 1..684: note = ObSpc60PG; H chain: ObSp-H (CD20/Vk-Ck)-(CD3/VH-CH1)
DIVMTQTPLSLPVTPGEPASISCRSSKSLLHSNGITYLYWYLQKPGQSPQLLIYQMSNLVSGVPDRFSGSGSGTDFTLKISRVEAEDVGVYYCAQNLELPYTFGGGTKVEIKRTVAAPSVFIFPPSDEQLKSGTASVVCLLNNFYPREAKVQWKVDNALQSGNSQESVTEQDSKDSTYSLSSTLTLSKADYEKHKVYACEVTHQGLSSPVTKSFNRGECDGGGGSGGGGSEVQLLESGGGLVQPGGSLRLSCAASGFTFSTYAMNWVRQAPGKGLEWVSRIRSKYNNYATYYADSVKGRFTISRDDSKNTLYLQMNSLRAEDTAVYYCVRHGNFGNSYVSWFAYWGQGTLVTVSSASTKGPSVFPLAPSSKSTSGGTAALGCLVKDYFPEPVTVSWNSGALTSGVHTFPAVLQSSGLYSLSSVVTVPSSSLGTQTYICNVNHKPSNTKVDKKVEPKSCDKTHTCPPCPAPEAAGGPSVFLFPPKPKDTLMISRTPEVTCVVVDVSHEDPEVKFNWYVDGVEVHNAKTKPREEQYNSTYRVVSVLTVLHQDWLNGKEYKCKVSNKALGAPIEKTISKAKGQPREPQVYTLPPCRDELTKNQVSLWCLVKGFYPSDIAVEWESNGQPENNYKTTPPVLDSDGSFFLYSKLTVDKSRWQQGNVFSCSVMHEALHNHYTQKSLSLSPG

SEQ ID NO: 46 - protein, 219 aa, synthetic construct
  REGION 1..219: note = Obc60PG; L chain: Ob-L (CD20/Vk-Ck)
DIVMTQTPLSLPVTPGEPASISCRSSKSLLHSNGITYLYWYLQKPGQSPQLLIYQMSNLVSGVPDRFSGSGSGTDFTLKISRVEAEDVGVYYCAQNLELPYTFGGGTKVEIKRTVAAPSVFIFPPSDEQLKSGTASVVCLLNNFYPREAKVQWKVDNALQSGNSQESVTEQDSKDSTYSLSSTLTLSKADYEKHKVYACEVTHQGLSSPVTKSFNRGEC

SEQ ID NO: 47 - protein, 448 aa, synthetic construct
  REGION 1..448: note = Obc60PG; H chain: Ob-H/knob/PGLALA (CD20/VH-CH1)
QVQLVQSGAEVKKPGSSVKVSCKASGYAFSYSWINWVRQAPGQGLEWMGRIFPGDGDTDYNGKFKGRVTITADKSTSTAYMELSSLRSEDTAVYYCARNVFDGYWLVYWGQGTLVTVSSASTKGPSVFPLAPSSKSTSGGTAALGCLVKDYFPEPVTVSWNSGALTSGVHTFPAVLQSSGLYSLSSVVTVPSSSLGTQTYICNVNHKPSNTKVDKKVEPKSCDKTHTCPPCPAPEAAGGPSVFLFPPKPKDTLMISRTPEVTCVVVDVSHEDPEVKFNWYVDGVEVHNAKTKPREEQYNSTYRVVSVLTVLHQDWLNGKEYKCKVSNKALGAPIEKTISKAKGQPREPQVYTLPPCRDELTKNQVSLWCLVKGFYPSDIAVEWESNGQPENNYKTTPPVLDSDGSFFLYSKLTVDKSRWQQGNVFSCSVMHEALHNHYTQKSLSLSPG

SEQ ID NO: 48 - protein, 1266 aa, synthetic construct
  REGION 1..1266: note = ObSp41BBc60PG; H chain: ObSp-H-41BB/knob/PGLALA (CD20/Vk-Ck)-(CD3/VH-CH1)-41BB
DIVMTQTPLSLPVTPGEPASISCRSSKSLLHSNGITYLYWYLQKPGQSPQLLIYQMSNLVSGVPDRFSGSGSGTDFTLKISRVEAEDVGVYYCAQNLELPYTFGGGTKVEIKRTVAAPSVFIFPPSDEQLKSGTASVVCLLNNFYPREAKVQWKVDNALQSGNSQESVTEQDSKDSTYSLSSTLTLSKADYEKHKVYACEVTHQGLSSPVTKSFNRGECDGGGGSGGGGSEVQLLESGGGLVQPGGSLRLSCAASGFTFSTYAMNWVRQAPGKGLEWVSRIRSKYNNYATYYADSVKGRFTISRDDSKNTLYLQMNSLRAEDTAVYYCVRHGNFGNSYVSWFAYWGQGTLVTVSSASTKGPSVFPLAPSSKSTSGGTAALGCLVKDYFPEPVTVSWNSGALTSGVHTFPAVLQSSGLYSLSSVVTVPSSSLGTQTYICNVNHKPSNTKVDKKVEPKSCDKTHTCPPCPAPEAAGGPSVFLFPPKPKDTLMISRTPEVTCVVVDVSHEDPEVKFNWYVDGVEVHNAKTKPREEQYNSTYRVVSVLTVLHQDWLNGKEYKCKVSNKALGAPIEKTISKAKGQPREPQVYTLPPCRDELTKNQVSLWCLVKGFYPSDIAVEWESNGQPENNYKTTPPVLDSDGSFFLYSKLTVDKSRWQQGNVFSCSVMHEALHNHYTQKSLSLSPGGGGGSGGGGSREGPELSPDDPAGLLDLRQGMFAQLVAQNVLLIDGPLSWYSDPGLAGVSLTGGLSYKEDTKELVVAKAGVYYVFFQLELRRVVAGEGSGSVSLALHLQPLRSAAGAAALALTVDLPPASSEARNSAFGFQGRLLHLSAGQRLGVHLHTEARARHAWQLTQGATVLGLFRVTPEIPAGLPSPRSEGGGGSGGGGSREGPELSPDDPAGLLDLRQGMFAQLVAQNVLLIDGPLSWYSDPGLAGVSLTGGLSYKEDTKELVVAKAGVYYVFFQLELRRVVAGEGSGSVSLALHLQPLRSAAGAAALALTVDLPPASSEARNSAFGFQGRLLHLSAGQRLGVHLHTEARARHAWQLTQGATVLGLFRVTPEIPAGLPSPRSEGGGGSGGGGSREGPELSPDDPAGLLDLRQGMFAQLVAQNVLLIDGPLSWYSDPGLAGVSLTGGLSYKEDTKELVVAKAGVYYVFFQLELRRVVAGEGSGSVSLALHLQPLRSAAGAAALALTVDLPPASSEARNSAFGFQGRLLHLSAGQRLGVHLHTEARARHAWQLTQGATVLGLFRVTPEIPAGLPSPRSE

SEQ ID NO: 49 - protein, 1030 aa, synthetic construct
  REGION 1..1030: note = Ob41BBc60PG; H chain: Ob-H-41BB/knob/PGLALA (CD20/VH-CH1)-41BB
QVQLVQSGAEVKKPGSSVKVSCKASGYAFSYSWINWVRQAPGQGLEWMGRIFPGDGDTDYNGKFKGRVTITADKSTSTAYMELSSLRSEDTAVYYCARNVFDGYWLVYWGQGTLVTVSSASTKGPSVFPLAPSSKSTSGGTAALGCLVKDYFPEPVTVSWNSGALTSGVHTFPAVLQSSGLYSLSSVVTVPSSSLGTQTYICNVNHKPSNTKVDKKVEPKSCDKTHTCPPCPAPEAAGGPSVFLFPPKPKDTLMISRTPEVTCVVVDVSHEDPEVKFNWYVDGVEVHNAKTKPREEQYNSTYRVVSVLTVLHQDWLNGKEYKCKVSNKALGAPIEKTISKAKGQPREPQVYTLPPCRDELTKNQVSLWCLVKGFYPSDIAVEWESNGQPENNYKTTPPVLDSDGSFFLYSKLTVDKSRWQQGNVFSCSVMHEALHNHYTQKSLSLSPGGGGGSGGGGSREGPELSPDDPAGLLDLRQGMFAQLVAQNVLLIDGPLSWYSDPGLAGVSLTGGLSYKEDTKELVVAKAGVYYVFFQLELRRVVAGEGSGSVSLALHLQPLRSAAGAAALALTVDLPPASSEARNSAFGFQGRLLHLSAGQRLGVHLHTEARARHAWQLTQGATVLGLFRVTPEIPAGLPSPRSEGGGGSGGGGSREGPELSPDDPAGLLDLRQGMFAQLVAQNVLLIDGPLSWYSDPGLAGVSLTGGLSYKEDTKELVVAKAGVYYVFFQLELRRVVAGEGSGSVSLALHLQPLRSAAGAAALALTVDLPPASSEARNSAFGFQGRLLHLSAGQRLGVHLHTEARARHAWQLTQGATVLGLFRVTPEIPAGLPSPRSEGGGGSGGGGSREGPELSPDDPAGLLDLRQGMFAQLVAQNVLLIDGPLSWYSDPGLAGVSLTGGLSYKEDTKELVVAKAGVYYVFFQLELRRVVAGEGSGSVSLALHLQPLRSAAGAAALALTVDLPPASSEARNSAFGFQGRLLHLSAGQRLGVHLHTEARARHAWQLTQGATVLGLFRVTPEIPAGLPSPRSE

SEQ ID NO: 50 - protein, 803 aa, synthetic construct
  REGION 1..803: note = ObSpc60PG-41BB-RF; Fc chain: Fc6CC-hole/PGLALA/RF/41BB
CPPCPAPEAAGGPSVFLFPPKPKDTLMISRTPEVTCVVVDVSHEDPEVKFNWYVDGVEVHNAKTKPREEQYNSTYRVVSVLTVLHQDWLNGKEYKCKVSNKALGAPIEKTISKAKGQPREPQVCTLPPSRDELTKNQVSLSCAVKGFYPSDIAVEWESNGQPENNYKTTPPVLDSDGSFFLVSKLTVDKSRWQQGNVFSCSVMHEALHNRFTQKSLSLSPGGGGGSGGGGSREGPELSPDDPAGLLDLRQGMFAQLVAQNVLLIDGPLSWYSDPGLAGVSLTGGLSYKEDTKELVVAKAGVYYVFFQLELRRVVAGEGSGSVSLALHLQPLRSAAGAAALALTVDLPPASSEARNSAFGFQGRLLHLSAGQRLGVHLHTEARARHAWQLTQGATVLGLFRVTPEIPAGLPSPRSEGGGGSGGGGSREGPELSPDDPAGLLDLRQGMFAQLVAQNVLLIDGPLSWYSDPGLAGVSLTGGLSYKEDTKELVVAKAGVYYVFFQLELRRVVAGEGSGSVSLALHLQPLRSAAGAAALALTVDLPPASSEARNSAFGFQGRLLHLSAGQRLGVHLHTEARARHAWQLTQGATVLGLFRVTPEIPAGLPSPRSEGGGGSGGGGSREGPELSPDDPAGLLDLRQGMFAQLVAQNVLLIDGPLSWYSDPGLAGVSLTGGLSYKEDTKELVVAKAGVYYVFFQLELRRVVAGEGSGSVSLALHLQPLRSAAGAAALALTVDLPPASSEARNSAFGFQGRLLHLSAGQRLGVHLHTEARARHAWQLTQGATVLGLFRVTPEIPAGLPSPRSE

SEQ ID NO: 51 - protein, 215 aa, synthetic construct
  REGION 1..215: note = Ci; L1 chain: Ci-L1 (CEA/V-kappa-C-kappa)
DIQMTQSPSSLSASVGDRVTITCKASAAVGTYVAWYQQKPGKAPKLLIYSASYRKRGVPSRFSGSGSGTDFTLTISSLQPEDFATYYCHQYYTYPLFTFGQGTKLEIKRTVAAPSVFIFPPSDEQLKSGTASVVCLLNNFYPREAKVQWKVDNALQSGNSQESVTEQDSKDSTYSLSSTLTLSKADYEKHKVYACEVTHQGLSSPVTKSFNRGEC

SEQ ID NO: 52 - protein, 214 aa, synthetic construct
  REGION 1..214: note = Ci; L2 chain: Ci-L2 (CD3/V-lambda-CH1)
QAVVTQEPSLTVSPGGTVTLTCGSSTGAVTTSNYANWVQEKPGQAFRGLIGGTNKRAPGTPARFSGSLLGGKAALTLSGAQPEDEAEYYCALWYSNLWVFGGGTKLTVLSSASTKGPSVFPLAPSSKSTSGGTAALGCLVKDYFPEPVTVSWNSGALTSGVHTFPAVLQSSGLYSLSSVVTVPSSSLGTQTYICNVNHKPSNTKVDKKVEPKSC

SEQ ID NO: 53 - protein, 693 aa, synthetic construct
  REGION 1..693: note = Ci; H1 chain: Ci-H1 (CEA/VH-CH1)-(CD3/VH-C-lambda)
QVQLVQSGAEVKKPGASVKVSCKASGYTFTEFGMNWVRQAPGQGLEWMGWINTKTGEATYVEEFKGRVTFTTDTSTSTAYMELRSLRSDDTAVYYCARWDFAYYVEAMDYWGQGTTVTVSSASTKGPSVFPLAPSSKSTSGGTAALGCLVKDYFPEPVTVSWNSGALTSGVHTFPAVLQSSGLYSLSSVVTVPSSSLGTQTYICNVNHKPSNTKVDKKVEPKSCDGGGGSGGGGSEVQLLESGGGLVQPGGSLRLSCAASGFTFSTYAMNWVRQAPGKGLEWVSRIRSKYNNYATYYADSVKGRFTISRDDSKNTLYLQMNSLRAEDTAVYYCVRHGNFGNSYVSWFAYWGQGTLVTVSSASVAAPSVFIFPPSDEQLKSGTASVVCLLNNFYPREAKVQWKVDNALQSGNSQESVTEQDSKDSTYSLSSTLTLSKADYEKHKVYACEVTHQGLSSPVTKSFNRGECDKTHTCPPCPAPEAAGGPSVFLFPPKPKDTLMISRTPEVTCVVVDVSHEDPEVKFNWYVDGVEVHNAKTKPREEQYNSTYRVVSVLTVLHQDWLNGKEYKCKVSNKALGAPIEKTISKAKGQPREPQVYTLPPCRDELTKNQVSLWCLVKGFYPSDIAVEWESNGQPENNYKTTPPVLDSDGSFFLYSKLTVDKSRWQQGNVFSCSVMHEALHNHYTQKSLSLSPG

SEQ ID NO: 54 - protein, 450 aa, synthetic construct
  REGION 1..450: note = Ci; H2 chain: Ci-H2 (CEA/VH-CH1)
QVQLVQSGAEVKKPGASVKVSCKASGYTFTEFGMNWVRQAPGQGLEWMGWINTKTGEATYVEEFKGRVTFTTDTSTSTAYMELRSLRSDDTAVYYCARWDFAYYVEAMDYWGQGTTVTVSSASTKGPSVFPLAPSSKSTSGGTAALGCLVKDYFPEPVTVSWNSGALTSGVHTFPAVLQSSGLYSLSSVVTVPSSSLGTQTYICNVNHKPSNTKVDKKVEPKSCDKTHTCPPCPAPEAAGGPSVFLFPPKPKDTLMISRTPEVTCVVVDVSHEDPEVKFNWYVDGVEVHNAKTKPREEQYNSTYRVVSVLTVLHQDWLNGKEYKCKVSNKALGAPIEKTISKAKGQPREPQVCTLPPSRDELTKNQVSLSCAVKGFYPSDIAVEWESNGQPENNYKTTPPVLDSDGSFFLVSKLTVDKSRWQQGNVFSCSVMHEALHNHYTQKSLSLSPG

SEQ ID NO: 55 - protein, 335 aa, synthetic construct
  REGION 1..335: note = CD3Ec60PG; H chain: CD3-epsilon/knob/PGLALA
DGNEEMGGITQTPYKVSISGTTVILTCPQYPGSEILWQHNDKNIGGDEDDKNIGSDEDHLSLKEFSELEQSGYYVCYPRGSKPEDANFYLYLRARVCENCMEMDEPKSSDKTHTCPPCPAPEAAGGPSVFLFPPKPKDTLMISRTPEVTCVVVDVSHEDPEVKFNWYVDGVEVHNAKTKPREEQYNSTYRVVSVLTVLHQDWLNGKEYKCKVSNKALGAPIEKTISKAKGQPREPQVYTLPPCRDELTKNQVSLWCLVKGFYPSDIAVEWESNGQPENNYKTTPPVLDSDGSFFLYSKLTVDKSRWQQGNVFSCSVMHEALHNHYTQKSLSLSPG

SEQ ID NO: 56 - protein, 394 aa, synthetic construct
  REGION 1..394: note = 41BBc60PG; 4-1BB/knob/PGLALA
LQDPCSNCPAGTFCDNNRNQICSPCPPNSFSSAGGQRTCDICRQCKGVFRTRKECSSTSNAECDCTPGFHCLGAGCSMCEQDCKQGQELTKKGCKDCCFGTFNDQKRGICRPWTNCSLDGKSVLVNGTKERDVVCGPSPADLSPGASSVTPPAPAREPGHSPQEPKSSDKTHTCPPCPAPEAAGGPSVFLFPPKPKDTLMISRTPEVTCVVVDVSHEDPEVKFNWYVDGVEVHNAKTKPREEQYNSTYRVVSVLTVLHQDWLNGKEYKCKVSNKALGAPIEKTISKAKGQPREPQVYTLPPCRDELTKNQVSLWCLVKGFYPSDIAVEWESNGQPENNYKTTPPVLDSDGSFFLYSKLTVDKSRWQQGNVFSCSVMHEALHNHYTQKSLSLSPG

SEQ ID NO: 57 - protein, 394 aa, synthetic construct
  REGION 1..394: note = 41BBFcPG; H chain: 4-1BB/PGLALA
LQDPCSNCPAGTFCDNNRNQICSPCPPNSFSSAGGQRTCDICRQCKGVFRTRKECSSTSNAECDCTPGFHCLGAGCSMCEQDCKQGQELTKKGCKDCCFGTFNDQKRGICRPWTNCSLDGKSVLVNGTKERDVVCGPSPADLSPGASSVTPPAPAREPGHSPQEPKSSDKTHTCPPCPAPEAAGGPSVFLFPPKPKDTLMISRTPEVTCVVVDVSHEDPEVKFNWYVDGVEVHNAKTKPREEQYNSTYRVVSVLTVLHQDWLNGKEYKCKVSNKALGAPIEKTISKAKGQPREPQVYTLPPSRDELTKNQVSLTCLVKGFYPSDIAVEWESNGQPENNYKTTPPVLDSDGSFFLYSKLTVDKSRWQQGNVFSCSVMHEALHNHYTQKSLSLSPG

SEQ ID NO: 58 - protein, 503 aa, synthetic construct
  REGION 1..503: note = CD19c60PG; H chain: CD19/knob/PGLALA
PEEPLVVKVEEGDNAVLQCLKGTSDGPTQQLTWSRESPLKPFLKLSLGLPGLGIHMRPLAIWLFIFNVSQQMGGFYLCQPGPPSEKAWQPGWTVNVEGSGELFRWNVSDLGGLGCGLKNRSSEGPSSPSGKLMSPKLYVWAKDRPEIWEGEPPCLPPRDSLNQSLSQDLTMAPGSTLWLSCGVPPDSVSRGPLSWTHVHPKGPKSLLSLELKDDRPARDMWVMETGLLLPRATAQDAGKYYCHRGNLTMSFHLEITARPVLWHWLLRTGGWKEPKSSDKTHTCPPCPAPEAAGGPSVFLFPPKPKDTLMISRTPEVTCVVVDVSHEDPEVKFNWYVDGVEVHNAKTKPREEQYNSTYRVVSVLTVLHQDWLNGKEYKCKVSNKALGAPIEKTISKAKGQPREPQVYTLPPCRDELTKNQVSLWCLVKGFYPSDIAVEWESNGQPENNYKTTPPVLDSDGSFFLYSKLTVDKSRWQQGNVFSCSVMHEALHNHYTQKSLSLSPG

SEQ ID NO: 59 - protein, 503 aa, synthetic construct
  REGION 1..503: note = CD19FcPG; H chain: CD19/PGLALA
PEEPLVVKVEEGDNAVLQCLKGTSDGPTQQLTWSRESPLKPFLKLSLGLPGLGIHMRPLAIWLFIFNVSQQMGGFYLCQPGPPSEKAWQPGWTVNVEGSGELFRWNVSDLGGLGCGLKNRSSEGPSSPSGKLMSPKLYVWAKDRPEIWEGEPPCLPPRDSLNQSLSQDLTMAPGSTLWLSCGVPPDSVSRGPLSWTHVHPKGPKSLLSLELKDDRPARDMWVMETGLLLPRATAQDAGKYYCHRGNLTMSFHLEITARPVLWHWLLRTGGWKEPKSSDKTHTCPPCPAPEAAGGPSVFLFPPKPKDTLMISRTPEVTCVVVDVSHEDPEVKFNWYVDGVEVHNAKTKPREEQYNSTYRVVSVLTVLHQDWLNGKEYKCKVSNKALGAPIEKTISKAKGQPREPQVYTLPPSRDELTKNQVSLTCLVKGFYPSDIAVEWESNGQPENNYKTTPPVLDSDGSFFLYSKLTVDKSRWQQGNVFSCSVMHEALHNHYTQKSLSLSPG

SEQ ID NO: 60 - protein, 882 aa, synthetic construct
  REGION 1..882: note = CEACAM5c60PG; H chain: CEACAM5/knob/PGLALA
KLTIESTPFNVAEGKEVLLLVHNLPQHLFGYSWYKGERVDGNRQIIGYVIGTQQATPGPAYSGREIIYPNASLLIQNIIQNDTGFYTLHVIKSDLVNEEATGQFRVYPELPKPSISSNNSKPVEDKDAVAFTCEPETQDATYLWWVNNQSLPVSPRLQLSNGNRTLTLFNVTRNDTASYKCETQNPVSARRSDSVILNVLYGPDAPTISPLNTSYRSGENLNLSCHAASNPPAQYSWFVNGTFQQSTQELFIPNITVNNSGSYTCQAHNSDTGLNRTTVTTITVYAEPPKPFITSNNSNPVEDEDAVALTCEPEIQNTTYLWWVNNQSLPVSPRLQLSNDNRTLTLLSVTRNDVGPYECGIQNKLSVDHSDPVILNVLYGPDDPTISPSYTYYRPGVNLSLSCHAASNPPAQYSWLIDGNIQQHTQELFISNITEKNSGLYTCQANNSASGHSRTTVKTITVSAELPKPSISSNNSKPVEDKDAVAFTCEPEAQNTTYLWWVNGQSLPVSPRLQLSNGNRTLTLFNVTRNDARAYVCGIQNSVSANRSDPVTLDVLYGPDTPIISPPDSSYLSGANLNLSCHSASNPSPQYSWRINGIPQQHTQVLFIAKITPNNNGTYACFVSNLATGRNNSIVKSITVSASGTSPGLSAEPKSSDKTHTCPPCPAPEAAGGPSVFLFPPKPKDTLMISRTPEVTCVVVDVSHEDPEVKFNWYVDGVEVHNAKTKPREEQYNSTYRVVSVLTVLHQDWLNGKEYKCKVSNKALGAPIEKTISKAKGQPREPQVYTLPPCRDELTKNQVSLWCLVKGFYPSDIAVEWESNGQPENNYKTTPPVLDSDGSFFLYSKLTVDKSRWQQGNVFSCSVMHEALHNHYTQKSLSLSPG

SEQ ID NO: 61 - protein, 882 aa, synthetic construct
  REGION 1..882: note = CEACAM5FcPG; H chain: CEACAM5/PGLALA
KLTIESTPFNVAEGKEVLLLVHNLPQHLFGYSWYKGERVDGNRQIIGYVIGTQQATPGPAYSGREIIYPNASLLIQNIIQNDTGFYTLHVIKSDLVNEEATGQFRVYPELPKPSISSNNSKPVEDKDAVAFTCEPETQDATYLWWVNNQSLPVSPRLQLSNGNRTLTLFNVTRNDTASYKCETQNPVSARRSDSVILNVLYGPDAPTISPLNTSYRSGENLNLSCHAASNPPAQYSWFVNGTFQQSTQELFIPNITVNNSGSYTCQAHNSDTGLNRTTVTTITVYAEPPKPFITSNNSNPVEDEDAVALTCEPEIQNTTYLWWVNNQSLPVSPRLQLSNDNRTLTLLSVTRNDVGPYECGIQNKLSVDHSDPVILNVLYGPDDPTISPSYTYYRPGVNLSLSCHAASNPPAQYSWLIDGNIQQHTQELFISNITEKNSGLYTCQANNSASGHSRTTVKTITVSAELPKPSISSNNSKPVEDKDAVAFTCEPEAQNTTYLWWVNGQSLPVSPRLQLSNGNRTLTLFNVTRNDARAYVCGIQNSVSANRSDPVTLDVLYGPDTPIISPPDSSYLSGANLNLSCHSASNPSPQYSWRINGIPQQHTQVLFIAKITPNNNGTYACFVSNLATGRNNSIVKSITVSASGTSPGLSAEPKSSDKTHTCPPCPAPEAAGGPSVFLFPPKPKDTLMISRTPEVTCVVVDVSHEDPEVKFNWYVDGVEVHNAKTKPREEQYNSTYRVVSVLTVLHQDWLNGKEYKCKVSNKALGAPIEKTISKAKGQPREPQVYTLPPSRDELTKNQVSLTCLVKGFYPSDIAVEWESNGQPENNYKTTPPVLDSDGSFFLYSKLTVDKSRWQQGNVFSCSVMHEALHNHYTQKSLSLSPG

SEQ ID NO: 62 - protein, 829 aa, synthetic construct
  REGION 1..829: note = ACE2-615/knob/PGLALA/R273Q
QSTIEEQAKTFLDKFNHEAEDLFYQSSLASWNYNTNITEENVQNMNNAGDKWSAFLKEQSTLAQMYPLQEIQNLTVKLQLQALQQNGSSVLSEDKSKRLNTILNTMSTIYSTGKVCNPDNPQECLLLEPGLNEIMANSLDYNERLWAWESWRSEVGKQLRPLYEEYVVLKNEMARANHYEDYGDYWRGDYEVNGVDGYDYSRGQLIEDVEHTFEEIKPLYEHLHAYVRAKLMNAYPSYISPIGCLPAHLLGDMWGQFWTNLYSLTVPFGQKPNIDVTDAMVDQAWDAQRIFKEAEKFFVSVGLPNMTQGFWENSMLTDPGNVQKAVCHPTAWDLGKGDFRILMCTKVTMDDFLTAHHEMGHIQYDMAYAAQPFLLRNGANEGFHEAVGEIMSLSAATPKHLKSIGLLSPDFQEDNETEINFLLKQALTIVGTLPFTYMLEKWRWMVFKGEIPKDQWMKKWWEMKREIVGVVEPVPHDETYCDPASLFHVSNDYSFIRYYTRTLYQFQFQEALCQAAKHEGPLHKCDISNSTEAGQKLFNMLRLGKSEPWTLALENVVGAKNMNVRPLLNYFEPLFTWLKDQNKNSFVGWSTDWSPYADEPKSSDKTHTCPPCPAPEAAGGPSVFLFPPKPKDTLMISRTPEVTCVVVDVSHEDPEVKFNWYVDGVEVHNAKTKPREEQYNSTYRVVSVLTVLHQDWLNGKEYKCKVSNKALGAPIEKTISKAKGQPREPQVYTLPPCRDELTKNQVSLWCLVKGFYPSDIAVEWESNGQPENNYKTTPPVLDSDGSFFLYSKLTVDKSRWQQGNVFSCSVMHEALHNHYTQKSLSLSPG

SEQ ID NO: 63 - protein, 829 aa, synthetic construct
  REGION 1..829: note = ACE2-615/SSS/knob/PGLALA/R273Q
QSTIEEQAKTFLDKFNHEAEDLFYQSSLASWNYNTNITEENVQNMNNAGDKWSAFLKEQSTLAQMYPLQEIQNLTVKLQLQALQQNGSSVLSEDKSKRLNTILNTMSTIYSTGKVCNPDNPQECLLLEPGLNEIMANSLDYNERLWAWESWRSEVGKQLRPLYEEYVVLKNEMARANHYEDYGDYWRGDYEVNGVDGYDYSRGQLIEDVEHTFEEIKPLYEHLHAYVRAKLMNAYPSYISPIGCLPAHLLGDMWGQFWTNLYSLTVPFGQKPNIDVTDAMVDQAWDAQRIFKEAEKFFVSVGLPNMTQGFWENSMLTDPGNVQKAVCHPTAWDLGKGDFRILMCTKVTMDDFLTAHHEMGHIQYDMAYAAQPFLLRNGANEGFHEAVGEIMSLSAATPKHLKSIGLLSPDFQEDNETEINFLLKQALTIVGTLPFTYMLEKWRWMVFKGEIPKDQWMKKWWEMKREIVGVVEPVPHDETYCDPASLFHVSNDYSFIRYYTRTLYQFQFQEALCQAAKHEGPLHKCDISNSTEAGQKLFNMLRLGKSEPWTLALENVVGAKNMNVRPLLNYFEPLFTWLKDQNKNSFVGWSTDWSPYADEPKSSDKTHTSPPSPAPEAAGGPSVFLFPPKPKDTLMISRTPEVTCVVVDVSHEDPEVKFNWYVDGVEVHNAKTKPREEQYNSTYRVVSVLTVLHQDWLNGKEYKCKVSNKALGAPIEKTISKAKGQPREPQVYTLPPCRDELTKNQVSLWCLVKGFYPSDIAVEWESNGQPENNYKTTPPVLDSDGSFFLYSKLTVDKSRWQQGNVFSCSVMHEALHNHYTQKSLSLSPG

SEQ ID NO: 64 - protein, 221 aa, synthetic construct
  REGION 1..221: note = FcPG-CS; Fc chain: Fc6CS-hole/PGLALA/delK
CPPSPAPEAAGGPSVFLFPPKPKDTLMISRTPEVTCVVVDVSHEDPEVKFNWYVDGVEVHNAKTKPREEQYNSTYRVVSVLTVLHQDWLNGKEYKCKVSNKALGAPIEKTISKAKGQPREPQVCTLPPSRDELTKNQVSLSCAVKGFYPSDIAVEWESNGQPENNYKTTPPVLDSDGSFFLVSKLTVDKSRWQQGNVFSCSVMHEALHNHYTQKSLSLSPG

SEQ ID NO: 65 - protein, 954 aa, synthetic construct
  REGION 1..954: note = ACE2-740/knob/PGLALA/R273Q
QSTIEEQAKTFLDKFNHEAEDLFYQSSLASWNYNTNITEENVQNMNNAGDKWSAFLKEQSTLAQMYPLQEIQNLTVKLQLQALQQNGSSVLSEDKSKRLNTILNTMSTIYSTGKVCNPDNPQECLLLEPGLNEIMANSLDYNERLWAWESWRSEVGKQLRPLYEEYVVLKNEMARANHYEDYGDYWRGDYEVNGVDGYDYSRGQLIEDVEHTFEEIKPLYEHLHAYVRAKLMNAYPSYISPIGCLPAHLLGDMWGQFWTNLYSLTVPFGQKPNIDVTDAMVDQAWDAQRIFKEAEKFFVSVGLPNMTQGFWENSMLTDPGNVQKAVCHPTAWDLGKGDFRILMCTKVTMDDFLTAHHEMGHIQYDMAYAAQPFLLRNGANEGFHEAVGEIMSLSAATPKHLKSIGLLSPDFQEDNETEINFLLKQALTIVGTLPFTYMLEKWRWMVFKGEIPKDQWMKKWWEMKREIVGVVEPVPHDETYCDPASLFHVSNDYSFIRYYTRTLYQFQFQEALCQAAKHEGPLHKCDISNSTEAGQKLFNMLRLGKSEPWTLALENVVGAKNMNVRPLLNYFEPLFTWLKDQNKNSFVGWSTDWSPYADQSIKVRISLKSALGDKAYEWNDNEMYLFRSSVAYAMRQYFLKVKNQMILFGEEDVRVANLKPRISFNFFVTAPKNVSDIIPRTEVEKAIRMSRSRINDAFRLNDNSLEFLGIQPTLGPPNQPPVSEPKSSDKTHTCPPCPAPEAAGGPSVFLFPPKPKDTLMISRTPEVTCVVVDVSHEDPEVKFNWYVDGVEVHNAKTKPREEQYNSTYRVVSVLTVLHQDWLNGKEYKCKVSNKALGAPIEKTISKAKGQPREPQVYTLPPCRDELTKNQVSLWCLVKGFYPSDIAVEWESNGQPENNYKTTPPVLDSDGSFFLYSKLTVDKSRWQQGNVFSCSVMHEALHNHYTQKSLSLSPG

SEQ ID NO: 66 - protein, 1011 aa, synthetic construct
  REGION 1..1011: note = ACE2-740/240/knob/PGLALA/R273Q
QSTIEEQAKTFLDKFNHEAEDLFYQSSLASWNYNTNITEENVQNMNNAGDKWSAFLKEQSTLAQMYPLQEIQNLTVKLQLQALQQNGSSVLSEDKSKRLNTILNTMSTIYSTGKVCNPDNPQECLLLEPGLNEIMANSLDYNERLWAWESWRSEVGKQLRPLYEEYVVLKNEMARANHYEDYGDYWRGDYEVNGVDGYDYSRGQLIEDVEHTFEEIKPLYEHLHAYVRAKLMNAYPSYISPIGCLPAHLLGDMWGQFWTNLYSLTVPFGQKPNIDVTDAMVDQAWDAQRIFKEAEKFFVSVGLPNMTQGFWENSMLTDPGNVQKAVCHPTAWDLGKGDFRILMCTKVTMDDFLTAHHEMGHIQYDMAYAAQPFLLRNGANEGFHEAVGEIMSLSAATPKHLKSIGLLSPDFQEDNETEINFLLKQALTIVGTLPFTYMLEKWRWMVFKGEIPKDQWMKKWWEMKREIVGVVEPVPHDETYCDPASLFHVSNDYSFIRYYTRTLYQFQFQEALCQAAKHEGPLHKCDISNSTEAGQKLFNMLRLGKSEPWTLALENVVGAKNMNVRPLLNYFEPLFTWLKDQNKNSFVGWSTDWSPYADQSIKVRISLKSALGDKAYEWNDNEMYLFRSSVAYAMRQYFLKVKNQMILFGEEDVRVANLKPRISFNFFVTAPKNVSDIIPRTEVEKAIRMSRSRINDAFRLNDNSLEFLGIQPTLGPPNQPPVSTSTSPTRSMAPGAVHLPQPVSTRSQHTQPTPEPSTAPSTSFLLPMGPSPPAEGSTGDEPKSSDKTHTCPPCPAPEAAGGPSVFLFPPKPKDTLMISRTPEVTCVVVDVSHEDPEVKFNWYVDGVEVHNAKTKPREEQYNSTYRVVSVLTVLHQDWLNGKEYKCKVSNKALGAPIEKTISKAKGQPREPQVYTLPPCRDELTKNQVSLWCLVKGFYPSDIAVEWESNGQPENNYKTTPPVLDSDGSFFLYSKLTVDKSRWQQGNVFSCSVMHEALHNHYTQKSLSLSPG

SEQ ID NO: 67 - protein, 1006 aa, synthetic construct
  REGION 1..1006: note = ACE2-740/235/knob/PGLALA/R273Q
QSTIEEQAKTFLDKFNHEAEDLFYQSSLASWNYNTNITEENVQNMNNAGDKWSAFLKEQSTLAQMYPLQEIQNLTVKLQLQALQQNGSSVLSEDKSKRLNTILNTMSTIYSTGKVCNPDNPQECLLLEPGLNEIMANSLDYNERLWAWESWRSEVGKQLRPLYEEYVVLKNEMARANHYEDYGDYWRGDYEVNGVDGYDYSRGQLIEDVEHTFEEIKPLYEHLHAYVRAKLMNAYPSYISPIGCLPAHLLGDMWGQFWTNLYSLTVPFGQKPNIDVTDAMVDQAWDAQRIFKEAEKFFVSVGLPNMTQGFWENSMLTDPGNVQKAVCHPTAWDLGKGDFRILMCTKVTMDDFLTAHHEMGHIQYDMAYAAQPFLLRNGANEGFHEAVGEIMSLSAATPKHLKSIGLLSPDFQEDNETEINFLLKQALTIVGTLPFTYMLEKWRWMVFKGEIPKDQWMKKWWEMKREIVGVVEPVPHDETYCDPASLFHVSNDYSFIRYYTRTLYQFQFQEALCQAAKHEGPLHKCDISNSTEAGQKLFNMLRLGKSEPWTLALENVVGAKNMNVRPLLNYFEPLFTWLKDQNKNSFVGWSTDWSPYADQSIKVRISLKSALGDKAYEWNDNEMYLFRSSVAYAMRQYFLKVKNQMILFGEEDVRVANLKPRISFNFFVTAPKNVSDIIPRTEVEKAIRMSRSRINDAFRLNDNSLEFLGIQPTLGPPNQPPVSTSTSPTRSMAPGAVHLPQPVSTRSQHTQPTPEPSTAPSTSFLLPMGPSPPAEGSTGDDKTHTCPPCPAPEAAGGPSVFLFPPKPKDTLMISRTPEVTCVVVDVSHEDPEVKFNWYVDGVEVHNAKTKPREEQYNSTYRVVSVLTVLHQDWLNGKEYKCKVSNKALGAPIEKTISKAKGQPREPQVYTLPPCRDELTKNQVSLWCLVKGFYPSDIAVEWESNGQPENNYKTTPPVLDSDGSFFLYSKLTVDKSRWQQGNVFSCSVMHEALHNHYTQKSLSLSPG

SEQ ID NO: 68 - protein, 983 aa, synthetic construct
  REGION 1..983: note = ACE2-740/212/knob/PGLALA/R273Q
QSTIEEQAKTFLDKFNHEAEDLFYQSSLASWNYNTNITEENVQNMNNAGDKWSAFLKEQSTLAQMYPLQEIQNLTVKLQLQALQQNGSSVLSEDKSKRLNTILNTMSTIYSTGKVCNPDNPQECLLLEPGLNEIMANSLDYNERLWAWESWRSEVGKQLRPLYEEYVVLKNEMARANHYEDYGDYWRGDYEVNGVDGYDYSRGQLIEDVEHTFEEIKPLYEHLHAYVRAKLMNAYPSYISPIGCLPAHLLGDMWGQFWTNLYSLTVPFGQKPNIDVTDAMVDQAWDAQRIFKEAEKFFVSVGLPNMTQGFWENSMLTDPGNVQKAVCHPTAWDLGKGDFRILMCTKVTMDDFLTAHHEMGHIQYDMAYAAQPFLLRNGANEGFHEAVGEIMSLSAATPKHLKSIGLLSPDFQEDNETEINFLLKQALTIVGTLPFTYMLEKWRWMVFKGEIPKDQWMKKWWEMKREIVGVVEPVPHDETYCDPASLFHVSNDYSFIRYYTRTLYQFQFQEALCQAAKHEGPLHKCDISNSTEAGQKLFNMLRLGKSEPWTLALENVVGAKNMNVRPLLNYFEPLFTWLKDQNKNSFVGWSTDWSPYADQSIKVRISLKSALGDKAYEWNDNEMYLFRSSVAYAMRQYFLKVKNQMILFGEEDVRVANLKPRISFNFFVTAPKNVSDIIPRTEVEKAIRMSRSRINDAFRLNDNSLEFLGIQPTLGPPNQPPVSTSTSPTRSMAPGAVHLPQPVSTRSQHTQPTPEPSDKTHTCPPCPAPEAAGGPSVFLFPPKPKDTLMISRTPEVTCVVVDVSHEDPEVKFNWYVDGVEVHNAKTKPREEQYNSTYRVVSVLTVLHQDWLNGKEYKCKVSNKALGAPIEKTISKAKGQPREPQVYTLPPCRDELTKNQVSLWCLVKGFYPSDIAVEWESNGQPENNYKTTPPVLDSDGSFFLYSKLTVDKSRWQQGNVFSCSVMHEALHNHYTQKSLSLSPG

SEQ ID NO: 69 - protein, 979 aa, synthetic construct
  REGION 1..979: note = ACE2-740/208/knob/PGLALA/R273Q
QSTIEEQAKTFLDKFNHEAEDLFYQSSLASWNYNTNITEENVQNMNNAGDKWSAFLKEQSTLAQMYPLQEIQNLTVKLQLQALQQNGSSVLSEDKSKRLNTILNTMSTIYSTGKVCNPDNPQECLLLEPGLNEIMANSLDYNERLWAWESWRSEVGKQLRPLYEEYVVLKNEMARANHYEDYGDYWRGDYEVNGVDGYDYSRGQLIEDVEHTFEEIKPLYEHLHAYVRAKLMNAYPSYISPIGCLPAHLLGDMWGQFWTNLYSLTVPFGQKPNIDVTDAMVDQAWDAQRIFKEAEKFFVSVGLPNMTQGFWENSMLTDPGNVQKAVCHPTAWDLGKGDFRILMCTKVTMDDFLTAHHEMGHIQYDMAYAAQPFLLRNGANEGFHEAVGEIMSLSAATPKHLKSIGLLSPDFQEDNETEINFLLKQALTIVGTLPFTYMLEKWRWMVFKGEIPKDQWMKKWWEMKREIVGVVEPVPHDETYCDPASLFHVSNDYSFIRYYTRTLYQFQFQEALCQAAKHEGPLHKCDISNSTEAGQKLFNMLRLGKSEPWTLALENVVGAKNMNVRPLLNYFEPLFTWLKDQNKNSFVGWSTDWSPYADQSIKVRISLKSALGDKAYEWNDNEMYLFRSSVAYAMRQYFLKVKNQMILFGEEDVRVANLKPRISFNFFVTAPKNVSDIIPRTEVEKAIRMSRSRINDAFRLNDNSLEFLGIQPTLGPPNQPPVSTSTSPTRSMAPGAVHLPQPVSTRSQHTQPTDKTHTCPPCPAPEAAGGPSVFLFPPKPKDTLMISRTPEVTCVVVDVSHEDPEVKFNWYVDGVEVHNAKTKPREEQYNSTYRVVSVLTVLHQDWLNGKEYKCKVSNKALGAPIEKTISKAKGQPREPQVYTLPPCRDELTKNQVSLWCLVKGFYPSDIAVEWESNGQPENNYKTTPPVLDSDGSFFLYSKLTVDKSRWQQGNVFSCSVMHEALHNHYTQKSLSLSPG

SEQ ID NO: 70 - protein, 969 aa, synthetic construct
  REGION 1..969: note = ACE2-740/198/knob/PGLALA/R273Q
QSTIEEQAKTFLDKFNHEAEDLFYQSSLASWNYNTNITEENVQNMNNAGDKWSAFLKEQSTLAQMYPLQEIQNLTVKLQLQALQQNGSSVLSEDKSKRLNTILNTMSTIYSTGKVCNPDNPQECLLLEPGLNEIMANSLDYNERLWAWESWRSEVGKQLRPLYEEYVVLKNEMARANHYEDYGDYWRGDYEVNGVDGYDYSRGQLIEDVEHTFEEIKPLYEHLHAYVRAKLMNAYPSYISPIGCLPAHLLGDMWGQFWTNLYSLTVPFGQKPNIDVTDAMVDQAWDAQRIFKEAEKFFVSVGLPNMTQGFWENSMLTDPGNVQKAVCHPTAWDLGKGDFRILMCTKVTMDDFLTAHHEMGHIQYDMAYAAQPFLLRNGANEGFHEAVGEIMSLSAATPKHLKSIGLLSPDFQEDNETEINFLLKQALTIVGTLPFTYMLEKWRWMVFKGEIPKDQWMKKWWEMKREIVGVVEPVPHDETYCDPASLFHVSNDYSFIRYYTRTLYQFQFQEALCQAAKHEGPLHKCDISNSTEAGQKLFNMLRLGKSEPWTLALENVVGAKNMNVRPLLNYFEPLFTWLKDQNKNSFVGWSTDWSPYADQSIKVRISLKSALGDKAYEWNDNEMYLFRSSVAYAMRQYFLKVKNQMILFGEEDVRVANLKPRISFNFFVTAPKNVSDIIPRTEVEKAIRMSRSRINDAFRLNDNSLEFLGIQPTLGPPNQPPVSTSTSPTRSMAPGAVHLPQPVDKTHTCPPCPAPEAAGGPSVFLFPPKPKDTLMISRTPEVTCVVVDVSHEDPEVKFNWYVDGVEVHNAKTKPREEQYNSTYRVVSVLTVLHQDWLNGKEYKCKVSNKALGAPIEKTISKAKGQPREPQVYTLPPCRDELTKNQVSLWCLVKGFYPSDIAVEWESNGQPENNYKTTPPVLDSDGSFFLYSKLTVDKSRWQQGNVFSCSVMHEALHNHYTQKSLSLSPG

SEQ ID NO: 71 - protein, 956 aa, synthetic construct
  REGION 1..956: note = ACE2-740/185/knob/PGLALA/R273Q
QSTIEEQAKTFLDKFNHEAEDLFYQSSLASWNYNTNITEENVQNMNNAGDKWSAFLKEQSTLAQMYPLQEIQNLTVKLQLQALQQNGSSVLSEDKSKRLNTILNTMSTIYSTGKVCNPDNPQECLLLEPGLNEIMANSLDYNERLWAWESWRSEVGKQLRPLYEEYVVLKNEMARANHYEDYGDYWRGDYEVNGVDGYDYSRGQLIEDVEHTFEEIKPLYEHLHAYVRAKLMNAYPSYISPIGCLPAHLLGDMWGQFWTNLYSLTVPFGQKPNIDVTDAMVDQAWDAQRIFKEAEKFFVSVGLPNMTQGFWENSMLTDPGNVQKAVCHPTAWDLGKGDFRILMCTKVTMDDFLTAHHEMGHIQYDMAYAAQPFLLRNGANEGFHEAVGEIMSLSAATPKHLKSIGLLSPDFQEDNETEINFLLKQALTIVGTLPFTYMLEKWRWMVFKGEIPKDQWMKKWWEMKREIVGVVEPVPHDETYCDPASLFHVSNDYSFIRYYTRTLYQFQFQEALCQAAKHEGPLHKCDISNSTEAGQKLFNMLRLGKSEPWTLALENVVGAKNMNVRPLLNYFEPLFTWLKDQNKNSFVGWSTDWSPYADQSIKVRISLKSALGDKAYEWNDNEMYLFRSSVAYAMRQYFLKVKNQMILFGEEDVRVANLKPRISFNFFVTAPKNVSDIIPRTEVEKAIRMSRSRINDAFRLNDNSLEFLGIQPTLGPPNQPPVSTSTSPTRDKTHTCPPCPAPEAAGGPSVFLFPPKPKDTLMISRTPEVTCVVVDVSHEDPEVKFNWYVDGVEVHNAKTKPREEQYNSTYRVVSVLTVLHQDWLNGKEYKCKVSNKALGAPIEKTISKAKGQPREPQVYTLPPCRDELTKNQVSLWCLVKGFYPSDIAVEWESNGQPENNYKTTPPVLDSDGSFFLYSKLTVDKSRWQQGNVFSCSVMHEALHNHYTQKSLSLSPG

SEQ ID NO: 72 - protein, 954 aa, synthetic construct; identical to SEQ ID NO: 65
  REGION 1..954: note = ACE2-740/knob/PGLALA/R273Q

SEQ ID NO: 73 - protein, 221 aa, synthetic construct
  REGION 1..221: note = Fc6CC-hole/PGLALA/RF
CPPCPAPEAAGGPSVFLFPPKPKDTLMISRTPEVTCVVVDVSHEDPEVKFNWYVDGVEVHNAKTKPREEQYNSTYRVVSVLTVLHQDWLNGKEYKCKVSNKALGAPIEKTISKAKGQPREPQVCTLPPSRDELTKNQVSLSCAVKGFYPSDIAVEWESNGQPENNYKTTPPVLDSDGSFFLVSKLTVDKSRWQQGNVFSCSVMHEALHNRFTQKSLSLSPG

SEQ ID NO: 74 - protein, 834 aa, synthetic construct
  REGION 1..834: note = ACE2-615/69/Fc/K
QSTIEEQAKTFLDKFNHEAEDLFYQSSLASWNYNTNITEENVQNMNNAGDKWSAFLKEQSTLAQMYPLQEIQNLTVKLQLQALQQNGSSVLSEDKSKRLNTILNTMSTIYSTGKVCNPDNPQECLLLEPGLNEIMANSLDYNERLWAWESWRSEVGKQLRPLYEEYVVLKNEMARANHYEDYGDYWRGDYEVNGVDGYDYSRGQLIEDVEHTFEEIKPLYEHLHAYVRAKLMNAYPSYISPIGCLPAHLLGDMWGRFWTNLYSLTVPFGQKPNIDVTDAMVDQAWDAQRIFKEAEKFFVSVGLPNMTQGFWENSMLTDPGNVQKAVCHPTAWDLGKGDFRILMCTKVTMDDFLTAHHEMGHIQYDMAYAAQPFLLRNGANEGFHEAVGEIMSLSAATPKHLKSIGLLSPDFQEDNETEINFLLKQALTIVGTLPFTYMLEKWRWMVFKGEIPKDQWMKKWWEMKREIVGVVEPVPHDETYCDPASLFHVSNDYSFIRYYTRTLYQFQFQEALCQAAKHEGPLHKCDISNSTEAGQKLFNMLRLGKSEPWTLALENVVGAKNMNVRPLLNYFEPLFTWLKDQNKNSFVGWSTDWSPYADGGGGAGGGGDKTHTCPPCPAPELLGGPSVFLFPPKPKDTLMISRTPEVTCVVVDVSHEDPEVKFNWYVDGVEVHNAKTKPREEQYNSTYRVVSVLTVLHQDWLNGKEYKCKVSNKALPAPIEKTISKAKGQPREPQVYTLPPSRDELTKNQVSLTCLVKGFYPSDIAVEWESNGQPENNYKTTPPVLDSDGSFFLYSKLTVDKSRWQQGNVFSCSVMHEALHNHYTQKSLSLSPGK

SEQ ID NO: 75 - protein, 959 aa, synthetic construct
  REGION 1..959: note = ACE2-740/G9/Fc/K
QSTIEEQAKTFLDKFNHEAEDLFYQSSLASWNYNTNITEENVQNMNNAGDKWSAFLKEQSTLAQMYPLQEIQNLTVKLQLQALQQNGSSVLSEDKSKRLNTILNTMSTIYSTGKVCNPDNPQECLLLEPGLNEIMANSLDYNERLWAWESWRSEVGKQLRPLYEEYVVLKNEMARANHYEDYGDYWRGDYEVNGVDGYDYSRGQLIEDVEHTFEEIKPLYEHLHAYVRAKLMNAYPSYISPIGCLPAHLLGDMWGRFWTNLYSLTVPFGQKPNIDVTDAMVDQAWDAQRIFKEAEKFFVSVGLPNMTQGFWENSMLTDPGNVQKAVCHPTAWDLGKGDFRILMCTKVTMDDFLTAHHEMGHIQYDMAYAAQPFLLRNGANEGFHEAVGEIMSLSAATPKHLKSIGLLSPDFQEDNETEINFLLKQALTIVGTLPFTYMLEKWRWMVFKGEIPKDQWMKKWWEMKREIVGVVEPVPHDETYCDPASLFHVSNDYSFIRYYTRTLYQFQFQEALCQAAKHEGPLHKCDISNSTEAGQKLFNMLRLGKSEPWTLALENVVGAKNMNVRPLLNYFEPLFTWLKDQNKNSFVGWSTDWSPYADQSIKVRISLKSALGDKAYEWNDNEMYLFRSSVAYAMRQYFLKVKNQMILFGEEDVRVANLKPRISFNFFVTAPKNVSDIIPRTEVEKAIRMSRSRINDAFRLNDNSLEFLGIQPTLGPPNQPPVSGGGGAGGGGDKTHTCPPCPAPELLGGPSVFLFPPKPKDTLMISRTPEVTCVVVDVSHEDPEVKFNWYVDGVEVHNAKTKPREEQYNSTYRVVSVLTVLHQDWLNGKEYKCKVSNKALPAPIEKTISKAKGQPREPQVYTLPPSRDELTKNQVSLTCLVKGFYPSDIAVEWESNGQPENNYKTTPPVLDSDGSFFLYSKLTVDKSRWQQGNVFSCSVMHEALHNHYTQKSLSLSPGK

SEQ ID NO: 76 - protein, 829 aa, synthetic construct
  REGION 1..829: note = ACE2-615/PGLALA/R273Q
QSTIEEQAKTFLDKFNHEAEDLFYQSSLASWNYNTNITEENVQNMNNAGDKWSAFLKEQSTLAQMYPLQEIQNLTVKLQLQALQQNGSSVLSEDKSKRLNTILNTMSTIYSTGKVCNPDNPQECLLLEPGLNEIMANSLDYNERLWAWESWRSEVGKQLRPLYEEYVVLKNEMARANHYEDYGDYWRGDYEVNGVDGYDYSRGQLIEDVEHTFEEIKPLYEHLHAYVRAKLMNAYPSYISPIGCLPAHLLGDMWGQFWTNLYSLTVPFGQKPNIDVTDAMVDQAWDAQRIFKEAEKFFVSVGLPNMTQGFWENSMLTDPGNVQKAVCHPTAWDLGKGDFRILMCTKVTMDDFLTAHHEMGHIQYDMAYAAQPFLLRNGANEGFHEAVGEIMSLSAATPKHLKSIGLLSPDFQEDNETEINFLLKQALTIVGTLPFTYMLEKWRWMVFKGEIPKDQWMKKWWEMKREIVGVVEPVPHDETYCDPASLFHVSNDYSFIRYYTRTLYQFQFQEALCQAAKHEGPLHKCDISNSTEAGQKLFNMLRLGKSEPWTLALENVVGAKNMNVRPLLNYFEPLFTWLKDQNKNSFVGWSTDWSPYADEPKSSDKTHTCPPCPAPEAAGGPSVFLFPPKPKDTLMISRTPEVTCVVVDVSHEDPEVKFNWYVDGVEVHNAKTKPREEQYNSTYRVVSVLTVLHQDWLNGKEYKCKVSNKALGAPIEKTISKAKGQPREPQVYTLPPSRDELTKNQVSLTCLVKGFYPSDIAVEWESNGQPENNYKTTPPVLDSDGSFFLYSKLTVDKSRWQQGNVFSCSVMHEALHNHYTQKSLSLSPG

SEQ ID NO: 77 - protein, 954 aa, synthetic construct
  REGION 1..954: note = ACE2-740/PGLALA/R273Q
QSTIEEQAKTFLDKFNHEAEDLFYQSSLASWNYNTNITEENVQNMNNAGDKWSAFLKEQSTLAQMYPLQEIQNLTVKLQLQALQQNGSSVLSEDKSKRLNTILNTMSTIYSTGKVCNPDNPQECLLLEPGLNEIMANSLDYNERLWAWESWRSEVGKQLRPLYEEYVVLKNEMARANHYEDYGDYWRGDYEVNGVDGYDYSRGQLIEDVEHTFEEIKPLYEHLHAYVRAKLMNAYPSYISPIGCLPAHLLGDMWGQFWTNLYSLTVPFGQKPNIDVTDAMVDQAWDAQRIFKEAEKFFVSVGLPNMTQGFWENSMLTDPGNVQKAVCHPTAWDLGKGDFRILMCTKVTMDDFLTAHHEMGHIQYDMAYAAQPFLLRNGANEGFHEAVGEIMSLSAATPKHLKSIGLLSPDFQEDNETEINFLLKQALTIVGTLPFTYMLEKWRWMVFKGEIPKDQWMKKWWEMKREIVGVVEPVPHDETYCDPASLFHVSNDYSFIRYYTRTLYQFQFQEALCQAAKHEGPLHKCDISNSTEAGQKLFNMLRLGKSEPWTLALENVVGAKNMNVRPLLNYFEPLFTWLKDQNKNSFVGWSTDWSPYADQSIKVRISLKSALGDKAYEWNDNEMYLFRSSVAYAMRQYFLKVKNQMILFGEEDVRVANLKPRISFNFFVTAPKNVSDIIPRTEVEKAIRMSRSRINDAFRLNDNSLEFLGIQPTLGPPNQPPVSEPKSSDKTHTCPPCPAPEAAGGPSVFLFPPKPKDTLMISRTPEVTCVVVDVSHEDPEVKFNWYVDGVEVHNAKTKPREEQYNSTYRVVSVLTVLHQDWLNGKEYKCKVSNKALGAPIEKTISKAKGQPREPQVYTLPPSRDELTKNQVSLTCLVKGFYPSDIAVEWESNGQPENNYKTTPPVLDSDGSFFLYSKLTVDKSRWQQGNVFSCSVMHEALHNHYTQKSLSLSPG

SEQ ID NO: 78 - protein, 958 aa, synthetic construct
  REGION 1..958: note = ACE2-740/G9/PGLALA/R273Q
QSTIEEQAKTFLDKFNHEAEDLFYQSSLASWNYNTNITEENVQNMNNAGDKWSAFLKEQSTLAQMYPLQEIQNLTVKLQLQALQQNGSSVLSEDKSKRLNTILNTMSTIYSTGKVCNPDNPQECLLLEPGLNEIMANSLDYNERLWAWESWRSEVGKQLRPLYEEYVVLKNEMARANHYEDYGDYWRGDYEVNGVDGYDYSRGQLIEDVEHTFEEIKPLYEHLHAYVRAKLMNAYPSYISPIGCLPAHLLGDMWGQFWTNLYSLTVPFGQKPNIDVTDAMVDQAWDAQRIFKEAEKFFVSVGLPNMTQGFWENSMLTDPGNVQKAVCHPTAWDLGKGDFRILMCTKVTMDDFLTAHHEMGHIQYDMAYAAQPFLLRNGANEGFHEAVGEIMSLSAATPKHLKSIGLLSPDFQEDNETEINFLLKQALTIVGTLPFTYMLEKWRWMVFKGEIPKDQWMKKWWEMKREIVGVVEPVPHDETYCDPASLFHVSNDYSFIRYYTRTLYQFQFQEALCQAAKHEGPLHKCDISNSTEAGQKLFNMLRLGKSEPWTLALENVVGAKNMNVRPLLNYFEPLFTWLKDQNKNSFVGWSTDWSPYADQSIKVRISLKSALGDKAYEWNDNEMYLFRSSVAYAMRQYFLKVKNQMILFGEEDVRVANLKPRISFNFFVTAPKNVSDIIPRTEVEKAIRMSRSRINDAFRLNDNSLEFLGIQPTLGPPNQPPVSGGGGAGGGGDKTHTCPPCPAPEAAGGPSVFLFPPKPKDTLMISRTPEVTCVVVDVSHEDPEVKFNWYVDGVEVHNAKTKPREEQYNSTYRVVSVLTVLHQDWLNGKEYKCKVSNKALGAPIEKTISKAKGQPREPQVYTLPPSRDELTKNQVSLTCLVKGFYPSDIAVEWESNGQPENNYKTTPPVLDSDGSFFLYSKLTVDKSRWQQGNVFSCSVMHEALHNHYTQKSLSLSPG

SEQ ID NO: 79 - protein, 958 aa, synthetic construct
  REGION 1..958: note = ACE2-740/G9/PGLALA
QSTIEEQAKTFLDKFNHEAEDLFYQSSLASWNYNTNITEENVQNMNNAGDKWSAFLKEQSTLAQMYPLQEIQNLTVKLQLQALQQNGSSVLSEDKSKRLNTILNTMSTIYSTGKVCNPDNPQECLLLEPGLNEIMANSLDYNERLWAWESWRSEVGKQLRPLYEEYVVLKNEMARANHYEDYGDYWRGDYEVNGVDGYDYSRGQLIEDVEHTFEEIKPLYEHLHAYVRAKLMNAYPSYISPIGCLPAHLLGDMWGRFWTNLYSLTVPFGQKPNIDVTDAMVDQAWDAQRIFKEAEKFFVSVGLPNMTQGFWENSMLTDPGNVQKAVCHPTAWDLGKGDFRILMCTKVTMDDFLTAHHEMGHIQYDMAYAAQPFLLRNGANEGFHEAVGEIMSLSAATPKHLKSIGLLSPDFQEDNETEINFLLKQALTIVGTLPFTYMLEKWRWMVFKGEIPKDQWMKKWWEMKREIVGVVEPVPHDETYCDPASLFHVSNDYSFIRYYTRTLYQFQFQEALCQAAKHEGPLHKCDISNSTEAGQKLFNMLRLGKSEPWTLALENVVGAKNMNVRPLLNYFEPLFTWLKDQNKNSFVGWSTDWSPYADQSIKVRISLKSALGDKAYEWNDNEMYLFRSSVAYAMRQYFLKVKNQMILFGEEDVRVANLKPRISFNFFVTAPKNVSDIIPRTEVEKAIRMSRSRINDAFRLNDNSLEFLGIQPTLGPPNQPPVSGGGGAGGGGDKTHTCPPCPAPEAAGGPSVFLFPPKPKDTLMISRTPEVTCVVVDVSHEDPEVKFNWYVDGVEVHNAKTKPREEQYNSTYRVVSVLTVLHQDWLNGKEYKCKVSNKALGAPIEKTISKAKGQPREPQVYTLPPSRDELTKNQVSLTCLVKGFYPSDIAVEWESNGQPENNYKTTPPVLDSDGSFFLYSKLTVDKSRWQQGNVFSCSVMHEALHNHYTQKSLSLSPG

SEQ ID NO: 80 - protein, 958 aa, synthetic construct
  REGION 1..958: note = ACE2-740/G9/R273Q
QSTIEEQAKTFLDKFNHEAEDLFYQSSLASWNYNTNITEENVQNMNNAGDKWSAFLKEQSTLAQMYPLQEIQNLTVKLQLQALQQNGSSVLSEDKSKRLNTILNTMSTIYSTGKVCNPDNPQECLLLEPGLNEIMANSLDYNERLWAWESWRSEVGKQLRPLYEEYVVLKNEMARANHYEDYGDYWRGDYEVNGVDGYDYSRGQLIEDVEHTFEEIKPLYEHLHAYVRAKLMNAYPSYISPIGCLPAHLLGDMWGQFWTNLYSLTVPFGQKPNIDVTDAMVDQAWDAQRIFKEAEKFFVSVGLPNMTQGFWENSMLTDPGNVQKAVCHPTAWDLGKGDFRILMCTKVTMDDFLTAHHEMGHIQYDMAYAAQPFLLRNGANEGFHEAVGEIMSLSAATPKHLKSIGLLSPDFQEDNETEINFLLKQALTIVGTLPFTYMLEKWRWMVFKGEIPKDQWMKKWWEMKREIVGVVEPVPHDETYCDPASLFHVSNDYSFIRYYTRTLYQFQFQEALCQAAKHEGPLHKCDISNSTEAGQKLFNMLRLGKSEPWTLALENVVGAKNMNVRPLLNYFEPLFTWLKDQNKNSFVGWSTDWSPYADQSIKVRISLKSALGDKAYEWNDNEMYLFRSSVAYAMRQYFLKVKNQMILFGEEDVRVANLKPRISFNFFVTAPKNVSDIIPRTEVEKAIRMSRSRINDAFRLNDNSLEFLGIQPTLGPPNQPPVSGGGGAGGGGDKTHTCPPCPAPELLGGPSVFLFPPKPKDTLMISRTPEVTCVVVDVSHEDPEVKFNWYVDGVEVHNAKTKPREEQYNSTYRVVSVLTVLHQDWLNGKEYKCKVSNKALPAPIEKTISKAKGQPREPQVYTLPPSRDELTKNQVSLTCLVKGFYPSDIAVEWESNGQPENNYKTTPPVLDSDGSFFLYSKLTVDKSRWQQGNVFSCSVMHEALHNHYTQKSLSLSPG

SEQ ID NO: 81 - protein, 958 aa, synthetic construct
  REGION 1..958: note = ACE2-740/G9
QSTIEEQAKTFLDKFNHEAEDLFYQSSLASWNYNTNITEENVQNMNNAGDKWSAFLKEQSTLAQMYPLQEIQNLTVKLQLQALQQNGSSVLSEDKSKRLNTILNTMSTIYSTGKVCNPDNPQECLLLEPGLNEIMANSLDYNERLWAWESWRSEVGKQLRPLYEEYVVLKNEMARANHYEDYGDYWRGDYEVNGVDGYDYSRGQLIEDVEHTFEEIKPLYEHLHAYVRAKLMNAYPSYISPIGCLPAHLLGDMWGRFWTNLYSLTVPFGQKPNIDVTDAMVDQAWDAQRIFKEAEKFFVSVGLPNMTQGFWENSMLTDPGNVQKAVCHPTAWDLGKGDFRILMCTKVTMDDFLTAHHEMGHIQYDMAYAAQPFLLRNGANEGFHEAVGEIMSLSAATPKHLKSIGLLSPDFQEDNETEINFLLKQALTIVGTLPFTYMLEKWRWMVFKGEIPKDQWMKKWWEMKREIVGVVEPVPHDETYCDPASLFHVSNDYSFIRYYTRTLYQFQFQEALCQAAKHEGPLHKCDISNSTEAGQKLFNMLRLGKSEPWTLALENVVGAKNMNVRPLLNYFEPLFTWLKDQNKNSFVGWSTDWSPYADQSIKVRISLKSALGDKAYEWNDNEMYLFRSSVAYAMRQYFLKVKNQMILFGEEDVRVANLKPRISFNFFVTAPKNVSDIIPRTEVEKAIRMSRSRINDAFRLNDNSLEFLGIQPTLGPPNQPPVSGGGGAGGGGDKTHTCPPCPAPELLGGPSVFLFPPKPKDTLMISRTPEVTCVVVDVSHEDPEVKFNWYVDGVEVHNAKTKPREEQYNSTYRVVSVLTVLHQDWLNGKEYKCKVSNKALPAPIEKTISKAKGQPREPQVYTLPPSRDELTKNQVSLTCLVKGFYPSDIAVEWESNGQPENNYKTTPPVLDSDGSFFLYSKLTVDKSRWQQGNVFSCSVMHEALHNHYTQKSLSLSPG

SEQ ID NO: 82 - protein, 320 aa, synthetic construct
  REGION 1..320: note = ACE2-106/knob/PGLALA
QSTIEEQAKTFLDKFNHEAEDLFYQSSLASWNYNTNITEENVQNMNNAGDKWSAFLKEQSTLAQMYPLQEIQNLTVKLQLQALQQNGSSEPKSSDKTHTCPPCPAPEAAGGPSVFLFPPKPKDTLMISRTPEVTCVVVDVSHEDPEVKFNWYVDGVEVHNAKTKPREEQYNSTYRVVSVLTVLHQDWLNGKEYKCKVSNKALGAPIEKTISKAKGQPREPQVYTLPPCRDELTKNQVSLWCLVKGFYPSDIAVEWESNGQPENNYKTTPPVLDSDGSFFLYSKLTVDKSRWQQGNVFSCSVMHEALHNHYTQKSLSLSPG

SEQ ID NO: 83 - protein, 320 aa, synthetic construct
  REGION 1..320: note = ACE2-106/PGLALA
QSTIEEQAKTFLDKFNHEAEDLFYQSSLASWNYNTNITEENVQNMNNAGDKWSAFLKEQSTLAQMYPLQEIQNLTVKLQLQALQQNGSSEPKSSDKTHTCPPCPAPEAAGGPSVFLFPPKPKDTLMISRTPEVTCVVVDVSHEDPEVKFNWYVDGVEVHNAKTKPREEQYNSTYRVVSVLTVLHQDWLNGKEYKCKVSNKALGAPIEKTISKAKGQPREPQVYTLPPSRDELTKNQVSLTCLVKGFYPSDIAVEWESNGQPENNYKTTPPVLDSDGSFFLYSKLTVDKSRWQQGNVFSCSVMHEALHNHYTQKSLSLSPG

SEQ ID NO: 84 - protein, 815 aa, synthetic construct
  REGION 1..815: note = ACE2-106x6/knob/PGLALA
QSTIEEQAKTFLDKFNHEAEDLFYQSSLASWNYNTNITEENVQNMNNAGDKWSAFLKEQSTLAQMYPLQEIQNLTVKLQLQALQQNGSSGGGGSGGGGSQSTIEEQAKTFLDKFNHEAEDLFYQSSLASWNYNTNITEENVQNMNNAGDKWSAFLKEQSTLAQMYPLQEIQNLTVKLQLQALQQNGSSGGGGSGGGGSQSTIEEQAKTFLDKFNHEAEDLFYQSSLASWNYNTNITEENVQNMNNAGDKWSAFLKEQSTLAQMYPLQEIQNLTVKLQLQALQQNGSSGGGGSGGGGSQSTIEEQAKTFLDKFNHEAEDLFYQSSLASWNYNTNITEENVQNMNNAGDKWSAFLKEQSTLAQMYPLQEIQNLTVKLQLQALQQNGSSGGGGSGGGGSQSTIEEQAKTFLDKFNHEAEDLFYQSSLASWNYNTNITEENVQNMNNAGDKWSAFLKEQSTLAQMYPLQEIQNLTVKLQLQALQQNGSSGGGGSGGGGSQSTIEEQAKTFLDKFNHEAEDLFYQSSLASWNYNTNITEENVQNMNNAGDKWSAFLKEQSTLAQMYPLQEIQNLTVKLQLQALQQNGSSEPKSSDKTHTCPPCPAPEAAGGPSVFLFPPKPKDTLMISRTPEVTCVVVDVSHEDPEVKFNWYVDGVEVHNAKTKPREEQYNSTYRVVSVLTVLHQDWLNGKEYKCKVSNKALGAPIEKTISKAKGQPREPQVYTLPPCRDELTKNQVSLWCLVKGFYPSDIAVEWESNGQPENNYKTTPPVLDSDGSFFLYSKLTVDKSRWQQGNVFSCSVMHEALHNHYTQKSLSLSPG

SEQ ID NO: 85 - protein, 815 aa, synthetic construct
  REGION 1..815: note = ACE2-106x6/PGLALA
QSTIEEQAKTFLDKFNHEAEDLFYQSSLASWNYNTNITEENVQNMNNAGDKWSAFLKEQSTLAQMYPLQEIQNLTVKLQLQALQQNGSSGGGGSGGGGSQSTIEEQAKTFLDKFNHEAEDLFYQSSLASWNYNTNITEENVQNMNNAGDKWSAFLKEQSTLAQMYPLQEIQNLTVKLQLQALQQNGSSGGGGSGGGGSQSTIEEQAKTFLDKFNHEAEDLFYQSSLASWNYNTNITEENVQNMNNAGDKWSAFLKEQSTLAQMYPLQEIQNLTVKLQLQALQQNGSSGGGGSGGGGSQSTIEEQAKTFLDKFNHEAEDLFYQSSLASWNYNTNITEENVQNMNNAGDKWSAFLKEQSTLAQMYPLQEIQNLTVKLQLQALQQNGSSGGGGSGGGGSQSTIEEQAKTFLDKFNHEAEDLFYQSSLASWNYNTNITEENVQNMNNAGDKWSAFLKEQSTLAQMYPLQEIQNLTVKLQLQALQQNGSSGGGGSGGGGSQSTIEEQAKTFLDKFNHEAEDLFYQSSLASWNYNTNITEENVQNMNNAGDKWSAFLKEQSTLAQMYPLQEIQNLTVKLQLQALQQNGSSEPKSSDKTHTCPPCPAPEAAGGPSVFLFPPKPKDTLMISRTPEVTCVVVDVSHEDPEVKFNWYVDGVEVHNAKTKPREEQYNSTYRVVSVLTVLHQDWLNGKEYKCKVSNKALGAPIEKTISKAKGQPREPQVYTLPPSRDELTKNQVSLTCLVKGFYPSDIAVEWESNGQPENNYKTTPPVLDSDGSFFLYSKLTVDKSRWQQGNVFSCSVMHEALHNHYTQKSLSLSPG

SEQ ID NO: 86 - protein, 899 aa, synthetic construct
  REGION 1..899: note = CoV2-680/knob/PGLALA
SQCVNLTTRTQLPPAYTNSFTRGVYYPDKVFRSSVLHSTQDLFLPFFSNVTWFHAIHVSGTNGTKRFDNPVLPFNDGVYFASTEKSNIIRGWIFGTTLDSKTQSLLIVNNATNVVIKVCEFQFCNDPFLGVYYHKNNKSWMESEFRVYSSANNCTFEYVSQPFLMDLEGKQGNFKNLREFVFKNIDGYFKIYSKHTPINLVRDLPQGFSALEPLVDLPIGINITRFQTLLALHRSYLTPGDSSSGWTAGAAAYYVGYLQPRTFLLKYNENGTITDAVDCALDPLSETKCTLKSFTVEKGIYQTSNFRVQPTESIVRFPNITNLCPFGEVFNATRFASVYAWNRKRISNCVADYSVLYNSASFSTFKCYGVSPTKLNDLCFTNVYADSFVIRGDEVRQIAPGQTGKIADYNYKLPDDFTGCVIAWNSNNLDSKVGGNYNYLYRLFRKSNLKPFERDISTEIYQAGSTPCNGVEGFNCYFPLQSYGFQPTNGVGYQPYRVVVLSFELLHAPATVCGPKKSTNLVKNKCVNFNFNGLTGTGVLTESNKKFLPFQQFGRDIADTTDAVRDPQTLEILDITPCSFGGVSVITPGTNTSNQVAVLYQDVNCTEVPVAIHADQLTPTWRVYSTGSNVFQTRAGCLIGAEHVNNSYECDIPIGAGICASYQTQTNSEPKSSDKTHTCPPCPAPEAAGGPSVFLFPPKPKDTLMISRTPEVTCVVVDVSHEDPEVKFNWYVDGVEVHNAKTKPREEQYNSTYRVVSVLTVLHQDWLNGKEYKCKVSNKALGAPIEKTISKAKGQPREPQVYTLPPCRDELTKNQVSLWCLVKGFYPSDIAVEWESNGQPENNYKTTPPVLDSDGSFFLYSKLTVDKSRWQQGNVFSCSVMHEALHNHYTQKSLSLSPG

SEQ ID NO: 87 - protein, 899 aa, synthetic construct
  REGION 1..899: note = CoV2-680/PGLALA
SQCVNLTTRTQLPPAYTNSFTRGVYYPDKVFRSSVLHSTQDLFLPFFSNVTWFHAIHVSGTNGTKRFDNPVLPFNDGVYFASTEKSNIIRGWIFGTTLDSKTQSLLIVNNATNVVIKVCEFQFCNDPFLGVYYHKNNKSWMESEFRVYSSANNCTFEYVSQPFLMDLEGKQGNFKNLREFVFKNIDGYFKIYSKHTPINLVRDLPQGFSALEPLVDLPIGINITRFQTLLALHRSYLTPGDSSSGWTAGAAAYYVGYLQPRTFLLKYNENGTITDAVDCALDPLSETKCTLKSFTVEKGIYQTSNFRVQPTESIVRFPNITNLCPFGEVFNATRFASVYAWNRKRISNCVADYSVLYNSASFSTFKCYGVSPTKLNDLCFTNVYADSFVIRGDEVRQIAPGQTGKIADYNYKLPDDFTGCVIAWNSNNLDSKVGGNYNYLYRLFRKSNLKPFERDISTEIYQAGSTPCNGVEGFNCYFPLQSYGFQPTNGVGYQPYRVVVLSFELLHAPATVCGPKKSTNLVKNKCVNFNFNGLTGTGVLTESNKKFLPFQQFGRDIADTTDAVRDPQTLEILDITPCSFGGVSVITPGTNTSNQVAVLYQDVNCTEVPVAIHADQLTPTWRVYSTGSNVFQTRAGCLIGAEHVNNSYECDIPIGAGICASYQTQTNSEPKSSDKTHTCPPCPAPEAAGGPSVFLFPPKPKDTLMISRTPEVTCVVVDVSHEDPEVKFNWYVDGVEVHNAKTKPREEQYNSTYRVVSVLTVLHQDWLNGKEYKCKVSNKALGAPIEKTISKAKGQPREPQVYTLPPSRDELTKNQVSLTCLVKGFYPSDIAVEWESNGQPENNYKTTPPVLDSDGSFFLYSKLTVDKSRWQQGNVFSCSVMHEALHNHYTQKSLSLSPG

SEQ ID NO: 88 - protein, 884 aa, synthetic construct
  REGION 1..884: note = SARS-666/knob/PGLALA
SDLDRCTTFDDVQAPNYTQHTSSMRGVYYPDEIFRSDTLYLTQDLFLPFYSNVTGFHTINHTFGNPVIPFKDGIYFAATEKSNVVRGWVFGSTMNNKSQSVIIINNSTNVVIRACNFELCDNPFFAVSKPMGTQTHTMIFDNAFNCTFEYISDAFSLDVSEKSGNFKHLREFVFKNKDGFLYVYKGYQPIDVVRDLPSGFNTLKPIFKLPLGINITNFRAILTAFSPAQDIWGTSAAAYFVGYLKPTTFMLKYDENGTITDAVDCSQNPLAELKCSVKSFEIDKGIYQTSNFRVVPSGDVVRFPNITNLCPFGEVFNATKFPSVYAWERKKISNCVADYSVLYNSTFFSTFKCYGVSATKLNDLCFSNVYADSFVVKGDDVRQIAPGQTGVIADYNYKLPDDFMGCVLAWNTRNIDATSTGNYNYKYRYLRHGKLRPFERDISNVPFSPDGKPCTPPALNCYWPLNDYGFYTTTGIGYQPYRVVVLSFELLNAPATVCGPKLSTDLIKNQCVNFNFNGLTGTGVLTPSSKRFQPFQQFGRDVSDFTDSVRDPKTSEILDISPCSFGGVSVITPGTNASSEVAVLYQDVNCTDVSTAIHADQLTPAWRIYSTGNNVFQTQAGCLIGAEHVDTSYECDIPIGAGICASYHTVSLLEPKSSDKTHTCPPCPAPEAAGGPSVFLFPPKPKDTLMISRTPEVTCVVVDVSHEDPEVKFNWYVDGVEVHNAKTKPREEQYNSTYRVVSVLTVLHQDWLNGKEYKCKVSNKALGAPIEKTISKAKGQPREPQVYTLPPCRDELTKNQVSLWCLVKGFYPSDIAVEWESNGQPENNYKTTPPVLDSDGSFFLYSKLTVDKSRWQQGNVFSCSVMHEALHNHYTQKSLSLSPG

SEQ ID NO: 89 - protein, 899 aa, synthetic construct
  REGION 1..899: note = RaTG13-680/knob/PGLALA
SQCVNLTTRTQLPPAYTNSSTRGVYYPDKVFRSSVLHLTQDLFLPFFSNVTWFHAIHVSGTNGIKRFDNPVLPFNDGVYFASTEKSNIIRGWIFGTTLDSKTQSLLIVNNATNVVIKVCEFQFCNDPFLGVYYHKNNKSWMESEFRVYSSANNCTFEYVSQPFLMDLEGKQGNFKNLREFVFKNIDGYFKIYSKHTPINLVRDLPPGFSALEPLVDLPIGINITRFQTLLALHRSYLTPGDSSSGWTAGAAAYYVGYLQPRTFLLKYNENGTITDAVDCALDPLSETKCTLKSFTVEKGIYQTSNFRVQPTDSIVRFPNITNLCPFGEVFNATTFASVYAWNRKRISNCVADYSVLYNSTSFSTFKCYGVSPTKLNDLCFTNVYADSFVITGDEVRQIAPGQTGKIADYNYKLPDDFTGCVIAWNSKHIDAKEGGNFNYLYRLFRKANLKPFERDISTEIYQAGSKPCNGQTGLNCYYPLYRYGFYPTDGVGHQPYRVVVLSFELLNAPATVCGPKKSTNLVKNKCVNFNFNGLTGTGVLTESNKKFLPFQQFGRDIADTTDAVRDPQTLEILDITPCSFGGVSVITPGTNASNQVAVLYQDVNCTEVPVAIHADQLTPTWRVYSTGSNVFQTRAGCLIGAEHVNNSYECDIPIGAGICASYQTQTNSEPKSSDKTHTCPPCPAPEAAGGPSVFLFPPKPKDTLMISRTPEVTCVVVDVSHEDPEVKFNWYVDGVEVHNAKTKPREEQYNSTYRVVSVLTVLHQDWLNGKEYKCKVSNKALGAPIEKTISKAKGQPREPQVYTLPPCRDELTKNQVSLWCLVKGFYPSDIAVEWESNGQPENNYKTTPPVLDSDGSFFLYSKLTVDKSRWQQGNVFSCSVMHEALHNHYTQKSLSLSPG

SEQ ID NO: 90 - protein, 1006 aa, synthetic construct
  REGION 1..1006: note = ACE2-740/235/PGLALA/R273Q
QSTIEEQAKTFLDKFNHEAEDLFYQSSLASWNYNTNITEENVQNMNNAGDKWSAFLKEQSTLAQMYPLQEIQNLTVKLQLQALQQNGSSVLSEDKSKRLNTILNTMSTIYSTGKVCNPDNPQECLLLEPGLNEIMANSLDYNERLWAWESWRSEVGKQLRPLYEEYVVLKNEMARANHYEDYGDYWRGDYEVNGVDGYDYSRGQLIEDVEHTFEEIKPLYEHLHAYVRAKLMNAYPSYISPIGCLPAHLLGDMWGQFWTNLYSLTVPFGQKPNIDVTDAMVDQAWDAQRIFKEAEKFFVSVGLPNMTQGFWENSMLTDPGNVQKAVCHPTAWDLGKGDFRILMCTKVTMDDFLTAHHEMGHIQYDMAYAAQPFLLRNGANEGFHEAVGEIMSLSAATPKHLKSIGLLSPDFQEDNETEINFLLKQALTIVGTLPFTYMLEKWRWMVFKGEIPKDQWMKKWWEMKREIVGVVEPVPHDETYCDPASLFHVSNDYSFIRYYTRTLYQFQFQEALCQAAKHEGPLHKCDISNSTEAGQKLFNMLRLGKSEPWTLALENVVGAKNMNVRPLLNYFEPLFTWLKDQNKNSFVGWSTDWSPYADQSIKVRISLKSALGDKAYEWNDNEMYLFRSSVAYAMRQYFLKVKNQMILFGEEDVRVANLKPRISFNFFVTAPKNVSDIIPRTEVEKAIRMSRSRINDAFRLNDNSLEFLGIQPTLGPPNQPPVSTSTSPTRSMAPGAVHLPQPVSTRSQHTQPTPEPSTAPSTSFLLPMGPSPPAEGSTGDDKTHTCPPCPAPEAAGGPSVFLFPPKPKDTLMISRTPEVTCVVVDVSHEDPEVKFNWYVDGVEVHNAKTKPREEQYNSTYRVVSVLTVLHQDWLNGKEYKCKVSNKALGAPIEKTISKAKGQPREPQVYTLPPSRDELTKNQVSLTCLVKGFYPSDIAVEWESNGQPENNYKTTPPVLDSDGSFFLYSKLTVDKSRWQQGNVFSCSVMHEALHNHYTQKSLSLSPG

SEQ ID NO: 91 - protein, 983 aa, synthetic construct
  REGION 1..983: note = ACE2-740/212/PGLALA/R273Q
QSTIEEQAKTFLDKFNHEAEDLFYQSSLASWNYNTNITEENVQNMNNAGDKWSAFLKEQSTLAQMYPLQEIQNLTVKLQLQALQQNGSSVLSEDKSKRLNTILNTMSTIYSTGKVCNPDNPQECLLLEPGLNEIMANSLDYNERLWAWESWRSEVGKQLRPLYEEYVVLKNEMARANHYEDYGDYWRGDYEVNGVDGYDYSRGQLIEDVEHTFEEIKPLYEHLHAYVRAKLMNAYPSYISPIGCLPAHLLGDMWGQFWTNLYSLTVPFGQKPNIDVTDAMVDQAWDAQRIFKEAEKFFVSVGLPNMTQGFWENSMLTDPGNVQKAVCHPTAWDLGKGDFRILMCTKVTMDDFLTAHHEMGHIQYDMAYAAQPFLLRNGANEGFHEAVGEIMSLSAATPKHLKSIGLLSPDFQEDNETEINFLLKQALTIVGTLPFTYMLEKWRWMVFKGEIPKDQWMKKWWEMKREIVGVVEPVPHDETYCDPASLFHVSNDYSFIRYYTRTLYQFQFQEALCQAAKHEGPLHKCDISNSTEAGQKLFNMLRLGKSEPWTLALENVVGAKNMNVRPLLNYFEPLFTWLKDQNKNSFVGWSTDWSPYADQSIKVRISLKSALGDKAYEWNDNEMYLFRSSVAYAMRQYFLKVKNQMILFGEEDVRVANLKPRISFNFFVTAPKNVSDIIPRTEVEKAIRMSRSRINDAFRLNDNSLEFLGIQPTLGPPNQPPVSTSTSPTRSMAPGAVHLPQPVSTRSQHTQPTPEPSDKTHTCPPCPAPEAAGGPSVFLFPPKPKDTLMISRTPEVTCVVVDVSHEDPEVKFNWYVDGVEVHNAKTKPREEQYNSTYRVVSVLTVLHQDWLNGKEYKCKVSNKALGAPIEKTISKAKGQPREPQVYTLPPSRDELTKNQVSLTCLVKGFYPSDIAVEWESNGQPENNYKTTPPVLDSDGSFFLYSKLTVDKSRWQQGNVFSCSVMHEALHNHYTQKSLSLSPG

SEQ ID NO: 92 - protein, 979 aa, synthetic construct
  REGION 1..979: note = ACE2-740/208/PGLALA/R273Q
QSTIEEQAKTFLDKFNHEAEDLFYQSSLASWNYNTNITEENVQNMNNAGDKWSAFLKEQSTLAQMYPLQEIQNLTVKLQLQALQQNGSSVLSEDKSKRLNTILNTMSTIYSTGKVCNPDNPQECLLLEPGLNEIMANSLDYNERLWAWESWRSEVGKQLRPLYEEYVVLKNEMARANHYEDYGDYWRGDYEVNGVDGYDYSRGQLIEDVEHTFEEIKPLYEHLHAYVRAKLMNAYPSYISPIGCLPAHLLGDMWGQFWTNLYSLTVPFGQKPNIDVTDAMVDQAWDAQRIFKEAEKFFVSVGLPNMTQGFWENSMLTDPGNVQKAVCHPTAWDLGKGDFRILMCTKVTMDDFLTAHHEMGHIQYDMAYAAQPFLLRNGANEGFHEAVGEIMSLSAATPKHLKSIGLLSPDFQEDNETEINFLLKQALTIVGTLPFTYMLEKWRWMVFKGEIPKDQWMKKWWEMKREIVGVVEPVPHDETYCDPASLFHVSNDYSFIRYYTRTLYQFQFQEALCQAAKHEGPLHKCDISNSTEAGQKLFNMLRLGKSEPWTLALENVVGAKNMNVRPLLNYFEPLFTWLKDQNKNSFVGWSTDWSPYADQSIKVRISLKSALGDKAYEWNDNEMYLFRSSVAYAMRQYFLKVKNQMILFGEEDVRVANLKPRISFNFFVTAPKNVSDIIPRTEVEKAIRMSRSRINDAFRLNDNSLEFLGIQPTLGPPNQPPVSTSTSPTRSMAPGAVHLPQPVSTRSQHTQPTDKTHTCPPCPAPEAAGGPSVFLFPPKPKDTLMISRTPEVTCVVVDVSHEDPEVKFNWYVDGVEVHNAKTKPREEQYNSTYRVVSVLTVLHQDWLNGKEYKCKVSNKALGAPIEKTISKAKGQPREPQVYTLPPSRDELTKNQVSLTCLVKGFYPSDIAVEWESNGQPENNYKTTPPVLDSDGSFFLYSKLTVDKSRWQQGNVFSCSVMHEALHNHYTQKSLSLSPG

SEQ ID NO: 93 - protein, 973 aa, synthetic construct
  REGION 1..973: note = ACE2-740/202/PGLALA/R273Q
QSTIEEQAKTFLDKFNHEAEDLFYQSSLASWNYNTNITEENVQNMNNAGDKWSAFLKEQSTLAQMYPLQEIQNLTVKLQLQALQQNGSSVLSEDKSKRLNTILNTMSTIYSTGKVCNPDNPQECLLLEPGLNEIMANSLDYNERLWAWESWRSEVGKQLRPLYEEYVVLKNEMARANHYEDYGDYWRGDYEVNGVDGYDYSRGQLIEDVEHTFEEIKPLYEHLHAYVRAKLMNAYPSYISPIGCLPAHLLGDMWGQFWTNLYSLTVPFGQKPNIDVTDAMVDQAWDAQRIFKEAEKFFVSVGLPNMTQGFWENSMLTDPGNVQKAVCHPTAWDLGKGDFRILMCTKVTMDDFLTAHHEMGHIQYDMAYAAQPFLLRNGANEGFHEAVGEIMSLSAATPKHLKSIGLLSPDFQEDNETEINFLLKQALTIVGTLPFTYMLEKWRWMVFKGEIPKDQWMKKWWEMKREIVGVVEPVPHDETYCDPASLFHVSNDYSFIRYYTRTLYQFQFQEALCQAAKHEGPLHKCDISNSTEAGQKLFNMLRLGKSEPWTLALENVVGAKNMNVRPLLNYFEPLFTWLKDQNKNSFVGWSTDWSPYADQSIKVRISLKSALGDKAYEWNDNEMYLFRSSVAYAMRQYFLKVKNQMILFGEEDVRVANLKPRISFNFFVTAPKNVSDIIPRTEVEKAIRMSRSRINDAFRLNDNSLEFLGIQPTLGPPNQPPVSTSTSPTRSMAPGAVHLPQPVSTRSDKTHTCPPCPAPEAAGGPSVFLFPPKPKDTLMISRTPEVTCVVVDVSHEDPEVKFNWYVDGVEVHNAKTKPREEQYNSTYRVVSVLTVLHQDWLNGKEYKCKVSNKALGAPIEKTISKAKGQPREPQVYTLPPSRDELTKNQVSLTCLVKGFYPSDIAVEWESNGQPENNYKTTPPVLDSDGSFFLYSKLTVDKSRWQQGNVFSCSVMHEALHNHYTQKSLSLSPG

SEQ ID NO: 94 - protein, 972 aa, synthetic construct
  REGION 1..972: note = ACE2-740/201/PGLALA/R273Q
QSTIEEQAKTFLDKFNHEAEDLFYQSSLASWNYNTNITEENVQNMNNAGDKWSAFLKEQSTLAQMYPLQEIQNLTVKLQLQALQQNGSSVLSEDKSKRLNTILNTMSTIYSTGKVCNPDNPQECLLLEPGLNEIMANSLDYNERLWAWESWRSEVGKQLRPLYEEYVVLKNEMARANHYEDYGDYWRGDYEVNGVDGYDYSRGQLIEDVEHTFEEIKPLYEHLHAYVRAKLMNAYPSYISPIGCLPAHLLGDMWGQFWTNLYSLTVPFGQKPNIDVTDAMVDQAWDAQRIFKEAEKFFVSVGLPNMTQGFWENSMLTDPGNVQKAVCHPTAWDLGKGDFRILMCTKVTMDDFLTAHHEMGHIQYDMAYAAQPFLLRNGANEGFHEAVGEIMSLSAATPKHLKSIGLLSPDFQEDNETEINFLLKQALTIVGTLPFTYMLEKWRWMVFKGEIPKDQWMKKWWEMKREIVGVVEPVPHDETYCDPASLFHVSNDYSFIRYYTRTLYQFQFQEALCQAAKHEGPLHKCDISNSTEAGQKLFNMLRLGKSEPWTLALENVVGAKNMNVRPLLNYFEPLFTWLKDQNKNSFVGWSTDWSPYADQSIKVRISLKSALGDKAYEWNDNEMYLFRSSVAYAMRQYFLKVKNQMILFGEEDVRVANLKPRISFNFFVTAPKNVSDIIPRTEVEKAIRMSRSRINDAFRLNDNSLEFLGIQPTLGPPNQPPVSTSTSPTRSMAPGAVHLPQPVSTRDKTHTCPPCPAPEAAGGPSVFLFPPKPKDTLMISRTPEVTCVVVDVSHEDPEVKFNWYVDGVEVHNAKTKPREEQYNSTYRVVSVLTVLHQDWLNGKEYKCKVSNKALGAPIEKTISKAKGQPREPQVYTLPPSRDELTKNQVSLTCLVKGFYPSDIAVEWESNGQPENNYKTTPPVLDSDGSFFLYSKLTVDKSRWQQGNVFSCSVMHEALHNHYTQKSLSLSPG

SEQ ID NO: 95 - protein, 971 aa, synthetic construct
  REGION 1..971: note = ACE2-740/200/PGLALA/R273Q
QSTIEEQAKTFLDKFNHEAEDLFYQSSLASWNYNTNITEENVQNMNNAGDKWSAFLKEQSTLAQMYPLQEIQNLTVKLQLQALQQNGSSVLSEDKSKRLNTILNTMSTIYSTGKVCNPDNPQECLLLEPGLNEIMANSLDYNERLWAWESWRSEVGKQLRPLYEEYVVLKNEMARANHYEDYGDYWRGDYEVNGVDGYDYSRGQLIEDVEHTFEEIKPLYEHLHAYVRAKLMNAYPSYISPIGCLPAHLLGDMWGQFWTNLYSLTVPFGQKPNIDVTDAMVDQAWDAQRIFKEAEKFFVSVGLPNMTQGFWENSMLTDPGNVQKAVCHPTAWDLGKGDFRILMCTKVTMDDFLTAHHEMGHIQYDMAYAAQPFLLRNGANEGFHEAVGEIMSLSAATPKHLKSIGLLSPDFQEDNETEINFLLKQALTIVGTLPFTYMLEKWRWMVFKGEIPKDQWMKKWWEMKREIVGVVEPVPHDETYCDPASLFHVSNDYSFIRYYTRTLYQFQFQEALCQAAKHEGPLHKCDISNSTEAGQKLFNMLRLGKSEPWTLALENVVGAKNMNVRPLLNYFEPLFTWLKDQNKNSFVGWSTDWSPYADQSIKVRISLKSALGDKAYEWNDNEMYLFRSSVAYAMRQYFLKVKNQMILFGEEDVRVANLKPRISFNFFVTAPKNVSDIIPRTEVEKAIRMSRSRINDAFRLNDNSLEFLGIQPTLGPPNQPPVSTSTSPTRSMAPGAVHLPQPVSTDKTHTCPPCPAPEAAGGPSVFLFPPKPKDTLMISRTPEVTCVVVDVSHEDPEVKFNWYVDGVEVHNAKTKPREEQYNSTYRVVSVLTVLHQDWLNGKEYKCKVSNKALGAPIEKTISKAKGQPREPQVYTLPPSRDELTKNQVSLTCLVKGFYPSDIAVEWESNGQPENNYKTTPPVLDSDGSFFLYSKLTVDKSRWQQGNVFSCSVMHEALHNHYTQKSLSLSPG

SEQ ID NO: 96 - protein, 970 aa, synthetic construct
  REGION 1..970: note = ACE2-740/199/PGLALA/R273Q
QSTIEEQAKTFLDKFNHEAEDLFYQSSLASWNYNTNITEENVQNMNNAGDKWSAFLKEQSTLAQMYPLQEIQNLTVKLQLQALQQNGSSVLSEDKSKRLNTILNTMSTIYSTGKVCNPDNPQECLLLEPGLNEIMANSLDYNERLWAWESWRSEVGKQLRPLYEEYVVLKNEMARANHYEDYGDYWRGDYEVNGVDGYDYSRGQLIEDVEHTFEEIKPLYEHLHAYVRAKLMNAYPSYISPIGCLPAHLLGDMWGQFWTNLYSLTVPFGQKPNIDVTDAMVDQAWDAQRIFKEAEKFFVSVGLPNMTQGFWENSMLTDPGNVQKAVCHPTAWDLGKGDFRILMCTKVTMDDFLTAHHEMGHIQYDMAYAAQPFLLRNGANEGFHEAVGEIMSLSAATPKHLKSIGLLSPDFQEDNETEINFLLKQALTIVGTLPFTYMLEKWRWMVFKGEIPKDQWMKKWWEMKREIVGVVEPVPHDETYCDPASLFHVSNDYSFIRYYTRTLYQFQFQEALCQAAKHEGPLHKCDISNSTEAGQKLFNMLRLGKSEPWTLALENVVGAKNMNVRPLLNYFEPLFTWLKDQNKNSFVGWSTDWSPYADQSIKVRISLKSALGDKAYEWNDNEMYLFRSSVAYAMRQYFLKVKNQMILFGEEDVRVANLKPRISFNFFVTAPKNVSDIIPRTEVEKAIRMSRSRINDAFRLNDNSLEFLGIQPTLGPPNQPPVSTSTSPTRSMAPGAVHLPQPVSDKTHTCPPCPAPEAAGGPSVFLFPPKPKDTLMISRTPEVTCVVVDVSHEDPEVKFNWYVDGVEVHNAKTKPREEQYNSTYRVVSVLTVLHQDWLNGKEYKCKVSNKALGAPIEKTISKAKGQPREPQVYTLPPSRDELTKNQVSLTCLVKGFYPSDIAVEWESNGQPENNYKTTPPVLDSDGSFFLYSKLTVDKSRWQQGNVFSCSVMHEALHNHYTQKSLSLSPG

SEQ ID NO: 97 - protein, 969 aa, synthetic construct
  REGION 1..969: note = ACE2-740/198/PGLALA/R273Q
QSTIEEQAKTFLDKFNHEAEDLFYQSSLASWNYNTNITEENVQNMNNAGDKWSAFLKEQSTLAQMYPLQEIQNLTVKLQLQALQQNGSSVLSEDKSKRLNTILNTMSTIYSTGKVCNPDNPQECLLLEPGLNEIMANSLDYNERLWAWESWRSEVGKQLRPLYEEYVVLKNEMARANHYEDYGDYWRGDYEVNGVDGYDYSRGQLIEDVEHTFEEIKPLYEHLHAYVRAKLMNAYPSYISPIGCLPAHLLGDMWGQFWTNLYSLTVPFGQKPNIDVTDAMVDQAWDAQRIFKEAEKFFVSVGLPNMTQGFWENSMLTDPGNVQKAVCHPTAWDLGKGDFRILMCTKVTMDDFLTAHHEMGHIQYDMAYAAQPFLLRNGANEGFHEAVGEIMSLSAATPKHLKSIGLLSPDFQEDNETEINFLLKQALTIVGTLPFTYMLEKWRWMVFKGEIPKDQWMKKWWEMKREIVGVVEPVPHDETYCDPASLFHVSNDYSFIRYYTRTLYQFQFQEALCQAAKHEGPLHKCDISNSTEAGQKLFNMLRLGKSEPWTLALENVVGAKNMNVRPLLNYFEPLFTWLKDQNKNSFVGWSTDWSPYADQSIKVRISLKSALGDKAYEWNDNEMYLFRSSVAYAMRQYFLKVKNQMILFGEEDVRVANLKPRISFNFFVTAPKNVSDIIPRTEVEKAIRMSRSRINDAFRLNDNSLEFLGIQPTLGPPNQPPVSTSTSPTRSMAPGAVHLPQPVDKTHTCPPCPAPEAAGGPSVFLFPPKPKDTLMISRTPEVTCVVVDVSHEDPEVKFNWYVDGVEVHNAKTKPREEQYNSTYRVVSVLTVLHQDWLNGKEYKCKVSNKALGAPIEKTISKAKGQPREPQVYTLPPSRDELTKNQVSLTCLVKGFYPSDIAVEWESNGQPENNYKTTPPVLDSDGSFFLYSKLTVDKSRWQQGNVFSCSVMHEALHNHYTQKSLSLSPG

SEQ ID NO: 98 - protein, 968 aa, synthetic construct
  REGION 1..968: note = ACE2-740/197/PGLALA/R273Q
QSTIEEQAKTFLDKFNHEAEDLFYQSSLASWNYNTNITEENVQNMNNAGDKWSAFLKEQSTLAQMYPLQEIQNLTVKLQLQALQQNGSSVLSEDKSKRLNTILNTMSTIYSTGKVCNPDNPQECLLLEPGLNEIMANSLDYNERLWAWESWRSEVGKQLRPLYEEYVVLKNEMARANHYEDYGDYWRGDYEVNGVDGYDYSRGQLIEDVEHTFEEIKPLYEHLHAYVRAKLMNAYPSYISPIGCLPAHLLGDMWGQFWTNLYSLTVPFGQKPNIDVTDAMVDQAWDAQRIFKEAEKFFVSVGLPNMTQGFWENSMLTDPGNVQKAVCHPTAWDLGKGDFRILMCTKVTMDDFLTAHHEMGHIQYDMAYAAQPFLLRNGANEGFHEAVGEIMSLSAATPKHLKSIGLLSPDFQEDNETEINFLLKQALTIVGTLPFTYMLEKWRWMVFKGEIPKDQWMKKWWEMKREIVGVVEPVPHDETYCDPASLFHVSNDYSFIRYYTRTLYQFQFQEALCQAAKHEGPLHKCDISNSTEAGQKLFNMLRLGKSEPWTLALENVVGAKNMNVRPLLNYFEPLFTWLKDQNKNSFVGWSTDWSPYADQSIKVRISLKSALGDKAYEWNDNEMYLFRSSVAYAMRQYFLKVKNQMILFGEEDVRVANLKPRISFNFFVTAPKNVSDIIPRTEVEKAIRMSRSRINDAFRLNDNSLEFLGIQPTLGPPNQPPVSTSTSPTRSMAPGAVHLPQPDKTHTCPPCPAPEAAGGPSVFLFPPKPKDTLMISRTPEVTCVVVDVSHEDPEVKFNWYVDGVEVHNAKTKPREEQYNSTYRVVSVLTVLHQDWLNGKEYKCKVSNKALGAPIEKTISKAKGQPREPQVYTLPPSRDELTKNQVSLTCLVKGFYPSDIAVEWESNGQPENNYKTTPPVLDSDGSFFLYSKLTVDKSRWQQGNVFSCSVMHEALHNHYTQKSLSLSPG

SEQ ID NO: 99 - protein, 967 aa, synthetic construct
  REGION 1..967: note = ACE2-740/196/PGLALA/R273Q
QSTIEEQAKTFLDKFNHEAEDLFYQSSLASWNYNTNITEENVQNMNNAGDKWSAFLKEQSTLAQMYPLQEIQNLTVKLQLQALQQNGSSVLSEDKSKRLNTILNTMSTIYSTGKVCNPDNPQECLLLEPGLNEIMANSLDYNERLWAWESWRSEVGKQLRPLYEEYVVLKNEMARANHYEDYGDYWRGDYEVNGVDGYDYSRGQLIEDVEHTFEEIKPLYEHLHAYVRAKLMNAYPSYISPIGCLPAHLLGDMWGQFWTNLYSLTVPFGQKPNIDVTDAMVDQAWDAQRIFKEAEKFFVSVGLPNMTQGFWENSMLTDPGNVQKAVCHPTAWDLGKGDFRILMCTKVTMDDFLTAHHEMGHIQYDMAYAAQPFLLRNGANEGFHEAVGEIMSLSAATPKHLKSIGLLSPDFQEDNETEINFLLKQALTIVGTLPFTYMLEKWRWMVFKGEIPKDQWMKKWWEMKREIVGVVEPVPHDETYCDPASLFHVSNDYSFIRYYTRTLYQFQFQEALCQAAKHEGPLHKCDISNSTEAGQKLFNMLRLGKSEPWTLALENVVGAKNMNVRPLLNYFEPLFTWLKDQNKNSFVGWSTDWSPYADQSIKVRISLKSALGDKAYEWNDNEMYLFRSSVAYAMRQYFLKVKNQMILFGEEDVRVANLKPRISFNFFVTAPKNVSDIIPRTEVEKAIRMSRSRINDAFRLNDNSLEFLGIQPTLGPPNQPPVSTSTSPTRSMAPGAVHLPQDKTHTCPPCPAPEAAGGPSVFLFPPKPKDTLMISRTPEVTCVVVDVSHEDPEVKFNWYVDGVEVHNAKTKPREEQYNSTYRVVSVLTVLHQDWLNGKEYKCKVSNKALGAPIEKTISKAKGQPREPQVYTLPPSRDELTKNQVSLTCLVKGFYPSDIAVEWESNGQPENNYKTTPPVLDSDGSFFLYSKLTVDKSRWQQGNVFSCSVMHEALHNHYTQKSLSLSPG

SEQ ID NO: 100 - protein, 966 aa, synthetic construct
  REGION 1..966: note = ACE2-740/196/PGLALA/R273Q
QSTIEEQAKTFLDKFNHEAEDLFYQSSLASWNYNTNITEENVQNMNNAGDKWSAFLKEQSTLAQMYPLQEIQNLTVKLQLQALQQNGSSVLSEDKSKRLNTILNTMSTIYSTGKVCNPDNPQECLLLEPGLNEIMANSLDYNERLWAWESWRSEVGKQLRPLYEEYVVLKNEMARANHYEDYGDYWRGDYEVNGVDGYDYSRGQLIEDVEHTFEEIKPLYEHLHAYVRAKLMNAYPSYISPIGCLPAHLLGDMWGQFWTNLYSLTVPFGQKPNIDVTDAMVDQAWDAQRIFKEAEKFFVSVGLPNMTQGFWENSMLTDPGNVQKAVCHPTAWDLGKGDFRILMCTKVTMDDFLTAHHEMGHIQYDMAYAAQPFLLRNGANEGFHEAVGEIMSLSAATPKHLKSIGLLSPDFQEDNETEINFLLKQALTIVGTLPFTYMLEKWRWMVFKGEIPKDQWMKKWWEMKREIVGVVEPVPHDETYCDPASLFHVSNDYSFIRYYTRTLYQFQFQEALCQAAKHEGPLHKCDISNSTEAGQKLFNMLRLGKSEPWTLALENVVGAKNMNVRPLLNYFEPLFTWLKDQNKNSFVGWSTDWSPYADQSIKVRISLKSALGDKAYEWNDNEMYLFRSSVAYAMRQYFLKVKNQMILFGEEDVRVANLKPRISFNFFVTAPKNVSDIIPRTEVEKAIRMSRSRINDAFRLNDNSLEFLGIQPTLGPPNQPPVSTSTSPTRSMAPGAVHLPDKTHTCPPCPAPEAAGGPSVFLFPPKPKDTLMISRTPEVTCVVVDVSHEDPEVKFNWYVDGVEVHNAKTKPREEQYNSTYRVVSVLTVLHQDWLNGKEYKCKVSNKALGAPIEKTISKAKGQPREPQVYTLPPSRDELTKNQVSLTCLVKGFYPSDIAVEWESNGQPENNYKTTPPVLDSDGSFFLYSKLTVDKSRWQQGNVFSCSVMHEALHNHYTQKSLSLSPG

SEQ ID NO: 101 - protein, 965 aa, synthetic construct
  REGION 1..965: note = ACE2-740/194/PGLALA/R273Q
QSTIEEQAKTFLDKFNHEAEDLFYQSSLASWNYNTNITEENVQNMNNAGDKWSAFLKEQSTLAQMYPLQEIQNLTVKLQLQALQQNGSSVLSEDKSKRLNTILNTMSTIYSTGKVCNPDNPQECLLLEPGLNEIMANSLDYNERLWAWESWRSEVGKQLRPLYEEYVVLKNEMARANHYEDYGDYWRGDYEVNGVDGYDYSRGQLIEDVEHTFEEIKPLYEHLHAYVRAKLMNAYPSYISPIGCLPAHLLGDMWGQFWTNLYSLTVPFGQKPNIDVTDAMVDQAWDAQRIFKEAEKFFVSVGLPNMTQGFWENSMLTDPGNVQKAVCHPTAWDLGKGDFRILMCTKVTMDDFLTAHHEMGHIQYDMAYAAQPFLLRNGANEGFHEAVGEIMSLSAATPKHLKSIGLLSPDFQEDNETEINFLLKQALTIVGTLPFTYMLEKWRWMVFKGEIPKDQWMKKWWEMKREIVGVVEPVPHDETYCDPASLFHVSNDYSFIRYYTRTLYQFQFQEALCQAAKHEGPLHKCDISNSTEAGQKLFNMLRLGKSEPWTLALENVVGAKNMNVRPLLNYFEPLFTWLKDQNKNSFVGWSTDWSPYADQSIKVRISLKSALGDKAYEWNDNEMYLFRSSVAYAMRQYFLKVKNQMILFGEEDVRVANLKPRISFNFFVTAPKNVSDIIPRTEVEKAIRMSRSRINDAFRLNDNSLEFLGIQPTLGPPNQPPVSTSTSPTRSMAPGAVHLDKTHTCPPCPAPEAAGGPSVFLFPPKPKDTLMISRTPEVTCVVVDVSHEDPEVKFNWYVDGVEVHNAKTKPREEQYNSTYRVVSVLTVLHQDWLNGKEYKCKVSNKALGAPIEKTISKAKGQPREPQVYTLPPSRDELTKNQVSLTCLVKGFYPSDIAVEWESNGQPENNYKTTPPVLDSDGSFFLYSKLTVDKSRWQQGNVFSCSVMHEALHNHYTQKSLSLSPG

SEQ ID NO: 102 - protein, 964 aa, synthetic construct
  REGION 1..964: note = ACE2-740/193/PGLALA/R273Q
QSTIEEQAKTFLDKFNHEAEDLFYQSSLASWNYNTNITEENVQNMNNAGDKWSAFLKEQSTLAQMYPLQEIQNLTVKLQLQALQQNGSSVLSEDKSKRLNTILNTMSTIYSTGKVCNPDNPQECLLLEPGLNEIMANSLDYNERLWAWESWRSEVGKQLRPLYEEYVVLKNEMARANHYEDYGDYWRGDYEVNGVDGYDYSRGQLIEDVEHTFEEIKPLYEHLHAYVRAKLMNAYPSYISPIGCLPAHLLGDMWGQFWTNLYSLTVPFGQKPNIDVTDAMVDQAWDAQRIFKEAEKFFVSVGLPNMTQGFWENSMLTDPGNVQKAVCHPTAWDLGKGDFRILMCTKVTMDDFLTAHHEMGHIQYDMAYAAQPFLLRNGANEGFHEAVGEIMSLSAATPKHLKSIGLLSPDFQEDNETEINFLLKQALTIVGTLPFTYMLEKWRWMVFKGEIPKDQWMKKWWEMKREIVGVVEPVPHDETYCDPASLFHVSNDYSFIRYYTRTLYQFQFQEALCQAAKHEGPLHKCDISNSTEAGQKLFNMLRLGKSEPWTLALENVVGAKNMNVRPLLNYFEPLFTWLKDQNKNSFVGWSTDWSPYADQSIKVRISLKSALGDKAYEWNDNEMYLFRSSVAYAMRQYFLKVKNQMILFGEEDVRVANLKPRISFNFFVTAPKNVSDIIPRTEVEKAIRMSRSRINDAFRLNDNSLEFLGIQPTLGPPNQPPVSTSTSPTRSMAPGAVHDKTHTCPPCPAPEAAGGPSVFLFPPKPKDTLMISRTPEVTCVVVDVSHEDPEVKFNWYVDGVEVHNAKTKPREEQYNSTYRVVSVLTVLHQDWLNGKEYKCKVSNKALGAPIEKTISKAKGQPREPQVYTLPPSRDELTKNQVSLTCLVKGFYPSDIAVEWESNGQPENNYKTTPPVLDSDGSFFLYSKLTVDKSRWQQGNVFSCSVMHEALHNHYTQKSLSLSPG

SEQ ID NO: 103 - protein, 963 aa, synthetic construct
  REGION 1..963: note = ACE2-740/192/PGLALA/R273Q
QSTIEEQAKTFLDKFNHEAEDLFYQSSLASWNYNTNITEENVQNMNNAGDKWSAFLKEQSTLAQMYPLQEIQNLTVKLQLQALQQNGSSVLSEDKSKRLNTILNTMSTIYSTGKVCNPDNPQECLLLEPGLNEIMANSLDYNERLWAWESWRSEVGKQLRPLYEEYVVLKNEMARANHYEDYGDYWRGDYEVNGVDGYDYSRGQLIEDVEHTFEEIKPLYEHLHAYVRAKLMNAYPSYISPIGCLPAHLLGDMWGQFWTNLYSLTVPFGQKPNIDVTDAMVDQAWDAQRIFKEAEKFFVSVGLPNMTQGFWENSMLTDPGNVQKAVCHPTAWDLGKGDFRILMCTKVTMDDFLTAHHEMGHIQYDMAYAAQPFLLRNGANEGFHEAVGEIMSLSAATPKHLKSIGLLSPDFQEDNETEINFLLKQALTIVGTLPFTYMLEKWRWMVFKGEIPKDQWMKKWWEMKREIVGVVEPVPHDETYCDPASLFHVSNDYSFIRYYTRTLYQFQFQEALCQAAKHEGPLHKCDISNSTEAGQKLFNMLRLGKSEPWTLALENVVGAKNMNVRPLLNYFEPLFTWLKDQNKNSFVGWSTDWSPYADQSIKVRISLKSALGDKAYEWNDNEMYLFRSSVAYAMRQYFLKVKNQMILFGEEDVRVANLKPRISFNFFVTAPKNVSDIIPRTEVEKAIRMSRSRINDAFRLNDNSLEFLGIQPTLGPPNQPPVSTSTSPTRSMAPGAVDKTHTCPPCPAPEAAGGPSVFLFPPKPKDTLMISRTPEVTCVVVDVSHEDPEVKFNWYVDGVEVHNAKTKPREEQYNSTYRVVSVLTVLHQDWLNGKEYKCKVSNKALGAPIEKTISKAKGQPREPQVYTLPPSRDELTKNQVSLTCLVKGFYPSDIAVEWESNGQPENNYKTTPPVLDSDGSFFLYSKLTVDKSRWQQGNVFSCSVMHEALHNHYTQKSLSLSPG

SEQ ID NO: 104 - protein, 962 aa, synthetic construct
  REGION 1..962: note = ACE2-740/191/PGLALA/R273Q
QSTIEEQAKTFLDKFNHEAEDLFYQSSLASWNYNTNITEENVQNMNNAGDKWSAFLKEQSTLAQMYPLQEIQNLTVKLQLQALQQNGSSVLSEDKSKRLNTILNTMSTIYSTGKVCNPDNPQECLLLEPGLNEIMANSLDYNERLWAWESWRSEVGKQLRPLYEEYVVLKNEMARANHYEDYGDYWRGDYEVNGVDGYDYSRGQLIEDVEHTFEEIKPLYEHLHAYVRAKLMNAYPSYISPIGCLPAHLLGDMWGQFWTNLYSLTVPFGQKPNIDVTDAMVDQAWDAQRIFKEAEKFFVSVGLPNMTQGFWENSMLTDPGNVQKAVCHPTAWDLGKGDFRILMCTKVTMDDFLTAHHEMGHIQYDMAYAAQPFLLRNGANEGFHEAVGEIMSLSAATPKHLKSIGLLSPDFQEDNETEINFLLKQALTIVGTLPFTYMLEKWRWMVFKGEIPKDQWMKKWWEMKREIVGVVEPVPHDETYCDPASLFHVSNDYSFIRYYTRTLYQFQFQEALCQAAKHEGPLHKCDISNSTEAGQKLFNMLRLGKSEPWTLALENVVGAKNMNVRPLLNYFEPLFTWLKDQNKNSFVGWSTDWSPYADQSIKVRISLKSALGDKAYEWNDNEMYLFRSSVAYAMRQYFLKVKNQMILFGEEDVRVANLKPRISFNFFVTAPKNVSDIIPRTEVEKAIRMSRSRINDAFRLNDNSLEFLGIQPTLGPPNQPPVSTSTSPTRSMAPGADKTHTCPPCPAPEAAGGPSVFLFPPKPKDTLMISRTPEVTCVVVDVSHEDPEVKFNWYVDGVEVHNAKTKPREEQYNSTYRVVSVLTVLHQDWLNGKEYKCKVSNKALGAPIEKTISKAKGQPREPQVYTLPPSRDELTKNQVSLTCLVKGFYPSDIAVEWESNGQPENNYKTTPPVLDSDGSFFLYSKLTVDKSRWQQGNVFSCSVMHEALHNHYTQKSLSLSPG

SEQ ID NO: 105 - protein, 961 aa, synthetic construct
  REGION 1..961: note = ACE2-740/190/PGLALA/R273Q
QSTIEEQAKTFLDKFNHEAEDLFYQSSLASWNYNTNITEENVQNMNNAGDKWSAFLKEQSTLAQMYPLQEIQNLTVKLQLQALQQNGSSVLSEDKSKRLNTILNTMSTIYSTGKVCNPDNPQECLLLEPGLNEIMANSLDYNERLWAWESWRSEVGKQLRPLYEEYVVLKNEMARANHYEDYGDYWRGDYEVNGVDGYDYSRGQLIEDVEHTFEEIKPLYEHLHAYVRAKLMNAYPSYISPIGCLPAHLLGDMWGQFWTNLYSLTVPFGQKPNIDVTDAMVDQAWDAQRIFKEAEKFFVSVGLPNMTQGFWENSMLTDPGNVQKAVCHPTAWDLGKGDFRILMCTKVTMDDFLTAHHEMGHIQYDMAYAAQPFLLRNGANEGFHEAVGEIMSLSAATPKHLKSIGLLSPDFQEDNETEINFLLKQALTIVGTLPFTYMLEKWRWMVFKGEIPKDQWMKKWWEMKREIVGVVEPVPHDETYCDPASLFHVSNDYSFIRYYTRTLYQFQFQEALCQAAKHEGPLHKCDISNSTEAGQKLFNMLRLGKSEPWTLALENVVGAKNMNVRPLLNYFEPLFTWLKDQNKNSFVGWSTDWSPYADQSIKVRISLKSALGDKAYEWNDNEMYLFRSSVAYAMRQYFLKVKNQMILFGEEDVRVANLKPRISFNFFVTAPKNVSDIIPRTEVEKAIRMSRSRINDAFRLNDNSLEFLGIQPTLGPPNQPPVSTSTSPTRSMAPGDKTHTCPPCPAPEAAGGPSVFLFPPKPKDTLMISRTPEVTCVVVDVSHEDPEVKFNWYVDGVEVHNAKTKPREEQYNSTYRVVSVLTVLHQDWLNGKEYKCKVSNKALGAPIEKTISKAKGQPREPQVYTLPPSRDELTKNQVSLTCLVKGFYPSDIAVEWESNGQPENNYKTTPPVLDSDGSFFLYSKLTVDKSRWQQGNVFSCSVMHEALHNHYTQKSLSLSPG

SEQ ID NO: 106 - protein, 960 aa, synthetic construct
  REGION 1..960: note = ACE2-740/189/PGLALA/R273Q
QSTIEEQAKTFLDKFNHEAEDLFYQSSLASWNYNTNITEENVQNMNNAGDKWSAFLKEQSTLAQMYPLQEIQNLTVKLQLQALQQNGSSVLSEDKSKRLNTILNTMSTIYSTGKVCNPDNPQECLLLEPGLNEIMANSLDYNERLWAWESWRSEVGKQLRPLYEEYVVLKNEMARANHYEDYGDYWRGDYEVNGVDGYDYSRGQLIEDVEHTFEEIKPLYEHLHAYVRAKLMNAYPSYISPIGCLPAHLLGDMWGQFWTNLYSLTVPFGQKPNIDVTDAMVDQAWDAQRIFKEAEKFFVSVGLPNMTQGFWENSMLTDPGNVQKAVCHPTAWDLGKGDFRILMCTKVTMDDFLTAHHEMGHIQYDMAYAAQPFLLRNGANEGFHEAVGEIMSLSAATPKHLKSIGLLSPDFQEDNETEINFLLKQALTIVGTLPFTYMLEKWRWMVFKGEIPKDQWMKKWWEMKREIVGVVEPVPHDETYCDPASLFHVSNDYSFIRYYTRTLYQFQFQEALCQAAKHEGPLHKCDISNSTEAGQKLFNMLRLGKSEPWTLALENVVGAKNMNVRPLLNYFEPLFTWLKDQNKNSFVGWSTDWSPYADQSIKVRISLKSALGDKAYEWNDNEMYLFRSSVAYAMRQYFLKVKNQMILFGEEDVRVANLKPRISFNFFVTAPKNVSDIIPRTEVEKAIRMSRSRINDAFRLNDNSLEFLGIQPTLGPPNQPPVSTSTSPTRSMAPDKTHTCPPCPAPEAAGGPSVFLFPPKPKDTLMISRTPEVTCVVVDVSHEDPEVKFNWYVDGVEVHNAKTKPREEQYNSTYRVVSVLTVLHQDWLNGKEYKCKVSNKALGAPIEKTISKAKGQPREPQVYTLPPSRDELTKNQVSLTCLVKGFYPSDIAVEWESNGQPENNYKTTPPVLDSDGSFFLYSKLTVDKSRWQQGNVFSCSVMHEALHNHYTQKSLSLSPG

SEQ ID NO: 107 - protein, 959 aa, synthetic construct
  REGION 1..959: note = ACE2-740/188/PGLALA/R273Q
QSTIEEQAKTFLDKFNHEAEDLFYQSSLASWNYNTNITEENVQNMNNAGDKWSAFLKEQSTLAQMYPLQEIQNLTVKLQLQALQQNGSSVLSEDKSKRLNTILNTMSTIYSTGKVCNPDNPQECLLLEPGLNEIMANSLDYNERLWAWESWRSEVGKQLRPLYEEYVVLKNEMARANHYEDYGDYWRGDYEVNGVDGYDYSRGQLIEDVEHTFEEIKPLYEHLHAYVRAKLMNAYPSYISPIGCLPAHLLGDMWGQFWTNLYSLTVPFGQKPNIDVTDAMVDQAWDAQRIFKEAEKFFVSVGLPNMTQGFWENSMLTDPGNVQKAVCHPTAWDLGKGDFRILMCTKVTMDDFLTAHHEMGHIQYDMAYAAQPFLLRNGANEGFHEAVGEIMSLSAATPKHLKSIGLLSPDFQEDNETEINFLLKQALTIVGTLPFTYMLEKWRWMVFKGEIPKDQWMKKWWEMKREIVGVVEPVPHDETYCDPASLFHVSNDYSFIRYYTRTLYQFQFQEALCQAAKHEGPLHKCDISNSTEAGQKLFNMLRLGKSEPWTLALENVVGAKNMNVRPLLNYFEPLFTWLKDQNKNSFVGWSTDWSPYADQSIKVRISLKSALGDKAYEWNDNEMYLFRSSVAYAMRQYFLKVKNQMILFGEEDVRVANLKPRISFNFFVTAPKNVSDIIPRTEVEKAIRMSRSRINDAFRLNDNSLEFLGIQPTLGPPNQPPVSTSTSPTRSMADKTHTCPPCPAPEAAGGPSVFLFPPKPKDTLMISRTPEVTCVVVDVSHEDPEVKFNWYVDGVEVHNAKTKPREEQYNSTYRVVSVLTVLHQDWLNGKEYKCKVSNKALGAPIEKTISKAKGQPREPQVYTLPPSRDELTKNQVSLTCLVKGFYPSDIAVEWESNGQPENNYKTTPPVLDSDGSFFLYSKLTVDKSRWQQGNVFSCSVMHEALHNHYTQKSLSLSPG

SEQ ID NO: 108 - protein, 958 aa, synthetic construct
  REGION 1..958: note = ACE2-740/187/PGLALA/R273Q
QSTIEEQAKTFLDKFNHEAEDLFYQSSLASWNYNTNITEENVQNMNNAGDKWSAFLKEQSTLAQMYPLQEIQNLTVKLQLQALQQNGSSVLSEDKSKRLNTILNTMSTIYSTGKVCNPDNPQECLLLEPGLNEIMANSLDYNERLWAWESWRSEVGKQLRPLYEEYVVLKNEMARANHYEDYGDYWRGDYEVNGVDGYDYSRGQLIEDVEHTFEEIKPLYEHLHAYVRAKLMNAYPSYISPIGCLPAHLLGDMWGQFWTNLYSLTVPFGQKPNIDVTDAMVDQAWDAQRIFKEAEKFFVSVGLPNMTQGFWENSMLTDPGNVQKAVCHPTAWDLGKGDFRILMCTKVTMDDFLTAHHEMGHIQYDMAYAAQPFLLRNGANEGFHEAVGEIMSLSAATPKHLKSIGLLSPDFQEDNETEINFLLKQALTIVGTLPFTYMLEKWRWMVFKGEIPKDQWMKKWWEMKREIVGVVEPVPHDETYCDPASLFHVSNDYSFIRYYTRTLYQFQFQEALCQAAKHEGPLHKCDISNSTEAGQKLFNMLRLGKSEPWTLALENVVGAKNMNVRPLLNYFEPLFTWLKDQNKNSFVGWSTDWSPYADQSIKVRISLKSALGDKAYEWNDNEMYLFRSSVAYAMRQYFLKVKNQMILFGEEDVRVANLKPRISFNFFVTAPKNVSDIIPRTEVEKAIRMSRSRINDAFRLNDNSLEFLGIQPTLGPPNQPPVSTSTSPTRSMDKTHTCPPCPAPEAAGGPSVFLFPPKPKDTLMISRTPEVTCVVVDVSHEDPEVKFNWYVDGVEVHNAKTKPREEQYNSTYRVVSVLTVLHQDWLNGKEYKCKVSNKALGAPIEKTISKAKGQPREPQVYTLPPSRDELTKNQVSLTCLVKGFYPSDIAVEWESNGQPENNYKTTPPVLDSDGSFFLYSKLTVDKSRWQQGNVFSCSVMHEALHNHYTQKSLSLSPG

SEQ ID NO: 109 - protein, 957 aa, synthetic construct
  REGION 1..957: note = ACE2-740/186/PGLALA/R273Q
QSTIEEQAKTFLDKFNHEAEDLFYQSSLASWNYNTNITEENVQNMNNAGDKWSAFLKEQSTLAQMYPLQEIQNLTVKLQLQALQQNGSSVLSEDKSKRLNTILNTMSTIYSTGKVCNPDNPQECLLLEPGLNEIMANSLDYNERLWAWESWRSEVGKQLRPLYEEYVVLKNEMARANHYEDYGDYWRGDYEVNGVDGYDYSRGQLIEDVEHTFEEIKPLYEHLHAYVRAKLMNAYPSYISPIGCLPAHLLGDMWGQFWTNLYSLTVPFGQKPNIDVTDAMVDQAWDAQRIFKEAEKFFVSVGLPNMTQGFWENSMLTDPGNVQKAVCHPTAWDLGKGDFRILMCTKVTMDDFLTAHHEMGHIQYDMAYAAQPFLLRNGANEGFHEAVGEIMSLSAATPKHLKSIGLLSPDFQEDNETEINFLLKQALTIVGTLPFTYMLEKWRWMVFKGEIPKDQWMKKWWEMKREIVGVVEPVPHDETYCDPASLFHVSNDYSFIRYYTRTLYQFQFQEALCQAAKHEGPLHKCDISNSTEAGQKLFNMLRLGKSEPWTLALENVVGAKNMNVRPLLNYFEPLFTWLKDQNKNSFVGWSTDWSPYADQSIKVRISLKSALGDKAYEWNDNEMYLFRSSVAYAMRQYFLKVKNQMILFGEEDVRVANLKPRISFNFFVTAPKNVSDIIPRTEVEKAIRMSRSRINDAFRLNDNSLEFLGIQPTLGPPNQPPVSTSTSPTRSDKTHTCPPCPAPEAAGGPSVFLFPPKPKDTLMISRTPEVTCVVVDVSHEDPEVKFNWYVDGVEVHNAKTKPREEQYNSTYRVVSVLTVLHQDWLNGKEYKCKVSNKALGAPIEKTISKAKGQPREPQVYTLPPSRDELTKNQVSLTCLVKGFYPSDIAVEWESNGQPENNYKTTPPVLDSDGSFFLYSKLTVDKSRWQQGNVFSCSVMHEALHNHYTQKSLSLSPG

SEQ ID NO: 110 - protein, 956 aa, synthetic construct
  REGION 1..956: note = ACE2-740/185/PGLALA/R273Q
QSTIEEQAKTFLDKFNHEAEDLFYQSSLASWNYNTNITEENVQNMNNAGDKWSAFLKEQSTLAQMYPLQEIQNLTVKLQLQALQQNGSSVLSEDKSKRLNTILNTMSTIYSTGKVCNPDNPQECLLLEPGLNEIMANSLDYNERLWAWESWRSEVGKQLRPLYEEYVVLKNEMARANHYEDYGDYWRGDYEVNGVDGYDYSRGQLIEDVEHTFEEIKPLYEHLHAYVRAKLMNAYPSYISPIGCLPAHLLGDMWGQFWTNLYSLTVPFGQKPNIDVTDAMVDQAWDAQRIFKEAEKFFVSVGLPNMTQGFWENSMLTDPGNVQKAVCHPTAWDLGKGDFRILMCTKVTMDDFLTAHHEMGHIQYDMAYAAQPFLLRNGANEGFHEAVGEIMSLSAATPKHLKSIGLLSPDFQEDNETEINFLLKQALTIVGTLPFTYMLEKWRWMVFKGEIPKDQWMKKWWEMKREIVGVVEPVPHDETYCDPASLFHVSNDYSFIRYYTRTLYQFQFQEALCQAAKHEGPLHKCDISNSTEAGQKLFNMLRLGKSEPWTLALENVVGAKNMNVRPLLNYFEPLFTWLKDQNKNSFVGWSTDWSPYADQSIKVRISLKSALGDKAYEWNDNEMYLFRSSVAYAMRQYFLKVKNQMILFGEEDVRVANLKPRISFNFFVTAPKNVSDIIPRTEVEKAIRMSRSRINDAFRLNDNSLEFLGIQPTLGPPNQPPVSTSTSPTRDKTHTCPPCPAPEAAGGPSVFLFPPKPKDTLMISRTPEVTCVVVDVSHEDPEVKFNWYVDGVEVHNAKTKPREEQYNSTYRVVSVLTVLHQDWLNGKEYKCKVSNKALGAPIEKTISKAKGQPREPQVYTLPPSRDELTKNQVSLTCLVKGFYPSDIAVEWESNGQPENNYKTTPPVLDSDGSFFLYSKLTVDKSRWQQGNVFSCSVMHEALHNHYTQKSLSLSPG

SEQ ID NO: 111 - protein, 955 aa, synthetic construct
  REGION 1..955: note = ACE2-740/184/PGLALA/R273Q
QSTIEEQAKTFLDKFNHEAEDLFYQSSLASWNYNTNITEENVQNMNNAGDKWSAFLKEQSTLAQMYPLQEIQNLTVKLQLQALQQNGSSVLSEDKSKRLNTILNTMSTIYSTGKVCNPDNPQECLLLEPGLNEIMANSLDYNERLWAWESWRSEVGKQLRPLYEEYVVLKNEMARANHYEDYGDYWRGDYEVNGVDGYDYSRGQLIEDVEHTFEEIKPLYEHLHAYVRAKLMNAYPSYISPIGCLPAHLLGDMWGQFWTNLYSLTVPFGQKPNIDVTDAMVDQAWDAQRIFKEAEKFFVSVGLPNMTQGFWENSMLTDPGNVQKAVCHPTAWDLGKGDFRILMCTKVTMDDFLTAHHEMGHIQYDMAYAAQPFLLRNGANEGFHEAVGEIMSLSAATPKHLKSIGLLSPDFQEDNETEINFLLKQALTIVGTLPFTYMLEKWRWMVFKGEIPKDQWMKKWWEMKREIVGVVEPVPHDETYCDPASLFHVSNDYSFIRYYTRTLYQFQFQEALCQAAKHEGPLHKCDISNSTEAGQKLFNMLRLGKSEPWTLALENVVGAKNMNVRPLLNYFEPLFTWLKDQNKNSFVGWSTDWSPYADQSIKVRISLKSALGDKAYEWNDNEMYLFRSSVAYAMRQYFLKVKNQMILFGEEDVRVANLKPRISFNFFVTAPKNVSDIIPRTEVEKAIRMSRSRINDAFRLNDNSLEFLGIQPTLGPPNQPPVSTSTSPTDKTHTCPPCPAPEAAGGPSVFLFPPKPKDTLMISRTPEVTCVVVDVSHEDPEVKFNWYVDGVEVHNAKTKPREEQYNSTYRVVSVLTVLHQDWLNGKEYKCKVSNKALGAPIEKTISKAKGQPREPQVYTLPPSRDELTKNQVSLTCLVKGFYPSDIAVEWESNGQPENNYKTTPPVLDSDGSFFLYSKLTVDKSRWQQGNVFSCSVMHEALHNHYTQKSLSLSPG

SEQ ID NO: 112 - protein, 954 aa, synthetic construct
  REGION 1..954: note = ACE2-740/183/PGLALA/R273Q
QSTIEEQAKTFLDKFNHEAEDLFYQSSLASWNYNTNITEENVQNMNNAGDKWSAFLKEQSTLAQMYPLQEIQNLTVKLQLQALQQNGSSVLSEDKSKRLNTILNTMSTIYSTGKVCNPDNPQECLLLEPGLNEIMANSLDYNERLWAWESWRSEVGKQLRPLYEEYVVLKNEMARANHYEDYGDYWRGDYEVNGVDGYDYSRGQLIEDVEHTFEEIKPLYEHLHAYVRAKLMNAYPSYISPIGCLPAHLLGDMWGQFWTNLYSLTVPFGQKPNIDVTDAMVDQAWDAQRIFKEAEKFFVSVGLPNMTQGFWENSMLTDPGNVQKAVCHPTAWDLGKGDFRILMCTKVTMDDFLTAHHEMGHIQYDMAYAAQPFLLRNGANEGFHEAVGEIMSLSAATPKHLKSIGLLSPDFQEDNETEINFLLKQALTIVGTLPFTYMLEKWRWMVFKGEIPKDQWMKKWWEMKREIVGVVEPVPHDETYCDPASLFHVSNDYSFIRYYTRTLYQFQFQEALCQAAKHEGPLHKCDISNSTEAGQKLFNMLRLGKSEPWTLALENVVGAKNMNVRPLLNYFEPLFTWLKDQNKNSFVGWSTDWSPYADQSIKVRISLKSALGDKAYEWNDNEMYLFRSSVAYAMRQYFLKVKNQMILFGEEDVRVANLKPRISFNFFVTAPKNVSDIIPRTEVEKAIRMSRSRINDAFRLNDNSLEFLGIQPTLGPPNQPPVSTSTSPDKTHTCPPCPAPEAAGGPSVFLFPPKPKDTLMISRTPEVTCVVVDVSHEDPEVKFNWYVDGVEVHNAKTKPREEQYNSTYRVVSVLTVLHQDWLNGKEYKCKVSNKALGAPIEKTISKAKGQPREPQVYTLPPSRDELTKNQVSLTCLVKGFYPSDIAVEWESNGQPENNYKTTPPVLDSDGSFFLYSKLTVDKSRWQQGNVFSCSVMHEALHNHYTQKSLSLSPG

SEQ ID NO: 113 - protein, 963 aa, synthetic construct
  REGION 1..963: note = ACE2-740/G14/PGLALA/R273Q
QSTIEEQAKTFLDKFNHEAEDLFYQSSLASWNYNTNITEENVQNMNNAGDKWSAFLKEQSTLAQMYPLQEIQNLTVKLQLQALQQNGSSVLSEDKSKRLNTILNTMSTIYSTGKVCNPDNPQECLLLEPGLNEIMANSLDYNERLWAWESWRSEVGKQLRPLYEEYVVLKNEMARANHYEDYGDYWRGDYEVNGVDGYDYSRGQLIEDVEHTFEEIKPLYEHLHAYVRAKLMNAYPSYISPIGCLPAHLLGDMWGQFWTNLYSLTVPFGQKPNIDVTDAMVDQAWDAQRIFKEAEKFFVSVGLPNMTQGFWENSMLTDPGNVQKAVCHPTAWDLGKGDFRILMCTKVTMDDFLTAHHEMGHIQYDMAYAAQPFLLRNGANEGFHEAVGEIMSLSAATPKHLKSIGLLSPDFQEDNETEINFLLKQALTIVGTLPFTYMLEKWRWMVFKGEIPKDQWMKKWWEMKREIVGVVEPVPHDETYCDPASLFHVSNDYSFIRYYTRTLYQFQFQEALCQAAKHEGPLHKCDISNSTEAGQKLFNMLRLGKSEPWTLALENVVGAKNMNVRPLLNYFEPLFTWLKDQNKNSFVGWSTDWSPYADQSIKVRISLKSALGDKAYEWNDNEMYLFRSSVAYAMRQYFLKVKNQMILFGEEDVRVANLKPRISFNFFVTAPKNVSDIIPRTEVEKAIRMSRSRINDAFRLNDNSLEFLGIQPTLGPPNQPPVSGGGGAGGGGAGGGGDKTHTCPPCPAPEAAGGPSVFLFPPKPKDTLMISRTPEVTCVVVDVSHEDPEVKFNWYVDGVEVHNAKTKPREEQYNSTYRVVSVLTVLHQDWLNGKEYKCKVSNKALGAPIEKTISKAKGQPREPQVYTLPPSRDELTKNQVSLTCLVKGFYPSDIAVEWESNGQPENNYKTTPPVLDSDGSFFLYSKLTVDKSRWQQGNVFSCSVMHEALHNHYTQKSLSLSPG

SEQ ID NO: 114 - protein, 961 aa, synthetic construct
  REGION 1..961: note = ACE2-740/G12/PGLALA/R273Q
QSTIEEQAKTFLDKFNHEAEDLFYQSSLASWNYNTNITEENVQNMNNAGDKWSAFLKEQSTLAQMYPLQEIQNLTVKLQLQALQQNGSSVLSEDKSKRLNTILNTMSTIYSTGKVCNPDNPQECLLLEPGLNEIMANSLDYNERLWAWESWRSEVGKQLRPLYEEYVVLKNEMARANHYEDYGDYWRGDYEVNGVDGYDYSRGQLIEDVEHTFEEIKPLYEHLHAYVRAKLMNAYPSYISPIGCLPAHLLGDMWGQFWTNLYSLTVPFGQKPNIDVTDAMVDQAWDAQRIFKEAEKFFVSVGLPNMTQGFWENSMLTDPGNVQKAVCHPTAWDLGKGDFRILMCTKVTMDDFLTAHHEMGHIQYDMAYAAQPFLLRNGANEGFHEAVGEIMSLSAATPKHLKSIGLLSPDFQEDNETEINFLLKQALTIVGTLPFTYMLEKWRWMVFKGEIPKDQWMKKWWEMKREIVGVVEPVPHDETYCDPASLFHVSNDYSFIRYYTRTLYQFQFQEALCQAAKHEGPLHKCDISNSTEAGQKLFNMLRLGKSEPWTLALENVVGAKNMNVRPLLNYFEPLFTWLKDQNKNSFVGWSTDWSPYADQSIKVRISLKSALGDKAYEWNDNEMYLFRSSVAYAMRQYFLKVKNQMILFGEEDVRVANLKPRISFNFFVTAPKNVSDIIPRTEVEKAIRMSRSRINDAFRLNDNSLEFLGIQPTLGPPNQPPVSGGAGGGGAGGGGDKTHTCPPCPAPEAAGGPSVFLFPPKPKDTLMISRTPEVTCVVVDVSHEDPEVKFNWYVDGVEVHNAKTKPREEQYNSTYRVVSVLTVLHQDWLNGKEYKCKVSNKALGAPIEKTISKAKGQPREPQVYTLPPSRDELTKNQVSLTCLVKGFYPSDIAVEWESNGQPENNYKTTPPVLDSDGSFFLYSKLTVDKSRWQQGNVFSCSVMHEALHNHYTQKSLSLSPG

SEQ ID NO: 115 - protein, 959 aa, synthetic construct
  REGION 1..959: note = ACE2-740/G10/PGLALA/R273Q
QSTIEEQAKTFLDKFNHEAEDLFYQSSLASWNYNTNITEENVQNMNNAGDKWSAFLKEQSTLAQMYPLQEIQNLTVKLQLQALQQNGSSVLSEDKSKRLNTILNTMSTIYSTGKVCNPDNPQECLLLEPGLNEIMANSLDYNERLWAWESWRSEVGKQLRPLYEEYVVLKNEMARANHYEDYGDYWRGDYEVNGVDGYDYSRGQLIEDVEHTFEEIKPLYEHLHAYVRAKLMNAYPSYISPIGCLPAHLLGDMWGQFWTNLYSLTVPFGQKPNIDVTDAMVDQAWDAQRIFKEAEKFFVSVGLPNMTQGFWENSMLTDPGNVQKAVCHPTAWDLGKGDFRILMCTKVTMDDFLTAHHEMGHIQYDMAYAAQPFLLRNGANEGFHEAVGEIMSLSAATPKHLKSIGLLSPDFQEDNETEINFLLKQALTIVGTLPFTYMLEKWRWMVFKGEIPKDQWMKKWWEMKREIVGVVEPVPHDETYCDPASLFHVSNDYSFIRYYTRTLYQFQFQEALCQAAKHEGPLHKCDISNSTEAGQKLFNMLRLGKSEPWTLALENVVGAKNMNVRPLLNYFEPLFTWLKDQNKNSFVGWSTDWSPYADQSIKVRISLKSALGDKAYEWNDNEMYLFRSSVAYAMRQYFLKVKNQMILFGEEDVRVANLKPRISFNFFVTAPKNVSDIIPRTEVEKAIRMSRSRINDAFRLNDNSLEFLGIQPTLGPPNQPPVSAGGGGAGGGGDKTHTCPPCPAPEAAGGPSVFLFPPKPKDTLMISRTPEVTCVVVDVSHEDPEVKFNWYVDGVEVHNAKTKPREEQYNSTYRVVSVLTVLHQDWLNGKEYKCKVSNKALGAPIEKTISKAKGQPREPQVYTLPPSRDELTKNQVSLTCLVKGFYPSDIAVEWESNGQPENNYKTTPPVLDSDGSFFLYSKLTVDKSRWQQGNVFSCSVMHEALHNHYTQKSLSLSPG

SEQ ID NO: 116 - protein, 957 aa, synthetic construct
  REGION 1..957: note = ACE2-740/G8/PGLALA/R273Q
QSTIEEQAKTFLDKFNHEAEDLFYQSSLASWNYNTNITEENVQNMNNAGDKWSAFLKEQSTLAQMYPLQEIQNLTVKLQLQALQQNGSSVLSEDKSKRLNTILNTMSTIYSTGKVCNPDNPQECLLLEPGLNEIMANSLDYNERLWAWESWRSEVGKQLRPLYEEYVVLKNEMARANHYEDYGDYWRGDYEVNGVDGYDYSRGQLIEDVEHTFEEIKPLYEHLHAYVRAKLMNAYPSYISPIGCLPAHLLGDMWGQFWTNLYSLTVPFGQKPNIDVTDAMVDQAWDAQRIFKEAEKFFVSVGLPNMTQGFWENSMLTDPGNVQKAVCHPTAWDLGKGDFRILMCTKVTMDDFLTAHHEMGHIQYDMAYAAQPFLLRNGANEGFHEAVGEIMSLSAATPKHLKSIGLLSPDFQEDNETEINFLLKQALTIVGTLPFTYMLEKWRWMVFKGEIPKDQWMKKWWEMKREIVGVVEPVPHDETYCDPASLFHVSNDYSFIRYYTRTLYQFQFQEALCQAAKHEGPLHKCDISNSTEAGQKLFNMLRLGKSEPWTLALENVVGAKNMNVRPLLNYFEPLFTWLKDQNKNSFVGWSTDWSPYADQSIKVRISLKSALGDKAYEWNDNEMYLFRSSVAYAMRQYFLKVKNQMILFGEEDVRVANLKPRISFNFFVTAPKNVSDIIPRTEVEKAIRMSRSRINDAFRLNDNSLEFLGIQPTLGPPNQPPVSGGGAGGGGDKTHTCPPCPAPEAAGGPSVFLFPPKPKDTLMISRTPEVTCVVVDVSHEDPEVKFNWYVDGVEVHNAKTKPREEQYNSTYRVVSVLTVLHQDWLNGKEYKCKVSNKALGAPIEKTISKAKGQPREPQVYTLPPSRDELTKNQVSLTCLVKGFYPSDIAVEWESNGQPENNYKTTPPVLDSDGSFFLYSKLTVDKSRWQQGNVFSCSVMHEALHNHYTQKSLSLSPG

SEQ ID NO: 117 - protein, 956 aa, synthetic construct
  REGION 1..956: note = ACE2-740/G7/PGLALA/R273Q
QSTIEEQAKTFLDKFNHEAEDLFYQSSLASWNYNTNITEENVQNMNNAGDKWSAFLKEQSTLAQMYPLQEIQNLTVKLQLQALQQNGSSVLSEDKSKRLNTILNTMSTIYSTGKVCNPDNPQECLLLEPGLNEIMANSLDYNERLWAWESWRSEVGKQLRPLYEEYVVLKNEMARANHYEDYGDYWRGDYEVNGVDGYDYSRGQLIEDVEHTFEEIKPLYEHLHAYVRAKLMNAYPSYISPIGCLPAHLLGDMWGQFWTNLYSLTVPFGQKPNIDVTDAMVDQAWDAQRIFKEAEKFFVSVGLPNMTQGFWENSMLTDPGNVQKAVCHPTAWDLGKGDFRILMCTKVTMDDFLTAHHEMGHIQYDMAYAAQPFLLRNGANEGFHEAVGEIMSLSAATPKHLKSIGLLSPDFQEDNETEINFLLKQALTIVGTLPFTYMLEKWRWMVFKGEIPKDQWMKKWWEMKREIVGVVEPVPHDETYCDPASLFHVSNDYSFIRYYTRTLYQFQFQEALCQAAKHEGPLHKCDISNSTEAGQKLFNMLRLGKSEPWTLALENVVGAKNMNVRPLLNYFEPLFTWLKDQNKNSFVGWSTDWSPYADQSIKVRISLKSALGDKAYEWNDNEMYLFRSSVAYAMRQYFLKVKNQMILFGEEDVRVANLKPRISFNFFVTAPKNVSDIIPRTEVEKAIRMSRSRINDAFRLNDNSLEFLGIQPTLGPPNQPPVSGGAGGGGDKTHTCPPCPAPEAAGGPSVFLFPPKPKDTLMISRTPEVTCVVVDVSHEDPEVKFNWYVDGVEVHNAKTKPREEQYNSTYRVVSVLTVLHQDWLNGKEYKCKVSNKALGAPIEKTISKAKGQPREPQVYTLPPSRDELTKNQVSLTCLVKGFYPSDIAVEWESNGQPENNYKTTPPVLDSDGSFFLYSKLTVDKSRWQQGNVFSCSVMHEALHNHYTQKSLSLSPG

SEQ ID NO: 118 - protein, 955 aa, synthetic construct
  REGION 1..955: note = ACE2-740/G6/PGLALA/R273Q
QSTIEEQAKTFLDKFNHEAEDLFYQSSLASWNYNTNITEENVQNMNNAGDKWSAFLKEQSTLAQMYPLQEIQNLTVKLQLQALQQNGSSVLSEDKSKRLNTILNTMSTIYSTGKVCNPDNPQECLLLEPGLNEIMANSLDYNERLWAWESWRSEVGKQLRPLYEEYVVLKNEMARANHYEDYGDYWRGDYEVNGVDGYDYSRGQLIEDVEHTFEEIKPLYEHLHAYVRAKLMNAYPSYISPIGCLPAHLLGDMWGQFWTNLYSLTVPFGQKPNIDVTDAMVDQAWDAQRIFKEAEKFFVSVGLPNMTQGFWENSMLTDPGNVQKAVCHPTAWDLGKGDFRILMCTKVTMDDFLTAHHEMGHIQYDMAYAAQPFLLRNGANEGFHEAVGEIMSLSAATPKHLKSIGLLSPDFQEDNETEINFLLKQALTIVGTLPFTYMLEKWRWMVFKGEIPKDQWMKKWWEMKREIVGVVEPVPHDETYCDPASLFHVSNDYSFIRYYTRTLYQFQFQEALCQAAKHEGPLHKCDISNSTEAGQKLFNMLRLGKSEPWTLALENVVGAKNMNVRPLLNYFEPLFTWLKDQNKNSFVGWSTDWSPYADQSIKVRISLKSALGDKAYEWNDNEMYLFRSSVAYAMRQYFLKVKNQMILFGEEDVRVANLKPRISFNFFVTAPKNVSDIIPRTEVEKAIRMSRSRINDAFRLNDNSLEFLGIQPTLGPPNQPPVSGAGGGGDKTHTCPPCPAPEAAGGPSVFLFPPKPKDTLMISRTPEVTCVVVDVSHEDPEVKFNWYVDGVEVHNAKTKPREEQYNSTYRVVSVLTVLHQDWLNGKEYKCKVSNKALGAPIEKTISKAKGQPREPQVYTLPPSRDELTKNQVSLTCLVKGFYPSDIAVEWESNGQPENNYKTTPPVLDSDGSFFLYSKLTVDKSRWQQGNVFSCSVMHEALHNHYTQKSLSLSPG

SEQ ID NO: 119 - protein, 954 aa, synthetic construct
  REGION 1..954: note = ACE2-740/G5/PGLALA/R273Q
QSTIEEQAKTFLDKFNHEAEDLFYQSSLASWNYNTNITEENVQNMNNAGDKWSAFLKEQSTLAQMYPLQEIQNLTVKLQLQALQQNGSSVLSEDKSKRLNTILNTMSTIYSTGKVCNPDNPQECLLLEPGLNEIMANSLDYNERLWAWESWRSEVGKQLRPLYEEYVVLKNEMARANHYEDYGDYWRGDYEVNGVDGYDYSRGQLIEDVEHTFEEIKPLYEHLHAYVRAKLMNAYPSYISPIGCLPAHLLGDMWGQFWTNLYSLTVPFGQKPNIDVTDAMVDQAWDAQRIFKEAEKFFVSVGLPNMTQGFWENSMLTDPGNVQKAVCHPTAWDLGKGDFRILMCTKVTMDDFLTAHHEMGHIQYDMAYAAQPFLLRNGANEGFHEAVGEIMSLSAATPKHLKSIGLLSPDFQEDNETEINFLLKQALTIVGTLPFTYMLEKWRWMVFKGEIPKDQWMKKWWEMKREIVGVVEPVPHDETYCDPASLFHVSNDYSFIRYYTRTLYQFQFQEALCQAAKHEGPLHKCDISNSTEAGQKLFNMLRLGKSEPWTLALENVVGAKNMNVRPLLNYFEPLFTWLKDQNKNSFVGWSTDWSPYADQSIKVRISLKSALGDKAYEWNDNEMYLFRSSVAYAMRQYFLKVKNQMILFGEEDVRVANLKPRISFNFFVTAPKNVSDIIPRTEVEKAIRMSRSRINDAFRLNDNSLEFLGIQPTLGPPNQPPVSAGGGGDKTHTCPPCPAPEAAGGPSVFLFPPKPKDTLMISRTPEVTCVVVDVSHEDPEVKFNWYVDGVEVHNAKTKPREEQYNSTYRVVSVLTVLHQDWLNGKEYKCKVSNKALGAPIEKTISKAKGQPREPQVYTLPPSRDELTKNQVSLTCLVKGFYPSDIAVEWESNGQPENNYKTTPPVLDSDGSFFLYSKLTVDKSRWQQGNVFSCSVMHEALHNHYTQKSLSLSPG

SEQ ID NO: 120 - protein, 228 aa, synthetic construct
  REGION 1..228: note = Human IgG1 Fc domain having the N-terminal sequence CDKTHTCPPCPAPE
CDKTHTCPPCPAPELLGGPSVFLFPPKPKDTLMISRTPEVTCVVVDVSHEDPEVKFNWYVDGVEVHNAKTKPREEQYNSTYRVVSVLTVLHQDWLNGKEYKCKVSNKALPAPIEKTISKAKGQPREPQVYTLPPSRDELTKNQVSLTCLVKGFYPSDIAVEWESNGQPENNYKTTPPVLDSDGSFFLYSKLTVDKSRWQQGNVFSCSVMHEALHNHYTQKSLSLSPGK

SEQ ID NO: 121 - DNA, 684 bp, synthetic construct
  misc_feature 1..684: note = DNA encoding human IgG1 Fc domain having the N-terminal sequence CDKTHTCPPCPAPE
  source 1..684: mol_type = other DNA
tgtgacaaaactcacacatgcccaccgtgcccagcacctgaactcctgggggggccctcagtcttcctcttccccccaaaacccaaggacaccctcatgatctcccggacccctgaggtcacatgcgtggtggtggacgtgagccacgaagaccctgaggtcaagttcaactggtacgtggacggcgtggaggtgcataatgccaagacaaagccgcgggaggagcagtacaacagcacgtaccgtgtggtcagcgtcctcaccgtcctgcaccaggactggctgaatggcaaggagtacaagtgcaaggtctccaacaaagccctcccagcccccatcgagaaaaccatctccaaagccaaagggcagccccgagaaccacaggtgtacaccctgcccccatcccgggatgagctgaccaagaaccaggtcagcctgacctgcctggtcaaaggcttctatcccagcgacatcgccgtggagtgggagagcaatgggcagccggagaacaactacaagaccacgcctcccgtgctggactccgacggctccttcttcctctacagcaagctcaccgtggacaagagcaggtggcagcaggggaacgtcttctcatgctccgtgatgcatgaggctctgcacaaccactacacgcagaagagcctctccctgtctccgggtaaa

SEQ ID NO: 122 - protein, 251 aa, synthetic construct
  REGION 1..251: note = pre-Fc chimeric polypeptide having SHH signal peptide
MLLLARCLLLVLVSSLLVCSGLACDKTHTCPPCPAPELLGGPSVFLFPPKPKDTLMISRTPEVTCVVVDVSHEDPEVKFNWYVDGVEVHNAKTKPREEQYNSTYRVVSVLTVLHQDWLNGKEYKCKVSNKALPAPIEKTISKAKGQPREPQVYTLPPSRDELTKNQVSLTCLVKGFYPSDIAVEWESNGQPENNYKTTPPVLDSDGSFFLYSKLTVDKSRWQQGNVFSCSVMHEALHNHYTQKSLSLSPGK

SEQ ID NO: 123 - DNA, 785 bp, synthetic construct
  misc_feature 1..785: note = DNA encoding pre-Fc chimeric polypeptide having SHH signal peptide
  source 1..785: mol_type = other DNA
aagcttgaattcccaccatgctgctgctggcgagatgtctgctgctagtcctcgtctcctcgctgctggtatgctcgggactggcgtgtgacaaaactcacacatgcccaccgtgcccagcacctgaactcctgggggggccctcagtcttcctcttccccccaaaacccaaggacaccctcatgatctcccggacccctgaggtcacatgcgtggtggtggacgtgagccacgaagaccctgaggtcaagttcaactggtacgtggacggcgtggaggtgcataatgccaagacaaagccgcgggaggagcagtacaacagcacgtaccgtgtggtcagcgtcctcaccgtcctgcaccaggactggctgaatggcaaggagtacaagtgcaaggtctccaacaaagccctcccagcccccatcgagaaaaccatctccaaagccaaagggcagccccgagaaccacaggtgtacaccctgcccccatcccgggatgagctgaccaagaaccaggtcagcctgacctgcctggtcaaaggcttctatcccagcgacatcgccgtggagtgggagagcaatgggcagccggagaacaactacaagaccacgcctcccgtgctggactccgacggctccttcttcctctacagcaagctcaccgtggacaagagcaggtggcagcaggggaacgtcttctcatgctccgtgatgcatgaggctctgcacaaccactacacgcagaagagcctctccctgtctccgggtaaatgactcgagcggccg

SEQ ID NO: 124 - protein, 251 aa, synthetic construct
  REGION 1..251: note = pre-Fc chimeric polypeptide having IFN signal peptide
MALTFALLVALLVLSCKSSCSVGCDKTHTCPPCPAPELLGGPSVFLFPPKPKDTLMISRTPEVTCVVVDVSHEDPEVKFNWYVDGVEVHNAKTKPREEQYNSTYRVVSVLTVLHQDWLNGKEYKCKVSNKALPAPIEKTISKAKGQPREPQVYTLPPSRDELTKNQVSLTCLVKGFYPSDIAVEWESNGQPENNYKTTPPVLDSDGSFFLYSKLTVDKSRWQQGNVFSCSVMHEALHNHYTQKSLSLSPGK

SEQ ID NO: 125 - DNA, 785 bp, synthetic construct
  misc_feature 1..785: note = DNA encoding pre-Fc chimeric polypeptide having IFN signal peptide
  source 1..785: mol_type = other DNA
aagcttgaattcccaccatggccttgacctttgctttactggtggccctcctggtgctcagctgcaagtcaagctgctctgtgggctgtgacaaaactcacacatgcccaccgtgcccagcacctgaactcctgggggggccctcagtcttcctcttccccccaaaacccaaggacaccctcatgatctcccggacccctgaggtcacatgcgtggtggtggacgtgagccacgaagaccctgaggtcaagttcaactggtacgtggacggcgtggaggtgcataatgccaagacaaagccgcgggaggagcagtacaacagcacgtaccgtgtggtcagcgtcctcaccgtcctgcaccaggactggctgaatggcaaggagtacaagtgcaaggtctccaacaaagccctcccagcccccatcgagaaaaccatctccaaagccaaagggcagccccgagaaccacaggtgtacaccctgcccccatcccgggatgagctgaccaagaaccaggtcagcctgacctgcctggtcaaaggcttctatcccagcgacatcgccgtggagtgggagagcaatgggcagccggagaacaactacaagaccacgcctcccgtgctggactccgacggctccttcttcctctacagcaagctcaccgtggacaagagcaggtggcagcaggggaacgtcttctcatgctccgtgatgcatgaggctctgcacaaccactacacgcagaagagcctctccctgtctccgggtaaatgactcgagcggccg

SEQ ID NO: 126 - protein, 245 aa, synthetic construct
  REGION 1..245: note = pre-Fc chimeric polypeptide having CETP signal peptide
MLAATVLTLALLGNAHACDKTHTCPPCPAPELLGGPSVFLFPPKPKDTLMISRTPEVTCVVVDVSHEDPEVKFNWYVDGVEVHNAKTKPREEQYNSTYRVVSVLTVLHQDWLNGKEYKCKVSNKALPAPIEKTISKAKGQPREPQVYTLPPSRDELTKNQVSLTCLVKGFYPSDIAVEWESNGQPENNYKTTPPVLDSDGSFFLYSKLTVDKSRWQQGNVFSCSVMHEALHNHYTQKSLSLSPGK

SEQ ID NO: 127 - DNA, 767 bp, synthetic construct
  misc_feature 1..767: note = DNA encoding pre-Fc chimeric polypeptide having CETP signal peptide
  source 1..767: mol_type = other DNA
aagcttgaattcccaccatgctggctgccacagtcctgaccctggccctgctgggcaatgcccatgcctgtgacaaaactcacacatgcccaccgtgcccagcacctgaactcctgggggggccctcagtcttcctcttccccccaaaacccaaggacaccctcatgatctcccggacccctgaggtcacatgcgtggtggtggacgtgagccacgaagaccctgaggtcaagttcaactggtacgtggacggcgtggaggtgcataatgccaagacaaagccgcgggaggagcagtacaacagcacgtaccgtgtggtcagcgtcctcaccgtcctgcaccaggactggctgaatggcaaggagtacaagtgcaaggtctccaacaaagccctcccagcccccatcgagaaaaccatctccaaagccaaagggcagccccgagaaccacaggtgtacaccctgcccccatcccgggatgagctgaccaagaaccaggtcagcctgacctgcctggtcaaaggcttctatcccagcgacatcgccgtggagtgggagagcaatgggcagccggagaacaactacaagaccacgcctcccgtgctggactccgacggctccttcttcctctacagcaagctcaccgtggacaagagcaggtggcagcaggggaacgtcttctcatgctccgtgatgcatgaggctctgcacaaccactacacgcagaagagcctctccctgtctccgggtaaatgactcgagcggccg

SEQ ID NO: 128 - protein, 222 aa, synthetic construct; identical to SEQ ID NO: 3
  REGION 1..222: note = Human IgG1 Fc domain having the N-terminal sequence CPPCPAPE

SEQ ID NO: 129 - DNA, 666 bp, synthetic construct
  misc_feature 1..666: note = DNA encoding human IgG1 Fc domain having the N-terminal sequence CPPCPAPE
  source 1..666: mol_type = other DNA
tgcccaccgtgcccagcacctgaactcctgggggggccctcagtcttcctcttccccccaaaacccaaggacaccctcatgatctcccggacccctgaggtcacatgcgtggtggtggacgtgagccacgaagaccctgaggtcaagttcaactggtacgtggacggcgtggaggtgcataatgccaagacaaagccgcgggaggagcagtacaacagcacgtaccgtgtggtcagcgtcctcaccgtcctgcaccaggactggctgaatggcaaggagtacaagtgcaaggtctccaacaaagccctcccagcccccatcgagaaaaccatctccaaagccaaagggcagccccgagaaccacaggtgtacaccctgcccccatcccgggatgagctgaccaagaaccaggtcagcctgacctgcctggtcaaaggcttctatcccagcgacatcgccgtggagtgggagagcaatgggcagccggagaacaactacaagaccacgcctcccgtgctggactccgacggctccttcttcctctacagcaagctcaccgtggacaagagcaggtggcagcaggggaacgtcttctcatgctccgtgatgcatgaggctctgcacaaccactacacgcagaagagcctctccctgtctccgggtaaa

SEQ ID NO: 130 - protein, 245 aa, synthetic construct
  REGION 1..245: note = pre-Fc chimeric polypeptide having SHH signal peptide
MLLLARCLLLVLVSSLLVCSGLACPPCPAPELLGGPSVFLFPPKPKDTLMISRTPEVTCVVVDVSHEDPEVKFNWYVDGVEVHNAKTKPREEQYNSTYRVVSVLTVLHQDWLNGKEYKCKVSNKALPAPIEKTISKAKGQPREPQVYTLPPSRDELTKNQVSLTCLVKGFYPSDIAVEWESNGQPENNYKTTPPVLDSDGSFFLYSKLTVDKSRWQQGNVFSCSVMHEALHNHYTQKSLSLSPGK

SEQ ID NO: 131 - DNA, 767 bp, synthetic construct
  misc_feature 1..767: note = DNA encoding pre-Fc chimeric polypeptide having SHH signal peptide
  source 1..767: mol_type = other DNA
aagcttgaattcccaccatgctgctgctggcgagatgtctgctgctagtcctcgtctcctcgctgctggtatgctcgggactggcgtgcccaccgtgcccagcacctgaactcctgggggggccctcagtcttcctcttccccccaaaacccaaggacaccctcatgatctcccggacccctgaggtcacatgcgtggtggtggacgtgagccacgaagaccctgaggtcaagttcaactggtacgtggacggcgtggaggtgcataatgccaagacaaagccgcgggaggagcagtacaacagcacgtaccgtgtggtcagcgtcctcaccgtcctgcaccaggactggctgaatggcaaggagtacaagtgcaaggtctccaacaaagccctcccagcccccatcgagaaaaccatctccaaagccaaagggcagccccgagaaccacaggtgtacaccctgcccccatcccgggatgagctgaccaagaaccaggtcagcctgacctgcctggtcaaaggcttctatcccagcgacatcgccgtggagtgggagagcaatgggcagccggagaacaactacaagaccacgcctcccgtgctggactccgacggctccttcttcctctacagcaagctcaccgtggacaagagcaggtggcagcaggggaacgtcttctcatgctccgtgatgcatgaggctctgcacaaccactacacgcagaagagcctctccctgtctccgggtaaatgactcgagcggccg

SEQ ID NO: 132 - protein, 245 aa, synthetic construct
  REGION 1..245: note = pre-Fc chimeric polypeptide having IFN signal peptide
MALTFALLVALLVLSCKSSCSVGCPPCPAPELLGGPSVFLFPPKPKDTLMISRTPEVTCVVVDVSHEDPEVKFNWYVDGVEVHNAKTKPREEQYNSTYRVVSVLTVLHQDWLNGKEYKCKVSNKALPAPIEKTISKAKGQPREPQVYTLPPSRDELTKNQVSLTCLVKGFYPSDIAVEWESNGQPENNYKTTPPVLDSDGSFFLYSKLTVDKSRWQQGNVFSCSVMHEALHNHYTQKSLSLSPGK

SEQ ID NO: 133 - DNA, 767 bp, synthetic construct
  misc_feature 1..767: note = DNA encoding pre-Fc chimeric polypeptide having IFN signal peptide
  source 1..767: mol_type = other DNA
aagcttgaattcccaccatggccttgacctttgctttactggtggccctcctggtgctcagctgcaagtcaagctgctctgtgggctgcccaccgtgcccagcacctgaactcctgggggggccctcagtcttcctcttccccccaaaacccaaggacaccctcatgatctcccggacccctgaggtcacatgcgtggtggtggacgtgagccacgaagaccctgaggtcaagttcaactggtacgtggacggcgtggaggtgcataatgccaagacaaagccgcgggaggagcagtacaacagcacgtaccgtgtggtcagcgtcctcaccgtcctgcaccaggactggctgaatggcaaggagtacaagtgcaaggtctccaacaaagccctcccagcccccatcgagaaaaccatctccaaagccaaagggcagccccgagaaccacaggtgtacaccctgcccccatcccgggatgagctgaccaagaaccaggtcagcctgacctgcctggtcaaaggcttctatcccagcgacatcgccgtggagtgggagagcaatgggcagccggagaacaactacaagaccacgcctcccgtgctggactccgacggctccttcttcctctacagcaagctcaccgtggacaagagcaggtggcagcaggggaacgtcttctcatgctccgtgatgcatgaggctctgcacaaccactacacgcagaagagcctctccctgtctccgggtaaatgactcgagcggccg

SEQ ID NO: 134 - protein, 239 aa, synthetic construct
  REGION 1..239: note = pre-Fc chimeric polypeptide having CETP signal peptide
MLAATVLTLALLGNAHACPPCPAPELLGGPSVFLFPPKPKDTLMISRTPEVTCVVVDVSHEDPEVKFNWYVDGVEVHNAKTKPREEQYNSTYRVVSVLTVLHQDWLNGKEYKCKVSNKALPAPIEKTISKAKGQPREPQVYTLPPSRDELTKNQVSLTCLVKGFYPSDIAVEWESNGQPENNYKTTPPVLDSDGSFFLYSKLTVDKSRWQQGNVFSCSVMHEALHNHYTQKSLSLSPGK

SEQ ID NO: 135 - DNA, 749 bp, synthetic construct
  misc_feature 1..749: note = DNA encoding pre-Fc chimeric polypeptide having CETP signal peptide
  source 1..749: mol_type = other DNA
aagcttgaattcccaccatgctggctgccacagtcctgaccctggccctgctgggcaatgcccatgcctgcccaccgtgcccagcacctgaactcctgggggggccctcagtcttcctcttccccccaaaacccaaggacaccctcatgatctcccggacccctgaggtcacatgcgtggtggtggacgtgagccacgaagaccctgaggtcaagttcaactggtacgtggacggcgtggaggtgcataatgccaagacaaagccgcgggaggagcagtacaacagcacgtaccgtgtggtcagcgtcctcaccgtcctgcaccaggactggctgaatggcaaggagtacaagtgcaaggtctccaacaaagccctcccagcccccatcgagaaaaccatctccaaagccaaagggcagccccgagaaccacaggtgtacaccctgcccccatcccgggatgagctgaccaagaaccaggtcagcctgacctgcctggtcaaaggcttctatcccagcgacatcgccgtggagtgggagagcaatgggcagccggagaacaactacaagaccacgcctcccgtgctggactccgacggctccttcttcctctacagcaagctcaccgtggacaagagcaggtggcagcaggggaacgtcttctcatgctccgtgatgcatgaggctctgcacaaccactacacgcagaagagcctctccctgtctccgggtaaatgactcgagcggccg

SEQ ID NO: 136 - protein, 219 aa, synthetic construct
  REGION 1..219: note = Human IgG1 Fc domain having the N-terminal sequence CPAPE
CPAPELLGGPSVFLFPPKPKDTLMISRTPEVTCVVVDVSHEDPEVKFNWYVDGVEVHNAKTKPREEQYNSTYRVVSVLTVLHQDWLNGKEYKCKVSNKALPAPIEKTISKAKGQPREPQVYTLPPSRDELTKNQVSLTCLVKGFYPSDIAVEWESNGQPENNYKTTPPVLDSDGSFFLYSKLTVDKSRWQQGNVFSCSVMHEALHNHYTQKSLSLSPGK

SEQ ID NO: 137 - DNA, 657 bp, synthetic construct
  misc_feature 1..657: note = DNA encoding human IgG1 Fc domain having the N-terminal sequence CPAPE
  source 1..657: mol_type = other DNA
tgcccagcacctgaactcctgggggggccctcagtcttcctcttccccccaaaacccaaggacaccctcatgatctcccggacccctgaggtcacatgcgtggtggtggacgtgagccacgaagaccctgaggtcaagttcaactggtacgtggacggcgtggaggtgcataatgccaagacaaagccgcgggaggagcagtacaacagcacgtaccgtgtggtcagcgtcctcaccgtcctgcaccaggactggctgaatggcaaggagtacaagtgcaaggtctccaacaaagccctcccagcccccatcgagaaaaccatctccaaagccaaagggcagccccgagaaccacaggtgtacaccctgcccccatcccgggatgagctgaccaagaaccaggtcagcctgacctgcctggtcaaaggcttctatcccagcgacatcgccgtggagtgggagagcaatgggcagccggagaacaactacaagaccacgcctcccgtgctggactccgacggctccttcttcctctacagcaagctcaccgtggacaagagcaggtggcagcaggggaacgtcttctcatgctccgtgatgcatgaggctctgcacaaccactacacgcagaagagcctctccctgtctccgggtaaa

SEQ ID NO: 138 - protein, 242 aa, synthetic construct
  REGION 1..242: note = pre-Fc chimeric polypeptide having SHH signal peptide
MLLLARCLLLVLVSSLLVCSGLACPAPELLGGPSVFLFPPKPKDTLMISRTPEVTCVVVDVSHEDPEVKFNWYVDGVEVHNAKTKPREEQYNSTYRVVSVLTVLHQDWLNGKEYKCKVSNKALPAPIEKTISKAKGQPREPQVYTLPPSRDELTKNQVSLTCLVKGFYPSDIAVEWESNGQPENNYKTTPPVLDSDGSFFLYSKLTVDKSRWQQGNVFSCSVMHEALHNHYTQKSLSLSPGK

SEQ ID NO: 139 - DNA, 758 bp, synthetic construct
  misc_feature 1..758: note = DNA encoding pre-Fc chimeric polypeptide having SHH signal peptide
  source 1..758: mol_type = other DNA
aagcttgaattcccaccatgctgctgctggcgagatgtctgctgctagtcctcgtctcctcgctgctggtatgctcgggactggcgtgcccagcacctgaactcctgggggggccctcagtcttcctcttccccccaaaacccaaggacaccctcatgatctcccggacccctgaggtcacatgcgtggtggtggacgtgagccacgaagaccctgaggtcaagttcaactggtacgtggacggcgtggaggtgcataatgccaagacaaagccgcgggaggagcagtacaacagcacgtaccgtgtggtcagcgtcctcaccgtcctgcaccaggactggctgaatggcaaggagtacaagtgcaaggtctccaacaaagccctcccagcccccatcgagaaaaccatctccaaagccaaagggcagccccgagaaccacaggtgtacaccctgcccccatcccgggatgagctgaccaagaaccaggtcagcctgacctgcctggtcaaaggcttctatcccagcgacatcgccgtggagtgggagagcaatgggcagccggagaacaactacaagaccacgcctcccgtgctggactccgacggctccttcttcctctacagcaagctcaccgtggacaagagcaggtggcagcaggggaacgtcttctcatgctccgtgatgcatgaggctctgcacaaccactacacgcagaagagcctctccctgtctccgggtaaatgactcgagcggccg

SEQ ID NO: 140 - protein, 242 aa, synthetic construct
  REGION 1..242: note = pre-Fc chimeric polypeptide having IFN signal peptide
MALTFALLVALLVLSCKSSCSVGCPAPELLGGPSVFLFPPKPKDTLMISRTPEVTCVVVDVSHEDPEVKFNWYVDGVEVHNAKTKPREEQYNSTYRVVSVLTVLHQDWLNGKEYKCKVSNKALPAPIEKTISKAKGQPREPQVYTLPPSRDELTKNQVSLTCLVKGFYPSDIAVEWESNGQPENNYKTTPPVLDSDGSFFLYSKLTVDKSRWQQGNVFSCSVMHEALHNHYTQKSLSLSPGK

SEQ ID NO: 141 - DNA, 758 bp, synthetic construct
  misc_feature 1..758: note = DNA encoding pre-Fc chimeric polypeptide having IFN signal peptide
  source 1..758: mol_type = other DNA
aagcttgaattcccaccatggccttgacctttgctttactggtggccctcctggtgctcagctgcaagtcaagctgctctgtgggctgcccagcacctgaactcctgggggggccctcagtcttcctcttccccccaaaacccaaggacaccctcatgatctcccggacccctgaggtcacatgcgtggtggtggacgtgagccacgaagaccctgaggtcaagttcaactggtacgtggacggcgtggaggtgcataatgccaagacaaagccgcgggaggagcagtacaacagcacgtaccgtgtggtcagcgtcctcaccgtcctgcaccaggactggctgaatggcaaggagtacaagtgcaaggtctccaacaaagccctcccagcccccatcgagaaaaccatctccaaagccaaagggcagccccgagaaccacaggtgtacaccctgcccccatcccgggatgagctgaccaagaaccaggtcagcctgacctgcctggtcaaaggcttctatcccagcgacatcgccgtggagtgggagagcaatgggcagccggagaacaactacaagaccacgcctcccgtgctggactccgacggctccttcttcctctacagcaagctcaccgtggacaagagcaggtggcagcaggggaacgtcttctcatgctccgtgatgcatgaggctctgcacaaccactacacgcagaagagcctctccctgtctccgggtaaatgactcgagcggccg

SEQ ID NO: 142 - protein, 236 aa, synthetic construct
  REGION 1..236: note = pre-Fc chimeric polypeptide having CETP signal peptide
MLAATVLTLALLGNAHACPAPELLGGPSVFLFPPKPKDTLMISRTPEVTCVVVDVSHEDPEVKFNWYVDGVEVHNAKTKPREEQYNSTYRVVSVLTVLHQDWLNGKEYKCKVSNKALPAPIEKTISKAKGQPREPQVYTLPPSRDELTKNQVSLTCLVKGFYPSDIAVEWESNGQPENNYKTTPPVLDSDGSFFLYSKLTVDKSRWQQGNVFSCSVMHEALHNHYTQKSLSLSPGK

SEQ ID NO: 143 - DNA, 740 bp, synthetic construct
  misc_feature 1..740: note = DNA encoding pre-Fc chimeric polypeptide having CETP signal peptide
  source 1..740: mol_type = other DNA
aagcttgaattcccaccatgctggctgccacagtcctgaccctggccctgctgggcaatgcccatgcctgcccagcacctgaactcctgggggggccctcagtcttcctcttccccccaaaacccaaggacaccctcatgatctcccggacccctgaggtcacatgcgtggtggtggacgtgagccacgaagaccctgaggtcaagttcaactggtacgtggacggcgtggaggtgcataatgccaagacaaagccgcgggaggagcagtacaacagcacgtaccgtgtggtcagcgtcctcaccgtcctgcaccaggactggctgaatggcaaggagtacaagtgcaaggtctccaacaaagccctcccagcccccatcgagaaaaccatctccaaagccaaagggcagccccgagaaccacaggtgtacaccctgcccccatcccgggatgagctgaccaagaaccaggtcagcctgacctgcctggtcaaaggcttctatcccagcgacatcgccgtggagtgggagagcaatgggcagccggagaacaactacaagaccacgcctcccgtgctggactccgacggctccttcttcctctacagcaagctcaccgtggacaagagcaggtggcagcaggggaacgtcttctcatgctccgtgatgcatgaggctctgcacaaccactacacgcagaagagcctctccctgtctccgggtaaatgactcgagcggccg

SEQ ID NO: 144 - protein, 225 aa, synthetic construct
  REGION 1..225: note = Human IgG2 Fc domain having the N-terminal sequence CCVECPPCPAPE
CCVECPPCPAPPVAGPSVFLFPPKPKDTLMISRTPEVTCVVVDVSHEDPEVQFNWYVDGVEVHNAKTKPREEQFNSTFRVVSVLTVVHQDWLNGKEYKCKVSNKGLPAPIEKTISKTKGQPREPQVYTLPPSREEMTKNQVSLTCLVKGFYPSDIAVEWESNGQPENNYKTTPPMLDSDGSFFLYSKLTVDKSRWQQGNVFSCSVMHEALHNHYTQKSLSLSPGK

SEQ ID NO: 145 - DNA, 675 bp, synthetic construct
  misc_feature 1..675: note = DNA encoding human IgG2 Fc domain having the N-terminal sequence CCVECPPCPAPE
  source 1..675: mol_type = other DNA
tgttgtgtcgagtgcccaccgtgcccagcaccacctgtggcaggaccgtcagtcttcctcttccccccaaaacccaaggacaccctcatgatctcccggacccctgaggtcacgtgcgtggtggtggacgtgagccacgaagaccccgaggtccagttcaactggtacgtggacggcgtggaggtgcataatgccaagacaaagccacgggaggagcagttcaacagcacgttccgtgtggtcagcgtcctcaccgttgtgcaccaggactggctgaacggcaaggagtacaagtgcaaggtctccaacaaaggcctcccagcccccatcgagaaaaccatctccaaaaccaaagggcagccccgagaaccacaggtgtacaccctgcccccatcccgggaggagatgaccaagaaccaggtcagcctgacctgcctggtcaaaggcttctaccccagcgacatcgccgtggagtgggagagcaatgggcagccggagaacaactacaagaccacacctcccatgctggactccgacggctccttcttcctctacagcaagctcaccgtggacaagagcaggtggcagcaggggaacgtcttctcatgctccgtgatgcatgaggctctgcacaaccactacacgcagaagagcctctccctgtctccgggtaaa

SEQ ID NO: 146 - protein, 248 aa, synthetic construct
  REGION 1..248: note = pre-Fc chimeric polypeptide having SHH signal peptide
MLLLARCLLLVLVSSLLVCSGLACCVECPPCPAPPVAGPSVFLFPPKPKDTLMISRTPEVTCVVVDVSHEDPEVQFNWYVDGVEVHNAKTKPREEQFNSTFRVVSVLTVVHQDWLNGKEYKCKVSNKGLPAPIEKTISKTKGQPREPQVYTLPPSREEMTKNQVSLTCLVKGFYPSDIAVEWESNGQPENNYKTTPPMLDSDGSFFLYSKLTVDKSRWQQGNVFSCSVMHEALHNHYTQKSLSLSPGK

SEQ ID NO: 147 - DNA, 776 bp, synthetic construct
  misc_feature 1..776: note = DNA encoding pre-Fc chimeric polypeptide having SHH signal peptide
  source 1..776: mol_type = other DNA
aagcttgaattcccaccatgctgctgctggcgagatgtctgctgctagtcctcgtctcctcgctgctggtatgctcgggactggcgtgttgtgtcgagtgcccaccgtgcccagcaccacctgtggcaggaccgtcagtcttcctcttccccccaaaacccaaggacaccctcatgatctcccggacccctgaggtcacgtgcgtggtggtggacgtgagccacgaagaccccgaggtccagttcaactggtacgtggacggcgtggaggtgcataatgccaagacaaagccacgggaggagcagttcaacagcacgttccgtgtggtcagcgtcctcaccgttgtgcaccaggactggctgaacggcaaggagtacaagtgcaaggtctccaacaaaggcctcccagcccccatcgagaaaaccatctccaaaaccaaagggcagccccgagaaccacaggtgtacaccctgcccccatcccgggaggagatgaccaagaaccaggtcagcctgacctgcctggtcaaaggcttctaccccagcgacatcgccgtggagtgggagagcaatgggcagccggagaacaactacaagaccacacctcccatgctggactccgacggctccttcttcctctacagcaagctcaccgtggacaagagcaggtggcagcaggggaacgtcttctcatgctccgtgatgcatgaggctctgcacaaccactacacgcagaagagcctctccctgtctccgggtaaatgactcgagcggccg

SEQ ID NO: 148 - protein, 248 aa, synthetic construct
  REGION 1..248: note = pre-Fc chimeric polypeptide having IFN signal peptide
MALTFALLVALLVLSCKSSCSVGCCVECPPCPAPPVAGPSVFLFPPKPKDTLMISRTPEVTCVVVDVSHEDPEVQFNWYVDGVEVHNAKTKPREEQFNSTFRVVSVLTVVHQDWLNGKEYKCKVSNKGLPAPIEKTISKTKGQPREPQVYTLPPSREEMTKNQVSLTCLVKGFYPSDIAVEWESNGQPENNYKTTPPMLDSDGSFFLYSKLTVDKSRWQQGNVFSCSVMHEALHNHYTQKSLSLSPGK

SEQ ID NO: 149 - DNA, 776 bp, synthetic construct
  misc_feature 1..776: note = DNA encoding pre-Fc chimeric polypeptide having IFN signal peptide
  source 1..776: mol_type = other DNA
aagcttgaattcccaccatggccttgacctttgctttactggtggccctcctggtgctcagctgcaagtcaagctgctctgtgggctgttgtgtcgagtgcccaccgtgcccagcaccacctgtggcaggaccgtcagtcttcctcttccccccaaaacccaaggacaccctcatgatctcccggacccctgaggtcacgtgcgtggtggtggacgtgagccacgaagaccccgaggtccagttcaactggtacgtggacggcgtggaggtgcataatgccaagacaaagccacgggaggagcagttcaacagcacgttccgtgtggtcagcgtcctcaccgttgtgcaccaggactggctgaacggcaaggagtacaagtgcaaggtctccaacaaaggcctcccagcccccatcgagaaaaccatctccaaaaccaaagggcagccccgagaaccacaggtgtacaccctgcccccatcccgggaggagatgaccaagaaccaggtcagcctgacctgcctggtcaaaggcttctaccccagcgacatcgccgtggagtgggagagcaatgggcagccggagaacaactacaagaccacacctcccatgctggactccgacggctccttcttcctctacagcaagctcaccgtggacaagagcaggtggcagcaggggaacgtcttctcatgctccgtgatgcatgaggctctgcacaaccactacacgcagaagagcctctccctgtctccgggtaaatgactcgagcggccg

SEQ ID NO: 150 - protein, 242 aa, synthetic construct
  REGION 1..242: note = pre-Fc chimeric polypeptide having CETP signal peptide
MLAATVLTLALLGNAHACCVECPPCPAPPVAGPSVFLFPPKPKDTLMISRTPEVTCVVVDVSHEDPEVQFNWYVDGVEVHNAKTKPREEQFNSTFRVVSVLTVVHQDWLNGKEYKCKVSNKGLPAPIEKTISKTKGQPREPQVYTLPPSREEMTKNQVSLTCLVKGFYPSDIAVEWESNGQPENNYKTTPPMLDSDGSFFLYSKLTVDKSRWQQGNVFSCSVMHEALHNHYTQKSLSLSPGK

SEQ ID NO: 151 - DNA, 758 bp, synthetic construct
  misc_feature 1..758: note = DNA encoding pre-Fc chimeric polypeptide having CETP signal peptide
  source 1..758: mol_type = other DNA
aagcttgaattcccaccatgctggctgccacagtcctgaccctggccctgctgggcaatgcccatgcctgttgtgtcgagtgcccaccgtgcccagcaccacctgtggcaggaccgtcagtcttcctcttccccccaaaacccaaggacaccctcatgatctcccggacccctgaggtcacgtgcgtggtggtggacgtgagccacgaagaccccgaggtccagttcaactggtacgtggacggcgtggaggtgcataatgccaagacaaagccacgggaggagcagttcaacagcacgttccgtgtggtcagcgtcctcaccgttgtgcaccaggactggctgaacggcaaggagtacaagtgcaaggtctccaacaaaggcctcccagcccccatcgagaaaaccatctccaaaaccaaagggcagccccgagaaccacaggtgtacaccctgcccccatcccgggaggagatgaccaagaaccaggtcagcctgacctgcctggtcaaaggcttctaccccagcgacatcgccgtggagtgggagagcaatgggcagccggagaacaactacaagaccacacctcccatgctggactccgacggctccttcttcctctacagcaagctcaccgtggacaagagcaggtggcagcaggggaacgtcttctcatgctccgtgatgcatgaggctctgcacaaccactacacgcagaagagcctctccctgtctccgggtaaatgactcgagcggccg

SEQ ID NO: 152 - protein, 224 aa, synthetic construct
  REGION 1..224: note = Human IgG2 Fc domain having the N-terminal sequence CVECPPCPAPE
CVECPPCPAPPVAGPSVFLFPPKPKDTLMISRTPEVTCVVVDVSHEDPEVQFNWYVDGVEVHNAKTKPREEQFNSTFRVVSVLTVVHQDWLNGKEYKCKVSNKGLPAPIEKTISKTKGQPREPQVYTLPPSREEMTKNQVSLTCLVKGFYPSDIAVEWESNGQPENNYKTTPPMLDSDGSFFLYSKLTVDKSRWQQGNVFSCSVMHEALHNHYTQKSLSLSPGK

SEQ ID NO: 153 - DNA, 672 bp, synthetic construct
  misc_feature 1..672: note = DNA encoding human IgG2 Fc domain having the N-terminal sequence CVECPPCPAPE
  source 1..672: mol_type = other DNA
tgtgtcgagtgcccaccgtgcccagcaccacctgtggcaggaccgtcagtcttcctcttccccccaaaacccaaggacaccctcatgatctcccggacccctgaggtcacgtgcgtggtggtggacgtgagccacgaagaccccgaggtccagttcaactggtacgtggacggcgtggaggtgcataatgccaagacaaagccacgggaggagcagttcaacagcacgttccgtgtggtcagcgtcctcaccgttgtgcaccaggactggctgaacggcaaggagtacaagtgcaaggtctccaacaaaggcctcccagcccccatcgagaaaaccatctccaaaaccaaagggcagccccgagaaccacaggtgtacaccctgcccccatcccgggaggagatgaccaagaaccaggtcagcctgacctgcctggtcaaaggcttctaccccagcgacatcgccgtggagtgggagagcaatgggcagccggagaacaactacaagaccacacctcccatgctggactccgacggctccttcttcctctacagcaagctcaccgtggacaagagcaggtggcagcaggggaacgtcttctcatgctccgtgatgcatgaggctctgcacaaccactacacgcagaagagcctctccctgtctccgggtaaa

SEQ ID NO: 154 - protein, 247 aa, synthetic construct
  REGION 1..247: note = pre-Fc chimeric polypeptide having SHH signal peptide
MLLLARCLLLVLVSSLLVCSGLACVECPPCPAPPVAGPSVFLFPPKPKDTLMISRTPEVTCVVVDVSHEDPEVQFNWYVDGVEVHNAKTKPREEQFNSTFRVVSVLTVVHQDWLNGKEYKCKVSNKGLPAPIEKTISKTKGQPREPQVYTLPPSREEMTKNQVSLTCLVKGFYPSDIAVEWESNGQPENNYKTTPPMLDSDGSFFLYSKLTVDKSRWQQGNVFSCSVMHEALHNHYTQKSLSLSPGK

SEQ ID NO: 155 - DNA, 773 bp, synthetic construct
  misc_feature 1..773: note = DNA encoding pre-Fc chimeric polypeptide having SHH signal peptide
  source 1..773: mol_type = other DNA
aagcttgaattcccaccatgctgctgctggcgagatgtctgctgctagtcctcgtctcctcgctgctggtatgctcgggactggcgtgtgtcgagtgcccaccgtgcccagcaccacctgtggcaggaccgtcagtcttcctcttccccccaaaacccaaggacaccctcatgatctcccggacccctgaggtcacgtgcgtggtggtggacgtgagccacgaagaccccgaggtccagttcaactggtacgtggacggcgtggaggtgcataatgccaagacaaagccacgggaggagcagttcaacagcacgttccgtgtggtcagcgtcctcaccgttgtgcaccaggactggctgaacggcaaggagtacaagtgcaaggtctccaacaaaggcctcccagcccccatcgagaaaaccatctccaaaaccaaagggcagccccgagaaccacaggtgtacaccctgcccccatcccgggaggagatgaccaagaaccaggtcagcctgacctgcctggtcaaaggcttctaccccagcgacatcgccgtggagtgggagagcaatgggcagccggagaacaactacaagaccacacctcccatgctggactccgacggctccttcttcctctacagcaagctcaccgtggacaagagcaggtggcagcaggggaacgtcttctcatgctccgtgatgcatgaggctctgcacaaccactacacgcagaagagcctctccctgtctccgggtaaatgactcgagcggccg

SEQ ID NO: 156 - protein, 247 aa, synthetic construct
  REGION 1..247: note = pre-Fc chimeric polypeptide having IFN signal peptide
MALTFALLVALLVLSCKSSCSVGCVECPPCPAPPVAGPSVFLFPPKPKDTLMISRTPEVTCVVVDVSHEDPEVQFNWYVDGVEVHNAKTKPREEQFNSTFRVVSVLTVVHQDWLNGKEYKCKVSNKGLPAPIEKTISKTKGQPREPQVYTLPPSREEMTKNQVSLTCLVKGFYPSDIAVEWESNGQPENNYKTTPPMLDSDGSFFLYSKLTVDKSRWQQGNVFSCSVMHEALHNHYTQKSLSLSPGK

SEQ ID NO: 157 - DNA, 773 bp, synthetic construct
  misc_feature 1..773: note = DNA encoding pre-Fc chimeric polypeptide having IFN signal peptide
  source 1..773: mol_type = other DNA
aagcttgaattcccaccatggccttgacctttgctttactggtggccctcctggtgctcagctgcaagtcaagctgctctgtgggctgtgtcgagtgcccaccgtgcccagcaccacctgtggcaggaccgtcagtcttcctcttccccccaaaacccaaggacaccctcatgatctcccggacccctgaggtcacgtgcgtggtggtggacgtgagccacgaagaccccgaggtccagttcaactggtacgtggacggcgtggaggtgcataatgccaagacaaagccacgggaggagcagttcaacagcacgttccgtgtggtcagcgtcctcaccgttgtgcaccaggactggctgaacggcaaggagtacaagtgcaaggtctccaacaaaggcctcccagcccccatcgagaaaaccatctccaaaaccaaagggcagccccgagaaccacaggtgtacaccctgcccccatcccgggaggagatgaccaagaaccaggtcagcctgacctgcctggtcaaaggcttctaccccagcgacatcgccgtggagtgggagagcaatgggcagccggagaacaactacaagaccacacctcccatgctggactccgacggctccttcttcctctacagcaagctcaccgtggacaagagcaggtggcagcaggggaacgtcttctcatgctccgtgatgcatgaggctctgcacaaccactacacgcagaagagcctctccctgtctccgggtaaatgactcgagcggccg

SEQ ID NO: 158 - protein, 241 aa, synthetic construct
  REGION 1..241: note = pre-Fc chimeric polypeptide having CETP signal peptide
MLAATVLTLALLGNAHACVECPPCPAPPVAGPSVFLFPPKPKDTLMISRTPEVTCVVVDVSHEDPEVQFNWYVDGVEVHNAKTKPREEQFNSTFRVVSVLTVVHQDWLNGKEYKCKVSNKGLPAPIEKTISKTKGQPREPQVYTLPPSREEMTKNQVSLTCLVKGFYPSDIAVEWESNGQPENNYKTTPPMLDSDGSFFLYSKLTVDKSRWQQGNVFSCSVMHEALHNHYTQKSLSLSPGK

SEQ ID NO: 159 - DNA, 755 bp, synthetic construct
  misc_feature 1..755: note = DNA encoding pre-Fc chimeric polypeptide having CETP signal peptide
  source 1..755: mol_type = other DNA
aagcttgaattcccaccatgctggctgccacagtcctgaccctggccctgctgggcaatgcccatgcctgtgtcgagtgcccaccgtgcccagcaccacctgtggcaggaccgtcagtcttcctcttccccccaaaacccaaggacaccctcatgatctcccggacccctgaggtcacgtgcgtggtggtggacgtgagccacgaagaccccgaggtccagttcaactggtacgtggacggcgtggaggtgcataatgccaagacaaagccacgggaggagcagttcaacagcacgttccgtgtggtcagcgtcctcaccgttgtgcaccaggactggctgaacggcaaggagtacaagtgcaaggtctccaacaaaggcctcccagcccccatcgagaaaaccatctccaaaaccaaagggcagccccgagaaccacaggtgtacaccctgcccccatcccgggaggagatgaccaagaaccaggtcagcctgacctgcctggtcaaaggcttctaccccagcgacatcgccgtggagtgggagagcaatgggcagccggagaacaactacaagaccacacctcccatgctggactccgacggctccttcttcctctacagcaagctcaccgtggacaagagcaggtggcagcaggggaacgtcttctcatgctccgtgatgcatgaggctctgcacaaccactacacgcagaagagcctctccctgtctccgggtaaatgactcgagcggccg

SEQ ID NO: 160 - protein, 221 aa, synthetic construct
  REGION 1..221: note = Human IgG2 Fc domain having the N-terminal sequence CPPCPAPE
CPPCPAPPVAGPSVFLFPPKPKDTLMISRTPEVTCVVVDVSHEDPEVQFNWYVDGVEVHNAKTKPREEQFNSTFRVVSVLTVVHQDWLNGKEYKCKVSNKGLPAPIEKTISKTKGQPREPQVYTLPPSREEMTKNQVSLTCLVKGFYPSDIAVEWESNGQPENNYKTTPPMLDSDGSFFLYSKLTVDKSRWQQGNVFSCSVMHEALHNHYTQKSLSLSPGK

SEQ ID NO: 161 - DNA, 663 bp, synthetic construct
  misc_feature 1..663: note = DNA encoding human IgG2 Fc domain having the N-terminal sequence CPPCPAPE
  source 1..663: mol_type = other DNA
tgcccaccgtgcccagcaccacctgtggcaggaccgtcagtcttcctcttccccccaaaacccaaggacaccctcatgatctcccggacccctgaggtcacgtgcgtggtggtggacgtgagccacgaagaccccgaggtccagttcaactggtacgtggacggcgtggaggtgcataatgccaagacaaagccacgggaggagcagttcaacagcacgttccgtgtggtcagcgtcctcaccgttgtgcaccaggactggctgaacggcaaggagtacaagtgcaaggtctccaacaaaggcctcccagcccccatcgagaaaaccatctccaaaaccaaagggcagccccgagaaccacaggtgtacaccctgcccccatcccgggaggagatgaccaagaaccaggtcagcctgacctgcctggtcaaaggcttctaccccagcgacatcgccgtggagtgggagagcaatgggcagccggagaacaactacaagaccacacctcccatgctggactccgacggctccttcttcctctacagcaagctcaccgtggacaagagcaggtggcagcaggggaacgtcttctcatgctccgtgatgcatgaggctctgcacaaccactacacgcagaagagcctctccctgtctccgggtaaa

SEQ ID NO: 162 - protein, 244 aa, synthetic construct
  REGION 1..244: note = pre-Fc chimeric polypeptide having SHH signal peptide
MLLLARCLLLVLVSSLLVCSGLACPPCPAPPVAGPSVFLFPPKPKDTLMISRTPEVTCVVVDVSHEDPEVQFNWYVDGVEVHNAKTKPREEQFNSTFRVVSVLTVVHQDWLNGKEYKCKVSNKGLPAPIEKTISKTKGQPREPQVYTLPPSREEMTKNQVSLTCLVKGFYPSDIAVEWESNGQPENNYKTTPPMLDSDGSFFLYSKLTVDKSRWQQGNVFSCSVMHEALHNHYTQKSLSLSPGK

SEQ ID NO: 163 - DNA, 764 bp, synthetic construct
  misc_feature 1..764: note = DNA encoding pre-Fc chimeric polypeptide having SHH signal peptide
  source 1..764: mol_type = other DNA
aagcttgaattcccaccatgctgctgctggcgagatgtctgctgctagtcctcgtctcctcgctgctggtatgctcgggactggcgtgcccaccgtgcccagcaccacctgtggcaggaccgtcagtcttcctcttccccccaaaacccaaggacaccctcatgatctcccggacccctgaggtcacgtgcgtggtggtggacgtgagccacgaagaccccgaggtccagttcaactggtacgtggacggcgtggaggtgcataatgccaagacaaagccacgggaggagcagttcaacagcacgttccgtgtggtcagcgtcctcaccgttgtgcaccaggactggctgaacggcaaggagtacaagtgcaaggtctccaacaaaggcctcccagcccccatcgagaaaaccatctccaaaaccaaagggcagccccgagaaccacaggtgtacaccctgcccccatcccgggaggagatgaccaagaaccaggtcagcctgacctgcctggtcaaaggcttctaccccagcgacatcgccgtggagtgggagagcaatgggcagccggagaacaactacaagaccacacctcccatgctggactccgacggctccttcttcctctacagcaagctcaccgtggacaagagcaggtggcagcaggggaacgtcttctcatgctccgtgatgcatgaggctctgcacaaccactacacgcagaagagcctctccctgtctccgggtaaatgactcgagcggccg

SEQ ID NO: 164 - protein, 244 aa, synthetic construct
  REGION 1..244: note = pre-Fc chimeric polypeptide having IFN signal peptide
MALTFALLVALLVLSCKSSCSVGCPPCPAPPVAGPSVFLFPPKPKDTLMISRTPEVTCVVVDVSHEDPEVQFNWYVDGVEVHNAKTKPREEQFNSTFRVVSVLTVVHQDWLNGKEYKCKVSNKGLPAPIEKTISKTKGQPREPQVYTLPPSREEMTKNQVSLTCLVKGFYPSDIAVEWESNGQPENNYKTTPPMLDSDGSFFLYSKLTVDKSRWQQGNVFSCSVMHEALHNHYTQKSLSLSPGK

SEQ ID NO: 165 - DNA, 764 bp, synthetic construct
  misc_feature 1..764: note = DNA encoding pre-Fc chimeric polypeptide having IFN signal peptide
  source 1..764: mol_type = other DNA
aagcttgaattcccaccatggccttgacctttgctttactggtggccctcctggtgctcagctgcaagtcaagctgctctgtgggctgcccaccgtgcccagcaccacctgtggcaggaccgtcagtcttcctcttccccccaaaacccaaggacaccctcatgatctcccggacccctgaggtcacgtgcgtggtggtggacgtgagccacgaagaccccgaggtccagttcaactggtacgtggacggcgtggaggtgcataatgccaagacaaagccacgggaggagcagttcaacagcacgttccgtgtggtcagcgtcctcaccgttgtgcaccaggactggctgaacggcaaggagtacaagtgcaaggtctccaacaaaggcctcccagcccccatcgagaaaaccatctccaaaaccaaagggcagccccgagaaccacaggtgtacaccctgcccccatcccgggaggagatgaccaagaaccaggtcagcctgacctgcctggtcaaaggcttctaccccagcgacatcgccgtggagtgggagagcaatgggcagccggagaacaactacaagaccacacctcccatgctggactccgacggctccttcttcctctacagcaagctcaccgtggacaagagcaggtggcagcaggggaacgtcttctcatgctccgtgatgcatgaggctctgcacaaccactacacgcagaagagcctctccctgtctccgggtaaatgactcgagcggccg

SEQ ID NO: 166 - protein, 238 aa, synthetic construct
  REGION 1..238: note = pre-Fc chimeric polypeptide having CETP signal peptide
MLAATVLTLALLGNAHACPPCPAPPVAGPSVFLFPPKPKDTLMISRTPEVTCVVVDVSHEDPEVQFNWYVDGVEVHNAKTKPREEQFNSTFRVVSVLTVVHQDWLNGKEYKCKVSNKGLPAPIEKTISKTKGQPREPQVYTLPPSREEMTKNQVSLTCLVKGFYPSDIAVEWESNGQPENNYKTTPPMLDSDGSFFLYSKLTVDKSRWQQGNVFSCSVMHEALHNHYTQKSLSLSPGK

SEQ ID NO: 167 - DNA, 746 bp, synthetic construct
  misc_feature 1..746: note = DNA encoding pre-Fc chimeric polypeptide having CETP signal peptide
  source 1..746: mol_type = other DNA
aagcttgaattcccaccatgctggctgccacagtcctgaccctggccctgctgggcaatgcccatgcctgcccaccgtgcccagcaccacctgtggcaggaccgtcagtcttcctcttccccccaaaacccaaggacaccctcatgatctcccggacccctgaggtcacgtgcgtggtggtggacgtgagccacgaagaccccgaggtccagttcaactggtacgtggacggcgtggaggtgcataatgccaagacaaagccacgggaggagcagttcaacagcacgttccgtgtggtcagcgtcctcaccgttgtgcaccaggactggctgaacggcaaggagtacaagtgcaaggtctccaacaaaggcctcccagcccccatcgagaaaaccatctccaaaaccaaagggcagccccgagaaccacaggtgtacaccctgcccccatcccgggaggagatgaccaagaaccaggtcagcctgacctgcctggtcaaaggcttctaccccagcgacatcgccgtggagtgggagagcaatgggcagccggagaacaactacaagaccacacctcccatgctggactccgacggctccttcttcctctacagcaagctcaccgtggacaagagcaggtggcagcaggggaacgtcttctcatgctccgtgatgcatgaggctctgcacaaccactacacgcagaagagcctctccctgtctccgggtaaatgactcgagcggccg

SEQ ID NO: 168 - protein, 218 aa, synthetic construct
  REGION 1..218: note = Human IgG2 Fc domain having the N-terminal sequence CPAPE
CPAPPVAGPSVFLFPPKPKDTLMISRTPEVTCVVVDVSHEDPEVQFNWYVDGVEVHNAKTKPREEQFNSTFRVVSVLTVVHQDWLNGKEYKCKVSNKGLPAPIEKTISKTKGQPREPQVYTLPPSREEMTKNQVSLTCLVKGFYPSDIAVEWESNGQPENNYKTTPPMLDSDGSFFLYSKLTVDKSRWQQGNVFSCSVMHEALHNHYTQKSLSLSPGK

SEQ ID NO: 169 - DNA, 654 bp, synthetic construct
  misc_feature 1..654: note = DNA encoding human IgG2 Fc domain having the N-terminal sequence CPAPE
  source 1..654: mol_type = other DNA
tgcccagcaccacctgtggcaggaccgtcagtcttcctcttccccccaaaacccaaggacaccctcatgatctcccggacccctgaggtcacgtgcgtggtggtggacgtgagccacgaagaccccgaggtccagttcaactggtacgtggacggcgtggaggtgcataatgccaagacaaagccacgggaggagcagttcaacagcacgttccgtgtggtcagcgtcctcaccgttgtgcaccaggactggctgaacggcaaggagtacaagtgcaaggtctccaacaaaggcctcccagcccccatcgagaaaaccatctccaaaaccaaagggcagccccgagaaccacaggtgtacaccctgcccccatcccgggaggagatgaccaagaaccaggtcagcctgacctgcctggtcaaaggcttctaccccagcgacatcgccgtggagtgggagagcaatgggcagccggagaacaactacaagaccacacctcccatgctggactccgacggctccttcttcctctacagcaagctcaccgtggacaagagcaggtggcagcaggggaacgtcttctcatgctccgtgatgcatgaggctctgcacaaccactacacgcagaagagcctctccctgtctccgggtaaa

SEQ ID NO: 170 - protein, 241 aa, synthetic construct
  REGION 1..241: note = pre-Fc chimeric polypeptide having SHH signal peptide
MLLLARCLLLVLVSSLLVCSGLACPAPPVAGPSVFLFPPKPKDTLMISRTPEVTCVVVDVSHEDPEVQFNWYVDGVEVHNAKTKPREEQFNSTFRVVSVLTVVHQDWLNGKEYKCKVSNKGLPAPIEKTISKTKGQPREPQVYTLPPSREEMTKNQVSLTCLVKGFYPSDIAVEWESNGQPENNYKTTPPMLDSDGSFFLYSKLTVDKSRWQQGNVFSCSVMHEALHNHYTQKSLSLSPGK

SEQ ID NO: 171 - DNA, 755 bp, synthetic construct
  misc_feature 1..755: note = DNA encoding pre-Fc chimeric polypeptide having SHH signal peptide
  source 1..755: mol_type = other DNA
aagcttgaattcccaccatgctgctgctggcgagatgtctgctgctagtcctcgtctcctcgctgctggtatgctcgggactggcgtgcccagcaccacctgtggcaggaccgtcagtcttcctcttccccccaaaacccaaggacaccctcatgatctcccggacccctgaggtcacgtgcgtggtggtggacgtgagccacgaagaccccgaggtccagttcaactggtacgtggacggcgtggaggtgcataatgccaagacaaagccacgggaggagcagttcaacagcacgttccgtgtggtcagcgtcctcaccgttgtgcaccaggactggctgaacggcaaggagtacaagtgcaaggtctccaacaaaggcctcccagcccccatcgagaaaaccatctccaaaaccaaagggcagccccgagaaccacaggtgtacaccctgcccccatcccgggaggagatgaccaagaaccaggtcagcctgacctgcctggtcaaaggcttctaccccagcgacatcgccgtggagtgggagagcaatgggcagccggagaacaactacaagaccacacctcccatgctggactccgacggctccttcttcctctacagcaagctcaccgtggacaagagcaggtggcagcaggggaacgtcttctcatgctccgtgatgcatgaggctctgcacaaccactacacgcagaagagcctctccctgtctccgggtaaatgactcgagcggccg

SEQ ID NO: 172 - protein, 241 aa, synthetic construct
  REGION 1..241: note = pre-Fc chimeric polypeptide having IFN signal peptide
MALTFALLVALLVLSCKSSCSVGCPAPPVAGPSVFLFPPKPKDTLMISRTPEVTCVVVDVSHEDPEVQFNWYVDGVEVHNAKTKPREEQFNSTFRVVSVLTVVHQDWLNGKEYKCKVSNKGLPAPIEKTISKTKGQPREPQVYTLPPSREEMTKNQVSLTCLVKGFYPSDIAVEWESNGQPENNYKTTPPMLDSDGSFFLYSKLTVDKSRWQQGNVFSCSVMHEALHNHYTQKSLSLSPGK

SEQ ID NO: 173 - DNA, 755 bp, synthetic construct
  misc_feature 1..755: note = DNA encoding pre-Fc chimeric polypeptide having IFN signal peptide
  source 1..755: mol_type = other DNA
aagcttgaattcccaccatggccttgacctttgctttactggtggccctcctggtgctcagctgcaagtcaagctgctctgtgggctgcccagcaccacctgtggcaggaccgtcagtcttcctcttccccccaaaacccaaggacaccctcatgatctcccggacccctgaggtcacgtgcgtggtggtggacgtgagccacgaagaccccgaggtccagttcaactggtacgtggacggcgtggaggtgcataatgccaagacaaagccacgggaggagcagttcaacagcacgttccgtgtggtcagcgtcctcaccgttgtgcaccaggactggctgaacggcaaggagtacaagtgcaaggtctccaacaaaggcctcccagcccccatcgagaaaaccatctccaaaaccaaagggcagccccgagaaccacaggtgtacaccctgcccccatcccgggaggagatgaccaagaaccaggtcagcctgacctgcctggtcaaaggcttctaccccagcgacatcgccgtggagtgggagagcaatgggcagccggagaacaactacaagaccacacctcccatgctggactccgacggctccttcttcctctacagcaagctcaccgtggacaagagcaggtggcagcaggggaacgtcttctcatgctccgtgatgcatgaggctctgcacaaccactacacgcagaagagcctctccctgtctccgggtaaatgactcgagcggccg

SEQ ID NO: 174 - protein, 235 aa, synthetic construct
  REGION 1..235: note = pre-Fc chimeric polypeptide having CETP signal peptide
MLAATVLTLALLGNAHACPAPPVAGPSVFLFPPKPKDTLMISRTPEVTCVVVDVSHEDPEVQFNWYVDGVEVHNAKTKPREEQFNSTFRVVSVLTVVHQDWLNGKEYKCKVSNKGLPAPIEKTISKTKGQPREPQVYTLPPSREEMTKNQVSLTCLVKGFYPSDIAVEWESNGQPENNYKTTPPMLDSDGSFFLYSKLTVDKSRWQQGNVFSCSVMHEALHNHYTQKSLSLSPGK

SEQ ID NO: 175 - DNA, 737 bp, synthetic construct
  misc_feature 1..737: note = DNA encoding pre-Fc chimeric polypeptide having CETP signal peptide
  source 1..737: mol_type = other DNA
aagcttgaattcccaccatgctggctgccacagtcctgaccctggccctgctgggcaatgcccatgcctgcccagcaccacctgtggcaggaccgtcagtcttcctcttccccccaaaacccaaggacaccctcatgatctcccggacccctgaggtcacgtgcgtggtggtggacgtgagccacgaagaccccgaggtccagttcaactggtacgtggacggcgtggaggtgcataatgccaagacaaagccacgggaggagcagttcaacagcacgttccgtgtggtcagcgtcctcaccgttgtgcaccaggactggctgaacggcaaggagtacaagtgcaaggtctccaacaaaggcctcccagcccccatcgagaaaaccatctccaaaaccaaagggcagccccgagaaccacaggtgtacaccctgcccccatcccgggaggagatgaccaagaaccaggtcagcctgacctgcctggtcaaaggcttctaccccagcgacatcgccgtggagtgggagagcaatgggcagccggagaacaactacaagaccacacctcccatgctggactccgacggctccttcttcctctacagcaagctcaccgtggacaagagcaggtggcagcaggggaacgtcttctcatgctccgtgatgcatgaggctctgcacaaccactacacgcagaagagcctctccctgtctccgggtaaatgactcgagcggccg

SEQ ID NO: 176 - protein, 267 aa, synthetic construct
  REGION 1..267: note = Human IgG3 Fc domain having the N-terminal sequence (CPRCPEPKSDTPPP)3-CPRCPAPE
CPRCPEPKSCDTPPPCPRCPEPKSCDTPPPCPRCPEPKSCDTPPPCPRCPAPELLGGPSVFLFPPKPKDTLMISRTPEVTCVVVDVSHEDPEVQFKWYVDGVEVHNAKTKPREEQYNSTFRVVSVLTVLHQDWLNGKEYKCKVSNKALPAPIEKTISKTKGQPREPQVYTLPPSREEMTKNQVSLTCLVKGFYPSDIAVEWESSGQPENNYNTTPPMLDSDGSFFLYSKLTVDKSRWQQGNIFSCSVMHEALHNRFTQKSLSLSPGK

SEQ ID NO: 177 - DNA, 801 bp, synthetic construct
  misc_feature 1..801: note = DNA encoding human IgG3 Fc domain having the N-terminal sequence (CPRCPEPKSDTPPP)3-CPRCPAPE
  source 1..801: mol_type = other DNA
tgcccacggtgcccagagcccaaatcttgtgacacacctcccccgtgcccacggtgcccagagcccaaatcttgtgacacacctcccccatgcccacggtgcccagagcccaaatcttgtgacacacctcccccgtgcccaaggtgcccagcacctgaactcctgggaggaccgtcagtcttcctcttccccccaaaacccaaggatacccttatgatttcccggacccctgaggtcacgtgcgtggtggtggacgtgagccacgaagaccccgaggtccagttcaagtggtacgtggacggcgtggaggtgcataatgccaagacaaagccgcgggaggagcagtacaacagcacgttccgtgtggtcagcgtcctcaccgtcctgcaccaggactggctgaacggcaaggagtacaagtgcaaggtctccaacaaagccctcccagcccccatcgagaaaaccatctccaaaaccaaaggacagccccgagaaccacaggtgtacaccctgcccccatcccgggaggagatgaccaagaaccaggtcagcctgacctgcctggtcaaaggcttctaccccagcgacatcgccgtggagtgggagagcagcgggcagccggagaacaactacaacaccacgcctcccatgctggactccgacggctccttcttcctctacagcaagctcaccgtggacaagagcaggtggcagcaggggaacatcttctcatgctccgtgatgcatgaggctctgcacaaccgcttcacgcagaagagcctctccctgtctccgggtaaa

SEQ ID NO: 178 - protein, 290 aa, synthetic construct
  REGION 1..290: note = pre-Fc chimeric polypeptide having SHH signal peptide
MLLLARCLLLVLVSSLLVCSGLACPRCPEPKSCDTPPPCPRCPEPKSCDTPPPCPRCPEPKSCDTPPPCPRCPAPELLGGPSVFLFPPKPKDTLMISRTPEVTCVVVDVSHEDPEVQFKWYVDGVEVHNAKTKPREEQYNSTFRVVSVLTVLHQDWLNGKEYKCKVSNKALPAPIEKTISKTKGQPREPQVYTLPPSREEMTKNQVSLTCLVKGFYPSDIAVEWESSGQPENNYNTTPPMLDSDGSFFLYSKLTVDKSRWQQGNIFSCSVMHEALHNRFTQKSLSLSPGK

SEQ ID NO: 179 - DNA, 902 bp, synthetic construct
  misc_feature 1..902: note = DNA encoding pre-Fc chimeric polypeptide having SHH signal peptide
  source 1..902: mol_type = other DNA
aagcttgaattcccaccatgctgctgctggcgagatgtctgctgctagtcctcgtctcctcgctgctggtatgctcgggactggcgtgcccacggtgcccagagcccaaatcttgtgacacacctcccccgtgcccacggtgcccagagcccaaatcttgtgacacacctcccccatgcccacggtgcccagagcccaaatcttgtgacacacctcccccgtgcccaaggtgcccagcacctgaactcctgggaggaccgtcagtcttcctcttccccccaaaacccaaggatacccttatgatttcccggacccctgaggtcacgtgcgtggtggtggacgtgagccacgaagaccccgaggtccagttcaagtggtacgtggacggcgtggaggtgcataatgccaagacaaagccgcgggaggagcagtacaacagcacgttccgtgtggtcagcgtcctcaccgtcctgcaccaggactggctgaacggcaaggagtacaagtgcaaggtctccaacaaagccctcccagcccccatcgagaaaaccatctccaaaaccaaaggacagccccgagaaccacaggtgtacaccctgcccccatcccgggaggagatgaccaagaaccaggtcagcctgacctgcctggtcaaaggcttctaccccagcgacatcgccgtggagtgggagagcagcgggcagccggagaacaactacaacaccacgcctcccatgctggactccgacggctccttcttcctctacagcaagctcaccgtggacaagagcaggtggcagcaggggaacatcttctcatgctccgtgatgcatgaggctctgcacaaccgcttcacgcagaagagcctctccctgtctccgggtaaatgactcgagcggccg

SEQ ID NO: 180 - protein, 290 aa, synthetic construct
  REGION 1..290: note = pre-Fc chimeric polypeptide having IFN signal peptide
MALTFALLVALLVLSCKSSCSVGCPRCPEPKSCDTPPPCPRCPEPKSCDTPPPCPRCPEPKSCDTPPPCPRCPAPELLGGPSVFLFPPKPKDTLMISRTPEVTCVVVDVSHEDPEVQFKWYVDGVEVHNAKTKPREEQYNSTFRVVSVLTVLHQDWLNGKEYKCKVSNKALPAPIEKTISKTKGQPREPQVYTLPPSREEMTKNQVSLTCLVKGFYPSDIAVEWESSGQPENNYNTTPPMLDSDGSFFLYSKLTVDKSRWQQGNIFSCSVMHEALHNRFTQKSLSLSPGK

SEQ ID NO: 181 - DNA, 902 bp, synthetic construct
  misc_feature 1..902: note = DNA encoding pre-Fc chimeric polypeptide having IFN signal peptide
  source 1..902: mol_type = other DNA
aagcttgaattcccaccatggccttgacctttgctttactggtggccctcctggtgctcagctgcaagtcaagctgctctgtgggctgcccacggtgcccagagcccaaatcttgtgacacacctcccccgtgcccacggtgcccagagcccaaatcttgtgacacacctcccccatgcccacggtgcccagagcccaaatcttgtgacacacctcccccgtgcccaaggtgcccagcacctgaactcctgggaggaccgtcagtcttcctcttccccccaaaacccaaggatacccttatgatttcccggacccctgaggtcacgtgcgtggtggtggacgtgagccacgaagaccccgaggtccagttcaagtggtacgtggacggcgtggaggtgcataatgccaagacaaagccgcgggaggagcagtacaacagcacgttccgtgtggtcagcgtcctcaccgtcctgcaccaggactggctgaacggcaaggagtacaagtgcaaggtctccaacaaagccctcccagcccccatcgagaaaaccatctccaaaaccaaaggacagccccgagaaccacaggtgtacaccctgcccccatcccgggaggagatgaccaagaaccaggtcagcctgacctgcctggtcaaaggcttctaccccagcgacatcgccgtggagtgggagagcagcgggcagccggagaacaactacaacaccacgcctcccatgctggactccgacggctccttcttcctctacagcaagctcaccgtggacaagagcaggtggcagcaggggaacatcttctcatgctccgtgatgcatgaggctctgcacaaccgcttcacgcagaagagcctctccctgtctccgggtaaatgactcgagcggccg

SEQ ID NO: 182 - protein, 284 aa, synthetic construct
  REGION 1..284: note = pre-Fc chimeric polypeptide having CETP signal peptide
MLAATVLTLALLGNAHACPRCPEPKSCDTPPPCPRCPEPKSCDTPPPCPRCPEPKSCDTPPPCPRCPAPELLGGPSVFLFPPKPKDTLMISRTPEVTCVVVDVSHEDPEVQFKWYVDGVEVHNAKTKPREEQYNSTFRVVSVLTVLHQDWLNGKEYKCKVSNKALPAPIEKTISKTKGQPREPQVYTLPPSREEMTKNQVSLTCLVKGFYPSDIAVEWESSGQPENNYNTTPPMLDSDGSFFLYSKLTVDKSRWQQGNIFSCSVMHEALHNRFTQKSLSLSPGK

SEQ ID NO: 183 - DNA, 884 bp, synthetic construct
  misc_feature 1..884: note = DNA encoding pre-Fc chimeric polypeptide having CETP signal peptide
  source 1..884: mol_type = other DNA
aagcttgaattcccaccatgctggctgccacagtcctgaccctggccctgctgggcaatgcccatgcctgcccacggtgcccagagcccaaatcttgtgacacacctcccccgtgcccacggtgcccagagcccaaatcttgtgacacacctcccccatgcccacggtgcccagagcccaaatcttgtgacacacctcccccgtgcccaaggtgcccagcacctgaactcctgggaggaccgtcagtcttcctcttccccccaaaacccaaggatacccttatgatttcccggacccctgaggtcacgtgcgtggtggtggacgtgagccacgaagaccccgaggtccagttcaagtggtacgtggacggcgtggaggtgcataatgccaagacaaagccgcgggaggagcagtacaacagcacgttccgtgtggtcagcgtcctcaccgtcctgcaccaggactggctgaacggcaaggagtacaagtgcaaggtctccaacaaagccctcccagcccccatcgagaaaaccatctccaaaaccaaaggacagccccgagaaccacaggtgtacaccctgcccccatcccgggaggagatgaccaagaaccaggtcagcctgacctgcctggtcaaaggcttctaccccagcgacatcgccgtggagtgggagagcagcgggcagccggagaacaactacaacaccacgcctcccatgctggactccgacggctccttcttcctctacagcaagctcaccgtggacaagagcaggtggcagcaggggaacatcttctcatgctccgtgatgcatgaggctctgcacaaccgcttcacgcagaagagcctctccctgtctccgggtaaatgactcgagcggccg

SEQ ID NO: 184 - protein, 222 aa, synthetic construct
  REGION 1..222: note = Human IgG3 Fc domain having the N-terminal sequence CPRCPAPE
CPRCPAPELLGGPSVFLFPPKPKDTLMISRTPEVTCVVVDVSHEDPEVQFKWYVDGVEVHNAKTKPREEQYNSTFRVVSVLTVLHQDWLNGKEYKCKVSNKALPAPIEKTISKTKGQPREPQVYTLPPSREEMTKNQVSLTCLVKGFYPSDIAVEWESSGQPENNYNTTPPMLDSDGSFFLYSKLTVDKSRWQQGNIFSCSVMHEALHNRFTQKSLSLSPGK

SEQ ID NO: 185 - DNA, 681 bp, synthetic construct
  misc_feature 1..681: note = DNA encoding human IgG3 Fc domain having the N-terminal sequence CPRCPAPE
  source 1..681: mol_type = other DNA
tgcccaaggtgcccagcacctgaactcctgggaggaccgtcagtcttcctcttccccccaaaacccaaggatacccttatgatttcccggacccctgaggtcacgtgcgtggtggtggacgtgagccacgaagaccccgaggtccagttcaagtggtacgtggacggcgtggaggtgcataatgccaagacaaagccgcgggaggagcagtacaacagcacgttccgtgtggtcagcgtcctcaccgtcctgcaccaggactggctgaacggcaaggagtacaagtgcaaggtctccaacaaagccctcccagcccccatcgagaaaaccatctccaaaaccaaaggacagccccgagaaccacaggtgtacaccctgcccccatcccgggaggagatgaccaagaaccaggtcagcctgacctgcctggtcaaaggcttctaccccagcgacatcgccgtggagtgggagagcagcgggcagccggagaacaactacaacaccacgcctcccatgctggactccgacggctccttcttcctctacagcaagctcaccgtggacaagagcaggtggcagcaggggaacatcttctcatgctccgtgatgcatgaggctctgcacaaccgcttcacgcagaagagcctctccctgtctccgggtaaatgactcgagcggccg

SEQ ID NO: 186 - protein, 245 aa, synthetic construct
  REGION 1..245: note = pre-Fc chimeric polypeptide having SHH signal peptide
MLLLARCLLLVLVSSLLVCSGLACPRCPAPELLGGPSVFLFPPKPKDTLMISRTPEVTCVVVDVSHEDPEVQFKWYVDGVEVHNAKTKPREEQYNSTFRVVSVLTVLHQDWLNGKEYKCKVSNKALPAPIEKTISKTKGQPREPQVYTLPPSREEMTKNQVSLTCLVKGFYPSDIAVEWESSGQPENNYNTTPPMLDSDGSFFLYSKLTVDKSRWQQGNIFSCSVMHEALHNRFTQKSLSLSPGK

SEQ ID NO: 187 - DNA, 767 bp, synthetic construct
  misc_feature 1..767: note = DNA encoding pre-Fc chimeric polypeptide having SHH signal peptide
  source 1..767: mol_type = other DNA
aagcttgaattcccaccatgctgctgctggcgagatgtctgctgctagtcctcgtctcctcgctgctggtatgctcgggactggcgtgcccaaggtgcccagcacctgaactcctgggaggaccgtcagtcttcctcttccccccaaaacccaaggatacccttatgatttcccggacccctgaggtcacgtgcgtggtggtggacgtgagccacgaagaccccgaggtccagttcaagtggtacgtggacggcgtggaggtgcataatgccaagacaaagccgcgggaggagcagtacaacagcacgttccgtgtggtcagcgtcctcaccgtcctgcaccaggactggctgaacggcaaggagtacaagtgcaaggtctccaacaaagccctcccagcccccatcgagaaaaccatctccaaaaccaaaggacagccccgagaaccacaggtgtacaccctgcccccatcccgggaggagatgaccaagaaccaggtcagcctgacctgcctggtcaaaggcttctaccccagcgacatcgccgtggagtgggagagcagcgggcagccggagaacaactacaacaccacgcctcccatgctggactccgacggctccttcttcctctacagcaagctcaccgtggacaagagcaggtggcagcaggggaacatcttctcatgctccgtgatgcatgaggctctgcacaaccgcttcacgcagaagagcctctccctgtctccgggtaaatgactcgagcggccg

SEQ ID NO: 188 - protein, 245 aa, synthetic construct
  REGION 1..245: note = pre-Fc chimeric polypeptide having IFN signal peptide
MALTFALLVALLVLSCKSSCSVGCPRCPAPELLGGPSVFLFPPKPKDTLMISRTPEVTCVVVDVSHEDPEVQFKWYVDGVEVHNAKTKPREEQYNSTFRVVSVLTVLHQDWLNGKEYKCKVSNKALPAPIEKTISKTKGQPREPQVYTLPPSREEMTKNQVSLTCLVKGFYPSDIAVEWESSGQPENNYNTTPPMLDSDGSFFLYSKLTVDKSRWQQGNIFSCSVMHEALHNRFTQKSLSLSPGK

SEQ ID NO: 189 - DNA, 767 bp, synthetic construct
  misc_feature 1..767: note = DNA encoding pre-Fc chimeric polypeptide having IFN signal peptide
  source 1..767: mol_type = other DNA
aagcttgaattcccaccatggccttgacctttgctttactggtggccctcctggtgctcagctgcaagtcaagctgctctgtgggctgcccaaggtgcccagcacctgaactcctgggaggaccgtcagtcttcctcttccccccaaaacccaaggatacccttatgatttcccggacccctgaggtcacgtgcgtggtggtggacgtgagccacgaagaccccgaggtccagttcaagtggtacgtggacggcgtggaggtgcataatgccaagacaaagccgcgggaggagcagtacaacagcacgttccgtgtggtcagcgtcctcaccgtcctgcaccaggactggctgaacggcaaggagtacaagtgcaaggtctccaacaaagccctcccagcccccatcgagaaaaccatctccaaaaccaaaggacagccccgagaaccacaggtgtacaccctgcccccatcccgggaggagatgaccaagaaccaggtcagcctgacctgcctggtcaaaggcttctaccccagcgacatcgccgtggagtgggagagcagcgggcagccggagaacaactacaacaccacgcctcccatgctggactccgacggctccttcttcctctacagcaagctcaccgtggacaagagcaggtggcagcaggggaacatcttctcatgctccgtgatgcatgaggctctgcacaaccgcttcacgcagaagagcctctccctgtctccgggtaaatgactcgagcggccg

SEQ ID NO: 190 - protein, 239 aa, synthetic construct
  REGION 1..239: note = pre-Fc chimeric polypeptide having CETP signal peptide
MLAATVLTLALLGNAHACPRCPAPELLGGPSVFLFPPKPKDTLMISRTPEVTCVVVDVSHEDPEVQFKWYVDGVEVHNAKTKPREEQYNSTFRVVSVLTVLHQDWLNGKEYKCKVSNKALPAPIEKTISKTKGQPREPQVYTLPPSREEMTKNQVSLTCLVKGFYPSDIAVEWESSGQPENNYNTTPPMLDSDGSFFLYSKLTVDKSRWQQGNIFSCSVMHEALHNRFTQKSLSLSPGK

SEQ ID NO: 191 - DNA, 749 bp, synthetic construct
  misc_feature 1..749: note = DNA encoding pre-Fc chimeric polypeptide having CETP signal peptide
  source 1..749: mol_type = other DNA
aagcttgaattcccaccatgctggctgccacagtcctgaccctggccctgctgggcaatgcccatgcctgcccaaggtgcccagcacctgaactcctgggaggaccgtcagtcttcctcttccccccaaaacccaaggatacccttatgatttcccggacccctgaggtcacgtgcgtggtggtggacgtgagccacgaagaccccgaggtccagttcaagtggtacgtggacggcgtggaggtgcataatgccaagacaaagccgcgggaggagcagtacaacagcacgttccgtgtggtcagcgtcctcaccgtcctgcaccaggactggctgaacggcaaggagtacaagtgcaaggtctccaacaaagccctcccagcccccatcgagaaaaccatctccaaaaccaaaggacagccccgagaaccacaggtgtacaccctgcccccatcccgggaggagatgaccaagaaccaggtcagcctgacctgcctggtcaaaggcttctaccccagcgacatcgccgtggagtgggagagcagcgggcagccggagaacaactacaacaccacgcctcccatgctggactccgacggctccttcttcctctacagcaagctcaccgtggacaagagcaggtggcagcaggggaacatcttctcatgctccgtgatgcatgaggctctgcacaaccgcttcacgcagaagagcctctccctgtctccgggtaaatgactcgagcggccg

SEQ ID NO: 192 - protein, 219 aa, synthetic construct
  REGION 1..219: note = Human IgG3 Fc domain having the N-terminal sequence CPAPE
CPAPELLGGPSVFLFPPKPKDTLMISRTPEVTCVVVDVSHEDPEVQFKWYVDGVEVHNAKTKPREEQYNSTFRVVSVLTVLHQDWLNGKEYKCKVSNKALPAPIEKTISKTKGQPREPQVYTLPPSREEMTKNQVSLTCLVKGFYPSDIAVEWESSGQPENNYNTTPPMLDSDGSFFLYSKLTVDKSRWQQGNIFSCSVMHEALHNRFTQKSLSLSPGK

SEQ ID NO: 193 - DNA, 672 bp, synthetic construct
  misc_feature 1..672: note = DNA encoding human IgG3 Fc domain having the N-terminal sequence CPAPE
  source 1..672: mol_type = other DNA
tgcccagcacctgaactcctgggaggaccgtcagtcttcctcttccccccaaaacccaaggatacccttatgatttcccggacccctgaggtcacgtgcgtggtggtggacgtgagccacgaagaccccgaggtccagttcaagtggtacgtggacggcgtggaggtgcataatgccaagacaaagccgcgggaggagcagtacaacagcacgttccgtgtggtcagcgtcctcaccgtcctgcaccaggactggctgaacggcaaggagtacaagtgcaaggtctccaacaaagccctcccagcccccatcgagaaaaccatctccaaaaccaaaggacagccccgagaaccacaggtgtacaccctgcccccatcccgggaggagatgaccaagaaccaggtcagcctgacctgcctggtcaaaggcttctaccccagcgacatcgccgtggagtgggagagcagcgggcagccggagaacaactacaacaccacgcctcccatgctggactccgacggctccttcttcctctacagcaagctcaccgtggacaagagcaggtggcagcaggggaacatcttctcatgctccgtgatgcatgaggctctgcacaaccgcttcacgcagaagagcctctccctgtctccgggtaaatgactcgagcggccg

SEQ ID NO: 194 - protein, 242 aa, synthetic construct
  REGION 1..242: note = pre-Fc chimeric polypeptide having SHH signal peptide
MLLLARCLLLVLVSSLLVCSGLACPAPELLGGPSVFLFPPKPKDTLMISRTPEVTCVVVDVSHEDPEVQFKWYVDGVEVHNAKTKPREEQYNSTFRVVSVLTVLHQDWLNGKEYKCKVSNKALPAPIEKTISKTKGQPREPQVYTLPPSREEMTKNQVSLTCLVKGFYPSDIAVEWESSGQPENNYNTTPPMLDSDGSFFLYSKLTVDKSRWQQGNIFSCSVMHEALHNRFTQKSLSLSPGK

SEQ ID NO: 195 - DNA, 758 bp, synthetic construct
  misc_feature 1..758: note = DNA encoding pre-Fc chimeric polypeptide having SHH signal peptide
  source 1..758: mol_type = other DNA
aagcttgaattcccaccatgctgctgctggcgagatgtctgctgctagtcctcgtctcctcgctgctggtatgctcgggactggcgtgcccagcacctgaactcctgggaggaccgtcagtcttcctcttccccccaaaacccaaggatacccttatgatttcccggacccctgaggtcacgtgcgtggtggtggacgtgagccacgaagaccccgaggtccagttcaagtggtacgtggacggcgtggaggtgcataatgccaagacaaagccgcgggaggagcagtacaacagcacgttccgtgtggtcagcgtcctcaccgtcctgcaccaggactggctgaacggcaaggagtacaagtgcaaggtctccaacaaagccctcccagcccccatcgagaaaaccatctccaaaaccaaaggacagccccgagaaccacaggtgtacaccctgcccccatcccgggaggagatgaccaagaaccaggtcagcctgacctgcctggtcaaaggcttctaccccagcgacatcgccgtggagtgggagagcagcgggcagccggagaacaactacaacaccacgcctcccatgctggactccgacggctccttcttcctctacagcaagctcaccgtggacaagagcaggtggcagcaggggaacatcttctcatgctccgtgatgcatgaggctctgcacaaccgcttcacgcagaagagcctctccctgtctccgggtaaatgactcgagcggccg

SEQ ID NO: 196 - protein, 242 aa, synthetic construct
  REGION 1..242: note = pre-Fc chimeric polypeptide having IFN signal peptide
MALTFALLVALLVLSCKSSCSVGCPAPELLGGPSVFLFPPKPKDTLMISRTPEVTCVVVDVSHEDPEVQFKWYVDGVEVHNAKTKPREEQYNSTFRVVSVLTVLHQDWLNGKEYKCKVSNKALPAPIEKTISKTKGQPREPQVYTLPPSREEMTKNQVSLTCLVKGFYPSDIAVEWESSGQPENNYNTTPPMLDSDGSFFLYSKLTVDKSRWQQGNIFSCSVMHEALHNRFTQKSLSLSPGK

SEQ ID NO: 197 - DNA, 758 bp, synthetic construct
  misc_feature 1..758: note = DNA encoding pre-Fc chimeric polypeptide having IFN signal peptide
  source 1..758: mol_type = other DNA
aagcttgaattcccaccatggccttgacctttgctttactggtggccctcctggtgctcagctgcaagtcaagctgctctgtgggctgcccagcacctgaactcctgggaggaccgtcagtcttcctcttccccccaaaacccaaggatacccttatgatttcccggacccctgaggtcacgtgcgtggtggtggacgtgagccacgaagaccccgaggtccagttcaagtggtacgtggacggcgtggaggtgcataatgccaagacaaagccgcgggaggagcagtacaacagcacgttccgtgtggtcagcgtcctcaccgtcctgcaccaggactggctgaacggcaaggagtacaagtgcaaggtctccaacaaagccctcccagcccccatcgagaaaaccatctccaaaaccaaaggacagccccgagaaccacaggtgtacaccctgcccccatcccgggaggagatgaccaagaaccaggtcagcctgacctgcctggtcaaaggcttctaccccagcgacatcgccgtggagtgggagagcagcgggcagccggagaacaactacaacaccacgcctcccatgctggactccgacggctccttcttcctctacagcaagctcaccgtggacaagagcaggtggcagcaggggaacatcttctcatgctccgtgatgcatgaggctctgcacaaccgcttcacgcagaagagcctctccctgtctccgggtaaatgactcgagcggccg

SEQ ID NO: 198 - protein, 235 aa, synthetic construct
  REGION 1..235: note = pre-Fc chimeric polypeptide having CETP signal peptide
MLAATVLTLALLGNAHACPAPELLGGPSVFLFPPKPKDTLMISRTPEVTCVVVDVSHEDPEVQFKWYVDGVEVHNAKTKPREEQYNSTFRVVSVLTVLHQDWLNGKEYKCKVSNKALPAPIEKTISKTKGQPREPQVYTLPPSREEMTKNQVSLTCLVKGFYPSDIAVEWESSGQPENNYNTTPPMLDSDGSFFLYSKLTVDKSRWQQGNIFSCSVMHEALHNRFTQKSLSLSPG

SEQ ID NO: 199 - DNA, 740 bp, synthetic construct
  misc_feature 1..740: note = DNA encoding pre-Fc chimeric polypeptide having CETP signal peptide
  source 1..740: mol_type = other DNA
aagcttgaattcccaccatgctggctgccacagtcctgaccctggccctgctgggcaatgcccatgcctgcccagcacctgaactcctgggaggaccgtcagtcttcctcttccccccaaaacccaaggatacccttatgatttcccggacccctgaggtcacgtgcgtggtggtggacgtgagccacgaagaccccgaggtccagttcaagtggtacgtggacggcgtggaggtgcataatgccaagacaaagccgcgggaggagcagtacaacagcacgttccgtgtggtcagcgtcctcaccgtcctgcaccaggactggctgaacggcaaggagtacaagtgcaaggtctccaacaaagccctcccagcccccatcgagaaaaccatctccaaaaccaaaggacagccccgagaaccacaggtgtacaccctgcccccatcccgggaggagatgaccaagaaccaggtcagcctgacctgcctggtcaaaggcttctaccccagcgacatcgccgtggagtgggagagcagcgggcagccggagaacaactacaacaccacgcctcccatgctggactccgacggctccttcttcctctacagcaagctcaccgtggacaagagcaggtggcagcaggggaacatcttctcatgctccgtgatgcatgaggctctgcacaaccgcttcacgcagaagagcctctccctgtctccgggtaaatgactcgagcggccg

SEQ ID NO: 200 - protein, 222 aa, synthetic construct
  REGION 1..222: note = Human IgG4 Fc domain having the N-terminal sequence CPSCPAPE
CPSCPAPEFLGGPSVFLFPPKPKDTLMISRTPEVTCVVVDVSQEDPEVQFNWYVDGVEVHNAKTKPREEQFNSTYRVVSVLTVLHQDWLNGKEYKCKVSNKGLPSSIEKTISKAKGQPREPQVYTLPPSQEEMTKNQVSLTCLVKGFYPSDIAVEWESNGQPENNYKTTPPVLDSDGSFFLYSRLTVDKSRWQEGNVFSCSVMHEALHNHYTQKSLSLSLGK

SEQ ID NO: 201 - DNA, 666 bp, synthetic construct
  misc_feature 1..666: note = DNA encoding human IgG4 Fc domain having the N-terminal sequence CPSCPAPE
  source 1..666: mol_type = other DNA
tgcccatcatgcccagcacctgagttcctggggggaccatcagtcttcctgttccccccaaaacccaaggacactctcatgatctcccggacccctgaggtcacgtgcgtggtggtggacgtgagccaggaagaccccgaggtccagttcaactggtacgtggatggcgtggaggtgcataatgccaagacaaagccgcgggaggagcagttcaacagcacgtaccgtgtggtcagcgtcctcaccgtcctgcaccaggactggctgaacggcaaggagtacaagtgcaaggtctccaacaaaggcctcccgtcctccatcgagaaaaccatctccaaagccaaagggcagccccgagagccacaggtgtacaccctgcccccatcccaggaggagatgaccaagaaccaggtcagcctgacctgcctggtcaaaggcttctaccccagcgacatcgccgtggagtgggagagcaatgggcagccggagaacaactacaagaccacgcctcccgtgctggactccgacggctccttcttcctctacagcaggctaaccgtggacaagagcaggtggcaggaggggaatgtcttctcatgctccgtgatgcatgaggctctgcacaaccactacacacagaagagcctctccctgtctctgggtaaa

SEQ ID NO: 202 - protein, 245 aa, synthetic construct
  REGION 1..245: note = pre-Fc chimeric polypeptide having a SHH signal peptide
MLLLARCLLLVLVSSLLVCSGLACPSCPAPEFLGGPSVFLFPPKPKDTLMISRTPEVTCVVVDVSQEDPEVQFNWYVDGVEVHNAKTKPREEQFNSTYRVVSVLTVLHQDWLNGKEYKCKVSNKGLPSSIEKTISKAKGQPREPQVYTLPPSQEEMTKNQVSLTCLVKGFYPSDIAVEWESNGQPENNYKTTPPVLDSDGSFFLYSRLTVDKSRWQEGNVFSCSVMHEALHNHYTQKSLSLSLGK

SEQ ID NO: 203 - DNA, 767 bp, synthetic construct
  misc_feature 1..767: note = DNA encoding pre-Fc chimeric polypeptide having a SHH signal peptide
  source 1..767: mol_type = other DNA
aagcttgaattcccaccatgctgctgctggcgagatgtctgctgctagtcctcgtctcctcgctgctggtatgctcgggactggcgtgcccatcatgcccagcacctgagttcctggggggaccatcagtcttcctgttccccccaaaacccaaggacactctcatgatctcccggacccctgaggtcacgtgcgtggtggtggacgtgagccaggaagaccccgaggtccagttcaactggtacgtggatggcgtggaggtgcataatgccaagacaaagccgcgggaggagcagttcaacagcacgtaccgtgtggtcagcgtcctcaccgtcctgcaccaggactggctgaacggcaaggagtacaagtgcaaggtctccaacaaaggcctcccgtcctccatcgagaaaaccatctccaaagccaaagggcagccccgagagccacaggtgtacaccctgcccccatcccaggaggagatgaccaagaaccaggtcagcctgacctgcctggtcaaaggcttctaccccagcgacatcgccgtggagtgggagagcaatgggcagccggagaacaactacaagaccacgcctcccgtgctggactccgacggctccttcttcctctacagcaggctaaccgtggacaagagcaggtggcaggaggggaatgtcttctcatgctccgtgatgcatgaggctctgcacaaccactacacacagaagagcctctccctgtctctgggtaaatgactcgagcggccg

SEQ ID NO: 204 - protein, 245 aa, synthetic construct
  REGION 1..245: note = pre-Fc chimeric polypeptide having a IFN signal peptide
MALTFALLVALLVLSCKSSCSVGCPSCPAPEFLGGPSVFLFPPKPKDTLMISRTPEVTCVVVDVSQEDPEVQFNWYVDGVEVHNAKTKPREEQFNSTYRVVSVLTVLHQDWLNGKEYKCKVSNKGLPSSIEKTISKAKGQPREPQVYTLPPSQEEMTKNQVSLTCLVKGFYPSDIAVEWESNGQPENNYKTTPPVLDSDGSFFLYSRLTVDKSRWQEGNVFSCSVMHEALHNHYTQKSLSLSLGK

SEQ ID NO: 205 - DNA, 767 bp, synthetic construct
  misc_feature 1..767: note = DNA encoding pre-Fc chimeric polypeptide having a IFN signal peptide
  source 1..767: mol_type = other DNA
aagcttgaattcccaccatggccttgacctttgctttactggtggccctcctggtgctcagctgcaagtcaagctgctctgtgggctgcccatcatgcccagcacctgagttcctggggggaccatcagtcttcctgttccccccaaaacccaaggacactctcatgatctcccggacccctgaggtcacgtgcgtggtggtggacgtgagccaggaagaccccgaggtccagttcaactggtacgtggatggcgtggaggtgcataatgccaagacaaagccgcgggaggagcagttcaacagcacgtaccgtgtggtcagcgtcctcaccgtcctgcaccaggactggctgaacggcaaggagtacaagtgcaaggtctccaacaaaggcctcccgtcctccatcgagaaaaccatctccaaagccaaagggcagccccgagagccacaggtgtacaccctgcccccatcccaggaggagatgaccaagaaccaggtcagcctgacctgcctggtcaaaggcttctaccccagcgacatcgccgtggagtgggagagcaatgggcagccggagaacaactacaagaccacgcctcccgtgctggactccgacggctccttcttcctctacagcaggctaaccgtggacaagagcaggtggcaggaggggaatgtcttctcatgctccgtgatgcatgaggctctgcacaaccactacacacagaagagcctctccctgtctctgggtaaatgactcgagcggccg

SEQ ID NO: 206 - protein, 239 aa, synthetic construct
  REGION 1..239: note = pre-Fc chimeric polypeptide having a CETP signal peptide
MLAATVLTLALLGNAHACPSCPAPEFLGGPSVFLFPPKPKDTLMISRTPEVTCVVVDVSQEDPEVQFNWYVDGVEVHNAKTKPREEQFNSTYRVVSVLTVLHQDWLNGKEYKCKVSNKGLPSSIEKTISKAKGQPREPQVYTLPPSQEEMTKNQVSLTCLVKGFYPSDIAVEWESNGQPENNYKTTPPVLDSDGSFFLYSRLTVDKSRWQEGNVFSCSVMHEALHNHYTQKSLSLSLGK

SEQ ID NO: 207 - DNA, 749 bp, synthetic construct
  misc_feature 1..749: note = DNA encoding pre-Fc chimeric polypeptide having a CETP signal peptide
  source 1..749: mol_type = other DNA
aagcttgaattcccaccatgctggctgccacagtcctgaccctggccctgctgggcaatgcccatgcctgcccatcatgcccagcacctgagttcctggggggaccatcagtcttcctgttccccccaaaacccaaggacactctcatgatctcccggacccctgaggtcacgtgcgtggtggtggacgtgagccaggaagaccccgaggtccagttcaactggtacgtggatggcgtggaggtgcataatgccaagacaaagccgcgggaggagcagttcaacagcacgtaccgtgtggtcagcgtcctcaccgtcctgcaccaggactggctgaacggcaaggagtacaagtgcaaggtctccaacaaaggcctcccgtcctccatcgagaaaaccatctccaaagccaaagggcagccccgagagccacaggtgtacaccctgcccccatcccaggaggagatgaccaagaaccaggtcagcctgacctgcctggtcaaaggcttctaccccagcgacatcgccgtggagtgggagagcaatgggcagccggagaacaactacaagaccacgcctcccgtgctggactccgacggctccttcttcctctacagcaggctaaccgtggacaagagcaggtggcaggaggggaatgtcttctcatgctccgtgatgcatgaggctctgcacaaccactacacacagaagagcctctccctgtctctgggtaaatgactcgagcggccg

SEQ ID NO: 208 - protein, 219 aa, synthetic construct
  REGION 1..219: note = Human IgG4 Fc domain having the N-terminal sequence CPAPE
CPAPEFLGGPSVFLFPPKPKDTLMISRTPEVTCVVVDVSQEDPEVQFNWYVDGVEVHNAKTKPREEQFNSTYRVVSVLTVLHQDWLNGKEYKCKVSNKGLPSSIEKTISKAKGQPREPQVYTLPPSQEEMTKNQVSLTCLVKGFYPSDIAVEWESNGQPENNYKTTPPVLDSDGSFFLYSRLTVDKSRWQEGNVFSCSVMHEALHNHYTQKSLSLSLGK

SEQ ID NO: 209 - DNA, 657 bp, synthetic construct
  misc_feature 1..657: note = DNA encoding human IgG4 Fc domain having the N-terminal sequence CPAPE
  source 1..657: mol_type = other DNA
tgcccagcacctgagttcctggggggaccatcagtcttcctgttccccccaaaacccaaggacactctcatgatctcccggacccctgaggtcacgtgcgtggtggtggacgtgagccaggaagaccccgaggtccagttcaactggtacgtggatggcgtggaggtgcataatgccaagacaaagccgcgggaggagcagttcaacagcacgtaccgtgtggtcagcgtcctcaccgtcctgcaccaggactggctgaacggcaaggagtacaagtgcaaggtctccaacaaaggcctcccgtcctccatcgagaaaaccatctccaaagccaaagggcagccccgagagccacaggtgtacaccctgcccccatcccaggaggagatgaccaagaaccaggtcagcctgacctgcctggtcaaaggcttctaccccagcgacatcgccgtggagtgggagagcaatgggcagccggagaacaactacaagaccacgcctcccgtgctggactccgacggctccttcttcctctacagcaggctaaccgtggacaagagcaggtggcaggaggggaatgtcttctcatgctccgtgatgcatgaggctctgcacaaccactacacacagaagagcctctccctgtctctgggtaaa

SEQ ID NO: 210 - protein, 242 aa, synthetic construct
  REGION 1..242: note = pre-Fc chimeric polypeptide having a SHH signal peptide
MLLLARCLLLVLVSSLLVCSGLACPAPEFLGGPSVFLFPPKPKDTLMISRTPEVTCVVVDVSQEDPEVQFNWYVDGVEVHNAKTKPREEQFNSTYRVVSVLTVLHQDWLNGKEYKCKVSNKGLPSSIEKTISKAKGQPREPQVYTLPPSQEEMTKNQVSLTCLVKGFYPSDIAVEWESNGQPENNYKTTPPVLDSDGSFFLYSRLTVDKSRWQEGNVFSCSVMHEALHNHYTQKSLSLSLGK

SEQ ID NO: 211 - DNA, 758 bp, synthetic construct
  misc_feature 1..758: note = DNA encoding pre-Fc chimeric polypeptide having a SHH signal peptide
  source 1..758: mol_type = other DNA
aagcttgaattcccaccatgctgctgctggcgagatgtctgctgctagtcctcgtctcctcgctgctggtatgctcgggactggcgtgcccagcacctgagttcctggggggaccatcagtcttcctgttccccccaaaacccaaggacactctcatgatctcccggacccctgaggtcacgtgcgtggtggtggacgtgagccaggaagaccccgaggtccagttcaactggtacgtggatggcgtggaggtgcataatgccaagacaaagccgcgggaggagcagttcaacagcacgtaccgtgtggtcagcgtcctcaccgtcctgcaccaggactggctgaacggcaaggagtacaagtgcaaggtctccaacaaaggcctcccgtcctccatcgagaaaaccatctccaaagccaaagggcagccccgagagccacaggtgtacaccctgcccccatcccaggaggagatgaccaagaaccaggtcagcctgacctgcctggtcaaaggcttctaccccagcgacatcgccgtggagtgggagagcaatgggcagccggagaacaactacaagaccacgcctcccgtgctggactccgacggctccttcttcctctacagcaggctaaccgtggacaagagcaggtggcaggaggggaatgtcttctcatgctccgtgatgcatgaggctctgcacaaccactacacacagaagagcctctccctgtctctgggtaaatgactcgagcggccg

SEQ ID NO: 212 - protein, 242 aa, synthetic construct
  REGION 1..242: note = pre-Fc chimeric polypeptide having a IFN signal peptide
MALTFALLVALLVLSCKSSCSVGCPAPEFLGGPSVFLFPPKPKDTLMISRTPEVTCVVVDVSQEDPEVQFNWYVDGVEVHNAKTKPREEQFNSTYRVVSVLTVLHQDWLNGKEYKCKVSNKGLPSSIEKTISKAKGQPREPQVYTLPPSQEEMTKNQVSLTCLVKGFYPSDIAVEWESNGQPENNYKTTPPVLDSDGSFFLYSRLTVDKSRWQEGNVFSCSVMHEALHNHYTQKSLSLSLGK

SEQ ID NO: 213 - DNA, 758 bp, synthetic construct
  misc_feature 1..758: note = DNA encoding pre-Fc chimeric polypeptide having a IFN signal peptide
  source 1..758: mol_type = other DNA
aagcttgaattcccaccatggccttgacctttgctttactggtggccctcctggtgctcagctgcaagtcaagctgctctgtgggctgcccagcacctgagttcctggggggaccatcagtcttcctgttccccccaaaacccaaggacactctcatgatctcccggacccctgaggtcacgtgcgtggtggtggacgtgagccaggaagaccccgaggtccagttcaactggtacgtggatggcgtggaggtgcataatgccaagacaaagccgcgggaggagcagttcaacagcacgtaccgtgtggtcagcgtcctcaccgtcctgcaccaggactggctgaacggcaaggagtacaagtgcaaggtctccaacaaaggcctcccgtcctccatcgagaaaaccatctccaaagccaaagggcagccccgagagccacaggtgtacaccctgcccccatcccaggaggagatgaccaagaaccaggtcagcctgacctgcctggtcaaaggcttctaccccagcgacatcgccgtggagtgggagagcaatgggcagccggagaacaactacaagaccacgcctcccgtgctggactccgacggctccttcttcctctacagcaggctaaccgtggacaagagcaggtggcaggaggggaatgtcttctcatgctccgtgatgcatgaggctctgcacaaccactacacacagaagagcctctccctgtctctgggtaaatgactcgagcggccg

SEQ ID NO: 214 - protein, 236 aa, synthetic construct
  REGION 1..236: note = pre-Fc chimeric polypeptide having a CETP signal peptide
MLAATVLTLALLGNAHACPAPEFLGGPSVFLFPPKPKDTLMISRTPEVTCVVVDVSQEDPEVQFNWYVDGVEVHNAKTKPREEQFNSTYRVVSVLTVLHQDWLNGKEYKCKVSNKGLPSSIEKTISKAKGQPREPQVYTLPPSQEEMTKNQVSLTCLVKGFYPSDIAVEWESNGQPENNYKTTPPVLDSDGSFFLYSRLTVDKSRWQEGNVFSCSVMHEALHNHYTQKSLSLSLGK

SEQ ID NO: 215 - DNA, 740 bp, synthetic construct
  misc_feature 1..740: note = DNA encoding pre-Fc chimeric polypeptide having a CETP signal peptide
  source 1..740: mol_type = other DNA
aagcttgaattcccaccatgctggctgccacagtcctgaccctggccctgctgggcaatgcccatgcctgcccagcacctgagttcctggggggaccatcagtcttcctgttccccccaaaacccaaggacactctcatgatctcccggacccctgaggtcacgtgcgtggtggtggacgtgagccaggaagaccccgaggtccagttcaactggtacgtggatggcgtggaggtgcataatgccaagacaaagccgcgggaggagcagttcaacagcacgtaccgtgtggtcagcgtcctcaccgtcctgcaccaggactggctgaacggcaaggagtacaagtgcaaggtctccaacaaaggcctcccgtcctccatcgagaaaaccatctccaaagccaaagggcagccccgagagccacaggtgtacaccctgcccccatcccaggaggagatgaccaagaaccaggtcagcctgacctgcctggtcaaaggcttctaccccagcgacatcgccgtggagtgggagagcaatgggcagccggagaacaactacaagaccacgcctcccgtgctggactccgacggctccttcttcctctacagcaggctaaccgtggacaagagcaggtggcaggaggggaatgtcttctcatgctccgtgatgcatgaggctctgcacaaccactacacacagaagagcctctccctgtctctgggtaaatgactcgagcggccg

SEQ ID NO: 216 - DNA, 5428 bp, synthetic construct
  misc_feature 1..5428: note = pCDNA3.1(+)
  source 1..5428: mol_type = other DNA
gacggatcgggagatctcccgatcccctatggtgcactctcagtacaatctgctctgatgccgcatagttaagccagtatctgctccctgcttgtgtgttggaggtcgctgagtagtgcgcgagcaaaatttaagctacaacaaggcaaggcttgaccgacaattgcatgaagaatctgcttagggttaggcgttttgcgctgcttcgcgatgtacgggccagatatacgcgttgacattgattattgactagttattaatagtaatcaattacggggtcattagttcatagcccatatatggagttccgcgttacataacttacggtaaatggcccgcctggctgaccgcccaacgacccccgcccattgacgtcaataatgacgtatgttcccatagtaacgccaatagggactttccattgacgtcaatgggtggagtatttacggtaaactgcccacttggcagtacatcaagtgtatcatatgccaagtacgccccctattgacgtcaatgacggtaaatggcccgcctggcattatgcccagtacatgaccttatgggactttcctacttggcagtacatctacgtattagtcatcgctattaccatggtgatgcggttttggcagtacatcaatgggcgtggatagcggtttgactcacggggatttccaagtctccaccccattgacgtcaatgggagtttgttttggcaccaaaatcaacgggactttccaaaatgtcgtaacaactccgccccattgacgcaaatgggcggtaggcgtgtacggtgggaggtctatataagcagagctctctggctaactagagaacccactgcttactggcttatcgaaattaatacgactcactatagggagacccaagctggctagcgtttaaacttaagcttggtaccgagctcggatccactagtccagtgtggtggaattctgcagatatccagcacagtggcggccgctcgagtctagagggcccgtttaaacccgctgatcagcctcgactgtgccttctagttgccagccatctgttgtttgcccctcccccgtgccttccttgaccctggaaggtgccactcccactgtcctttcctaataaaatgaggaaattgcatcgcattgtctgagtaggtgtcattctattctggggggtggggtggggcaggacagcaagggggaggattgggaagacaatagcaggcatgctggggatgcggtgggctctatggcttctgaggcggaaagaaccagctggggctctagggggtatccccacgcgccctgtagcggcgcattaagcgcggcgggtgtggtggttacgcgcagcgtgaccgctacacttgccagcgccctagcgcccgctcctttcgctttcttcccttcctttctcgccacgttcgccggctttccccgtcaagctctaaatcgggggctccctttagggttccgatttagtgctttacggcacctcgaccccaaaaaacttgattagggtgatggttcacgtagtgggccatcgccctgatagacggtttttcgccctttgacgttggagtccacgttctttaatagtggactcttgttccaaactggaacaacactcaaccctatctcggtctattcttttgatttataagggattttgccgatttcggcctattggttaaaaaatgagctgatttaacaaaaatttaacgcgaattaattctgtggaatgtgtgtcagttagggtgtggaaagtccccaggctccccagcaggcagaagtatgcaaagcatgcatctcaattagtcagcaaccaggtgtggaaagtccccaggctccccagcaggcagaagtatgcaaagcatgcatctcaattagtcagcaaccatagtcccgcccctaactccgcccatcccgcccctaactccgcccagttccgcccattctccgccccatggctgactaattttttttatttatgcagaggccgaggccgcctctgcctctgagctattccagaagtagtgaggaggcttttttggaggcctaggcttttgcaaaaagctcccgggagcttgtatatccattttcggatctgatcaagagacaggatgaggatcgtttcgcatgattgaacaagatggattgcacgcaggttctccggccgcttgggtggagaggctattcggctatgactgggcacaacagacaatcggctgctctgatgccgccgtgttccggctgtcagcgcaggggcgcccggttctttttgtcaagaccgacctgtccggtgccctgaatgaactgcaggacgaggcagcgcggctatcgtggctggccacgacgggcgttccttgcgcagctgtgctcgacgttgtcactgaagcgggaagggactggctgctattgggcgaagtgccggggcaggatctcctgtcatctcaccttgctcctgccgagaaagtatccatcatggctgatgcaatgcggcggctgcatacgcttgatccggctacctgcccattcgaccaccaagcgaaacatcgcatcgagcgagcacgtactcggatggaagccggtcttgtcgatcaggatgatctggacgaagagcatcaggggctcgcgccagccgaactgttcgccaggctcaaggcgcgcatgcccgacggcgaggatctcgtcgtgacccatggcgatgcctgcttgccgaatatcatggtggaaaatggccgcttttctggattcatcgactgtggccggctgggtgtggcggaccgctatcaggacatagcgttggctacccgtgatattgctgaagagcttggcggcgaatgggctgaccgcttcctcgtgctttacggtatcgccgctcccgattcgcagcgcatcgccttctatcgccttcttgacgagttcttctgagcgggactctggggttcgaaatgaccgaccaagcgacgcccaacctgccatcacgagatttcgattccaccgccgccttctatgaaaggttgggcttcggaatcgttttccgggacgccggctggatgatcctccagcgcggggatctcatgctggagttcttcgcccaccccaacttgtttattgcagcttataatggttacaaataaagcaatagcatcacaaatttcacaaataaagcatttttttcactgcattctagttgtggtttgtccaaactcatcaatgtatcttatcatgtctgtataccgtcgacctctagctagagcttggcgtaatcatggtcatagctgtttcctgtgtgaaattgttatccgctcacaattccacacaacatacgagccggaagcataaagtgtaaagcctggggtgcctaatgagtgagctaactcacattaattgcgttgcgctcactgcccgctttccagtcgggaaacctgtcgtgccagctgcattaatgaatcggccaacgcgcggggagaggcggtttgcgtattgggcgctcttccgcttcctcgctcactgactcgctgcgctcggtcgttcggctgcggcgagcggtatcagctcactcaaaggcggtaatacggttatccacagaatcaggggataacgcaggaaagaacatgtgagcaaaaggccagcaaaaggccaggaaccgtaaaaaggccgcgttgctggcgtttttccataggctccgcccccctgacgagcatcacaaaaatcgacgctcaagtcagaggtggcgaaacccgacaggactataaagataccaggcgtttccccctggaagctccctcgtgcgctctcctgttccgaccctgccgcttaccggatacctgtccgcctttctcccttcgggaagcgtggcgctttctcatagctcacgctgtaggtatctcagttcggtgtaggtcgttcgctccaagctgggctgtgtgcacgaaccccccgttcagcccgaccgctgcgccttatccggtaactatcgtcttgagtccaacccggtaagacacgacttatcgccactggcagcagccactggtaacaggattagcagagcgaggtatgtaggcggtgctacagagttcttgaagtggtggcctaactacggctacactagaagaacagtatttggtatctgcgctctgctgaagccagttaccttcggaaaaagagttggtagctcttgatccggcaaacaaaccaccgctggtagcggtttttttgtttgcaagcagcagattacgcgcagaaaaaaaggatctcaagaagatcctttgatcttttctacggggtctgacgctcagtggaacgaaaactcacgttaagggattttggtcatgagattatcaaaaaggatcttcacctagatccttttaaattaaaaatgaagttttaaatcaatctaaagtatatatgagtaaacttggtctgacagttaccaatgcttaatcagtgaggcacctatctcagcgatctgtctatttcgttcatccatagttgcctgactccccgtcgtgtagataactacgatacgggagggcttaccatctggccccagtgctgcaatgataccgcgagacccacgctcaccggctccagatttatcagcaataaaccagccagccggaagggccgagcgcagaagtggtcctgcaactttatccgcctccatccagtctattaattgttgccgggaagctagagtaagtagttcgccagttaatagtttgcgcaacgttgttgccattgctacaggcatcgtggtgtcacgctcgtcgtttggtatggcttcattcagctccggttcccaacgatcaaggcgagttacatgatcccccatgttgtgcaaaaaagcggttagctccttcggtcctccgatcgttgtcagaagtaagttggccgcagtgttatcactcatggttatggcagcactgcataattctcttactgtcatgccatccgtaagatgcttttctgtgactggtgagtactcaaccaagtcattctgagaatagtgtatgcggcgaccgagttgctcttgcccggcgtcaatacgggataataccgcgccacatagcagaactttaaaagtgctcatcattggaaaacgttcttcggggcgaaaactctcaaggatcttaccgctgttgagatccagttcgatgtaacccactcgtgcacccaactgatcttcagcatcttttactttcaccagcgtttctgggtgagcaaaaacaggaaggcaaaatgccgcaaaaaagggaataagggcgacacggaaatgttgaatactcatactcttcctttttcaatattattgaagcatttatcagggttattgtctcatgagcggatacatatttgaatgtatttagaaaaataaacaaataggggttccgcgcacatttccccgaaaagtgccacctgacgtc

SEQ ID NO: 217 - DNA, 4195 bp, synthetic construct
  misc_feature 1..4195: note = pSA
  source 1..4195: mol_type = other DNA
ctaaattgtaagcgttaatattttgttaaaattcgcgttaaatttttgttaaatcagctcattttttaaccaataggccgaaatcggcaaaatcccttataaatcaaaagaatagaccgagatagggttgagtgttgttccagtttggaacaagagtccactattaaagaacgtggactccaacgtcaaagggcgaaaaaccgtctatcagggcgatggcccactacgtgaaccatcaccctaatcaagttttttggggtcgaggtgccgtaaagcactaaatcggaaccctaaagggagcccccgatttagagcttgacggggaaagccggcgaacgtggcgagaaaggaagggaagaaagcgaaaggagcgggcgctagggcgctggcaagtgtagcggtcacgctgcgcgtaaccaccacacccgccgcgcttaatgcgccgctacagggcgcgtcccattcgccattcaggctgcgcaactgttgggaagggcgatcggtgcgggcctcttcgctattacgccagctggcgaaagggggatgtgctgcaaggcgattaagttgggtaacgccagggttttcccagtcacgacgttgtaaaacgacggccagtgagcgcgcaagcggccgcaacccgggaaaagcttggccattgcatacgttgtatccatatcataatatgtacatttatattggctcatgtccaacattaccgccatgttgacattgattattgactagttattaatagtaatcaattacggggtcattagttcatagcccatatatggagttccgcgttacataacttacggtaaatggcccgcctggctgaccgcccaacgacccccgcccattgacgtcaataatgacgtatgttcccatagtaacgccaatagggactttccattgacgtcaatgggtggagtatttacggtaaactgcccacttggcagtacatcaagtgtatcatatgccaagtacgccccctattgacgtcaatgacggtaaatggcccgcctggcattatgcccagtacatgaccttatgggactttcctacttggcagtacatctacgtattagtcatcgctattaccatggtgatgcggttttggcagtacatcaatgggcgtggatagcggtttgactcacggggatttccaagtctccaccccattgacgtcaatgggagtttgttttggcaccaaaatcaacgggactttccaaaatgtcgtaacaactccgccccattgacgcaaatgggcggtaggcgtgtacggtgggaggtctatataagcagagctcgtttagtgaaccgtcagatcgcctggagacgccatccacgctgttttgacctccatagaagacaccgggaccgatccagcctccgcggccgggaacggtgcattggaacgcggattccccgtgccaagagtgacgtaagtaccgcctatagagtctataggcccacccccttggcttcttatgcatgctcccctgctccgacccgggctcctcgcccgcccggacccacaggccaccctcaaccgtcctggccccggacccaaaccccacccctcactctgcttctccccgcaggagaattcaatcgcgaaagggcccaaagatctgccataccacatttgtagaggttttacttgctttaaaaaacctcccacacctccccctgaacctgaaacataaaatgaatgcaattgttgttgttaacttgtttattgcagcttataatggttacaaataaagcaatagcatcacaaatttcacaaataaagcatttttttcactgcattctagttgtggtttgtccaaactcatcaatgtatcttatcatgtctggagctagcatcccgcccctaactccgccctgttccgcccattctccgccccatggctgactaattttttttatttatgcagaggccgaggccgcctcggcctctgagctattccagaagtagtgaggaggcttttttggaggcctaggcttttgcgtcgagaagcgcgcttggcgtaatcatggtcatagctgtttcctgtgtgaaattgttatccgctcacaattccacacaacatacgagccggaagcataaagtgtaaagcctggggtgcctaatgagtgagctaactcacattaattgcgttgcgctcactgcccgctttccagtcgggaaacctgtcgtgccagctgcattaatgaatcggccaacgcgcggggagaggcggtttgcgtattgggcgctcttccgcttcctcgctcactgactcgctgcgctcggtcgttcggctgcggcgagcggtatcagctcactcaaaggcggtaatacggttatccacagaatcaggggataacgcaggaaagaacatgtgagcaaaaggccagcaaaaggccaggaaccgtaaaaaggccgcgttgctggcgtttttccataggctccgcccccctgacgagcatcacaaaaatcgacgctcaagtcagaggtggcgaaacccgacaggactataaagataccaggcgtttccccctggaagctccctcgtgcgctctcctgttccgaccctgccgcttaccggatacctgtccgcctttctcccttcgggaagcgtggcgctttctcatagctcacgctgtaggtatctcagttcggtgtaggtcgttcgctccaagctgggctgtgtgcacgaaccccccgttcagcccgaccgctgcgccttatccggtaactatcgtcttgagtccaacccggtaagacacgacttatcgccactggcagcagccactggtaacaggattagcagagcgaggtatgtaggcggtgctacagagttcttgaagtggtggcctaactacggctacactagaaggacagtatttggtatctgcgctctgctgaagccagttaccttcggaaaaagagttggtagctcttgatccggcaaacaaaccaccgctggtagcggtggtttttttgtttgcaagcagcagattacgcgcagaaaaaaaggatctcaagaagatcctttgatcttttctacggggtctgacgctcagtggaacgaaaactcacgttaagggattttggtcatgagattatcaaaaaggatcttcacctagatccttttaaattaaaaatgaagttttaaatcaatctaaagtatatatgagtaaacttggtctgacagttaccaatgcttaatcagtgaggcacctatctcagcgatctgtctatttcgttcatccatagttgcctgactccccgtcgtgtagataactacgatacgggagggcttaccatctggccccagtgctgcaatgataccgcgagacccacgctcaccggctccagatttatcagcaataaaccagccagccggaagggccgagcgcagaagtggtcctgcaactttatccgcctccatccagtctattaattgttgccgggaagctagagtaagtagttcgccagttaatagtttgcgcaacgttgttgccattgctacaggcatcgtggtgtcacgctcgtcgtttggtatggcttcattcagctccggttcccaacgatcaaggcgagttacatgatcccccatgttgtgcaaaaaagcggttagctccttcggtcctccgatcgttgtcagaagtaagttggccgcagtgttatcactcatggttatggcagcactgcataattctcttactgtcatgccatccgtaagatgcttttctgtgactggtgagtactcaaccaagtcattctgagaatagtgtatgcggcgaccgagttgctcttgcccggcgtcaatacgggataataccgcgccacatagcagaactttaaaagtgctcatcattggaaaacgttcttcggggcgaaaactctcaaggatcttaccgctgttgagatccagttcgatgtaacccactcgtgcacccaactgatcttcagcatcttttactttcaccagcgtttctgggtgagcaaaaacaggaaggcaaaatgccgcaaaaaagggaataagggcgacacggaaatgttgaatactcatactcttcctttttcaatattattgaagcatttatcagggttattgtctcatgagcggatacatatttgaatgtatttagaaaaataaacaaataggggttccgcgcacatttccccgaaaagtgccac

SEQ ID NO: 218 - DNA, 824 bp, synthetic construct
  misc_feature 1..824: note = Artificial Construct
  source 1..824: mol_type = other DNA
gttaacgaattcccaccatgattgaacaagatggattgcacgcaggttctccggccgcttgggtggagaggctattcggctatgactgggcacaacagacaatcggctgctctgatgccgccgtgttccggctgtcagcgcaggggcgcccggttctttttgtcaagaccgacctgtccggtgccctgaatgaactgcaggacgaggcagcgcggctatcgtggctggccacgacgggcgttccttgcgcagctgtgctcgacgttgtcactgaagcgggaagggactggctgctattgggcgaagtgccggggcaggatctcctgtcatctcaccttgctcctgccgagaaagtatccatcatggctgatgcaatgcggcggctgcatacgcttgatccggctacctgcccattcgaccaccaagcgaaacatcgcatcgagcgagcacgtactcggatggaagccggtcttgtcgatcaggatgatctggacgaagagcatcaggggctcgcgccagccgaactgttcgccaggctcaaggcgcgcatgcccgacggcgaggatctcgtcgtgacccatggcgatgcctgcttgccgaatatcatggtggaaaatggccgcttttctggattcatcgactgtggccggctgggtgtggcggaccgctatcaggacatagcgttggctacccgtgatattgctgaagagcttggcggcgaatgggctgaccgcttcctcgtgctttacggtatcgccgctcccgattcgcagcgcatcgccttctatcgccttcttgacgagttcttctgaagatctgttaac

SEQ ID NO: 219 - DNA, 6739 bp, synthetic construct
  misc_feature 1..6739: note = pCDNA3-TNR1B-Mth
  source 1..6739: mol_type = other DNA
gacggatcgggagatctcccgatcccctatggtgcactctcagtacaatctgctctgatgccgcatagttaagccagtatctgctccctgcttgtgtgttggaggtcgctgagtagtgcgcgagcaaaatttaagctacaacaaggcaaggcttgaccgacaattgcatgaagaatctgcttagggttaggcgttttgcgctgcttcgcgatgtacgggccagatatacgcgttgacattgattattgactagttattaatagtaatcaattacggggtcattagttcatagcccatatatggagttccgcgttacataacttacggtaaatggcccgcctggctgaccgcccaacgacccccgcccattgacgtcaataatgacgtatgttcccatagtaacgccaatagggactttccattgacgtcaatgggtggagtatttacggtaaactgcccacttggcagtacatcaagtgtatcatatgccaagtacgccccctattgacgtcaatgacggtaaatggcccgcctggcattatgcccagtacatgaccttatgggactttcctacttggcagtacatctacgtattagtcatcgctattaccatggtgatgcggttttggcagtacatcaatgggcgtggatagcggtttgactcacggggatttccaagtctccaccccattgacgtcaatgggagtttgttttggcaccaaaatcaacgggactttccaaaatgtcgtaacaactccgccccattgacgcaaatgggcggtaggcgtgtacggtgggaggtctatataagcagagctctctggctaactagagaacccactgcttactggcttatcgaaattaatacgactcactatagggagacccaagctggctagcgtttaaacttaagcttgaattcccaccatggcgcccgtcgccgtctgggccgcgctggccgtcggactggagctctgggctgcggcgcacgccttgcccgcccaggtggcatttacaccctacgccccggagcccgggagcacatgccggctcagagaatactatgaccagacagctcagatgtgctgcagcaaatgctcgccgggccaacatgcaaaagtcttctgtaccaagacctcggacaccgtgtgtgactcctgtgaggacagcacatacacccagctctggaactgggttcccgagtgcttgagctgtggctcccgctgtagctctgaccaggtggaaactcaagcctgcactcgggaacagaaccgcatctgcacctgcaggcccggctggtactgcgcgctgagcaagcaggaggggtgccggctgtgcgcgccgctgcgcaagtgccgcccgggcttcggcgtggccagaccaggaactgaaacatcagacgtggtgtgcaagccctgtgccccggggacgttctccaacacgacttcatccacggatatttgcaggccccaccagatctgtaacgtggtggccatccctgggaatgcaagcatggatgcagtctgcacgtccacgtcccccacccggagtatggccccaggggcagtacacttaccccagccagtgtccacacgatcccaacacacgcagccaactccagaacccagcactgctccaagcacctccttcctgctcccaatggggcccagccccccagctgaagggagcactggcgacgggtgcgtatccggtgacaccattgtaatgactagtggcgggccccgcactgtggctgaactggagggcaaaccgttcaccgcactgattcgcggctctggctacccatgcccctcaggtttcttccgcacctgtgaacgtgacgtatatgatctgcgtacacgtgagggtcattgcttacgtttgacccatgatcaccgtgttctggtgatggatggtggcctggaatggcgtgccgcgggtgaactggaacgcggcgaccgcctggtgatggatgatgcagctggcgagtttccggcactggcaaccttccgtggcctgcgtggcgctggccgccaggatgtttatgacgctactgtttacggtgctagcgcattcactgctaatggcttcattgtacacgcatgtggcgagcagcccgggaccggtctgaactcaggcctcacgacaaatcctggtgtatccgcttggcaggtcaacacagcttatactgcgggacaattggtcacatataacggcaagacgtataaatgtttgcagccccacacctccttggcaggatgggaaccatccaacgttcctgccttgtggcagcttcaatgactcgagcggcccgtttaaacccgctgatcagcctcgactgtgccttctagttgccagccatctgttgtttgcccctcccccgtgccttccttgaccctggaaggtgccactcccactgtcctttcctaataaaatgaggaaattgcatcgcattgtctgagtaggtgtcattctattctggggggtggggtggggcaggacagcaagggggaggattgggaagacaatagcaggcatgctggggatgcggtgggctctatggcttctgaggcggaaagaaccagctggggctctagggggtatccccacgcgccctgtagcggcgcattaagcgcggcgggtgtggtggttacgcgcagcgtgaccgctacacttgccagcgccctagcgcccgctcctttcgctttcttcccttcctttctcgccacgttcgccggctttccccgtcaagctctaaatcgggggctccctttagggttccgatttagtgctttacggcacctcgaccccaaaaaacttgattagggtgatggttcacgtagtgggccatcgccctgatagacggtttttcgccctttgacgttggagtccacgttctttaatagtggactcttgttccaaactggaacaacactcaaccctatctcggtctattcttttgatttataagggattttgccgatttcggcctattggttaaaaaatgagctgatttaacaaaaatttaacgcgaattaattctgtggaatgtgtgtcagttagggtgtggaaagtccccaggctccccagcaggcagaagtatgcaaagcatgcatctcaattagtcagcaaccaggtgtggaaagtccccaggctccccagcaggcagaagtatgcaaagcatgcatctcaattagtcagcaaccatagtcccgcccctaactccgcccatcccgcccctaactccgcccagttccgcccattctccgccccatggctgactaattttttttatttatgcagaggccgaggccgcctctgcctctgagctattccagaagtagtgaggaggcttttttggaggcctaggcttttgcaaaaagctcccgggagcttgtatatccattttcggatctgatcaagagacaggatgaggatcgtttcgcatgattgaacaagatggattgcacgcaggttctccggccgcttgggtggagaggctattcggctatgactgggcacaacagacaatcggctgctctgatgccgccgtgttccggctgtcagcgcaggggcgcccggttctttttgtcaagaccgacctgtccggtgccctgaatgaactgcaggacgaggcagcgcggctatcgtggctggccacgacgggcgttccttgcgcagctgtgctcgacgttgtcactgaagcgggaagggactggctgctattgggcgaagtgccggggcaggatctcctgtcatctcaccttgctcctgccgagaaagtatccatcatggctgatgcaatgcggcggctgcatacgcttgatccggctacctgcccattcgaccaccaagcgaaacatcgcatcgagcgagcacgtactcggatggaagccggtcttgtcgatcaggatgatctggacgaagagcatcaggggctcgcgccagccgaactgttcgccaggctcaaggcgcgcatgcccgacggcgaggatctcgtcgtgacccatggcgatgcctgcttgccgaatatcatggtggaaaatggccgcttttctggattcatcgactgtggccggctgggtgtggcggaccgctatcaggacatagcgttggctacccgtgatattgctgaagagcttggcggcgaatgggctgaccgcttcctcgtgctttacggtatcgccgctcccgattcgcagcgcatcgccttctatcgccttcttgacgagttcttctgagcgggactctggggttcgaaatgaccgaccaagcgacgcccaacctgccatcacgagatttcgattccaccgccgccttctatgaaaggttgggcttcggaatcgttttccgggacgccggctggatgatcctccagcgcggggatctcatgctggagttcttcgcccaccccaacttgtttattgcagcttataatggttacaaataaagcaatagcatcacaaatttcacaaataaagcatttttttcactgcattctagttgtggtttgtccaaactcatcaatgtatcttatcatgtctgtataccgtcgacctctagctagagcttggcgtaatcatggtcatagctgtttcctgtgtgaaattgttatccgctcacaattccacacaacatacgagccggaagcataaagtgtaaagcctggggtgcctaatgagtgagctaactcacattaattgcgttgcgctcactgcccgctttccagtcgggaaacctgtcgtgccagctgcattaatgaatcggccaacgcgcggggagaggcggtttgcgtattgggcgctcttccgcttcctcgctcactgactcgctgcgctcggtcgttcggctgcggcgagcggtatcagctcactcaaaggcggtaatacggttatccacagaatcaggggataacgcaggaaagaacatgtgagcaaaaggccagcaaaaggccaggaaccgtaaaaaggccgcgttgctggcgtttttccataggctccgcccccctgacgagcatcacaaaaatcgacgctcaagtcagaggtggcgaaacccgacaggactataaagataccaggcgtttccccctggaagctccctcgtgcgctctcctgttccgaccctgccgcttaccggatacctgtccgcctttctcccttcgggaagcgtggcgctttctcatagctcacgctgtaggtatctcagttcggtgtaggtcgttcgctccaagctgggctgtgtgcacgaaccccccgttcagcccgaccgctgcgccttatccggtaactatcgtcttgagtccaacccggtaagacacgacttatcgccactggcagcagccactggtaacaggattagcagagcgaggtatgtaggcggtgctacagagttcttgaagtggtggcctaactacggctacactagaagaacagtatttggtatctgcgctctgctgaagccagttaccttcggaaaaagagttggtagctcttgatccggcaaacaaaccaccgctggtagcggtttttttgtttgcaagcagcagattacgcgcagaaaaaaaggatctcaagaagatcctttgatcttttctacggggtctgacgctcagtggaacgaaaactcacgttaagggattttggtcatgagattatcaaaaaggatcttcacctagatccttttaaattaaaaatgaagttttaaatcaatctaaagtatatatgagtaaacttggtctgacagttaccaatgcttaatcagtgaggcacctatctcagcgatctgtctatttcgttcatccatagttgcctgactccccgtcgtgtagataactacgatacgggagggcttaccatctggccccagtgctgcaatgataccgcgagacccacgctcaccggctccagatttatcagcaataaaccagccagccggaagggccgagcgcagaagtggtcctgcaactttatccgcctccatccagtctattaattgttgccgggaagctagagtaagtagttcgccagttaatagtttgcgcaacgttgttgccattgctacaggcatcgtggtgtcacgctcgtcgtttggtatggcttcattcagctccggttcccaacgatcaaggcgagttacatgatcccccatgttgtgcaaaaaagcggttagctccttcggtcctccgatcgttgtcagaagtaagttggccgcagtgttatcactcatggttatggcagcactgcataattctcttactgtcatgccatccgtaagatgcttttctgtgactggtgagtactcaaccaagtcattctgagaatagtgtatgcggcgaccgagttgctcttgcccggcgtcaatacgggataataccgcgccacatagcagaactttaaaagtgctcatcattggaaaacgttcttcggggcgaaaactctcaaggatcttaccgctgttgagatccagttcgatgtaacccactcgtgcacccaactgatcttcagcatcttttactttcaccagcgtttctgggtgagcaaaaacaggaaggcaaaatgccgcaaaaaagggaataagggcgacacggaaatgttgaatactcatactcttcctttttcaatattattgaagcatttatcagggttattgtctcatgagcggatacatatttgaatgtatttagaaaaataaacaaataggggttccgcgcacatttccccgaaaagtgccacctgacgtc

SEQ ID NO: 220 - protein, 457 aa, synthetic construct
  REGION 1..457: note = pre-TNR1B-intein chimeric polypeptide
MAPVAVWAALAVGLELWAAAHALPAQVAFTPYAPEPGSTCRLREYYDQTAQMCCSKCSPGQHAKVFCTKTSDTVCDSCEDSTYTQLWNWVPECLSCGSRCSSDQVETQACTREQNRICTCRPGWYCALSKQEGCRLCAPLRKCRPGFGVARPGTETSDVVCKPCAPGTFSNTTSSTDICRPHQICNVVAIPGNASMDAVCTSTSPTRSMAPGAVHLPQPVSTRSQHTQPTPEPSTAPSTSFLLPMGPSPPAEGSTGDGCVSGDTIVMTSGGPRTVAELEGKPFTALIRGSGYPCPSGFFRTCERDVYDLRTREGHCLRLTHDHRVLVMDGGLEWRAAGELERGDRLVMDDAAGEFPALATFRGLRGAGRQDVYDATVYGASAFTANGFIVHACGEQPGTGLNSGLTTNPGVSAWQVNTAYTAGQLVTYNGKTYKCLQPHTSLAGWEPSNVPALWQLQ

SEQ ID NO: 221 - protein, 435 aa, synthetic construct
  REGION 1..435: note = mature TNR1B-intein fusion protein
LPAQVAFTPYAPEPGSTCRLREYYDQTAQMCCSKCSPGQHAKVFCTKTSDTVCDSCEDSTYTQLWNWVPECLSCGSRCSSDQVETQACTREQNRICTCRPGWYCALSKQEGCRLCAPLRKCRPGFGVARPGTETSDVVCKPCAPGTFSNTTSSTDICRPHQICNVVAIPGNASMDAVCTSTSPTRSMAPGAVHLPQPVSTRSQHTQPTPEPSTAPSTSFLLPMGPSPPAEGSTGDGCVSGDTIVMTSGGPRTVAELEGKPFTALIRGSGYPCPSGFFRTCERDVYDLRTREGHCLRLTHDHRVLVMDGGLEWRAAGELERGDRLVMDDAAGEFPALATFRGLRGAGRQDVYDATVYGASAFTANGFIVHACGEQPGTGLNSGLTTNPGVSAWQVNTAYTAGQLVTYNGKTYKCLQPHTSLAGWEPSNVPALWQLQ

SEQ ID NO: 222 - DNA, 6103 bp, synthetic construct
  misc_feature 1..6103: note = pCDNA3-SHH-IgG1-Fc11
  source 1..6103: mol_type = other DNA
gacggatcgggagatctcccgatcccctatggtgcactctcagtacaatctgctctgatgccgcatagttaagccagtatctgctccctgcttgtgtgttggaggtcgctgagtagtgcgcgagcaaaatttaagctacaacaaggcaaggcttgaccgacaattgcatgaagaatctgcttagggttaggcgttttgcgctgcttcgcgatgtacgggccagatatacgcgttgacattgattattgactagttattaatagtaatcaattacggggtcattagttcatagcccatatatggagttccgcgttacataacttacggtaaatggcccgcctggctgaccgcccaacgacccccgcccattgacgtcaataatgacgtatgttcccatagtaacgccaatagggactttccattgacgtcaatgggtggagtatttacggtaaactgcccacttggcagtacatcaagtgtatcatatgccaagtacgccccctattgacgtcaatgacggtaaatggcccgcctggcattatgcccagtacatgaccttatgggactttcctacttggcagtacatctacgtattagtcatcgctattaccatggtgatgcggttttggcagtacatcaatgggcgtggatagcggtttgactcacggggatttccaagtctccaccccattgacgtcaatgggagtttgttttggcaccaaaatcaacgggactttccaaaatgtcgtaacaactccgccccattgacgcaaatgggcggtaggcgtgtacggtgggaggtctatataagcagagctctctggctaactagagaacccactgcttactggcttatcgaaattaatacgactcactatagggagacccaagctggctagcgtttaaacttaagcttgaattcccaccatgctgctgctggcgagatgtctgctgctagtcctcgtctcctcgctgctggtatgctcgggactggcgtgcccaccgtgcccagcacctgaactcctgggggggccctcagtcttcctcttccccccaaaacccaaggacaccctcatgatctcccggacccctgaggtcacatgcgtggtggtggacgtgagccacgaagaccctgaggtcaagttcaactggtacgtggacggcgtggaggtgcataatgccaagacaaagccgcgggaggagcagtacaacagcacgtaccgtgtggtcagcgtcctcaccgtcctgcaccaggactggctgaatggcaaggagtacaagtgcaaggtctccaacaaagccctcccagcccccatcgagaaaaccatctccaaagccaaagggcagccccgagaaccacaggtgtacaccctgcccccatcccgggatgagctgaccaagaaccaggtcagcctgacctgcctggtcaaaggcttctatcccagcgacatcgccgtggagtgggagagcaatgggcagccggagaacaactacaagaccacgcctcccgtgctggactccgacggctccttcttcctctacagcaagctcaccgtggacaagagcaggtggcagcaggggaacgtcttctcatgctccgtgatgcatgaggctctgcacaaccactacacgcagaagagcctctccctgtctccgggtaaatgactcgagcggcccgtttaaacccgctgatcagcctcgactgtgccttctagttgccagccatctgttgtttgcccctcccccgtgccttccttgaccctggaaggtgccactcccactgtcctttcctaataaaatgaggaaattgcatcgcattgtctgagtaggtgtcattctattctggggggtggggtggggcaggacagcaagggggaggattgggaagacaatagcaggcatgctggggatgcggtgggctctatggcttctgaggcggaaagaaccagctggggctctagggggtatccccacgcgccctgtagcggcgcattaagcgcggcgggtgtggtggttacgcgcagcgtgaccgctacacttgccagcgccctagcgcccgctcctttcgctttcttcccttcctttctcgccacgttcgccggctttccccgtcaagctctaaatcgggggctccctttagggttccgatttagtgctttacggcacctcgaccccaaaaaacttgattagggtgatggttcacgtagtgggccatcgccctgatagacggtttttcgccctttgacgttggagtccacgttctttaatagtggactcttgttccaaactggaacaacactcaaccctatctcggtctattcttttgatttataagggattttgccgatttcggcctattggttaaaaaatgagctgatttaacaaaaatttaacgcgaattaattctgtggaatgtgtgtcagttagggtgtggaaagtccccaggctccccagcaggcagaagtatgcaaagcatgcatctcaattagtcagcaaccaggtgtggaaagtccccaggctccccagcaggcagaagtatgcaaagcatgcatctcaattagtcagcaaccatagtcccgcccctaactccgcccatcccgcccctaactccgcccagttccgcccattctccgccccatggctgactaattttttttatttatgcagaggccgaggccgcctctgcctctgagctattccagaagtagtgaggaggcttttttggaggcctaggcttttgcaaaaagctcccgggagcttgtatatccattttcggatctgatcaagagacaggatgaggatcgtttcgcatgattgaacaagatggattgcacgcaggttctccggccgcttgggtggagaggctattcggctatgactgggcacaacagacaatcggctgctctgatgccgccgtgttccggctgtcagcgcaggggcgcccggttctttttgtcaagaccgacctgtccggtgccctgaatgaactgcaggacgaggcagcgcggctatcgtggctggccacgacgggcgttccttgcgcagctgtgctcgacgttgtcactgaagcgggaagggactggctgctattgggcgaagtgccggggcaggatctcctgtcatctcaccttgctcctgccgagaaagtatccatcatggctgatgcaatgcggcggctgcatacgcttgatccggctacctgcccattcgaccaccaagcgaaacatcgcatcgagcgagcacgtactcggatggaagccggtcttgtcgatcaggatgatctggacgaagagcatcaggggctcgcgccagccgaactgttcgccaggctcaaggcgcgcatgcccgacggcgaggatctcgtcgtgacccatggcgatgcctgcttgccgaatatcatggtggaaaatggccgcttttctggattcatcgactgtggccggctgggtgtggcggaccgctatcaggacatagcgttggctacccgtgatattgctgaagagcttggcggcgaatgggctgaccgcttcctcgtgctttacggtatcgccgctcccgattcgcagcgcatcgccttctatcgccttcttgacgagttcttctgagcgggactctggggttcgaaatgaccgaccaagcgacgcccaacctgccatcacgagatttcgattccaccgccgccttctatgaaaggttgggcttcggaatcgttttccgggacgccggctggatgatcctccagcgcggggatctcatgctggagttcttcgcccaccccaacttgtttattgcagcttataatggttacaaataaagcaatagcatcacaaatttcacaaataaagcatttttttcactgcattctagttgtggtttgtccaaactcatcaatgtatcttatcatgtctgtataccgtcgacctctagctagagcttggcgtaatcatggtcatagctgtttcctgtgtgaaattgttatccgctcacaattccacacaacatacgagccggaagcataaagtgtaaagcctggggtgcctaatgagtgagctaactcacattaattgcgttgcgctcactgcccgctttccagtcgggaaacctgtcgtgccagctgcattaatgaatcggccaacgcgcggggagaggcggtttgcgtattgggcgctcttccgcttcctcgctcactgactcgctgcgctcggtcgttcggctgcggcgagcggtatcagctcactcaaaggcggtaatacggttatccacagaatcaggggataacgcaggaaagaacatgtgagcaaaaggccagcaaaaggccaggaaccgtaaaaaggccgcgttgctggcgtttttccataggctccgcccccctgacgagcatcacaaaaatcgacgctcaagtcagaggtggcgaaacccgacaggactataaagataccaggcgtttccccctggaagctccctcgtgcgctctcctgttccgaccctgccgcttaccggatacctgtccgcctttctcccttcgggaagcgtggcgctttctcatagctcacgctgtaggtatctcagttcggtgtaggtcgttcgctccaagctgggctgtgtgcacgaaccccccgttcagcccgaccgctgcgccttatccggtaactatcgtcttgagtccaacccggtaagacacgacttatcgccactggcagcagccactggtaacaggattagcagagcgaggtatgtaggcggtgctacagagttcttgaagtggtggcctaactacggctacactagaagaacagtatttggtatctgcgctctgctgaagccagttaccttcggaaaaagagttggtagctcttgatccggcaaacaaaccaccgctggtagcggtttttttgtttgcaagcagcagattacgcgcagaaaaaaaggatctcaagaagatcctttgatcttttctacggggtctgacgctcagtggaacgaaaactcacgttaagggattttggtcatgagattatcaaaaaggatcttcacctagatccttttaaattaaaaatgaagttttaaatcaatctaaagtatatatgagtaaacttggtctgacagttaccaatgcttaatcagtgaggcacctatctcagcgatctgtctatttcgttcatccatagttgcctgactccccgtcgtgtagataactacgatacgggagggcttaccatctggccccagtgctgcaatgataccgcgagacccacgctcaccggctccagatttatcagcaataaaccagccagccggaagggccgagcgcagaagtggtcctgcaactttatccgcctccatccagtctattaattgttgccgggaagctagagtaagtagttcgccagttaatagtttgcgcaacgttgttgccattgctacaggcatcgtggtgtcacgctcgtcgtttggtatggcttcattcagctccggttcccaacgatcaaggcgagttacatgatcccccatgttgtgcaaaaaagcggttagctccttcggtcctccgatcgttgtcagaagtaagttggccgcagtgttatcactcatggttatggcagcactgcataattctcttactgtcatgccatccgtaagatgcttttctgtgactggtgagtactcaaccaagtcattctgagaatagtgtatgcggcgaccgagttgctcttgcccggcgtcaatacgggataataccgcgccacatagcagaactttaaaagtgctcatcattggaaaacgttcttcggggcgaaaactctcaaggatcttaccgctgttgagatccagttcgatgtaacccactcgtgcacccaactgatcttcagcatcttttactttcaccagcgtttctgggtgagcaaaaacaggaaggcaaaatgccgcaaaaaagggaataagggcgacacggaaatgttgaatactcatactcttcctttttcaatattattgaagcatttatcagggttattgtctcatgagcggatacatatttgaatgtatttagaaaaataaacaaataggggttccgcgcacatttccccgaaaagtgccacctgacgtc

SEQ ID NO: 223 - protein, 245 aa, synthetic construct; identical to SEQ ID NO: 130
  REGION 1..245: note = pre-Fc6 polypeptide

SEQ ID NO: 224 - protein, 222 aa, synthetic construct; identical to SEQ ID NO: 3
  REGION 1..222: note = mature Fc6 protein

SEQ ID NO: 225 - protein, 237 aa, synthetic construct
  REGION 1..237: note = cleaved alkyne-modified TNR1B
  SITE 237: note = Xaa = cysteine-alkyne
LPAQVAFTPYAPEPGSTCRLREYYDQTAQMCCSKCSPGQHAKVFCTKTSDTVCDSCEDSTYTQLWNWVPECLSCGSRCSSDQVETQACTREQNRICTCRPGWYCALSKQEGCRLCAPLRKCRPGFGVARPGTETSDVVCKPCAPGTFSNTTSSTDICRPHQICNVVAIPGNASMDAVCTSTSPTRSMAPGAVHLPQPVSTRSQHTQPTPEPSTAPSTSFLLPMGPSPPAEGSTGDGX

SEQ ID NO: 226 - protein, 237 aa, synthetic construct; identical to SEQ ID NO: 225
  REGION 1..237: note = azide-modified TNR1B protein
  SITE 237: note = Xaa = cysteine-azide

SEQ ID NO: 227 - protein, 237 aa, synthetic construct
  REGION 1..237: note = cysteine-modified TNR1B
LPAQVAFTPYAPEPGSTCRLREYYDQTAQMCCSKCSPGQHAKVFCTKTSDTVCDSCEDSTYTQLWNWVPECLSCGSRCSSDQVETQACTREQNRICTCRPGWYCALSKQEGCRLCAPLRKCRPGFGVARPGTETSDVVCKPCAPGTFSNTTSSTDICRPHQICNVVAIPGNASMDAVCTSTSPTRSMAPGAVHLPQPVSTRSQHTQPTPEPSTAPSTSFLLPMGPSPPAEGSTGDGC

SEQ ID NO: 228 - protein, 236 aa, synthetic construct
  REGION 1..236: note = thioester-modified TNR1B
  SITE 236: note = Xaa = glycine-thioester
LPAQVAFTPYAPEPGSTCRLREYYDQTAQMCCSKCSPGQHAKVFCTKTSDTVCDSCEDSTYTQLWNWVPECLSCGSRCSSDQVETQACTREQNRICTCRPGWYCALSKQEGCRLCAPLRKCRPGFGVARPGTETSDVVCKPCAPGTFSNTTSSTDICRPHQICNVVAIPGNASMDAVCTSTSPTRSMAPGAVHLPQPVSTRSQHTQPTPEPSTAPSTSFLLPMGPSPPAEGSTGDX

SEQ ID NO: 229 - protein, 227 aa, synthetic construct
  REGION 1..227: note = Az-DKTHT-Fc6 protein
  SITE 1: note = Xaa = azide-aspartic acid
XKTHTCPPCPAPELLGGPSVFLFPPKPKDTLMISRTPEVTCVVVDVSHEDPEVKFNWYVDGVEVHNAKTKPREEQYNSTYRVVSVLTVLHQDWLNGKEYKCKVSNKALPAPIEKTISKAKGQPREPQVYTLPPSRDELTKNQVSLTCLVKGFYPSDIAVEWESNGQPENNYKTTPPVLDSDGSFFLYSKLTVDKSRWQQGNVFSCSVMHEALHNHYTQKSLSLSPGK

SEQ ID NO: 230 - protein, 227 aa, synthetic construct; identical to SEQ ID NO: 229
  REGION 1..227: note = Az-PEG4-DKTHT-Fc6
  SITE 1: note = Xaa = azide-PEG4-aspartic acid

SEQ ID NO: 231 - protein, 465 aa, synthetic construct
  REGION 1..465: note = Polypeptide with internal non-peptidyl moiety. TNR1B-alkyne-azide-Fc6
  SITE 238: note = Xaa = non-peptidyl moiety
LPAQVAFTPYAPEPGSTCRLREYYDQTAQMCCSKCSPGQHAKVFCTKTSDTVCDSCEDSTYTQLWNWVPECLSCGSRCSSDQVETQACTREQNRICTCRPGWYCALSKQEGCRLCAPLRKCRPGFGVARPGTETSDVVCKPCAPGTFSNTTSSTDICRPHQICNVVAIPGNASMDAVCTSTSPTRSMAPGAVHLPQPVSTRSQHTQPTPEPSTAPSTSFLLPMGPSPPAEGSTGDGCXDKTHTCPPCPAPELLGGPSVFLFPPKPKDTLMISRTPEVTCVVVDVSHEDPEVKFNWYVDGVEVHNAKTKPREEQYNSTYRVVSVLTVLHQDWLNGKEYKCKVSNKALPAPIEKTISKAKGQPREPQVYTLPPSRDELTKNQVSLTCLVKGFYPSDIAVEWESNGQPENNYKTTPPVLDSDGSFFLYSKLTVDKSRWQQGNVFSCSVMHEALHNHYTQKSLSLSPGK

SEQ ID NO: 232 - protein, 465 aa, synthetic construct; identical to SEQ ID NO: 231
  REGION 1..465: note = Polypeptide with internal non-peptidyl moiety. TNR1B-alkyne-azide-PEG4-Fc6
  SITE 238: note = Xaa = non-peptidyl moiety containing PEG4 linker

SEQ ID NO: 233 - protein, 467 aa, synthetic construct
  REGION 1..467: note = Etanercept
LPAQVAFTPYAPEPGSTCRLREYYDQTAQMCCSKCSPGQHAKVFCTKTSDTVCDSCEDSTYTQLWNWVPECLSCGSRCSSDQVETQACTREQNRICTCRPGWYCALSKQEGCRLCAPLRKCRPGFGVARPGTETSDVVCKPCAPGTFSNTTSSTDICRPHQICNVVAIPGNASMDAVCTSTSPTRSMAPGAVHLPQPVSTRSQHTQPTPEPSTAPSTSFLLPMGPSPPAEGSTGDEPKSCDKTHTCPPCPAPELLGGPSVFLFPPKPKDTLMISRTPEVTCVVVDVSHEDPEVKFNWYVDGVEVHNAKTKPREEQYNSTYRVVSVLTVLHQDWLNGKEYKCKVSNKALPAPIEKTISKAKGQPREPQVYTLPPSRDELTKNQVSLTCLVKGFYPSDIAVEWESNGQPENNYKTTPPVLDSDGSFFLYSKLTVDKSRWQQGNVFSCSVMHEALHNHYTQKSLSLSPGK

SEQ ID NO: 234 - DNA, 4175 bp, synthetic construct
  misc_feature 1..4175: note = pFUSE2ss-DE27-V -CLIg-hk
  source 1..4175: mol_type = other DNA
ggatctgcgatcgctccggtgcccgtcagtgggcagagcgcacatcgcccacagtccccgagaagttggggggaggggtcggcaattgaacgggtgcctagagaaggtggcgcggggtaaactgggaaagtgatgtcgtgtactggctccgcctttttcccgagggtgggggagaaccgtatataagtgcagtagtcgccgtgaacgttctttttcgcaacgggtttgccgccagaacacagctgaagcttcgaggggctcgcatctctccttcacgcgcccgccgccctacctgaggccgccatccacgccggttgagtcgcgttctgccgcctcccgcctgtggtgcctcctgaactgcgtccgccgtctaggtaagtttaaagctcaggtcgagaccgggcctttgtccggcgctcccttggagcctacctagactcagccggctctccacgctttgcctgaccctgcttgctcaactctacgtctttgtttcgttttctgttctgcgccgttacagatccaagctgtgaccggcgcctacctgagatcaacatgtacaggatgcaactcctgtcttgcattgcactaagtcttgcacttgtcacgaattcagacatccagatgacccagtctccatcctccctgtctgcatctgtaggggacagagtcaccatcacttgtcgggcaagtcagggcatcagaaattacttagcctggtatcagcaaaaaccagggaaagcccctaagctcctgatctatgctgcatccactttgcaatcaggggtcccatctcggttcagtggcagtggatctgggacagatttcactctcaccatcagcagcctacagcctgaagatgttgcaacttattactgtcaaaggtataaccgtgcaccgtatacttttggccaggggaccaaggtggaaatcaaacgtacggtggctgcaccatctgtcttcatcttcccgccatctgatgagcagttgaaatctggaactgcctctgttgtgtgcctgctgaataacttctatcccagagaggccaaagtacagtggaaggtggataacgccctccaatcgggtaactcccaggagagtgtcacagagcaggacagcaaggacagcacctacagcctcagcagcaccctgacgctgagcaaagcagactacgagaaacacaaagtctacgcctgcgaagtcacccatcagggcctgagctcgcccgtcacaaagagcttcaacaggggagagtgttagagggagctagctcgacatgataagatacattgatgagtttggacaaaccacaactagaatgcagtgaaaaaaatgctttatttgtgaaatttgtgatgctattgctttatttgtgaaatttgtgatgctattgctttatttgtaaccattataagctgcaataaacaagttaacaacaacaattgcattcattttatgtttcaggttcagggggaggtgtgggaggttttttaaagcaagtaaaacctctacaaatgtggtatggaattaattctaaaatacagcatagcaaaactttaacctccaaatcaagcctctacttgaatccttttctgagggatgaataaggcataggcatcaggggctgttgccaatgtgcattagctgtttgcagcctcaccttctttcatggagtttaagatatagtgtattttcccaaggtttgaactagctcttcatttctttatgttttaaatgcactgacctcccacattccctttttagtaaaatattcagaaataatttaaatacatcattgcaatgaaaataaatgttttttattaggcagaatccagatgctcaaggcccttcataatatcccccagtttagtagttggacttagggaacaaaggaacctttaatagaaattggacagcaagaaagcgagcttctagctttagttcctggtgtacttgagggggatgagttcctcaatggtggttttgaccagcttgccattcatctcaatgagcacaaagcagtcaggagcatagtcagagatgagctctctgcacatgccacaggggctgaccaccctgatggatctgtccacctcatcagagtaggggtgcctgacagccacaatggtgtcaaagtccttctgcccgttgctcacagcagacccaatggcaatggcttcagcacagacagtgaccctgccaatgtaggcctcaatgtggacagcagagatgatctccccagtcttggtcctgatggccgccccgacatggtgcttgttgtcctcatagagcatggtgatcttctcagtggcgacctccaccagctccagatcctgctgagagatgttgaaggtcttcatgatggctcctcctgtcaggagaggaaagagaagaaggttagtacaattgctatagtgagttgtattatactatgcttatgattaattgtcaaactagggctgcagggttcatagtgccacttttcctgcactgccccatctcctgcccaccctttcccaggcatagacagtcagtgacttaccaaactcacaggagggagaaggcagaagcttgagacagacccgcgggaccgccgaactgcgaggggacgtggctagggcggcttcttttatggtgcgccggccctcggaggcagggcgctcggggaggcctagcggccaatctgcggtggcaggaggcggggccgaaggccgtgcctgaccaatccggagcacataggagtctcagccccccgccccaaagcaaggggaagtcacgcgcctgtagcgccagcgtgttgtgaaatgggggcttgggggggttggggccctgactagtcaaaacaaactcccattgacgtcaatggggtggagacttggaaatccccgtgagtcaaaccgctatccacgcccattgatgtactgccaaaaccgcatcatcatggtaatagcgatgactaatacgtagatgtactgccaagtaggaaagtcccataaggtcatgtactgggcataatgccaggcgggccatttaccgtcattgacgtcaatagggggcgtacttggcatatgatacacttgatgtactgccaagtgggcagtttaccgtaaatactccacccattgacgtcaatggaaagtccctattggcgttactatgggaacatacgtcattattgacgtcaatgggcgggggtcgttgggcggtcagccaggcgggccatttaccgtaagttatgtaacgcctgcaggttaattaagaacatgtgagcaaaaggccagcaaaaggccaggaaccgtaaaaaggccgcgttgctggcgtttttccataggctccgcccccctgacgagcatcacaaaaatcgacgctcaagtcagaggtggcgaaacccgacaggactataaagataccaggcgtttccccctggaagctccctcgtgcgctctcctgttccgaccctgccgcttaccggatacctgtccgcctttctcccttcgggaagcgtggcgctttctcatagctcacgctgtaggtatctcagttcggtgtaggtcgttcgctccaagctgggctgtgtgcacgaaccccccgttcagcccgaccgctgcgccttatccggtaactatcgtcttgagtccaacccggtaagacacgacttatcgccactggcagcagccactggtaacaggattagcagagcgaggtatgtaggcggtgctacagagttcttgaagtggtggcctaactacggctacactagaagaacagtatttggtatctgcgctctgctgaagccagttaccttcggaaaaagagttggtagctcttgatccggcaaacaaaccaccgctggtagcggtggtttttttgtttgcaagcagcagattacgcgcagaaaaaaaggatctcaagaagatcctttgatcttttctacggggtctgacgctcagtggaacgaaaactcacgttaagggattttggtcatggctagttaattaacatttaaatcagcggccgcaataaaatatctttattttcattacatctgtgtgttggttttttgtgtgaatcgtaactaacatacgctctccatcaaaacaaaacgaaacaaaacaaactagcaaaataggctgtccccagtgcaagtgcaggtgccagaacatttctctatcgaa

SEQ ID NO: 235 - DNA, 4776 bp, synthetic construct
  misc_feature 1..4776: note = pPUSEss-DE27-V 1-CHIg-hG1-Mth-1
  source 1..4776: mol_type = other DNA
ggatctgcgatcgctccggtgcccgtcagtgggcagagcgcacatcgcccacagtccccgagaagttggggggaggggtcggcaattgaacgggtgcctagagaaggtggcgcggggtaaactgggaaagtgatgtcgtgtactggctccgcctttttcccgagggtgggggagaaccgtatataagtgcagtagtcgccgtgaacgttctttttcgcaacgggtttgccgccagaacacagctgaagcttcgaggggctcgcatctctccttcacgcgcccgccgccctacctgaggccgccatccacgccggttgagtcgcgttctgccgcctcccgcctgtggtgcctcctgaactgcgtccgccgtctaggtaagtttaaagctcaggtcgagaccgggcctttgtccggcgctcccttggagcctacctagactcagccggctctccacgctttgcctgaccctgcttgctcaactctacgtctttgtttcgttttctgttctgcgccgttacagatccaagctgtgaccggcgcctacctgagatcaccggcgaaggagggccaccatgtacaggatgcaactcctgtcttgcattgcactaagtcttgcacttgtcacgaattcggaggtgcagctggtggagtctgggggaggcttggtacagcccggcaggtccctgagactctcctgtgcggcctctggattcacctttgatgattatgccatgcactgggtccggcaagctccagggaagggcctggaatgggtctcagctatcacttggaatagtggtcacatagactatgcggactctgtggagggccgattcaccatctccagagacaacgccaagaactccctgtatctgcaaatgaacagtctgagagctgaggatacggccgtatattactgtgcgaaagtctcgtaccttagcaccgcgtcctcccttgactattggggccaaggtaccctggtcaccgtctcgagtgctagcaccaagggcccatcggtcttccccctggcaccctcctccaagagcacctctgggggcacagcggccctgggctgcctggtcaaggactacttccccgaaccggtgacggtgtcgtggaactcaggcgccctgaccagcggcgtgcacaccttcccggctgtcctacagtcctcaggactctactccctcagcagcgtggtgaccgtgccctccagcagcttgggcacccagacctacatctgcaacgtgaatcacaagcccagcaacaccaaggtggacaagaaagttgagcccaaatcttgtgacaaaactcacacatgcgtatccggtgacaccattgtaatgactagtggcgggccccgcactgtggctgaactggagggcaaaccgttcaccgcactgattcgcggctctggctacccatgcccctcaggtttcttccgcacctgtgaacgtgacgtatatgatctgcgtacacgtgagggtcattgcttacgtttgacccatgatcaccgtgttctggtgatggatggtggcctggaatggcgtgccgcgggtgaactggaacgcggcgaccgcctggtgatggatgatgcagctggcgagtttccggcactggcaaccttccgtggcctgcgtggcgctggccgccaggatgtttatgacgctactgtttacggtgctagcgcattcactgctaatggcttcattgtacacgcatgtggcgagcagcccgggaccggtctgaactcaggcctcacgacaaatcctggtgtatccgcttggcaggtcaacacagcttatactgcgggacaattggtcacatataacggcaagacgtataaatgtttgcagccccacacctccttggcaggatgggaaccatccaacgttcctgccttgtggcagcttcaatgagtcctagctggccagacatgataagatacattgatgagtttggacaaaccacaactagaatgcagtgaaaaaaatgctttatttgtgaaatttgtgatgctattgctttatttgtaaccattataagctgcaataaacaagttaacaacaacaattgcattcattttatgtttcaggttcagggggaggtgtgggaggttttttaaagcaagtaaaacctctacaaatgtggtatggaattaattctaaaatacagcatagcaaaactttaacctccaaatcaagcctctacttgaatccttttctgagggatgaataaggcataggcatcaggggctgttgccaatgtgcattagctgtttgcagcctcaccttctttcatggagtttaagatatagtgtattttcccaaggtttgaactagctcttcatttctttatgttttaaatgcactgacctcccacattccctttttagtaaaatattcagaaataatttaaatacatcattgcaatgaaaataaatgttttttattaggcagaatccagatgctcaaggcccttcataatatcccccagtttagtagttggacttagggaacaaaggaacctttaatagaaattggacagcaagaaagcgagcttctagcttatcctcagtcctgctcctctgccacaaagtgcacgcagttgccggccgggtcgcgcagggcgaactcccgcccccacggctgctcgccgatctcggtcatggccggcccggaggcgtcccggaagttcgtggacacgacctccgaccactcggcgtacagctcgtccaggccgcgcacccacacccaggccagggtgttgtccggcaccacctggtcctggaccgcgctgatgaacagggtcacgtcgtcccggaccacaccggcgaagtcgtcctccacgaagtcccgggagaacccgagccggtcggtccagaactcgaccgctccggcgacgtcgcgcgcggtgagcaccggaacggcactggtcaacttggccatgatggctcctcctgtcaggagaggaaagagaagaaggttagtacaattgctatagtgagttgtattatactatgcagatatactatgccaatgattaattgtcaaactagggctgcagggttcatagtgccacttttcctgcactgccccatctcctgcccaccctttcccaggcatagacagtcagtgacttaccaaactcacaggagggagaaggcagaagcttgagacagacccgcgggaccgccgaactgcgaggggacgtggctagggcggcttcttttatggtgcgccggccctcggaggcagggcgctcggggaggcctagcggccaatctgcggtggcaggaggcggggccgaaggccgtgcctgaccaatccggagcacataggagtctcagccccccgccccaaagcaaggggaagtcacgcgcctgtagcgccagcgtgttgtgaaatgggggcttgggggggttggggccctgactagtcaaaacaaactcccattgacgtcaatggggtggagacttggaaatccccgtgagtcaaaccgctatccacgcccattgatgtactgccaaaaccgcatcatcatggtaatagcgatgactaatacgtagatgtactgccaagtaggaaagtcccataaggtcatgtactgggcataatgccaggcgggccatttaccgtcattgacgtcaatagggggcgtacttggcatatgatacacttgatgtactgccaagtgggcagtttaccgtaaatactccacccattgacgtcaatggaaagtccctattggcgttactatgggaacatacgtcattattgacgtcaatgggcgggggtcgttgggcggtcagccaggcgggccatttaccgtaagttatgtaacgcctgcaggttaattaagaacatgtgagcaaaaggccagcaaaaggccaggaaccgtaaaaaggccgcgttgctggcgtttttccataggctccgcccccctgacgagcatcacaaaaatcgacgctcaagtcagaggtggcgaaacccgacaggactataaagataccaggcgtttccccctggaagctccctcgtgcgctctcctgttccgaccctgccgcttaccggatacctgtccgcctttctcccttcgggaagcgtggcgctttctcatagctcacgctgtaggtatctcagttcggtgtaggtcgttcgctccaagctgggctgtgtgcacgaaccccccgttcagcccgaccgctgcgccttatccggtaactatcgtcttgagtccaacccggtaagacacgacttatcgccactggcagcagccactggtaacaggattagcagagcgaggtatgtaggcggtgctacagagttcttgaagtggtggcctaactacggctacactagaagaacagtatttggtatctgcgctctgctgaagccagttaccttcggaaaaagagttggtagctcttgatccggcaaacaaaccaccgctggtagcggtggtttttttgtttgcaagcagcagattacgcgcagaaaaaaaggatctcaagaagatcctttgatcttttctacggggtctgacgctcagtggaacgaaaactcacgttaagggattttggtcatggctagttaattaacatttaaatcagcggccgcaataaaatatctttattttcattacatctgtgtgttggttttttgtgtgaatcgtaactaacatacgctctccatcaaaacaaaacgaaacaaaacaaactagcaaaataggctgtccccagtgcaagtgcaggtgccagaacatttctctatcgaa

SEQ ID NO: 236 - DNA, 4779 bp, synthetic construct
  misc_feature 1..4779: note = pFUSEss-DE27-V 1-CHIg-hG1-Mth-2
  source 1..4779: mol_type = other DNA
ggatctgcgatcgctccggtgcccgtcagtgggcagagcgcacatcgcccacagtccccgagaagttggggggaggggtcggcaattgaacgggtgcctagagaaggtggcgcggggtaaactgggaaagtgatgtcgtgtactggctccgcctttttcccgagggtgggggagaaccgtatataagtgcagtagtcgccgtgaacgttctttttcgcaacgggtttgccgccagaacacagctgaagcttcgaggggctcgcatctctccttcacgcgcccgccgccctacctgaggccgccatccacgccggttgagtcgcgttctgccgcctcccgcctgtggtgcctcctgaactgcgtccgccgtctaggtaagtttaaagctcaggtcgagaccgggcctttgtccggcgctcccttggagcctacctagactcagccggctctccacgctttgcctgaccctgcttgctcaactctacgtctttgtttcgttttctgttctgcgccgttacagatccaagctgtgaccggcgcctacctgagatcaccggcgaaggagggccaccatgtacaggatgcaactcctgtcttgcattgcactaagtcttgcacttgtcacgaattcggaggtgcagctggtggagtctgggggaggcttggtacagcccggcaggtccctgagactctcctgtgcggcctctggattcacctttgatgattatgccatgcactgggtccggcaagctccagggaagggcctggaatgggtctcagctatcacttggaatagtggtcacatagactatgcggactctgtggagggccgattcaccatctccagagacaacgccaagaactccctgtatctgcaaatgaacagtctgagagctgaggatacggccgtatattactgtgcgaaagtctcgtaccttagcaccgcgtcctcccttgactattggggccaaggtaccctggtcaccgtctcgagtgctagcaccaagggcccatcggtcttccccctggcaccctcctccaagagcacctctgggggcacagcggccctgggctgcctggtcaaggactacttccccgaaccggtgacggtgtcgtggaactcaggcgccctgaccagcggcgtgcacaccttcccggctgtcctacagtcctcaggactctactccctcagcagcgtggtgaccgtgccctccagcagcttgggcacccagacctacatctgcaacgtgaatcacaagcccagcaacaccaaggtggacaagaaagttgagcccaaatcttgtgacaaaactcacacagggtgcgtatccggtgacaccattgtaatgactagtggcgggccccgcactgtggctgaactggagggcaaaccgttcaccgcactgattcgcggctctggctacccatgcccctcaggtttcttccgcacctgtgaacgtgacgtatatgatctgcgtacacgtgagggtcattgcttacgtttgacccatgatcaccgtgttctggtgatggatggtggcctggaatggcgtgccgcgggtgaactggaacgcggcgaccgcctggtgatggatgatgcagctggcgagtttccggcactggcaaccttccgtggcctgcgtggcgctggccgccaggatgtttatgacgctactgtttacggtgctagcgcattcactgctaatggcttcattgtacacgcatgtggcgagcagcccgggaccggtctgaactcaggcctcacgacaaatcctggtgtatccgcttggcaggtcaacacagcttatactgcgggacaattggtcacatataacggcaagacgtataaatgtttgcagccccacacctccttggcaggatgggaaccatccaacgttcctgccttgtggcagcttcaatgagtcctagctggccagacatgataagatacattgatgagtttggacaaaccacaactagaatgcagtgaaaaaaatgctttatttgtgaaatttgtgatgctattgctttatttgtaaccattataagctgcaataaacaagttaacaacaacaattgcattcattttatgtttcaggttcagggggaggtgtgggaggttttttaaagcaagtaaaacctctacaaatgtggtatggaattaattctaaaatacagcatagcaaaactttaacctccaaatcaagcctctacttgaatccttttctgagggatgaataaggcataggcatcaggggctgttgccaatgtgcattagctgtttgcagcctcaccttctttcatggagtttaagatatagtgtattttcccaaggtttgaactagctcttcatttctttatgttttaaatgcactgacctcccacattccctttttagtaaaatattcagaaataatttaaatacatcattgcaatgaaaataaatgttttttattaggcagaatccagatgctcaaggcccttcataatatcccccagtttagtagttggacttagggaacaaaggaacctttaatagaaattggacagcaagaaagcgagcttctagcttatcctcagtcctgctcctctgccacaaagtgcacgcagttgccggccgggtcgcgcagggcgaactcccgcccccacggctgctcgccgatctcggtcatggccggcccggaggcgtcccggaagttcgtggacacgacctccgaccactcggcgtacagctcgtccaggccgcgcacccacacccaggccagggtgttgtccggcaccacctggtcctggaccgcgctgatgaacagggtcacgtcgtcccggaccacaccggcgaagtcgtcctccacgaagtcccgggagaacccgagccggtcggtccagaactcgaccgctccggcgacgtcgcgcgcggtgagcaccggaacggcactggtcaacttggccatgatggctcctcctgtcaggagaggaaagagaagaaggttagtacaattgctatagtgagttgtattatactatgcagatatactatgccaatgattaattgtcaaactagggctgcagggttcatagtgccacttttcctgcactgccccatctcctgcccaccctttcccaggcatagacagtcagtgacttaccaaactcacaggagggagaaggcagaagcttgagacagacccgcgggaccgccgaactgcgaggggacgtggctagggcggcttcttttatggtgcgccggccctcggaggcagggcgctcggggaggcctagcggccaatctgcggtggcaggaggcggggccgaaggccgtgcctgaccaatccggagcacataggagtctcagccccccgccccaaagcaaggggaagtcacgcgcctgtagcgccagcgtgttgtgaaatgggggcttgggggggttggggccctgactagtcaaaacaaactcccattgacgtcaatggggtggagacttggaaatccccgtgagtcaaaccgctatccacgcccattgatgtactgccaaaaccgcatcatcatggtaatagcgatgactaatacgtagatgtactgccaagtaggaaagtcccataaggtcatgtactgggcataatgccaggcgggccatttaccgtcattgacgtcaatagggggcgtacttggcatatgatacacttgatgtactgccaagtgggcagtttaccgtaaatactccacccattgacgtcaatggaaagtccctattggcgttactatgggaacatacgtcattattgacgtcaatgggcgggggtcgttgggcggtcagccaggcgggccatttaccgtaagttatgtaacgcctgcaggttaattaagaacatgtgagcaaaaggccagcaaaaggccaggaaccgtaaaaaggccgcgttgctggcgtttttccataggctccgcccccctgacgagcatcacaaaaatcgacgctcaagtcagaggtggcgaaacccgacaggactataaagataccaggcgtttccccctggaagctccctcgtgcgctctcctgttccgaccctgccgcttaccggatacctgtccgcctttctcccttcgggaagcgtggcgctttctcatagctcacgctgtaggtatctcagttcggtgtaggtcgttcgctccaagctgggctgtgtgcacgaaccccccgttcagcccgaccgctgcgccttatccggtaactatcgtcttgagtccaacccggtaagacacgacttatcgccactggcagcagccactggtaacaggattagcagagcgaggtatgtaggcggtgctacagagttcttgaagtggtggcctaactacggctacactagaagaacagtatttggtatctgcgctctgctgaagccagttaccttcggaaaaagagttggtagctcttgatccggcaaacaaaccaccgctggtagcggtggtttttttgtttgcaagcagcagattacgcgcagaaaaaaaggatctcaagaagatcctttgatcttttctacggggtctgacgctcagtggaacgaaaactcacgttaagggattttggtcatggctagttaattaacatttaaatcagcggccgcaataaaatatctttattttcattacatctgtgtgttggttttttgtgtgaatcgtaactaacatacgctctccatcaaaacaaaacgaaacaaaacaaactagcaaaataggctgtccccagtgcaagtgcaggtgccagaacatttctctatcgaa

SEQ ID NO: 237 - protein, 234 aa, synthetic construct
  REGION 1..234: note = pre-kappa light chain of adalimumab
MYRMQLLSCIALSLALVTNSDIQMTQSPSSLSASVGDRVTITCRASQGIRNYLAWYQQKPGKAPKLLIYAASTLQSGVPSRFSGSGSGTDFTLTISSLQPEDVATYYCQRYNRAPYTFGQGTKVEIKRTVAAPSVFIFPPSDEQLKSGTASVVCLLNNFYPREAKVQWKVDNALQSGNSQESVTEQDSKDSTYSLSSTLTLSKADYEKHKVYACEVTHQGLSSPVTKSFNRGEC

SEQ ID NO: 238 - protein, 214 aa, synthetic construct
  REGION 1..214: note = mature kappa light chain of adalimumab
DIQMTQSPSSLSASVGDRVTITCRASQGIRNYLAWYQQKPGKAPKLLIYAASTLQSGVPSRFSGSGSGTDFTLTISSLQPEDVATYYCQRYNRAPYTFGQGTKVEIKRTVAAPSVFIFPPSDEQLKSGTASVVCLLNNFYPREAKVQWKVDNALQSGNSQESVTEQDSKDSTYSLSSTLTLSKADYEKHKVYACEVTHQGLSSPVTKSFNRGEC

SEQ ID NO: 239 - protein, 448 aa, synthetic construct
  REGION 1..448: note = pre-heavy chain-intein chimeric polypeptide
MYRMQLLSCIALSLALVTNSEVQLVESGGGLVQPGRSLRLSCAASGFTFDDYAMHWVRQAPGKGLEWVSAITWNSGHIDYADSVEGRFTISRDNAKNSLYLQMNSLRAEDTAVYYCAKVSYLSTASSLDYWGQGTLVTVSSASTKGPSVFPLAPSSKSTSGGTAALGCLVKDYFPEPVTVSWNSGALTSGVHTFPAVLQSSGLYSLSSVVTVPSSSLGTQTYICNVNHKPSNTKVDKKVEPKSCDKTHTCVSGDTIVMTSGGPRTVAELEGKPFTALIRGSGYPCPSGFFRTCERDVYDLRTREGHCLRLTHDHRVLVMDGGLEWRAAGELERGDRLVMDDAAGEFPALATFRGLRGAGRQDVYDATVYGASAFTANGFIVHACGEQPGTGLNSGLTTNPGVSAWQVNTAYTAGQLVTYNGKTYKCLQPHTSLAGWEPSNVPALWQLQ

SEQ ID NO: 240 - protein, 428 aa, synthetic construct
  REGION 1..428: note = mature heavy chain-intein fusion protein
EVQLVESGGGLVQPGRSLRLSCAASGFTFDDYAMHWVRQAPGKGLEWVSAITWNSGHIDYADSVEGRFTISRDNAKNSLYLQMNSLRAEDTAVYYCAKVSYLSTASSLDYWGQGTLVTVSSASTKGPSVFPLAPSSKSTSGGTAALGCLVKDYFPEPVTVSWNSGALTSGVHTFPAVLQSSGLYSLSSVVTVPSSSLGTQTYICNVNHKPSNTKVDKKVEPKSCDKTHTCVSGDTIVMTSGGPRTVAELEGKPFTALIRGSGYPCPSGFFRTCERDVYDLRTREGHCLRLTHDHRVLVMDGGLEWRAAGELERGDRLVMDDAAGEFPALATFRGLRGAGRQDVYDATVYGASAFTANGFIVHACGEQPGTGLNSGLTTNPGVSAWQVNTAYTAGQLVTYNGKTYKCLQPHTSLAGWEPSNVPALWQLQ

SEQ ID NO: 241 - protein, 449 aa, synthetic construct
  REGION 1..449: note = pre-heavy chain-intein chimeric polypeptide
MYRMQLLSCIALSLALVTNSEVQLVESGGGLVQPGRSLRLSCAASGFTFDDYAMHWVRQAPGKGLEWVSAITWNSGHIDYADSVEGRFTISRDNAKNSLYLQMNSLRAEDTAVYYCAKVSYLSTASSLDYWGQGTLVTVSSASTKGPSVFPLAPSSKSTSGGTAALGCLVKDYFPEPVTVSWNSGALTSGVHTFPAVLQSSGLYSLSSVVTVPSSSLGTQTYICNVNHKPSNTKVDKKVEPKSCDKTHTGCVSGDTIVMTSGGPRTVAELEGKPFTALIRGSGYPCPSGFFRTCERDVYDLRTREGHCLRLTHDHRVLVMDGGLEWRAAGELERGDRLVMDDAAGEFPALATFRGLRGAGRQDVYDATVYGASAFTANGFIVHACGEQPGTGLNSGLTTNPGVSAWQVNTAYTAGQLVTYNGKTYKCLQPHTSLAGWEPSNVPALWQLQ

SEQ ID NO: 242 - protein, 429 aa, synthetic construct
  REGION 1..429: note = mature heavy chain-intein fusion protein
EVQLVESGGGLVQPGRSLRLSCAASGFTFDDYAMHWVRQAPGKGLEWVSAITWNSGHIDYADSVEGRFTISRDNAKNSLYLQMNSLRAEDTAVYYCAKVSYLSTASSLDYWGQGTLVTVSSASTKGPSVFPLAPSSKSTSGGTAALGCLVKDYFPEPVTVSWNSGALTSGVHTFPAVLQSSGLYSLSSVVTVPSSSLGTQTYICNVNHKPSNTKVDKKVEPKSCDKTHTGCVSGDTIVMTSGGPRTVAELEGKPFTALIRGSGYPCPSGFFRTCERDVYDLRTREGHCLRLTHDHRVLVMDGGLEWRAAGELERGDRLVMDDAAGEFPALATFRGLRGAGRQDVYDATVYGASAFTANGFIVHACGEQPGTGLNSGLTTNPGVSAWQVNTAYTAGQLVTYNGKTYKCLQPHTSLAGWEPSNVPALWQLQ

SEQ ID NO: 243 - protein, 230 aa, synthetic construct
  REGION 1..230: note = Part of alkyne-modified adalimumab Fab-1 protein. Modified at C-Terminus.
  SITE 230: note = Xaa = cysteine-alkyne
EVQLVESGGGLVQPGRSLRLSCAASGFTFDDYAMHWVRQAPGKGLEWVSAITWNSGHIDYADSVEGRFTISRDNAKNSLYLQMNSLRAEDTAVYYCAKVSYLSTASSLDYWGQGTLVTVSSASTKGPSVFPLAPSSKSTSGGTAALGCLVKDYFPEPVTVSWNSGALTSGVHTFPAVLQSSGLYSLSSVVTVPSSSLGTQTYICNVNHKPSNTKVDKKVEPKSCDKTHTX

SEQ ID NO: 244 - protein, 231 aa, synthetic construct
  REGION 1..231: note = Part of alkyne-modified adalimumab Fab-2 protein. Motified at C-Terminus
  SITE 131: note = Xaa = cysteine-alkyne
  SITE 231: note = misc_feature - Xaa can be any naturally occurring amino acid
EVQLVESGGGLVQPGRSLRLSCAASGFTFDDYAMHWVRQAPGKGLEWVSAITWNSGHIDYADSVEGRFTISRDNAKNSLYLQMNSLRAEDTAVYYCAKVSYLSTASSLDYWGQGTLVTVSSASTKGPSVFPLAPSSKSTSGGTAALGCLVKDYFPEPVTVSWNSGALTSGVHTFPAVLQSSGLYSLSSVVTVPSSSLGTQTYICNVNHKPSNTKVDKKVEPKSCDKTHTGX

SEQ ID NO: 245 - protein, 230 aa, synthetic construct; identical to SEQ ID NO: 243
  REGION 1..230: note = Part of azide-modified adalimumab Fab-1 protein. Modified C-Terminus
  SITE 230: note = Xaa = cysteine-azide

SEQ ID NO: 246 - protein, 231 aa, synthetic construct; identical to SEQ ID NO: 244
  REGION 1..231: note = Part of azide-modified adalimumab Fab-2 protein. Modified C-Terminus
  SITE 231: note = Xaa = cysteine-azide

SEQ ID NO: 247 - protein, 214 aa, Homo sapiens
DIQMTQSPSSLSASVGDRVTITCRASQDVNTAVAWYQQKPGKAPKLLIYSASFLYSGVPSRFSGSRSGTDFTLTISSLQPEDFATYYCQQHYTTPPTFGQGTKVEIKRTVAAPSVFIFPPSDEQLKSGTASVVCLLNNFYPREAKVQWKVDNALQSGNSQESVTEQDSKDSTYSLSSTLTLSKADYEKHKVYACEVTHQGLSSPVTKSFNRGEC

SEQ ID NO: 248 - protein, 450 aa, Homo sapiens
EVQLVESGGGLVQPGGSLRLSCAASGFNIKDTYIHWVRQAPGKGLEWVARIYPTNGYTRYADSVKGRFTISADTSKNTAYLQMNSLRAEDTAVYYCSRWGGDGFYAMDYWGQGTLVTVSSASTKGPSVFPLAPSSKSTSGGTAALGCLVKDYFPEPVTVSWNSGALTSGVHTFPAVLQSSGLYSLSSVVTVPSSSLGTQTYICNVNHKPSNTKVDKKVEPKSCDKTHTCPPCPAPELLGGPSVFLFPPKPKDTLMISRTPEVTCVVVDVSHEDPEVKFNWYVDGVEVHNAKTKPREEQYNSTYRVVSVLTVLHQDWLNGKEYKCKVSNKALPAPIEKTISKAKGQPREPQVYTLPPSRDELTKNQVSLTCLVKGFYPSDIAVEWESNGQPENNYKTTPPVLDSDGSFFLYSKLTVDKSRWQQGNVFSCSVMHEALHNHYTQKSLSLSPGK

SEQ ID NO: 249 - protein, 215 aa, synthetic construct
  REGION 1..215: note = Trastuzumab light chain having the N-terminal sequence C
CDIQMTQSPSSLSASVGDRVTITCRASQDVNTAVAWYQQKPGKAPKLLIYSASFLYSGVPSRFSGSRSGTDFTLTISSLQPEDFATYYCQQHYTTPPTFGQGTKVEIKRTVAAPSVFIFPPSDEQLKSGTASVVCLLNNFYPREAKVQWKVDNALQSGNSQESVTEQDSKDSTYSLSSTLTLSKADYEKHKVYACEVTHQGLSSPVTKSFNRGEC

SEQ ID NO: 250 - protein, 238 aa, synthetic construct
  REGION 1..238: note = pre-light chimeric polypeptide having SHH signal peptide
MLLLARCLLLVLVSSLLVCSGLACDIQMTQSPSSLSASVGDRVTITCRASQDVNTAVAWYQQKPGKAPKLLIYSASFLYSGVPSRFSGSRSGTDFTLTISSLQPEDFATYYCQQHYTTPPTFGQGTKVEIKRTVAAPSVFIFPPSDEQLKSGTASVVCLLNNFYPREAKVQWKVDNALQSGNSQESVTEQDSKDSTYSLSSTLTLSKADYEKHKVYACEVTHQGLSSPVTKSFNRGEC

SEQ ID NO: 251 - protein, 238 aa, synthetic construct
  REGION 1..238: note = pre-light chimeric polypeptide having IFN signal peptide
MALTFALLVALLVLSCKSSCSVGCDIQMTQSPSSLSASVGDRVTITCRASQDVNTAVAWYQQKPGKAPKLLIYSASFLYSGVPSRFSGSRSGTDFTLTISSLQPEDFATYYCQQHYTTPPTFGQGTKVEIKRTVAAPSVFIFPPSDEQLKSGTASVVCLLNNFYPREAKVQWKVDNALQSGNSQESVTEQDSKDSTYSLSSTLTLSKADYEKHKVYACEVTHQGLSSPVTKSFNRGEC

SEQ ID NO: 252 - protein, 232 aa, synthetic construct
  REGION 1..232: note = pre-light chimeric polypeptide having CETP signal peptide
MLAATVLTLALLGNAHACDIQMTQSPSSLSASVGDRVTITCRASQDVNTAVAWYQQKPGKAPKLLIYSASFLYSGVPSRFSGSRSGTDFTLTISSLQPEDFATYYCQQHYTTPPTFGQGTKVEIKRTVAAPSVFIFPPSDEQLKSGTASVVCLLNNFYPREAKVQWKVDNALQSGNSQESVTEQDSKDSTYSLSSTLTLSKADYEKHKVYACEVTHQGLSSPVTKSFNRGEC

SEQ ID NO: 253 - protein, 216 aa, synthetic construct
  REGION 1..216: note = Trastuzumab light chain having the N-terminal sequence CP
CPDIQMTQSPSSLSASVGDRVTITCRASQDVNTAVAWYQQKPGKAPKLLIYSASFLYSGVPSRFSGSRSGTDFTLTISSLQPEDFATYYCQQHYTTPPTFGQGTKVEIKRTVAAPSVFIFPPSDEQLKSGTASVVCLLNNFYPREAKVQWKVDNALQSGNSQESVTEQDSKDSTYSLSSTLTLSKADYEKHKVYACEVTHQGLSSPVTKSFNRGEC

SEQ ID NO: 254 - protein, 239 aa, synthetic construct
  REGION 1..239: note = pre-light chimeric polypeptide having SHH signal peptide
MLLLARCLLLVLVSSLLVCSGLACPDIQMTQSPSSLSASVGDRVTITCRASQDVNTAVAWYQQKPGKAPKLLIYSASFLYSGVPSRFSGSRSGTDFTLTISSLQPEDFATYYCQQHYTTPPTFGQGTKVEIKRTVAAPSVFIFPPSDEQLKSGTASVVCLLNNFYPREAKVQWKVDNALQSGNSQESVTEQDSKDSTYSLSSTLTLSKADYEKHKVYACEVTHQGLSSPVTKSFNRGEC

SEQ ID NO: 255 - protein, 239 aa, synthetic construct
  REGION 1..239: note = pre-light chimeric polypeptide having IFN signal peptide
MALTFALLVALLVLSCKSSCSVGCPDIQMTQSPSSLSASVGDRVTITCRASQDVNTAVAWYQQKPGKAPKLLIYSASFLYSGVPSRFSGSRSGTDFTLTISSLQPEDFATYYCQQHYTTPPTFGQGTKVEIKRTVAAPSVFIFPPSDEQLKSGTASVVCLLNNFYPREAKVQWKVDNALQSGNSQESVTEQDSKDSTYSLSSTLTLSKADYEKHKVYACEVTHQGLSSPVTKSFNRGEC

SEQ ID NO: 256 - protein, 233 aa, synthetic construct
  REGION 1..233: note = pre-light chimeric polypeptide having CETP signal peptide
MLAATVLTLALLGNAHACPDIQMTQSPSSLSASVGDRVTITCRASQDVNTAVAWYQQKPGKAPKLLIYSASFLYSGVPSRFSGSRSGTDFTLTISSLQPEDFATYYCQQHYTTPPTFGQGTKVEIKRTVAAPSVFIFPPSDEQLKSGTASVVCLLNNFYPREAKVQWKVDNALQSGNSQESVTEQDSKDSTYSLSSTLTLSKADYEKHKVYACEVTHQGLSSPVTKSFNRGEC

SEQ ID NO: 257 - protein, 217 aa, synthetic construct
  REGION 1..217: note = Trastuzumab light chain having the N-terminal sequence CPP
CPPDIQMTQSPSSLSASVGDRVTITCRASQDVNTAVAWYQQKPGKAPKLLIYSASFLYSGVPSRFSGSRSGTDFTLTISSLQPEDFATYYCQQHYTTPPTFGQGTKVEIKRTVAAPSVFIFPPSDEQLKSGTASVVCLLNNFYPREAKVQWKVDNALQSGNSQESVTEQDSKDSTYSLSSTLTLSKADYEKHKVYACEVTHQGLSSPVTKSFNRGEC

SEQ ID NO: 258 - protein, 240 aa, synthetic construct
  REGION 1..240: note = pre-light chimeric polypeptide having SHH signal peptide
MLLLARCLLLVLVSSLLVCSGLACPPDIQMTQSPSSLSASVGDRVTITCRASQDVNTAVAWYQQKPGKAPKLLIYSASFLYSGVPSRFSGSRSGTDFTLTISSLQPEDFATYYCQQHYTTPPTFGQGTKVEIKRTVAAPSVFIFPPSDEQLKSGTASVVCLLNNFYPREAKVQWKVDNALQSGNSQESVTEQDSKDSTYSLSSTLTLSKADYEKHKVYACEVTHQGLSSPVTKSFNRGEC

SEQ ID NO: 259 - protein, 240 aa, synthetic construct
  REGION 1..240: note = pre-light chimeric polypeptide having IFN signal peptide
MALTFALLVALLVLSCKSSCSVGCPPDIQMTQSPSSLSASVGDRVTITCRASQDVNTAVAWYQQKPGKAPKLLIYSASFLYSGVPSRFSGSRSGTDFTLTISSLQPEDFATYYCQQHYTTPPTFGQGTKVEIKRTVAAPSVFIFPPSDEQLKSGTASVVCLLNNFYPREAKVQWKVDNALQSGNSQESVTEQDSKDSTYSLSSTLTLSKADYEKHKVYACEVTHQGLSSPVTKSFNRGEC

SEQ ID NO: 260 - protein, 234 aa, synthetic construct
  REGION 1..234: note = pre-light chimeric polypeptide having CETP signal peptide
MLAATVLTLALLGNAHACPPDIQMTQSPSSLSASVGDRVTITCRASQDVNTAVAWYQQKPGKAPKLLIYSASFLYSGVPSRFSGSRSGTDFTLTISSLQPEDFATYYCQQHYTTPPTFGQGTKVEIKRTVAAPSVFIFPPSDEQLKSGTASVVCLLNNFYPREAKVQWKVDNALQSGNSQESVTEQDSKDSTYSLSSTLTLSKADYEKHKVYACEVTHQGLSSPVTKSFNRGEC

SEQ ID NO: 261 - protein, 217 aa, synthetic construct
  REGION 1..217: note = Trastuzumab light chain having the N-terminal sequence CPR
CPRDIQMTQSPSSLSASVGDRVTITCRASQDVNTAVAWYQQKPGKAPKLLIYSASFLYSGVPSRFSGSRSGTDFTLTISSLQPEDFATYYCQQHYTTPPTFGQGTKVEIKRTVAAPSVFIFPPSDEQLKSGTASVVCLLNNFYPREAKVQWKVDNALQSGNSQESVTEQDSKDSTYSLSSTLTLSKADYEKHKVYACEVTHQGLSSPVTKSFNRGEC

SEQ ID NO: 262 - protein, 240 aa, synthetic construct
  REGION 1..240: note = pre-light chimeric polypeptide having SHH signal peptide
MLLLARCLLLVLVSSLLVCSGLACPRDIQMTQSPSSLSASVGDRVTITCRASQDVNTAVAWYQQKPGKAPKLLIYSASFLYSGVPSRFSGSRSGTDFTLTISSLQPEDFATYYCQQHYTTPPTFGQGTKVEIKRTVAAPSVFIFPPSDEQLKSGTASVVCLLNNFYPREAKVQWKVDNALQSGNSQESVTEQDSKDSTYSLSSTLTLSKADYEKHKVYACEVTHQGLSSPVTKSFNRGEC

SEQ ID NO: 263 - protein, 240 aa, synthetic construct
  REGION 1..240: note = pre-light chimeric polypeptide having IFN signal peptide
MALTFALLVALLVLSCKSSCSVGCPRDIQMTQSPSSLSASVGDRVTITCRASQDVNTAVAWYQQKPGKAPKLLIYSASFLYSGVPSRFSGSRSGTDFTLTISSLQPEDFATYYCQQHYTTPPTFGQGTKVEIKRTVAAPSVFIFPPSDEQLKSGTASVVCLLNNFYPREAKVQWKVDNALQSGNSQESVTEQDSKDSTYSLSSTLTLSKADYEKHKVYACEVTHQGLSSPVTKSFNRGEC

SEQ ID NO: 264 - protein, 234 aa, synthetic construct
  REGION 1..234: note = pre-light chimeric polypeptide having CETP signal peptide
MLAATVLTLALLGNAHACPRDIQMTQSPSSLSASVGDRVTITCRASQDVNTAVAWYQQKPGKAPKLLIYSASFLYSGVPSRFSGSRSGTDFTLTISSLQPEDFATYYCQQHYTTPPTFGQGTKVEIKRTVAAPSVFIFPPSDEQLKSGTASVVCLLNNFYPREAKVQWKVDNALQSGNSQESVTEQDSKDSTYSLSSTLTLSKADYEKHKVYACEVTHQGLSSPVTKSFNRGEC

SEQ ID NO: 265 - protein, 217 aa, synthetic construct
  REGION 1..217: note = Trastuzumab light chain having the N-terminal sequence CPS
CPSDIQMTQSPSSLSASVGDRVTITCRASQDVNTAVAWYQQKPGKAPKLLIYSASFLYSGVPSRFSGSRSGTDFTLTISSLQPEDFATYYCQQHYTTPPTFGQGTKVEIKRTVAAPSVFIFPPSDEQLKSGTASVVCLLNNFYPREAKVQWKVDNALQSGNSQESVTEQDSKDSTYSLSSTLTLSKADYEKHKVYACEVTHQGLSSPVTKSFNRGEC

SEQ ID NO: 266 - protein, 240 aa, synthetic construct
  REGION 1..240: note = pre-light chimeric polypeptide having SHH signal peptide
MLLLARCLLLVLVSSLLVCSGLACPSDIQMTQSPSSLSASVGDRVTITCRASQDVNTAVAWYQQKPGKAPKLLIYSASFLYSGVPSRFSGSRSGTDFTLTISSLQPEDFATYYCQQHYTTPPTFGQGTKVEIKRTVAAPSVFIFPPSDEQLKSGTASVVCLLNNFYPREAKVQWKVDNALQSGNSQESVTEQDSKDSTYSLSSTLTLSKADYEKHKVYACEVTHQGLSSPVTKSFNRGEC

SEQ ID NO: 267 - protein, 240 aa, synthetic construct
  REGION 1..240: note = pre-light chimeric polypeptide having IFN signal peptide
MALTFALLVALLVLSCKSSCSVGCPSDIQMTQSPSSLSASVGDRVTITCRASQDVNTAVAWYQQKPGKAPKLLIYSASFLYSGVPSRFSGSRSGTDFTLTISSLQPEDFATYYCQQHYTTPPTFGQGTKVEIKRTVAAPSVFIFPPSDEQLKSGTASVVCLLNNFYPREAKVQWKVDNALQSGNSQESVTEQDSKDSTYSLSSTLTLSKADYEKHKVYACEVTHQGLSSPVTKSFNRGEC

SEQ ID NO: 268 - protein, 234 aa, synthetic construct
  REGION 1..234: note = pre-light chimeric polypeptide having CETP signal peptide
MLAATVLTLALLGNAHACPSDIQMTQSPSSLSASVGDRVTITCRASQDVNTAVAWYQQKPGKAPKLLIYSASFLYSGVPSRFSGSRSGTDFTLTISSLQPEDFATYYCQQHYTTPPTFGQGTKVEIKRTVAAPSVFIFPPSDEQLKSGTASVVCLLNNFYPREAKVQWKVDNALQSGNSQESVTEQDSKDSTYSLSSTLTLSKADYEKHKVYACEVTHQGLSSPVTKSFNRGEC

SEQ ID NO: 269 - protein, 218 aa, synthetic construct
  REGION 1..218: note = Trastuzumab light chain having the N-terminal sequence CDKT
CDKTDIQMTQSPSSLSASVGDRVTITCRASQDVNTAVAWYQQKPGKAPKLLIYSASFLYSGVPSRFSGSRSGTDFTLTISSLQPEDFATYYCQQHYTTPPTFGQGTKVEIKRTVAAPSVFIFPPSDEQLKSGTASVVCLLNNFYPREAKVQWKVDNALQSGNSQESVTEQDSKDSTYSLSSTLTLSKADYEKHKVYACEVTHQGLSSPVTKSFNRGEC

SEQ ID NO: 270 - protein, 241 aa, synthetic construct
  REGION 1..241: note = pre-light chimeric polypeptide having SHH signal peptide
MLLLARCLLLVLVSSLLVCSGLACDKTDIQMTQSPSSLSASVGDRVTITCRASQDVNTAVAWYQQKPGKAPKLLIYSASFLYSGVPSRFSGSRSGTDFTLTISSLQPEDFATYYCQQHYTTPPTFGQGTKVEIKRTVAAPSVFIFPPSDEQLKSGTASVVCLLNNFYPREAKVQWKVDNALQSGNSQESVTEQDSKDSTYSLSSTLTLSKADYEKHKVYACEVTHQGLSSPVTKSFNRGEC

SEQ ID NO: 271 - protein, 241 aa, synthetic construct
  REGION 1..241: note = pre-light chimeric polypeptide having IFN signal peptide
MALTFALLVALLVLSCKSSCSVGCDKTDIQMTQSPSSLSASVGDRVTITCRASQDVNTAVAWYQQKPGKAPKLLIYSASFLYSGVPSRFSGSRSGTDFTLTISSLQPEDFATYYCQQHYTTPPTFGQGTKVEIKRTVAAPSVFIFPPSDEQLKSGTASVVCLLNNFYPREAKVQWKVDNALQSGNSQESVTEQDSKDSTYSLSSTLTLSKADYEKHKVYACEVTHQGLSSPVTKSFNRGEC

SEQ ID NO: 272 - protein, 235 aa, synthetic construct
  REGION 1..235: note = pre-light chimeric polypeptide having CETP signal peptide
MLAATVLTLALLGNAHACDKTDIQMTQSPSSLSASVGDRVTITCRASQDVNTAVAWYQQKPGKAPKLLIYSASFLYSGVPSRFSGSRSGTDFTLTISSLQPEDFATYYCQQHYTTPPTFGQGTKVEIKRTVAAPSVFIFPPSDEQLKSGTASVVCLLNNFYPREAKVQWKVDNALQSGNSQESVTEQDSKDSTYSLSSTLTLSKADYEKHKVYACEVTHQGLSSPVTKSFNRGEC

SEQ ID NO: 273 - protein, 220 aa, synthetic construct
  REGION 1..220: note = Trastuzumab light chain having the N-terminal sequence CDKTHT
CDKTHTDIQMTQSPSSLSASVGDRVTITCRASQDVNTAVAWYQQKPGKAPKLLIYSASFLYSGVPSRFSGSRSGTDFTLTISSLQPEDFATYYCQQHYTTPPTFGQGTKVEIKRTVAAPSVFIFPPSDEQLKSGTASVVCLLNNFYPREAKVQWKVDNALQSGNSQESVTEQDSKDSTYSLSSTLTLSKADYEKHKVYACEVTHQGLSSPVTKSFNRGEC

SEQ ID NO: 274 - protein, 243 aa, synthetic construct
  REGION 1..243: note = pre-light chimeric polypeptide having SHH signal peptide
MLLLARCLLLVLVSSLLVCSGLACDKTHTDIQMTQSPSSLSASVGDRVTITCRASQDVNTAVAWYQQKPGKAPKLLIYSASFLYSGVPSRFSGSRSGTDFTLTISSLQPEDFATYYCQQHYTTPPTFGQGTKVEIKRTVAAPSVFIFPPSDEQLKSGTASVVCLLNNFYPREAKVQWKVDNALQSGNSQESVTEQDSKDSTYSLSSTLTLSKADYEKHKVYACEVTHQGLSSPVTKSFNRGEC

SEQ ID NO: 275 - protein, 243 aa, synthetic construct
  REGION 1..243: note = pre-light chimeric polypeptide having IFN signal peptide
MALTFALLVALLVLSCKSSCSVGCDKTHTDIQMTQSPSSLSASVGDRVTITCRASQDVNTAVAWYQQKPGKAPKLLIYSASFLYSGVPSRFSGSRSGTDFTLTISSLQPEDFATYYCQQHYTTPPTFGQGTKVEIKRTVAAPSVFIFPPSDEQLKSGTASVVCLLNNFYPREAKVQWKVDNALQSGNSQESVTEQDSKDSTYSLSSTLTLSKADYEKHKVYACEVTHQGLSSPVTKSFNRGEC

SEQ ID NO: 276 - protein, 237 aa, synthetic construct
  REGION 1..237: note = pre-light chimeric polypeptide having CETP signal peptide
MLAATVLTLALLGNAHACDKTHTDIQMTQSPSSLSASVGDRVTITCRASQDVNTAVAWYQQKPGKAPKLLIYSASFLYSGVPSRFSGSRSGTDFTLTISSLQPEDFATYYCQQHYTTPPTFGQGTKVEIKRTVAAPSVFIFPPSDEQLKSGTASVVCLLNNFYPREAKVQWKVDNALQSGNSQESVTEQDSKDSTYSLSSTLTLSKADYEKHKVYACEVTHQGLSSPVTKSFNRGEC

SEQ ID NO: 277 - protein, 217 aa, synthetic construct
  REGION 1..217: note = Trastuzumab light chain having the N-terminal sequence CVE
CVEDIQMTQSPSSLSASVGDRVTITCRASQDVNTAVAWYQQKPGKAPKLLIYSASFLYSGVPSRFSGSRSGTDFTLTISSLQPEDFATYYCQQHYTTPPTFGQGTKVEIKRTVAAPSVFIFPPSDEQLKSGTASVVCLLNNFYPREAKVQWKVDNALQSGNSQESVTEQDSKDSTYSLSSTLTLSKADYEKHKVYACEVTHQGLSSPVTKSFNRGEC

SEQ ID NO: 278 - protein, 240 aa, synthetic construct
  REGION 1..240: note = pre-light chimeric polypeptide having SHH signal peptide
MLLLARCLLLVLVSSLLVCSGLACVEDIQMTQSPSSLSASVGDRVTITCRASQDVNTAVAWYQQKPGKAPKLLIYSASFLYSGVPSRFSGSRSGTDFTLTISSLQPEDFATYYCQQHYTTPPTFGQGTKVEIKRTVAAPSVFIFPPSDEQLKSGTASVVCLLNNFYPREAKVQWKVDNALQSGNSQESVTEQDSKDSTYSLSSTLTLSKADYEKHKVYACEVTHQGLSSPVTKSFNRGEC

SEQ ID NO: 279 - protein, 240 aa, synthetic construct
  REGION 1..240: note = pre-light chimeric polypeptide having IFN signal peptide
MALTFALLVALLVLSCKSSCSVGCVEDIQMTQSPSSLSASVGDRVTITCRASQDVNTAVAWYQQKPGKAPKLLIYSASFLYSGVPSRFSGSRSGTDFTLTISSLQPEDFATYYCQQHYTTPPTFGQGTKVEIKRTVAAPSVFIFPPSDEQLKSGTASVVCLLNNFYPREAKVQWKVDNALQSGNSQESVTEQDSKDSTYSLSSTLTLSKADYEKHKVYACEVTHQGLSSPVTKSFNRGEC

SEQ ID NO: 280 - protein, 234 aa, synthetic construct
  REGION 1..234: note = pre-light chimeric polypeptide having CETP signal peptide
MLAATVLTLALLGNAHACVEDIQMTQSPSSLSASVGDRVTITCRASQDVNTAVAWYQQKPGKAPKLLIYSASFLYSGVPSRFSGSRSGTDFTLTISSLQPEDFATYYCQQHYTTPPTFGQGTKVEIKRTVAAPSVFIFPPSDEQLKSGTASVVCLLNNFYPREAKVQWKVDNALQSGNSQESVTEQDSKDSTYSLSSTLTLSKADYEKHKVYACEVTHQGLSSPVTKSFNRGEC

SEQ ID NO: 281 - protein, 220 aa, synthetic construct
  REGION 1..220: note = Trastuzumab light chain having the N-terminal sequence CDTPPP
CDTPPPDIQMTQSPSSLSASVGDRVTITCRASQDVNTAVAWYQQKPGKAPKLLIYSASFLYSGVPSRFSGSRSGTDFTLTISSLQPEDFATYYCQQHYTTPPTFGQGTKVEIKRTVAAPSVFIFPPSDEQLKSGTASVVCLLNNFYPREAKVQWKVDNALQSGNSQESVTEQDSKDSTYSLSSTLTLSKADYEKHKVYACEVTHQGLSSPVTKSFNRGEC

SEQ ID NO: 282 - protein, 243 aa, synthetic construct
  REGION 1..243: note = pre-light chimeric polypeptide having SHH signal peptide
MLLLARCLLLVLVSSLLVCSGLACDTPPPDIQMTQSPSSLSASVGDRVTITCRASQDVNTAVAWYQQKPGKAPKLLIYSASFLYSGVPSRFSGSRSGTDFTLTISSLQPEDFATYYCQQHYTTPPTFGQGTKVEIKRTVAAPSVFIFPPSDEQLKSGTASVVCLLNNFYPREAKVQWKVDNALQSGNSQESVTEQDSKDSTYSLSSTLTLSKADYEKHKVYACEVTHQGLSSPVTKSFNRGEC

SEQ ID NO: 283 - protein, 243 aa, synthetic construct
  REGION 1..243: note = pre-light chimeric polypeptide having IFN signal peptide
MALTFALLVALLVLSCKSSCSVGCDTPPPDIQMTQSPSSLSASVGDRVTITCRASQDVNTAVAWYQQKPGKAPKLLIYSASFLYSGVPSRFSGSRSGTDFTLTISSLQPEDFATYYCQQHYTTPPTFGQGTKVEIKRTVAAPSVFIFPPSDEQLKSGTASVVCLLNNFYPREAKVQWKVDNALQSGNSQESVTEQDSKDSTYSLSSTLTLSKADYEKHKVYACEVTHQGLSSPVTKSFNRGEC

SEQ ID NO: 284 - protein, 237 aa, synthetic construct
  REGION 1..237: note = pre-light chimeric polypeptide having CETP signal peptide
MLAATVLTLALLGNAHACDTPPPDIQMTQSPSSLSASVGDRVTITCRASQDVNTAVAWYQQKPGKAPKLLIYSASFLYSGVPSRFSGSRSGTDFTLTISSLQPEDFATYYCQQHYTTPPTFGQGTKVEIKRTVAAPSVFIFPPSDEQLKSGTASVVCLLNNFYPREAKVQWKVDNALQSGNSQESVTEQDSKDSTYSLSSTLTLSKADYEKHKVYACEVTHQGLSSPVTKSFNRGEC

SEQ ID NO: 285 - protein, 451 aa, synthetic construct
  REGION 1..451: note = Trastuzumab heavy chain having the N-terminal sequence C
CEVQLVESGGGLVQPGGSLRLSCAASGFNIKDTYIHWVRQAPGKGLEWVARIYPTNGYTRYADSVKGRFTISADTSKNTAYLQMNSLRAEDTAVYYCSRWGGDGFYAMDYWGQGTLVTVSSASTKGPSVFPLAPSSKSTSGGTAALGCLVKDYFPEPVTVSWNSGALTSGVHTFPAVLQSSGLYSLSSVVTVPSSSLGTQTYICNVNHKPSNTKVDKKVEPKSCDKTHTCPPCPAPELLGGPSVFLFPPKPKDTLMISRTPEVTCVVVDVSHEDPEVKFNWYVDGVEVHNAKTKPREEQYNSTYRVVSVLTVLHQDWLNGKEYKCKVSNKALPAPIEKTISKAKGQPREPQVYTLPPSRDELTKNQVSLTCLVKGFYPSDIAVEWESNGQPENNYKTTPPVLDSDGSFFLYSKLTVDKSRWQQGNVFSCSVMHEALHNHYTQKSLSLSPGK

SEQ ID NO: 286 - protein, 474 aa, synthetic construct
  REGION 1..474: note = pre-heavy chain chimeric polypeptide having SHH signal peptide
MLLLARCLLLVLVSSLLVCSGLACEVQLVESGGGLVQPGGSLRLSCAASGFNIKDTYIHWVRQAPGKGLEWVARIYPTNGYTRYADSVKGRFTISADTSKNTAYLQMNSLRAEDTAVYYCSRWGGDGFYAMDYWGQGTLVTVSSASTKGPSVFPLAPSSKSTSGGTAALGCLVKDYFPEPVTVSWNSGALTSGVHTFPAVLQSSGLYSLSSVVTVPSSSLGTQTYICNVNHKPSNTKVDKKVEPKSCDKTHTCPPCPAPELLGGPSVFLFPPKPKDTLMISRTPEVTCVVVDVSHEDPEVKFNWYVDGVEVHNAKTKPREEQYNSTYRVVSVLTVLHQDWLNGKEYKCKVSNKALPAPIEKTISKAKGQPREPQVYTLPPSRDELTKNQVSLTCLVKGFYPSDIAVEWESNGQPENNYKTTPPVLDSDGSFFLYSKLTVDKSRWQQGNVFSCSVMHEALHNHYTQKSLSLSPGK

SEQ ID NO: 287 - protein, 474 aa, synthetic construct
  REGION 1..474: note = pre-heavy chain chimeric polypeptide having IFN signal peptide
MALTFALLVALLVLSCKSSCSVGCEVQLVESGGGLVQPGGSLRLSCAASGFNIKDTYIHWVRQAPGKGLEWVARIYPTNGYTRYADSVKGRFTISADTSKNTAYLQMNSLRAEDTAVYYCSRWGGDGFYAMDYWGQGTLVTVSSASTKGPSVFPLAPSSKSTSGGTAALGCLVKDYFPEPVTVSWNSGALTSGVHTFPAVLQSSGLYSLSSVVTVPSSSLGTQTYICNVNHKPSNTKVDKKVEPKSCDKTHTCPPCPAPELLGGPSVFLFPPKPKDTLMISRTPEVTCVVVDVSHEDPEVKFNWYVDGVEVHNAKTKPREEQYNSTYRVVSVLTVLHQDWLNGKEYKCKVSNKALPAPIEKTISKAKGQPREPQVYTLPPSRDELTKNQVSLTCLVKGFYPSDIAVEWESNGQPENNYKTTPPVLDSDGSFFLYSKLTVDKSRWQQGNVFSCSVMHEALHNHYTQKSLSLSPGK

SEQ ID NO: 288 - protein, 468 aa, synthetic construct
  REGION 1..468: note = pre-heavy chain chimeric polypeptide having CETP signal peptide
MLAATVLTLALLGNAHACEVQLVESGGGLVQPGGSLRLSCAASGFNIKDTYIHWVRQAPGKGLEWVARIYPTNGYTRYADSVKGRFTISADTSKNTAYLQMNSLRAEDTAVYYCSRWGGDGFYAMDYWGQGTLVTVSSASTKGPSVFPLAPSSKSTSGGTAALGCLVKDYFPEPVTVSWNSGALTSGVHTFPAVLQSSGLYSLSSVVTVPSSSLGTQTYICNVNHKPSNTKVDKKVEPKSCDKTHTCPPCPAPELLGGPSVFLFPPKPKDTLMISRTPEVTCVVVDVSHEDPEVKFNWYVDGVEVHNAKTKPREEQYNSTYRVVSVLTVLHQDWLNGKEYKCKVSNKALPAPIEKTISKAKGQPREPQVYTLPPSRDELTKNQVSLTCLVKGFYPSDIAVEWESNGQPENNYKTTPPVLDSDGSFFLYSKLTVDKSRWQQGNVFSCSVMHEALHNHYTQKSLSLSPGK

SEQ ID NO: 289 - protein, 452 aa, synthetic construct
  REGION 1..452: note = Trastuzumab heavy chain having the N-terminal sequence CP
CPEVQLVESGGGLVQPGGSLRLSCAASGFNIKDTYIHWVRQAPGKGLEWVARIYPTNGYTRYADSVKGRFTISADTSKNTAYLQMNSLRAEDTAVYYCSRWGGDGFYAMDYWGQGTLVTVSSASTKGPSVFPLAPSSKSTSGGTAALGCLVKDYFPEPVTVSWNSGALTSGVHTFPAVLQSSGLYSLSSVVTVPSSSLGTQTYICNVNHKPSNTKVDKKVEPKSCDKTHTCPPCPAPELLGGPSVFLFPPKPKDTLMISRTPEVTCVVVDVSHEDPEVKFNWYVDGVEVHNAKTKPREEQYNSTYRVVSVLTVLHQDWLNGKEYKCKVSNKALPAPIEKTISKAKGQPREPQVYTLPPSRDELTKNQVSLTCLVKGFYPSDIAVEWESNGQPENNYKTTPPVLDSDGSFFLYSKLTVDKSRWQQGNVFSCSVMHEALHNHYTQKSLSLSPGK

SEQ ID NO: 290 - protein, 475 aa, synthetic construct
  REGION 1..475: note = pre-heavy chain chimeric polypeptide having SHH signal peptide
MLLLARCLLLVLVSSLLVCSGLACPEVQLVESGGGLVQPGGSLRLSCAASGFNIKDTYIHWVRQAPGKGLEWVARIYPTNGYTRYADSVKGRFTISADTSKNTAYLQMNSLRAEDTAVYYCSRWGGDGFYAMDYWGQGTLVTVSSASTKGPSVFPLAPSSKSTSGGTAALGCLVKDYFPEPVTVSWNSGALTSGVHTFPAVLQSSGLYSLSSVVTVPSSSLGTQTYICNVNHKPSNTKVDKKVEPKSCDKTHTCPPCPAPELLGGPSVFLFPPKPKDTLMISRTPEVTCVVVDVSHEDPEVKFNWYVDGVEVHNAKTKPREEQYNSTYRVVSVLTVLHQDWLNGKEYKCKVSNKALPAPIEKTISKAKGQPREPQVYTLPPSRDELTKNQVSLTCLVKGFYPSDIAVEWESNGQPENNYKTTPPVLDSDGSFFLYSKLTVDKSRWQQGNVFSCSVMHEALHNHYTQKSLSLSPGK

SEQ ID NO: 291 - protein, 475 aa, synthetic construct
  REGION 1..475: note = pre-heavy chain chimeric polypeptide having IFN signal peptide
MALTFALLVALLVLSCKSSCSVGCPEVQLVESGGGLVQPGGSLRLSCAASGFNIKDTYIHWVRQAPGKGLEWVARIYPTNGYTRYADSVKGRFTISADTSKNTAYLQMNSLRAEDTAVYYCSRWGGDGFYAMDYWGQGTLVTVSSASTKGPSVFPLAPSSKSTSGGTAALGCLVKDYFPEPVTVSWNSGALTSGVHTFPAVLQSSGLYSLSSVVTVPSSSLGTQTYICNVNHKPSNTKVDKKVEPKSCDKTHTCPPCPAPELLGGPSVFLFPPKPKDTLMISRTPEVTCVVVDVSHEDPEVKFNWYVDGVEVHNAKTKPREEQYNSTYRVVSVLTVLHQDWLNGKEYKCKVSNKALPAPIEKTISKAKGQPREPQVYTLPPSRDELTKNQVSLTCLVKGFYPSDIAVEWESNGQPENNYKTTPPVLDSDGSFFLYSKLTVDKSRWQQGNVFSCSVMHEALHNHYTQKSLSLSPGK

SEQ ID NO: 292 - protein, 469 aa, synthetic construct
  REGION 1..469: note = pre-heavy chain chimeric polypeptide having CETP signal peptide
MLAATVLTLALLGNAHACPEVQLVESGGGLVQPGGSLRLSCAASGFNIKDTYIHWVRQAPGKGLEWVARIYPTNGYTRYADSVKGRFTISADTSKNTAYLQMNSLRAEDTAVYYCSRWGGDGFYAMDYWGQGTLVTVSSASTKGPSVFPLAPSSKSTSGGTAALGCLVKDYFPEPVTVSWNSGALTSGVHTFPAVLQSSGLYSLSSVVTVPSSSLGTQTYICNVNHKPSNTKVDKKVEPKSCDKTHTCPPCPAPELLGGPSVFLFPPKPKDTLMISRTPEVTCVVVDVSHEDPEVKFNWYVDGVEVHNAKTKPREEQYNSTYRVVSVLTVLHQDWLNGKEYKCKVSNKALPAPIEKTISKAKGQPREPQVYTLPPSRDELTKNQVSLTCLVKGFYPSDIAVEWESNGQPENNYKTTPPVLDSDGSFFLYSKLTVDKSRWQQGNVFSCSVMHEALHNHYTQKSLSLSPGK

SEQ ID NO: 293 - protein, 453 aa, synthetic construct
  REGION 1..453: note = Trastuzumab heavy chain having the N-terminal sequence CPP
CPPEVQLVESGGGLVQPGGSLRLSCAASGFNIKDTYIHWVRQAPGKGLEWVARIYPTNGYTRYADSVKGRFTISADTSKNTAYLQMNSLRAEDTAVYYCSRWGGDGFYAMDYWGQGTLVTVSSASTKGPSVFPLAPSSKSTSGGTAALGCLVKDYFPEPVTVSWNSGALTSGVHTFPAVLQSSGLYSLSSVVTVPSSSLGTQTYICNVNHKPSNTKVDKKVEPKSCDKTHTCPPCPAPELLGGPSVFLFPPKPKDTLMISRTPEVTCVVVDVSHEDPEVKFNWYVDGVEVHNAKTKPREEQYNSTYRVVSVLTVLHQDWLNGKEYKCKVSNKALPAPIEKTISKAKGQPREPQVYTLPPSRDELTKNQVSLTCLVKGFYPSDIAVEWESNGQPENNYKTTPPVLDSDGSFFLYSKLTVDKSRWQQGNVFSCSVMHEALHNHYTQKSLSLSPGK

SEQ ID NO: 294 - protein, 476 aa, synthetic construct
  REGION 1..476: note = pre-heavy chain chimeric polypeptide having SHH signal peptide
MLLLARCLLLVLVSSLLVCSGLACPPEVQLVESGGGLVQPGGSLRLSCAASGFNIKDTYIHWVRQAPGKGLEWVARIYPTNGYTRYADSVKGRFTISADTSKNTAYLQMNSLRAEDTAVYYCSRWGGDGFYAMDYWGQGTLVTVSSASTKGPSVFPLAPSSKSTSGGTAALGCLVKDYFPEPVTVSWNSGALTSGVHTFPAVLQSSGLYSLSSVVTVPSSSLGTQTYICNVNHKPSNTKVDKKVEPKSCDKTHTCPPCPAPELLGGPSVFLFPPKPKDTLMISRTPEVTCVVVDVSHEDPEVKFNWYVDGVEVHNAKTKPREEQYNSTYRVVSVLTVLHQDWLNGKEYKCKVSNKALPAPIEKTISKAKGQPREPQVYTLPPSRDELTKNQVSLTCLVKGFYPSDIAVEWESNGQPENNYKTTPPVLDSDGSFFLYSKLTVDKSRWQQGNVFSCSVMHEALHNHYTQKSLSLSPGK

SEQ ID NO: 295 - protein, 476 aa, synthetic construct
  REGION 1..476: note = pre-heavy chain chimeric polypeptide having IFN signal peptide
MALTFALLVALLVLSCKSSCSVGCPPEVQLVESGGGLVQPGGSLRLSCAASGFNIKDTYIHWVRQAPGKGLEWVARIYPTNGYTRYADSVKGRFTISADTSKNTAYLQMNSLRAEDTAVYYCSRWGGDGFYAMDYWGQGTLVTVSSASTKGPSVFPLAPSSKSTSGGTAALGCLVKDYFPEPVTVSWNSGALTSGVHTFPAVLQSSGLYSLSSVVTVPSSSLGTQTYICNVNHKPSNTKVDKKVEPKSCDKTHTCPPCPAPELLGGPSVFLFPPKPKDTLMISRTPEVTCVVVDVSHEDPEVKFNWYVDGVEVHNAKTKPREEQYNSTYRVVSVLTVLHQDWLNGKEYKCKVSNKALPAPIEKTISKAKGQPREPQVYTLPPSRDELTKNQVSLTCLVKGFYPSDIAVEWESNGQPENNYKTTPPVLDSDGSFFLYSKLTVDKSRWQQGNVFSCSVMHEALHNHYTQKSLSLSPGK

SEQ ID NO: 296 - protein, 470 aa, synthetic construct
  REGION 1..470: note = pre-heavy chain chimeric polypeptide having CETP signal peptide
MLAATVLTLALLGNAHACPPEVQLVESGGGLVQPGGSLRLSCAASGFNIKDTYIHWVRQAPGKGLEWVARIYPTNGYTRYADSVKGRFTISADTSKNTAYLQMNSLRAEDTAVYYCSRWGGDGFYAMDYWGQGTLVTVSSASTKGPSVFPLAPSSKSTSGGTAALGCLVKDYFPEPVTVSWNSGALTSGVHTFPAVLQSSGLYSLSSVVTVPSSSLGTQTYICNVNHKPSNTKVDKKVEPKSCDKTHTCPPCPAPELLGGPSVFLFPPKPKDTLMISRTPEVTCVVVDVSHEDPEVKFNWYVDGVEVHNAKTKPREEQYNSTYRVVSVLTVLHQDWLNGKEYKCKVSNKALPAPIEKTISKAKGQPREPQVYTLPPSRDELTKNQVSLTCLVKGFYPSDIAVEWESNGQPENNYKTTPPVLDSDGSFFLYSKLTVDKSRWQQGNVFSCSVMHEALHNHYTQKSLSLSPGK

SEQ ID NO: 297 - protein, 453 aa, synthetic construct
  REGION 1..453: note = Trastuzumab heavy chain having the N-terminal sequence CPR
CPREVQLVESGGGLVQPGGSLRLSCAASGFNIKDTYIHWVRQAPGKGLEWVARIYPTNGYTRYADSVKGRFTISADTSKNTAYLQMNSLRAEDTAVYYCSRWGGDGFYAMDYWGQGTLVTVSSASTKGPSVFPLAPSSKSTSGGTAALGCLVKDYFPEPVTVSWNSGALTSGVHTFPAVLQSSGLYSLSSVVTVPSSSLGTQTYICNVNHKPSNTKVDKKVEPKSCDKTHTCPPCPAPELLGGPSVFLFPPKPKDTLMISRTPEVTCVVVDVSHEDPEVKFNWYVDGVEVHNAKTKPREEQYNSTYRVVSVLTVLHQDWLNGKEYKCKVSNKALPAPIEKTISKAKGQPREPQVYTLPPSRDELTKNQVSLTCLVKGFYPSDIAVEWESNGQPENNYKTTPPVLDSDGSFFLYSKLTVDKSRWQQGNVFSCSVMHEALHNHYTQKSLSLSPGK

SEQ ID NO: 298 - protein, 476 aa, synthetic construct
  REGION 1..476: note = pre-heavy chain chimeric polypeptide having SHH signal peptide
MLLLARCLLLVLVSSLLVCSGLACPREVQLVESGGGLVQPGGSLRLSCAASGFNIKDTYIHWVRQAPGKGLEWVARIYPTNGYTRYADSVKGRFTISADTSKNTAYLQMNSLRAEDTAVYYCSRWGGDGFYAMDYWGQGTLVTVSSASTKGPSVFPLAPSSKSTSGGTAALGCLVKDYFPEPVTVSWNSGALTSGVHTFPAVLQSSGLYSLSSVVTVPSSSLGTQTYICNVNHKPSNTKVDKKVEPKSCDKTHTCPPCPAPELLGGPSVFLFPPKPKDTLMISRTPEVTCVVVDVSHEDPEVKFNWYVDGVEVHNAKTKPREEQYNSTYRVVSVLTVLHQDWLNGKEYKCKVSNKALPAPIEKTISKAKGQPREPQVYTLPPSRDELTKNQVSLTCLVKGFYPSDIAVEWESNGQPENNYKTTPPVLDSDGSFFLYSKLTVDKSRWQQGNVFSCSVMHEALHNHYTQKSLSLSPGK

SEQ ID NO: 299 - protein, 476 aa, synthetic construct
  REGION 1..476: note = pre-heavy chain chimeric polypeptide having IFN signal peptide
MALTFALLVALLVLSCKSSCSVGCPREVQLVESGGGLVQPGGSLRLSCAASGFNIKDTYIHWVRQAPGKGLEWVARIYPTNGYTRYADSVKGRFTISADTSKNTAYLQMNSLRAEDTAVYYCSRWGGDGFYAMDYWGQGTLVTVSSASTKGPSVFPLAPSSKSTSGGTAALGCLVKDYFPEPVTVSWNSGALTSGVHTFPAVLQSSGLYSLSSVVTVPSSSLGTQTYICNVNHKPSNTKVDKKVEPKSCDKTHTCPPCPAPELLGGPSVFLFPPKPKDTLMISRTPEVTCVVVDVSHEDPEVKFNWYVDGVEVHNAKTKPREEQYNSTYRVVSVLTVLHQDWLNGKEYKCKVSNKALPAPIEKTISKAKGQPREPQVYTLPPSRDELTKNQVSLTCLVKGFYPSDIAVEWESNGQPENNYKTTPPVLDSDGSFFLYSKLTVDKSRWQQGNVFSCSVMHEALHNHYTQKSLSLSPGK

SEQ ID NO: 300 - protein, 470 aa, synthetic construct
  REGION 1..470: note = pre-heavy chain chimeric polypeptide having CETP signal peptide
MLAATVLTLALLGNAHACPREVQLVESGGGLVQPGGSLRLSCAASGFNIKDTYIHWVRQAPGKGLEWVARIYPTNGYTRYADSVKGRFTISADTSKNTAYLQMNSLRAEDTAVYYCSRWGGDGFYAMDYWGQGTLVTVSSASTKGPSVFPLAPSSKSTSGGTAALGCLVKDYFPEPVTVSWNSGALTSGVHTFPAVLQSSGLYSLSSVVTVPSSSLGTQTYICNVNHKPSNTKVDKKVEPKSCDKTHTCPPCPAPELLGGPSVFLFPPKPKDTLMISRTPEVTCVVVDVSHEDPEVKFNWYVDGVEVHNAKTKPREEQYNSTYRVVSVLTVLHQDWLNGKEYKCKVSNKALPAPIEKTISKAKGQPREPQVYTLPPSRDELTKNQVSLTCLVKGFYPSDIAVEWESNGQPENNYKTTPPVLDSDGSFFLYSKLTVDKSRWQQGNVFSCSVMHEALHNHYTQKSLSLSPGK

SEQ ID NO: 301 - protein, 453 aa, synthetic construct
  REGION 1..453: note = Trastuzumab heavy chain having the N-terminal sequence CPS
CPSEVQLVESGGGLVQPGGSLRLSCAASGFNIKDTYIHWVRQAPGKGLEWVARIYPTNGYTRYADSVKGRFTISADTSKNTAYLQMNSLRAEDTAVYYCSRWGGDGFYAMDYWGQGTLVTVSSASTKGPSVFPLAPSSKSTSGGTAALGCLVKDYFPEPVTVSWNSGALTSGVHTFPAVLQSSGLYSLSSVVTVPSSSLGTQTYICNVNHKPSNTKVDKKVEPKSCDKTHTCPPCPAPELLGGPSVFLFPPKPKDTLMISRTPEVTCVVVDVSHEDPEVKFNWYVDGVEVHNAKTKPREEQYNSTYRVVSVLTVLHQDWLNGKEYKCKVSNKALPAPIEKTISKAKGQPREPQVYTLPPSRDELTKNQVSLTCLVKGFYPSDIAVEWESNGQPENNYKTTPPVLDSDGSFFLYSKLTVDKSRWQQGNVFSCSVMHEALHNHYTQKSLSLSPGK

SEQ ID NO: 302 - protein, 476 aa, synthetic construct
  REGION 1..476: note = pre-heavy chain chimeric polypeptide having SHH signal peptide
MLLLARCLLLVLVSSLLVCSGLACPSEVQLVESGGGLVQPGGSLRLSCAASGFNIKDTYIHWVRQAPGKGLEWVARIYPTNGYTRYADSVKGRFTISADTSKNTAYLQMNSLRAEDTAVYYCSRWGGDGFYAMDYWGQGTLVTVSSASTKGPSVFPLAPSSKSTSGGTAALGCLVKDYFPEPVTVSWNSGALTSGVHTFPAVLQSSGLYSLSSVVTVPSSSLGTQTYICNVNHKPSNTKVDKKVEPKSCDKTHTCPPCPAPELLGGPSVFLFPPKPKDTLMISRTPEVTCVVVDVSHEDPEVKFNWYVDGVEVHNAKTKPREEQYNSTYRVVSVLTVLHQDWLNGKEYKCKVSNKALPAPIEKTISKAKGQPREPQVYTLPPSRDELTKNQVSLTCLVKGFYPSDIAVEWESNGQPENNYKTTPPVLDSDGSFFLYSKLTVDKSRWQQGNVFSCSVMHEALHNHYTQKSLSLSPGK

SEQ ID NO: 303 - protein, 476 aa, synthetic construct
  REGION 1..476: note = pre-heavy chain chimeric polypeptide having IFN signal peptide
MALTFALLVALLVLSCKSSCSVGCPSEVQLVESGGGLVQPGGSLRLSCAASGFNIKDTYIHWVRQAPGKGLEWVARIYPTNGYTRYADSVKGRFTISADTSKNTAYLQMNSLRAEDTAVYYCSRWGGDGFYAMDYWGQGTLVTVSSASTKGPSVFPLAPSSKSTSGGTAALGCLVKDYFPEPVTVSWNSGALTSGVHTFPAVLQSSGLYSLSSVVTVPSSSLGTQTYICNVNHKPSNTKVDKKVEPKSCDKTHTCPPCPAPELLGGPSVFLFPPKPKDTLMISRTPEVTCVVVDVSHEDPEVKFNWYVDGVEVHNAKTKPREEQYNSTYRVVSVLTVLHQDWLNGKEYKCKVSNKALPAPIEKTISKAKGQPREPQVYTLPPSRDELTKNQVSLTCLVKGFYPSDIAVEWESNGQPENNYKTTPPVLDSDGSFFLYSKLTVDKSRWQQGNVFSCSVMHEALHNHYTQKSLSLSPGK

SEQ ID NO: 304 - protein, 470 aa, synthetic construct
  REGION 1..470: note = pre-heavy chain chimeric polypeptide having CETP signal peptide
MLAATVLTLALLGNAHACPSEVQLVESGGGLVQPGGSLRLSCAASGFNIKDTYIHWVRQAPGKGLEWVARIYPTNGYTRYADSVKGRFTISADTSKNTAYLQMNSLRAEDTAVYYCSRWGGDGFYAMDYWGQGTLVTVSSASTKGPSVFPLAPSSKSTSGGTAALGCLVKDYFPEPVTVSWNSGALTSGVHTFPAVLQSSGLYSLSSVVTVPSSSLGTQTYICNVNHKPSNTKVDKKVEPKSCDKTHTCPPCPAPELLGGPSVFLFPPKPKDTLMISRTPEVTCVVVDVSHEDPEVKFNWYVDGVEVHNAKTKPREEQYNSTYRVVSVLTVLHQDWLNGKEYKCKVSNKALPAPIEKTISKAKGQPREPQVYTLPPSRDELTKNQVSLTCLVKGFYPSDIAVEWESNGQPENNYKTTPPVLDSDGSFFLYSKLTVDKSRWQQGNVFSCSVMHEALHNHYTQKSLSLSPGK

SEQ ID NO: 305 - protein, 454 aa, synthetic construct
  REGION 1..454: note = Trastuzumab heavy chain having the N-terminal sequence CDKT
CDKTEVQLVESGGGLVQPGGSLRLSCAASGFNIKDTYIHWVRQAPGKGLEWVARIYPTNGYTRYADSVKGRFTISADTSKNTAYLQMNSLRAEDTAVYYCSRWGGDGFYAMDYWGQGTLVTVSSASTKGPSVFPLAPSSKSTSGGTAALGCLVKDYFPEPVTVSWNSGALTSGVHTFPAVLQSSGLYSLSSVVTVPSSSLGTQTYICNVNHKPSNTKVDKKVEPKSCDKTHTCPPCPAPELLGGPSVFLFPPKPKDTLMISRTPEVTCVVVDVSHEDPEVKFNWYVDGVEVHNAKTKPREEQYNSTYRVVSVLTVLHQDWLNGKEYKCKVSNKALPAPIEKTISKAKGQPREPQVYTLPPSRDELTKNQVSLTCLVKGFYPSDIAVEWESNGQPENNYKTTPPVLDSDGSFFLYSKLTVDKSRWQQGNVFSCSVMHEALHNHYTQKSLSLSPGK

SEQ ID NO: 306 - protein, 477 aa, synthetic construct
  REGION 1..477: note = pre-heavy chain chimeric polypeptide having SHH signal peptide
MLLLARCLLLVLVSSLLVCSGLACDKTEVQLVESGGGLVQPGGSLRLSCAASGFNIKDTYIHWVRQAPGKGLEWVARIYPTNGYTRYADSVKGRFTISADTSKNTAYLQMNSLRAEDTAVYYCSRWGGDGFYAMDYWGQGTLVTVSSASTKGPSVFPLAPSSKSTSGGTAALGCLVKDYFPEPVTVSWNSGALTSGVHTFPAVLQSSGLYSLSSVVTVPSSSLGTQTYICNVNHKPSNTKVDKKVEPKSCDKTHTCPPCPAPELLGGPSVFLFPPKPKDTLMISRTPEVTCVVVDVSHEDPEVKFNWYVDGVEVHNAKTKPREEQYNSTYRVVSVLTVLHQDWLNGKEYKCKVSNKALPAPIEKTISKAKGQPREPQVYTLPPSRDELTKNQVSLTCLVKGFYPSDIAVEWESNGQPENNYKTTPPVLDSDGSFFLYSKLTVDKSRWQQGNVFSCSVMHEALHNHYTQKSLSLSPGK

SEQ ID NO: 307 - protein, 477 aa, synthetic construct
  REGION 1..477: note = pre-heavy chain chimeric polypeptide having IFN signal peptide
MALTFALLVALLVLSCKSSCSVGCDKTEVQLVESGGGLVQPGGSLRLSCAASGFNIKDTYIHWVRQAPGKGLEWVARIYPTNGYTRYADSVKGRFTISADTSKNTAYLQMNSLRAEDTAVYYCSRWGGDGFYAMDYWGQGTLVTVSSASTKGPSVFPLAPSSKSTSGGTAALGCLVKDYFPEPVTVSWNSGALTSGVHTFPAVLQSSGLYSLSSVVTVPSSSLGTQTYICNVNHKPSNTKVDKKVEPKSCDKTHTCPPCPAPELLGGPSVFLFPPKPKDTLMISRTPEVTCVVVDVSHEDPEVKFNWYVDGVEVHNAKTKPREEQYNSTYRVVSVLTVLHQDWLNGKEYKCKVSNKALPAPIEKTISKAKGQPREPQVYTLPPSRDELTKNQVSLTCLVKGFYPSDIAVEWESNGQPENNYKTTPPVLDSDGSFFLYSKLTVDKSRWQQGNVFSCSVMHEALHNHYTQKSLSLSPGK

SEQ ID NO: 308 - protein, 471 aa, synthetic construct
  REGION 1..471: note = pre-heavy chain chimeric polypeptide having CETP signal peptide
MLAATVLTLALLGNAHACDKTEVQLVESGGGLVQPGGSLRLSCAASGFNIKDTYIHWVRQAPGKGLEWVARIYPTNGYTRYADSVKGRFTISADTSKNTAYLQMNSLRAEDTAVYYCSRWGGDGFYAMDYWGQGTLVTVSSASTKGPSVFPLAPSSKSTSGGTAALGCLVKDYFPEPVTVSWNSGALTSGVHTFPAVLQSSGLYSLSSVVTVPSSSLGTQTYICNVNHKPSNTKVDKKVEPKSCDKTHTCPPCPAPELLGGPSVFLFPPKPKDTLMISRTPEVTCVVVDVSHEDPEVKFNWYVDGVEVHNAKTKPREEQYNSTYRVVSVLTVLHQDWLNGKEYKCKVSNKALPAPIEKTISKAKGQPREPQVYTLPPSRDELTKNQVSLTCLVKGFYPSDIAVEWESNGQPENNYKTTPPVLDSDGSFFLYSKLTVDKSRWQQGNVFSCSVMHEALHNHYTQKSLSLSPGK

SEQ ID NO: 309 - protein, 456 aa, synthetic construct
  REGION 1..456: note = Trastuzumab heavy chain having the N-terminal sequence CDKTHT
CDKTHTEVQLVESGGGLVQPGGSLRLSCAASGFNIKDTYIHWVRQAPGKGLEWVARIYPTNGYTRYADSVKGRFTISADTSKNTAYLQMNSLRAEDTAVYYCSRWGGDGFYAMDYWGQGTLVTVSSASTKGPSVFPLAPSSKSTSGGTAALGCLVKDYFPEPVTVSWNSGALTSGVHTFPAVLQSSGLYSLSSVVTVPSSSLGTQTYICNVNHKPSNTKVDKKVEPKSCDKTHTCPPCPAPELLGGPSVFLFPPKPKDTLMISRTPEVTCVVVDVSHEDPEVKFNWYVDGVEVHNAKTKPREEQYNSTYRVVSVLTVLHQDWLNGKEYKCKVSNKALPAPIEKTISKAKGQPREPQVYTLPPSRDELTKNQVSLTCLVKGFYPSDIAVEWESNGQPENNYKTTPPVLDSDGSFFLYSKLTVDKSRWQQGNVFSCSVMHEALHNHYTQKSLSLSPGK

SEQ ID NO: 310 - protein, 479 aa, synthetic construct
  REGION 1..479: note = pre-heavy chain chimeric polypeptide having SHH signal peptide
MLLLARCLLLVLVSSLLVCSGLACDKTHTEVQLVESGGGLVQPGGSLRLSCAASGFNIKDTYIHWVRQAPGKGLEWVARIYPTNGYTRYADSVKGRFTISADTSKNTAYLQMNSLRAEDTAVYYCSRWGGDGFYAMDYWGQGTLVTVSSASTKGPSVFPLAPSSKSTSGGTAALGCLVKDYFPEPVTVSWNSGALTSGVHTFPAVLQSSGLYSLSSVVTVPSSSLGTQTYICNVNHKPSNTKVDKKVEPKSCDKTHTCPPCPAPELLGGPSVFLFPPKPKDTLMISRTPEVTCVVVDVSHEDPEVKFNWYVDGVEVHNAKTKPREEQYNSTYRVVSVLTVLHQDWLNGKEYKCKVSNKALPAPIEKTISKAKGQPREPQVYTLPPSRDELTKNQVSLTCLVKGFYPSDIAVEWESNGQPENNYKTTPPVLDSDGSFFLYSKLTVDKSRWQQGNVFSCSVMHEALHNHYTQKSLSLSPGK

SEQ ID NO: 311 - protein, 479 aa, synthetic construct
  REGION 1..479: note = pre-heavy chain chimeric polypeptide having IFN signal peptide
MALTFALLVALLVLSCKSSCSVGCDKTHTEVQLVESGGGLVQPGGSLRLSCAASGFNIKDTYIHWVRQAPGKGLEWVARIYPTNGYTRYADSVKGRFTISADTSKNTAYLQMNSLRAEDTAVYYCSRWGGDGFYAMDYWGQGTLVTVSSASTKGPSVFPLAPSSKSTSGGTAALGCLVKDYFPEPVTVSWNSGALTSGVHTFPAVLQSSGLYSLSSVVTVPSSSLGTQTYICNVNHKPSNTKVDKKVEPKSCDKTHTCPPCPAPELLGGPSVFLFPPKPKDTLMISRTPEVTCVVVDVSHEDPEVKFNWYVDGVEVHNAKTKPREEQYNSTYRVVSVLTVLHQDWLNGKEYKCKVSNKALPAPIEKTISKAKGQPREPQVYTLPPSRDELTKNQVSLTCLVKGFYPSDIAVEWESNGQPENNYKTTPPVLDSDGSFFLYSKLTVDKSRWQQGNVFSCSVMHEALHNHYTQKSLSLSPGK

SEQ ID NO: 312 - protein, 473 aa, synthetic construct
  REGION 1..473: note = pre-heavy chain chimeric polypeptide having CETP signal peptide
MLAATVLTLALLGNAHACDKTHTEVQLVESGGGLVQPGGSLRLSCAASGFNIKDTYIHWVRQAPGKGLEWVARIYPTNGYTRYADSVKGRFTISADTSKNTAYLQMNSLRAEDTAVYYCSRWGGDGFYAMDYWGQGTLVTVSSASTKGPSVFPLAPSSKSTSGGTAALGCLVKDYFPEPVTVSWNSGALTSGVHTFPAVLQSSGLYSLSSVVTVPSSSLGTQTYICNVNHKPSNTKVDKKVEPKSCDKTHTCPPCPAPELLGGPSVFLFPPKPKDTLMISRTPEVTCVVVDVSHEDPEVKFNWYVDGVEVHNAKTKPREEQYNSTYRVVSVLTVLHQDWLNGKEYKCKVSNKALPAPIEKTISKAKGQPREPQVYTLPPSRDELTKNQVSLTCLVKGFYPSDIAVEWESNGQPENNYKTTPPVLDSDGSFFLYSKLTVDKSRWQQGNVFSCSVMHEALHNHYTQKSLSLSPGK

SEQ ID NO: 313 - protein, 453 aa, synthetic construct
  REGION 1..453: note = Trastuzumab heavy chain having the N-terminal sequence CVE
CVEEVQLVESGGGLVQPGGSLRLSCAASGFNIKDTYIHWVRQAPGKGLEWVARIYPTNGYTRYADSVKGRFTISADTSKNTAYLQMNSLRAEDTAVYYCSRWGGDGFYAMDYWGQGTLVTVSSASTKGPSVFPLAPSSKSTSGGTAALGCLVKDYFPEPVTVSWNSGALTSGVHTFPAVLQSSGLYSLSSVVTVPSSSLGTQTYICNVNHKPSNTKVDKKVEPKSCDKTHTCPPCPAPELLGGPSVFLFPPKPKDTLMISRTPEVTCVVVDVSHEDPEVKFNWYVDGVEVHNAKTKPREEQYNSTYRVVSVLTVLHQDWLNGKEYKCKVSNKALPAPIEKTISKAKGQPREPQVYTLPPSRDELTKNQVSLTCLVKGFYPSDIAVEWESNGQPENNYKTTPPVLDSDGSFFLYSKLTVDKSRWQQGNVFSCSVMHEALHNHYTQKSLSLSPGK

SEQ ID NO: 314 - protein, 476 aa, synthetic construct
  REGION 1..476: note = pre-heavy chain chimeric polypeptide having SHH signal peptide
MLLLARCLLLVLVSSLLVCSGLACVEEVQLVESGGGLVQPGGSLRLSCAASGFNIKDTYIHWVRQAPGKGLEWVARIYPTNGYTRYADSVKGRFTISADTSKNTAYLQMNSLRAEDTAVYYCSRWGGDGFYAMDYWGQGTLVTVSSASTKGPSVFPLAPSSKSTSGGTAALGCLVKDYFPEPVTVSWNSGALTSGVHTFPAVLQSSGLYSLSSVVTVPSSSLGTQTYICNVNHKPSNTKVDKKVEPKSCDKTHTCPPCPAPELLGGPSVFLFPPKPKDTLMISRTPEVTCVVVDVSHEDPEVKFNWYVDGVEVHNAKTKPREEQYNSTYRVVSVLTVLHQDWLNGKEYKCKVSNKALPAPIEKTISKAKGQPREPQVYTLPPSRDELTKNQVSLTCLVKGFYPSDIAVEWESNGQPENNYKTTPPVLDSDGSFFLYSKLTVDKSRWQQGNVFSCSVMHEALHNHYTQKSLSLSPGK

SEQ ID NO: 315 - protein, 476 aa, synthetic construct
  REGION 1..476: note = pre-heavy chain chimeric polypeptide having IFN signal peptide
MALTFALLVALLVLSCKSSCSVGCVEEVQLVESGGGLVQPGGSLRLSCAASGFNIKDTYIHWVRQAPGKGLEWVARIYPTNGYTRYADSVKGRFTISADTSKNTAYLQMNSLRAEDTAVYYCSRWGGDGFYAMDYWGQGTLVTVSSASTKGPSVFPLAPSSKSTSGGTAALGCLVKDYFPEPVTVSWNSGALTSGVHTFPAVLQSSGLYSLSSVVTVPSSSLGTQTYICNVNHKPSNTKVDKKVEPKSCDKTHTCPPCPAPELLGGPSVFLFPPKPKDTLMISRTPEVTCVVVDVSHEDPEVKFNWYVDGVEVHNAKTKPREEQYNSTYRVVSVLTVLHQDWLNGKEYKCKVSNKALPAPIEKTISKAKGQPREPQVYTLPPSRDELTKNQVSLTCLVKGFYPSDIAVEWESNGQPENNYKTTPPVLDSDGSFFLYSKLTVDKSRWQQGNVFSCSVMHEALHNHYTQKSLSLSPGK

SEQ ID NO: 316 - protein, 470 aa, synthetic construct
  REGION 1..470: note = pre-heavy chain chimeric polypeptide having CETP signal peptide
MLAATVLTLALLGNAHACVEEVQLVESGGGLVQPGGSLRLSCAASGFNIKDTYIHWVRQAPGKGLEWVARIYPTNGYTRYADSVKGRFTISADTSKNTAYLQMNSLRAEDTAVYYCSRWGGDGFYAMDYWGQGTLVTVSSASTKGPSVFPLAPSSKSTSGGTAALGCLVKDYFPEPVTVSWNSGALTSGVHTFPAVLQSSGLYSLSSVVTVPSSSLGTQTYICNVNHKPSNTKVDKKVEPKSCDKTHTCPPCPAPELLGGPSVFLFPPKPKDTLMISRTPEVTCVVVDVSHEDPEVKFNWYVDGVEVHNAKTKPREEQYNSTYRVVSVLTVLHQDWLNGKEYKCKVSNKALPAPIEKTISKAKGQPREPQVYTLPPSRDELTKNQVSLTCLVKGFYPSDIAVEWESNGQPENNYKTTPPVLDSDGSFFLYSKLTVDKSRWQQGNVFSCSVMHEALHNHYTQKSLSLSPGK

SEQ ID NO: 317 - protein, 456 aa, synthetic construct
  REGION 1..456: note = Trastuzumab heavy chain having the N-terminal sequence CDTPPP
CDTPPPEVQLVESGGGLVQPGGSLRLSCAASGFNIKDTYIHWVRQAPGKGLEWVARIYPTNGYTRYADSVKGRFTISADTSKNTAYLQMNSLRAEDTAVYYCSRWGGDGFYAMDYWGQGTLVTVSSASTKGPSVFPLAPSSKSTSGGTAALGCLVKDYFPEPVTVSWNSGALTSGVHTFPAVLQSSGLYSLSSVVTVPSSSLGTQTYICNVNHKPSNTKVDKKVEPKSCDKTHTCPPCPAPELLGGPSVFLFPPKPKDTLMISRTPEVTCVVVDVSHEDPEVKFNWYVDGVEVHNAKTKPREEQYNSTYRVVSVLTVLHQDWLNGKEYKCKVSNKALPAPIEKTISKAKGQPREPQVYTLPPSRDELTKNQVSLTCLVKGFYPSDIAVEWESNGQPENNYKTTPPVLDSDGSFFLYSKLTVDKSRWQQGNVFSCSVMHEALHNHYTQKSLSLSPGK

SEQ ID NO: 318 - protein, 479 aa, synthetic construct
  REGION 1..479: note = pre-heavy chain chimeric polypeptide having SHH signal peptide
MLLLARCLLLVLVSSLLVCSGLACDTPPPEVQLVESGGGLVQPGGSLRLSCAASGFNIKDTYIHWVRQAPGKGLEWVARIYPTNGYTRYADSVKGRFTISADTSKNTAYLQMNSLRAEDTAVYYCSRWGGDGFYAMDYWGQGTLVTVSSASTKGPSVFPLAPSSKSTSGGTAALGCLVKDYFPEPVTVSWNSGALTSGVHTFPAVLQSSGLYSLSSVVTVPSSSLGTQTYICNVNHKPSNTKVDKKVEPKSCDKTHTCPPCPAPELLGGPSVFLFPPKPKDTLMISRTPEVTCVVVDVSHEDPEVKFNWYVDGVEVHNAKTKPREEQYNSTYRVVSVLTVLHQDWLNGKEYKCKVSNKALPAPIEKTISKAKGQPREPQVYTLPPSRDELTKNQVSLTCLVKGFYPSDIAVEWESNGQPENNYKTTPPVLDSDGSFFLYSKLTVDKSRWQQGNVFSCSVMHEALHNHYTQKSLSLSPGK

SEQ ID NO: 319 - protein, 479 aa, synthetic construct
  REGION 1..479: note = pre-heavy chain chimeric polypeptide having IFN signal peptide
MALTFALLVALLVLSCKSSCSVGCDTPPPEVQLVESGGGLVQPGGSLRLSCAASGFNIKDTYIHWVRQAPGKGLEWVARIYPTNGYTRYADSVKGRFTISADTSKNTAYLQMNSLRAEDTAVYYCSRWGGDGFYAMDYWGQGTLVTVSSASTKGPSVFPLAPSSKSTSGGTAALGCLVKDYFPEPVTVSWNSGALTSGVHTFPAVLQSSGLYSLSSVVTVPSSSLGTQTYICNVNHKPSNTKVDKKVEPKSCDKTHTCPPCPAPELLGGPSVFLFPPKPKDTLMISRTPEVTCVVVDVSHEDPEVKFNWYVDGVEVHNAKTKPREEQYNSTYRVVSVLTVLHQDWLNGKEYKCKVSNKALPAPIEKTISKAKGQPREPQVYTLPPSRDELTKNQVSLTCLVKGFYPSDIAVEWESNGQPENNYKTTPPVLDSDGSFFLYSKLTVDKSRWQQGNVFSCSVMHEALHNHYTQKSLSLSPGK

SEQ ID NO: 320 - protein, 473 aa, synthetic construct
  REGION 1..473: note = pre-heavy chain chimeric polypeptide having CETP signal peptide
MLAATVLTLALLGNAHACDTPPPEVQLVESGGGLVQPGGSLRLSCAASGFNIKDTYIHWVRQAPGKGLEWVARIYPTNGYTRYADSVKGRFTISADTSKNTAYLQMNSLRAEDTAVYYCSRWGGDGFYAMDYWGQGTLVTVSSASTKGPSVFPLAPSSKSTSGGTAALGCLVKDYFPEPVTVSWNSGALTSGVHTFPAVLQSSGLYSLSSVVTVPSSSLGTQTYICNVNHKPSNTKVDKKVEPKSCDKTHTCPPCPAPELLGGPSVFLFPPKPKDTLMISRTPEVTCVVVDVSHEDPEVKFNWYVDGVEVHNAKTKPREEQYNSTYRVVSVLTVLHQDWLNGKEYKCKVSNKALPAPIEKTISKAKGQPREPQVYTLPPSRDELTKNQVSLTCLVKGFYPSDIAVEWESNGQPENNYKTTPPVLDSDGSFFLYSKLTVDKSRWQQGNVFSCSVMHEALHNHYTQKSLSLSPGK

SEQ ID NO: 321 - protein, 31 aa, Homo sapiens
HGEGTFTSDVSSYLEEQAAKEFIAWLVKGRG

SEQ ID NO: 322 - DNA, 22 bp, Homo sapiens
  source 1..22: mol_type = genomic DNA
agaggtagtaggttgcatagtt

SEQ ID NO: 323 - protein, 237 aa, synthetic construct; identical to SEQ ID NO: 227
  REGION 1..237: note = TNR1B

SEQ ID NO: 324 - protein, 222 aa, synthetic construct; identical to SEQ ID NO: 3
  REGION 1..222: note = Fc6

SEQ ID NO: 325 - protein, 5 aa, synthetic construct
  REGION 1..5: note = N-Terminus Sequence
CPPCP

SEQ ID NO: 326 - protein, 5 aa, synthetic construct
  REGION 1..5: note = N-Terminal Sequence
CPRCP

SEQ ID NO: 327 - protein, 5 aa, synthetic construct
  REGION 1..5: note = N-Terminal Sequence
CPSCP

SEQ ID NO: 328 - protein, 11 aa, synthetic construct
  REGION 1..11: note = N-Terminal Sequence
CDKTHTCPPCP

SEQ ID NO: 329 - protein, 8 aa, synthetic construct
  REGION 1..8: note = N-Terminal Sequence
CVECPPCP

SEQ ID NO: 330 - protein, 9 aa, synthetic construct
  REGION 1..9: note = N-Terminal Sequence
CCVECPPCP

SEQ ID NO: 331 - protein, 11 aa, synthetic construct
  REGION 1..11: note = N-Terminal Sequence
CDTPPPCPRCP

SEQ ID NO: 332 - protein, 15 aa, synthetic construct
  REGION 1..15: note = Sequence of component "B"
EPKSCDKTHTCPPCP

SEQ ID NO: 333 - protein, 12 aa, synthetic construct
  REGION 1..12: note = Sequence of component "B"
ERKCCVECPPCP

SEQ ID NO: 334 - protein, 62 aa, synthetic construct
  REGION 1..62: note = Sequence of component "B"
ELKTPLGDTTHTCPRCPEPKSCDTPPPCPRCPEPKSCDTPPPCPRCPEPKSCDTPPPCPRCP

SEQ ID NO: 335 - protein, 12 aa, synthetic construct
  REGION 1..12: note = Sequence of component "B"
ESKYGPPCPSCP

SEQ ID NO: 336 - protein, 6 aa, synthetic construct
  REGION 1..6: note = Sequence in linker
DKTHTC

SEQ ID NO: 337 - protein, 5 aa, synthetic construct
  REGION 1..5: note = Sequence in adalimumab Fab
CDKTH

SEQ ID NO: 338 - protein, 957 aa, synthetic construct
  REGION 1..957: note = ACE2-740/186/knob/PGLALA/R273Q
QSTIEEQAKTFLDKFNHEAEDLFYQSSLASWNYNTNITEENVQNMNNAGDKWSAFLKEQSTLAQMYPLQEIQNLTVKLQLQALQQNGSSVLSEDKSKRLNTILNTMSTIYSTGKVCNPDNPQECLLLEPGLNEIMANSLDYNERLWAWESWRSEVGKQLRPLYEEYVVLKNEMARANHYEDYGDYWRGDYEVNGVDGYDYSRGQLIEDVEHTFEEIKPLYEHLHAYVRAKLMNAYPSYISPIGCLPAHLLGDMWGQFWTNLYSLTVPFGQKPNIDVTDAMVDQAWDAQRIFKEAEKFFVSVGLPNMTQGFWENSMLTDPGNVQKAVCHPTAWDLGKGDFRILMCTKVTMDDFLTAHHEMGHIQYDMAYAAQPFLLRNGANEGFHEAVGEIMSLSAATPKHLKSIGLLSPDFQEDNETEINFLLKQALTIVGTLPFTYMLEKWRWMVFKGEIPKDQWMKKWWEMKREIVGVVEPVPHDETYCDPASLFHVSNDYSFIRYYTRTLYQFQFQEALCQAAKHEGPLHKCDISNSTEAGQKLFNMLRLGKSEPWTLALENVVGAKNMNVRPLLNYFEPLFTWLKDQNKNSFVGWSTDWSPYADQSIKVRISLKSALGDKAYEWNDNEMYLFRSSVAYAMRQYFLKVKNQMILFGEEDVRVANLKPRISFNFFVTAPKNVSDIIPRTEVEKAIRMSRSRINDAFRLNDNSLEFLGIQPTLGPPNQPPVSTSTSPTRSDKTHTCPPCPAPEAAGGPSVFLFPPKPKDTLMISRTPEVTCVVVDVSHEDPEVKFNWYVDGVEVHNAKTKPREEQYNSTYRVVSVLTVLHQDWLNGKEYKCKVSNKALGAPIEKTISKAKGQPREPQVYTLPPCRDELTKNQVSLWCLVKGFYPSDIAVEWESNGQPENNYKTTPPVLDSDGSFFLYSKLTVDKSRWQQGNVFSCSVMHEALHNHYTQKSLSLSPG

SEQ ID NO: 339 - protein, 965 aa, synthetic construct
  REGION 1..965: note = ACE2-740/194/knob/PGLALA/R273Q
QSTIEEQAKTFLDKFNHEAEDLFYQSSLASWNYNTNITEENVQNMNNAGDKWSAFLKEQSTLAQMYPLQEIQNLTVKLQLQALQQNGSSVLSEDKSKRLNTILNTMSTIYSTGKVCNPDNPQECLLLEPGLNEIMANSLDYNERLWAWESWRSEVGKQLRPLYEEYVVLKNEMARANHYEDYGDYWRGDYEVNGVDGYDYSRGQLIEDVEHTFEEIKPLYEHLHAYVRAKLMNAYPSYISPIGCLPAHLLGDMWGQFWTNLYSLTVPFGQKPNIDVTDAMVDQAWDAQRIFKEAEKFFVSVGLPNMTQGFWENSMLTDPGNVQKAVCHPTAWDLGKGDFRILMCTKVTMDDFLTAHHEMGHIQYDMAYAAQPFLLRNGANEGFHEAVGEIMSLSAATPKHLKSIGLLSPDFQEDNETEINFLLKQALTIVGTLPFTYMLEKWRWMVFKGEIPKDQWMKKWWEMKREIVGVVEPVPHDETYCDPASLFHVSNDYSFIRYYTRTLYQFQFQEALCQAAKHEGPLHKCDISNSTEAGQKLFNMLRLGKSEPWTLALENVVGAKNMNVRPLLNYFEPLFTWLKDQNKNSFVGWSTDWSPYADQSIKVRISLKSALGDKAYEWNDNEMYLFRSSVAYAMRQYFLKVKNQMILFGEEDVRVANLKPRISFNFFVTAPKNVSDIIPRTEVEKAIRMSRSRINDAFRLNDNSLEFLGIQPTLGPPNQPPVSTSTSPTRSMAPGAVHLDKTHTCPPCPAPEAAGGPSVFLFPPKPKDTLMISRTPEVTCVVVDVSHEDPEVKFNWYVDGVEVHNAKTKPREEQYNSTYRVVSVLTVLHQDWLNGKEYKCKVSNKALGAPIEKTISKAKGQPREPQVYTLPPCRDELTKNQVSLWCLVKGFYPSDIAVEWESNGQPENNYKTTPPVLDSDGSFFLYSKLTVDKSRWQQGNVFSCSVMHEALHNHYTQKSLSLSPG

SEQ ID NO: 340 - protein, 972 aa, synthetic construct
  REGION 1..972: note = ACE2-740/201/knob/PGLALA/R273Q
QSTIEEQAKTFLDKFNHEAEDLFYQSSLASWNYNTNITEENVQNMNNAGDKWSAFLKEQSTLAQMYPLQEIQNLTVKLQLQALQQNGSSVLSEDKSKRLNTILNTMSTIYSTGKVCNPDNPQECLLLEPGLNEIMANSLDYNERLWAWESWRSEVGKQLRPLYEEYVVLKNEMARANHYEDYGDYWRGDYEVNGVDGYDYSRGQLIEDVEHTFEEIKPLYEHLHAYVRAKLMNAYPSYISPIGCLPAHLLGDMWGQFWTNLYSLTVPFGQKPNIDVTDAMVDQAWDAQRIFKEAEKFFVSVGLPNMTQGFWENSMLTDPGNVQKAVCHPTAWDLGKGDFRILMCTKVTMDDFLTAHHEMGHIQYDMAYAAQPFLLRNGANEGFHEAVGEIMSLSAATPKHLKSIGLLSPDFQEDNETEINFLLKQALTIVGTLPFTYMLEKWRWMVFKGEIPKDQWMKKWWEMKREIVGVVEPVPHDETYCDPASLFHVSNDYSFIRYYTRTLYQFQFQEALCQAAKHEGPLHKCDISNSTEAGQKLFNMLRLGKSEPWTLALENVVGAKNMNVRPLLNYFEPLFTWLKDQNKNSFVGWSTDWSPYADQSIKVRISLKSALGDKAYEWNDNEMYLFRSSVAYAMRQYFLKVKNQMILFGEEDVRVANLKPRISFNFFVTAPKNVSDIIPRTEVEKAIRMSRSRINDAFRLNDNSLEFLGIQPTLGPPNQPPVSTSTSPTRSMAPGAVHLPQPVSTRDKTHTCPPCPAPEAAGGPSVFLFPPKPKDTLMISRTPEVTCVVVDVSHEDPEVKFNWYVDGVEVHNAKTKPREEQYNSTYRVVSVLTVLHQDWLNGKEYKCKVSNKALGAPIEKTISKAKGQPREPQVYTLPPCRDELTKNQVSLWCLVKGFYPSDIAVEWESNGQPENNYKTTPPVLDSDGSFFLYSKLTVDKSRWQQGNVFSCSVMHEALHNHYTQKSLSLSPG

SEQ ID NO: 341 - protein, 979 aa, synthetic construct; identical to SEQ ID NO: 69
  REGION 1..979: note = ACE2-740/208/knob/PGLALA/R273Q

SEQ ID NO: 342 - protein, 847 aa, synthetic construct
  REGION 1..847: note = ACE2-615/201/hole/PGLALA/R273Q/RF
QSTIEEQAKTFLDKFNHEAEDLFYQSSLASWNYNTNITEENVQNMNNAGDKWSAFLKEQSTLAQMYPLQEIQNLTVKLQLQALQQNGSSVLSEDKSKRLNTILNTMSTIYSTGKVCNPDNPQECLLLEPGLNEIMANSLDYNERLWAWESWRSEVGKQLRPLYEEYVVLKNEMARANHYEDYGDYWRGDYEVNGVDGYDYSRGQLIEDVEHTFEEIKPLYEHLHAYVRAKLMNAYPSYISPIGCLPAHLLGDMWGQFWTNLYSLTVPFGQKPNIDVTDAMVDQAWDAQRIFKEAEKFFVSVGLPNMTQGFWENSMLTDPGNVQKAVCHPTAWDLGKGDFRILMCTKVTMDDFLTAHHEMGHIQYDMAYAAQPFLLRNGANEGFHEAVGEIMSLSAATPKHLKSIGLLSPDFQEDNETEINFLLKQALTIVGTLPFTYMLEKWRWMVFKGEIPKDQWMKKWWEMKREIVGVVEPVPHDETYCDPASLFHVSNDYSFIRYYTRTLYQFQFQEALCQAAKHEGPLHKCDISNSTEAGQKLFNMLRLGKSEPWTLALENVVGAKNMNVRPLLNYFEPLFTWLKDQNKNSFVGWSTDWSPYADTSTSPTRSMAPGAVHLPQPVSTRDKTHTCPPCPAPEAAGGPSVFLFPPKPKDTLMISRTPEVTCVVVDVSHEDPEVKFNWYVDGVEVHNAKTKPREEQYNSTYRVVSVLTVLHQDWLNGKEYKCKVSNKALGAPIEKTISKAKGQPREPQVCTLPPSRDELTKNQVSLSCAVKGFYPSDIAVEWESNGQPENNYKTTPPVLDSDGSFFLVSKLTVDKSRWQQGNVFSCSVMHEALHNRFTQKSLSLSPG

SEQ ID NO: 343 - protein, 848 aa, synthetic construct
  REGION 1..848: note = ACE2-615/202/hole/PGLALA/R273Q/RF
QSTIEEQAKTFLDKFNHEAEDLFYQSSLASWNYNTNITEENVQNMNNAGDKWSAFLKEQSTLAQMYPLQEIQNLTVKLQLQALQQNGSSVLSEDKSKRLNTILNTMSTIYSTGKVCNPDNPQECLLLEPGLNEIMANSLDYNERLWAWESWRSEVGKQLRPLYEEYVVLKNEMARANHYEDYGDYWRGDYEVNGVDGYDYSRGQLIEDVEHTFEEIKPLYEHLHAYVRAKLMNAYPSYISPIGCLPAHLLGDMWGQFWTNLYSLTVPFGQKPNIDVTDAMVDQAWDAQRIFKEAEKFFVSVGLPNMTQGFWENSMLTDPGNVQKAVCHPTAWDLGKGDFRILMCTKVTMDDFLTAHHEMGHIQYDMAYAAQPFLLRNGANEGFHEAVGEIMSLSAATPKHLKSIGLLSPDFQEDNETEINFLLKQALTIVGTLPFTYMLEKWRWMVFKGEIPKDQWMKKWWEMKREIVGVVEPVPHDETYCDPASLFHVSNDYSFIRYYTRTLYQFQFQEALCQAAKHEGPLHKCDISNSTEAGQKLFNMLRLGKSEPWTLALENVVGAKNMNVRPLLNYFEPLFTWLKDQNKNSFVGWSTDWSPYADTSTSPTRSMAPGAVHLPQPVSTRSDKTHTCPPCPAPEAAGGPSVFLFPPKPKDTLMISRTPEVTCVVVDVSHEDPEVKFNWYVDGVEVHNAKTKPREEQYNSTYRVVSVLTVLHQDWLNGKEYKCKVSNKALGAPIEKTISKAKGQPREPQVCTLPPSRDELTKNQVSLSCAVKGFYPSDIAVEWESNGQPENNYKTTPPVLDSDGSFFLVSKLTVDKSRWQQGNVFSCSVMHEALHNRFTQKSLSLSPG

SEQ ID NO: 344 - protein, 854 aa, synthetic construct
  REGION 1..854: note = ACE2-615/208/hole/PGLALA/R273Q/RF
QSTIEEQAKTFLDKFNHEAEDLFYQSSLASWNYNTNITEENVQNMNNAGDKWSAFLKEQSTLAQMYPLQEIQNLTVKLQLQALQQNGSSVLSEDKSKRLNTILNTMSTIYSTGKVCNPDNPQECLLLEPGLNEIMANSLDYNERLWAWESWRSEVGKQLRPLYEEYVVLKNEMARANHYEDYGDYWRGDYEVNGVDGYDYSRGQLIEDVEHTFEEIKPLYEHLHAYVRAKLMNAYPSYISPIGCLPAHLLGDMWGQFWTNLYSLTVPFGQKPNIDVTDAMVDQAWDAQRIFKEAEKFFVSVGLPNMTQGFWENSMLTDPGNVQKAVCHPTAWDLGKGDFRILMCTKVTMDDFLTAHHEMGHIQYDMAYAAQPFLLRNGANEGFHEAVGEIMSLSAATPKHLKSIGLLSPDFQEDNETEINFLLKQALTIVGTLPFTYMLEKWRWMVFKGEIPKDQWMKKWWEMKREIVGVVEPVPHDETYCDPASLFHVSNDYSFIRYYTRTLYQFQFQEALCQAAKHEGPLHKCDISNSTEAGQKLFNMLRLGKSEPWTLALENVVGAKNMNVRPLLNYFEPLFTWLKDQNKNSFVGWSTDWSPYADTSTSPTRSMAPGAVHLPQPVSTRSQHTQPTDKTHTCPPCPAPEAAGGPSVFLFPPKPKDTLMISRTPEVTCVVVDVSHEDPEVKFNWYVDGVEVHNAKTKPREEQYNSTYRVVSVLTVLHQDWLNGKEYKCKVSNKALGAPIEKTISKAKGQPREPQVCTLPPSRDELTKNQVSLSCAVKGFYPSDIAVEWESNGQPENNYKTTPPVLDSDGSFFLVSKLTVDKSRWQQGNVFSCSVMHEALHNRFTQKSLSLSPG

SEQ ID NO: 345 - protein, 858 aa, synthetic construct
  REGION 1..858: note = ACE2-615/212/hole/PGLALA/R273Q/RF
QSTIEEQAKTFLDKFNHEAEDLFYQSSLASWNYNTNITEENVQNMNNAGDKWSAFLKEQSTLAQMYPLQEIQNLTVKLQLQALQQNGSSVLSEDKSKRLNTILNTMSTIYSTGKVCNPDNPQECLLLEPGLNEIMANSLDYNERLWAWESWRSEVGKQLRPLYEEYVVLKNEMARANHYEDYGDYWRGDYEVNGVDGYDYSRGQLIEDVEHTFEEIKPLYEHLHAYVRAKLMNAYPSYISPIGCLPAHLLGDMWGQFWTNLYSLTVPFGQKPNIDVTDAMVDQAWDAQRIFKEAEKFFVSVGLPNMTQGFWENSMLTDPGNVQKAVCHPTAWDLGKGDFRILMCTKVTMDDFLTAHHEMGHIQYDMAYAAQPFLLRNGANEGFHEAVGEIMSLSAATPKHLKSIGLLSPDFQEDNETEINFLLKQALTIVGTLPFTYMLEKWRWMVFKGEIPKDQWMKKWWEMKREIVGVVEPVPHDETYCDPASLFHVSNDYSFIRYYTRTLYQFQFQEALCQAAKHEGPLHKCDISNSTEAGQKLFNMLRLGKSEPWTLALENVVGAKNMNVRPLLNYFEPLFTWLKDQNKNSFVGWSTDWSPYADTSTSPTRSMAPGAVHLPQPVSTRSQHTQPTPEPSDKTHTCPPCPAPEAAGGPSVFLFPPKPKDTLMISRTPEVTCVVVDVSHEDPEVKFNWYVDGVEVHNAKTKPREEQYNSTYRVVSVLTVLHQDWLNGKEYKCKVSNKALGAPIEKTISKAKGQPREPQVCTLPPSRDELTKNQVSLSCAVKGFYPSDIAVEWESNGQPENNYKTTPPVLDSDGSFFLVSKLTVDKSRWQQGNVFSCSVMHEALHNRFTQKSLSLSPG

SEQ ID NO: 346 - protein, 859 aa, synthetic construct
  REGION 1..859: note = ACE2-615/213/hole/PGLALA/R273Q/RF
QSTIEEQAKTFLDKFNHEAEDLFYQSSLASWNYNTNITEENVQNMNNAGDKWSAFLKEQSTLAQMYPLQEIQNLTVKLQLQALQQNGSSVLSEDKSKRLNTILNTMSTIYSTGKVCNPDNPQECLLLEPGLNEIMANSLDYNERLWAWESWRSEVGKQLRPLYEEYVVLKNEMARANHYEDYGDYWRGDYEVNGVDGYDYSRGQLIEDVEHTFEEIKPLYEHLHAYVRAKLMNAYPSYISPIGCLPAHLLGDMWGQFWTNLYSLTVPFGQKPNIDVTDAMVDQAWDAQRIFKEAEKFFVSVGLPNMTQGFWENSMLTDPGNVQKAVCHPTAWDLGKGDFRILMCTKVTMDDFLTAHHEMGHIQYDMAYAAQPFLLRNGANEGFHEAVGEIMSLSAATPKHLKSIGLLSPDFQEDNETEINFLLKQALTIVGTLPFTYMLEKWRWMVFKGEIPKDQWMKKWWEMKREIVGVVEPVPHDETYCDPASLFHVSNDYSFIRYYTRTLYQFQFQEALCQAAKHEGPLHKCDISNSTEAGQKLFNMLRLGKSEPWTLALENVVGAKNMNVRPLLNYFEPLFTWLKDQNKNSFVGWSTDWSPYADTSTSPTRSMAPGAVHLPQPVSTRSQHTQPTPEPSTDKTHTCPPCPAPEAAGGPSVFLFPPKPKDTLMISRTPEVTCVVVDVSHEDPEVKFNWYVDGVEVHNAKTKPREEQYNSTYRVVSVLTVLHQDWLNGKEYKCKVSNKALGAPIEKTISKAKGQPREPQVCTLPPSRDELTKNQVSLSCAVKGFYPSDIAVEWESNGQPENNYKTTPPVLDSDGSFFLVSKLTVDKSRWQQGNVFSCSVMHEALHNRFTQKSLSLSPG

SEQ ID NO: 347 - protein, 862 aa, synthetic construct
  REGION 1..862: note = ACE2-615/216/hole/PGLALA/R273Q/RF
QSTIEEQAKTFLDKFNHEAEDLFYQSSLASWNYNTNITEENVQNMNNAGDKWSAFLKEQSTLAQMYPLQEIQNLTVKLQLQALQQNGSSVLSEDKSKRLNTILNTMSTIYSTGKVCNPDNPQECLLLEPGLNEIMANSLDYNERLWAWESWRSEVGKQLRPLYEEYVVLKNEMARANHYEDYGDYWRGDYEVNGVDGYDYSRGQLIEDVEHTFEEIKPLYEHLHAYVRAKLMNAYPSYISPIGCLPAHLLGDMWGQFWTNLYSLTVPFGQKPNIDVTDAMVDQAWDAQRIFKEAEKFFVSVGLPNMTQGFWENSMLTDPGNVQKAVCHPTAWDLGKGDFRILMCTKVTMDDFLTAHHEMGHIQYDMAYAAQPFLLRNGANEGFHEAVGEIMSLSAATPKHLKSIGLLSPDFQEDNETEINFLLKQALTIVGTLPFTYMLEKWRWMVFKGEIPKDQWMKKWWEMKREIVGVVEPVPHDETYCDPASLFHVSNDYSFIRYYTRTLYQFQFQEALCQAAKHEGPLHKCDISNSTEAGQKLFNMLRLGKSEPWTLALENVVGAKNMNVRPLLNYFEPLFTWLKDQNKNSFVGWSTDWSPYADTSTSPTRSMAPGAVHLPQPVSTRSQHTQPTPEPSTAPSDKTHTCPPCPAPEAAGGPSVFLFPPKPKDTLMISRTPEVTCVVVDVSHEDPEVKFNWYVDGVEVHNAKTKPREEQYNSTYRVVSVLTVLHQDWLNGKEYKCKVSNKALGAPIEKTISKAKGQPREPQVCTLPPSRDELTKNQVSLSCAVKGFYPSDIAVEWESNGQPENNYKTTPPVLDSDGSFFLVSKLTVDKSRWQQGNVFSCSVMHEALHNRFTQKSLSLSPG

SEQ ID NO: 348 - protein, 863 aa, synthetic construct
  REGION 1..863: note = ACE2-615/217/hole/PGLALA/R273Q/RF
QSTIEEQAKTFLDKFNHEAEDLFYQSSLASWNYNTNITEENVQNMNNAGDKWSAFLKEQSTLAQMYPLQEIQNLTVKLQLQALQQNGSSVLSEDKSKRLNTILNTMSTIYSTGKVCNPDNPQECLLLEPGLNEIMANSLDYNERLWAWESWRSEVGKQLRPLYEEYVVLKNEMARANHYEDYGDYWRGDYEVNGVDGYDYSRGQLIEDVEHTFEEIKPLYEHLHAYVRAKLMNAYPSYISPIGCLPAHLLGDMWGQFWTNLYSLTVPFGQKPNIDVTDAMVDQAWDAQRIFKEAEKFFVSVGLPNMTQGFWENSMLTDPGNVQKAVCHPTAWDLGKGDFRILMCTKVTMDDFLTAHHEMGHIQYDMAYAAQPFLLRNGANEGFHEAVGEIMSLSAATPKHLKSIGLLSPDFQEDNETEINFLLKQALTIVGTLPFTYMLEKWRWMVFKGEIPKDQWMKKWWEMKREIVGVVEPVPHDETYCDPASLFHVSNDYSFIRYYTRTLYQFQFQEALCQAAKHEGPLHKCDISNSTEAGQKLFNMLRLGKSEPWTLALENVVGAKNMNVRPLLNYFEPLFTWLKDQNKNSFVGWSTDWSPYADTSTSPTRSMAPGAVHLPQPVSTRSQHTQPTPEPSTAPSTDKTHTCPPCPAPEAAGGPSVFLFPPKPKDTLMISRTPEVTCVVVDVSHEDPEVKFNWYVDGVEVHNAKTKPREEQYNSTYRVVSVLTVLHQDWLNGKEYKCKVSNKALGAPIEKTISKAKGQPREPQVCTLPPSRDELTKNQVSLSCAVKGFYPSDIAVEWESNGQPENNYKTTPPVLDSDGSFFLVSKLTVDKSRWQQGNVFSCSVMHEALHNRFTQKSLSLSPG

SEQ ID NO: 349 - protein, 864 aa, synthetic construct
  REGION 1..864: note = ACE2-615/218/hole/PGLALA/R273Q/RF
QSTIEEQAKTFLDKFNHEAEDLFYQSSLASWNYNTNITEENVQNMNNAGDKWSAFLKEQSTLAQMYPLQEIQNLTVKLQLQALQQNGSSVLSEDKSKRLNTILNTMSTIYSTGKVCNPDNPQECLLLEPGLNEIMANSLDYNERLWAWESWRSEVGKQLRPLYEEYVVLKNEMARANHYEDYGDYWRGDYEVNGVDGYDYSRGQLIEDVEHTFEEIKPLYEHLHAYVRAKLMNAYPSYISPIGCLPAHLLGDMWGQFWTNLYSLTVPFGQKPNIDVTDAMVDQAWDAQRIFKEAEKFFVSVGLPNMTQGFWENSMLTDPGNVQKAVCHPTAWDLGKGDFRILMCTKVTMDDFLTAHHEMGHIQYDMAYAAQPFLLRNGANEGFHEAVGEIMSLSAATPKHLKSIGLLSPDFQEDNETEINFLLKQALTIVGTLPFTYMLEKWRWMVFKGEIPKDQWMKKWWEMKREIVGVVEPVPHDETYCDPASLFHVSNDYSFIRYYTRTLYQFQFQEALCQAAKHEGPLHKCDISNSTEAGQKLFNMLRLGKSEPWTLALENVVGAKNMNVRPLLNYFEPLFTWLKDQNKNSFVGWSTDWSPYADTSTSPTRSMAPGAVHLPQPVSTRSQHTQPTPEPSTAPSTSDKTHTCPPCPAPEAAGGPSVFLFPPKPKDTLMISRTPEVTCVVVDVSHEDPEVKFNWYVDGVEVHNAKTKPREEQYNSTYRVVSVLTVLHQDWLNGKEYKCKVSNKALGAPIEKTISKAKGQPREPQVCTLPPSRDELTKNQVSLSCAVKGFYPSDIAVEWESNGQPENNYKTTPPVLDSDGSFFLVSKLTVDKSRWQQGNVFSCSVMHEALHNRFTQKSLSLSPG

SEQ ID NO: 350 - protein, 870 aa, synthetic construct
  REGION 1..870: note = ACE2-615/224/hole/PGLALA/R273Q/RF
QSTIEEQAKTFLDKFNHEAEDLFYQSSLASWNYNTNITEENVQNMNNAGDKWSAFLKEQSTLAQMYPLQEIQNLTVKLQLQALQQNGSSVLSEDKSKRLNTILNTMSTIYSTGKVCNPDNPQECLLLEPGLNEIMANSLDYNERLWAWESWRSEVGKQLRPLYEEYVVLKNEMARANHYEDYGDYWRGDYEVNGVDGYDYSRGQLIEDVEHTFEEIKPLYEHLHAYVRAKLMNAYPSYISPIGCLPAHLLGDMWGQFWTNLYSLTVPFGQKPNIDVTDAMVDQAWDAQRIFKEAEKFFVSVGLPNMTQGFWENSMLTDPGNVQKAVCHPTAWDLGKGDFRILMCTKVTMDDFLTAHHEMGHIQYDMAYAAQPFLLRNGANEGFHEAVGEIMSLSAATPKHLKSIGLLSPDFQEDNETEINFLLKQALTIVGTLPFTYMLEKWRWMVFKGEIPKDQWMKKWWEMKREIVGVVEPVPHDETYCDPASLFHVSNDYSFIRYYTRTLYQFQFQEALCQAAKHEGPLHKCDISNSTEAGQKLFNMLRLGKSEPWTLALENVVGAKNMNVRPLLNYFEPLFTWLKDQNKNSFVGWSTDWSPYADTSTSPTRSMAPGAVHLPQPVSTRSQHTQPTPEPSTAPSTSFLLPMGDKTHTCPPCPAPEAAGGPSVFLFPPKPKDTLMISRTPEVTCVVVDVSHEDPEVKFNWYVDGVEVHNAKTKPREEQYNSTYRVVSVLTVLHQDWLNGKEYKCKVSNKALGAPIEKTISKAKGQPREPQVCTLPPSRDELTKNQVSLSCAVKGFYPSDIAVEWESNGQPENNYKTTPPVLDSDGSFFLVSKLTVDKSRWQQGNVFSCSVMHEALHNRFTQKSLSLSPG

SEQ ID NO: 351 - protein, 881 aa, synthetic construct
  REGION 1..881: note = ACE2-615/235/hole/PGLALA/R273Q/RF
QSTIEEQAKTFLDKFNHEAEDLFYQSSLASWNYNTNITEENVQNMNNAGDKWSAFLKEQSTLAQMYPLQEIQNLTVKLQLQALQQNGSSVLSEDKSKRLNTILNTMSTIYSTGKVCNPDNPQECLLLEPGLNEIMANSLDYNERLWAWESWRSEVGKQLRPLYEEYVVLKNEMARANHYEDYGDYWRGDYEVNGVDGYDYSRGQLIEDVEHTFEEIKPLYEHLHAYVRAKLMNAYPSYISPIGCLPAHLLGDMWGQFWTNLYSLTVPFGQKPNIDVTDAMVDQAWDAQRIFKEAEKFFVSVGLPNMTQGFWENSMLTDPGNVQKAVCHPTAWDLGKGDFRILMCTKVTMDDFLTAHHEMGHIQYDMAYAAQPFLLRNGANEGFHEAVGEIMSLSAATPKHLKSIGLLSPDFQEDNETEINFLLKQALTIVGTLPFTYMLEKWRWMVFKGEIPKDQWMKKWWEMKREIVGVVEPVPHDETYCDPASLFHVSNDYSFIRYYTRTLYQFQFQEALCQAAKHEGPLHKCDISNSTEAGQKLFNMLRLGKSEPWTLALENVVGAKNMNVRPLLNYFEPLFTWLKDQNKNSFVGWSTDWSPYADTSTSPTRSMAPGAVHLPQPVSTRSQHTQPTPEPSTAPSTSFLLPMGPSPPAEGSTGDDKTHTCPPCPAPEAAGGPSVFLFPPKPKDTLMISRTPEVTCVVVDVSHEDPEVKFNWYVDGVEVHNAKTKPREEQYNSTYRVVSVLTVLHQDWLNGKEYKCKVSNKALGAPIEKTISKAKGQPREPQVCTLPPSRDELTKNQVSLSCAVKGFYPSDIAVEWESNGQPENNYKTTPPVLDSDGSFFLVSKLTVDKSRWQQGNVFSCSVMHEALHNRFTQKSLSLSPG

SEQ ID NO: 352 - protein, 972 aa, synthetic construct
  REGION 1..972: note = ACE2-740/201/hole/PGLALA/R273Q/RF
QSTIEEQAKTFLDKFNHEAEDLFYQSSLASWNYNTNITEENVQNMNNAGDKWSAFLKEQSTLAQMYPLQEIQNLTVKLQLQALQQNGSSVLSEDKSKRLNTILNTMSTIYSTGKVCNPDNPQECLLLEPGLNEIMANSLDYNERLWAWESWRSEVGKQLRPLYEEYVVLKNEMARANHYEDYGDYWRGDYEVNGVDGYDYSRGQLIEDVEHTFEEIKPLYEHLHAYVRAKLMNAYPSYISPIGCLPAHLLGDMWGQFWTNLYSLTVPFGQKPNIDVTDAMVDQAWDAQRIFKEAEKFFVSVGLPNMTQGFWENSMLTDPGNVQKAVCHPTAWDLGKGDFRILMCTKVTMDDFLTAHHEMGHIQYDMAYAAQPFLLRNGANEGFHEAVGEIMSLSAATPKHLKSIGLLSPDFQEDNETEINFLLKQALTIVGTLPFTYMLEKWRWMVFKGEIPKDQWMKKWWEMKREIVGVVEPVPHDETYCDPASLFHVSNDYSFIRYYTRTLYQFQFQEALCQAAKHEGPLHKCDISNSTEAGQKLFNMLRLGKSEPWTLALENVVGAKNMNVRPLLNYFEPLFTWLKDQNKNSFVGWSTDWSPYADQSIKVRISLKSALGDKAYEWNDNEMYLFRSSVAYAMRQYFLKVKNQMILFGEEDVRVANLKPRISFNFFVTAPKNVSDIIPRTEVEKAIRMSRSRINDAFRLNDNSLEFLGIQPTLGPPNQPPVSTSTSPTRSMAPGAVHLPQPVSTRDKTHTCPPCPAPEAAGGPSVFLFPPKPKDTLMISRTPEVTCVVVDVSHEDPEVKFNWYVDGVEVHNAKTKPREEQYNSTYRVVSVLTVLHQDWLNGKEYKCKVSNKALGAPIEKTISKAKGQPREPQVCTLPPSRDELTKNQVSLSCAVKGFYPSDIAVEWESNGQPENNYKTTPPVLDSDGSFFLVSKLTVDKSRWQQGNVFSCSVMHEALHNRFTQKSLSLSPG

SEQ ID NO: 353 - protein, 847 aa, synthetic construct
  REGION 1..847: note = ACE2-615/201/knob/PGLALA/R273Q
QSTIEEQAKTFLDKFNHEAEDLFYQSSLASWNYNTNITEENVQNMNNAGDKWSAFLKEQSTLAQMYPLQEIQNLTVKLQLQALQQNGSSVLSEDKSKRLNTILNTMSTIYSTGKVCNPDNPQECLLLEPGLNEIMANSLDYNERLWAWESWRSEVGKQLRPLYEEYVVLKNEMARANHYEDYGDYWRGDYEVNGVDGYDYSRGQLIEDVEHTFEEIKPLYEHLHAYVRAKLMNAYPSYISPIGCLPAHLLGDMWGQFWTNLYSLTVPFGQKPNIDVTDAMVDQAWDAQRIFKEAEKFFVSVGLPNMTQGFWENSMLTDPGNVQKAVCHPTAWDLGKGDFRILMCTKVTMDDFLTAHHEMGHIQYDMAYAAQPFLLRNGANEGFHEAVGEIMSLSAATPKHLKSIGLLSPDFQEDNETEINFLLKQALTIVGTLPFTYMLEKWRWMVFKGEIPKDQWMKKWWEMKREIVGVVEPVPHDETYCDPASLFHVSNDYSFIRYYTRTLYQFQFQEALCQAAKHEGPLHKCDISNSTEAGQKLFNMLRLGKSEPWTLALENVVGAKNMNVRPLLNYFEPLFTWLKDQNKNSFVGWSTDWSPYADTSTSPTRSMAPGAVHLPQPVSTRDKTHTCPPCPAPEAAGGPSVFLFPPKPKDTLMISRTPEVTCVVVDVSHEDPEVKFNWYVDGVEVHNAKTKPREEQYNSTYRVVSVLTVLHQDWLNGKEYKCKVSNKALGAPIEKTISKAKGQPREPQVYTLPPCRDELTKNQVSLWCLVKGFYPSDIAVEWESNGQPENNYKTTPPVLDSDGSFFLYSKLTVDKSRWQQGNVFSCSVMHEALHNHYTQKSLSLSPG

SEQ ID NO: 354 - protein, 972 aa, synthetic construct
  REGION 1..972: note = ACE2-740/201/knob/PGLALA
QSTIEEQAKTFLDKFNHEAEDLFYQSSLASWNYNTNITEENVQNMNNAGDKWSAFLKEQSTLAQMYPLQEIQNLTVKLQLQALQQNGSSVLSEDKSKRLNTILNTMSTIYSTGKVCNPDNPQECLLLEPGLNEIMANSLDYNERLWAWESWRSEVGKQLRPLYEEYVVLKNEMARANHYEDYGDYWRGDYEVNGVDGYDYSRGQLIEDVEHTFEEIKPLYEHLHAYVRAKLMNAYPSYISPIGCLPAHLLGDMWGRFWTNLYSLTVPFGQKPNIDVTDAMVDQAWDAQRIFKEAEKFFVSVGLPNMTQGFWENSMLTDPGNVQKAVCHPTAWDLGKGDFRILMCTKVTMDDFLTAHHEMGHIQYDMAYAAQPFLLRNGANEGFHEAVGEIMSLSAATPKHLKSIGLLSPDFQEDNETEINFLLKQALTIVGTLPFTYMLEKWRWMVFKGEIPKDQWMKKWWEMKREIVGVVEPVPHDETYCDPASLFHVSNDYSFIRYYTRTLYQFQFQEALCQAAKHEGPLHKCDISNSTEAGQKLFNMLRLGKSEPWTLALENVVGAKNMNVRPLLNYFEPLFTWLKDQNKNSFVGWSTDWSPYADQSIKVRISLKSALGDKAYEWNDNEMYLFRSSVAYAMRQYFLKVKNQMILFGEEDVRVANLKPRISFNFFVTAPKNVSDIIPRTEVEKAIRMSRSRINDAFRLNDNSLEFLGIQPTLGPPNQPPVSTSTSPTRSMAPGAVHLPQPVSTRDKTHTCPPCPAPEAAGGPSVFLFPPKPKDTLMISRTPEVTCVVVDVSHEDPEVKFNWYVDGVEVHNAKTKPREEQYNSTYRVVSVLTVLHQDWLNGKEYKCKVSNKALGAPIEKTISKAKGQPREPQVYTLPPCRDELTKNQVSLWCLVKGFYPSDIAVEWESNGQPENNYKTTPPVLDSDGSFFLYSKLTVDKSRWQQGNVFSCSVMHEALHNHYTQKSLSLSPG

SEQ ID NO: 355 - protein, 972 aa, synthetic construct
  REGION 1..972: note = ACE2-740/201/knob/PGLALA/R273A
QSTIEEQAKTFLDKFNHEAEDLFYQSSLASWNYNTNITEENVQNMNNAGDKWSAFLKEQSTLAQMYPLQEIQNLTVKLQLQALQQNGSSVLSEDKSKRLNTILNTMSTIYSTGKVCNPDNPQECLLLEPGLNEIMANSLDYNERLWAWESWRSEVGKQLRPLYEEYVVLKNEMARANHYEDYGDYWRGDYEVNGVDGYDYSRGQLIEDVEHTFEEIKPLYEHLHAYVRAKLMNAYPSYISPIGCLPAHLLGDMWGAFWTNLYSLTVPFGQKPNIDVTDAMVDQAWDAQRIFKEAEKFFVSVGLPNMTQGFWENSMLTDPGNVQKAVCHPTAWDLGKGDFRILMCTKVTMDDFLTAHHEMGHIQYDMAYAAQPFLLRNGANEGFHEAVGEIMSLSAATPKHLKSIGLLSPDFQEDNETEINFLLKQALTIVGTLPFTYMLEKWRWMVFKGEIPKDQWMKKWWEMKREIVGVVEPVPHDETYCDPASLFHVSNDYSFIRYYTRTLYQFQFQEALCQAAKHEGPLHKCDISNSTEAGQKLFNMLRLGKSEPWTLALENVVGAKNMNVRPLLNYFEPLFTWLKDQNKNSFVGWSTDWSPYADQSIKVRISLKSALGDKAYEWNDNEMYLFRSSVAYAMRQYFLKVKNQMILFGEEDVRVANLKPRISFNFFVTAPKNVSDIIPRTEVEKAIRMSRSRINDAFRLNDNSLEFLGIQPTLGPPNQPPVSTSTSPTRSMAPGAVHLPQPVSTRDKTHTCPPCPAPEAAGGPSVFLFPPKPKDTLMISRTPEVTCVVVDVSHEDPEVKFNWYVDGVEVHNAKTKPREEQYNSTYRVVSVLTVLHQDWLNGKEYKCKVSNKALGAPIEKTISKAKGQPREPQVYTLPPCRDELTKNQVSLWCLVKGFYPSDIAVEWESNGQPENNYKTTPPVLDSDGSFFLYSKLTVDKSRWQQGNVFSCSVMHEALHNHYTQKSLSLSPG

SEQ ID NO: 356 - protein, 972 aa, synthetic construct
  REGION 1..972: note = ACE2-740/201/knob/PGLALA/R273G
QSTIEEQAKTFLDKFNHEAEDLFYQSSLASWNYNTNITEENVQNMNNAGDKWSAFLKEQSTLAQMYPLQEIQNLTVKLQLQALQQNGSSVLSEDKSKRLNTILNTMSTIYSTGKVCNPDNPQECLLLEPGLNEIMANSLDYNERLWAWESWRSEVGKQLRPLYEEYVVLKNEMARANHYEDYGDYWRGDYEVNGVDGYDYSRGQLIEDVEHTFEEIKPLYEHLHAYVRAKLMNAYPSYISPIGCLPAHLLGDMWGGFWTNLYSLTVPFGQKPNIDVTDAMVDQAWDAQRIFKEAEKFFVSVGLPNMTQGFWENSMLTDPGNVQKAVCHPTAWDLGKGDFRILMCTKVTMDDFLTAHHEMGHIQYDMAYAAQPFLLRNGANEGFHEAVGEIMSLSAATPKHLKSIGLLSPDFQEDNETEINFLLKQALTIVGTLPFTYMLEKWRWMVFKGEIPKDQWMKKWWEMKREIVGVVEPVPHDETYCDPASLFHVSNDYSFIRYYTRTLYQFQFQEALCQAAKHEGPLHKCDISNSTEAGQKLFNMLRLGKSEPWTLALENVVGAKNMNVRPLLNYFEPLFTWLKDQNKNSFVGWSTDWSPYADQSIKVRISLKSALGDKAYEWNDNEMYLFRSSVAYAMRQYFLKVKNQMILFGEEDVRVANLKPRISFNFFVTAPKNVSDIIPRTEVEKAIRMSRSRINDAFRLNDNSLEFLGIQPTLGPPNQPPVSTSTSPTRSMAPGAVHLPQPVSTRDKTHTCPPCPAPEAAGGPSVFLFPPKPKDTLMISRTPEVTCVVVDVSHEDPEVKFNWYVDGVEVHNAKTKPREEQYNSTYRVVSVLTVLHQDWLNGKEYKCKVSNKALGAPIEKTISKAKGQPREPQVYTLPPCRDELTKNQVSLWCLVKGFYPSDIAVEWESNGQPENNYKTTPPVLDSDGSFFLYSKLTVDKSRWQQGNVFSCSVMHEALHNHYTQKSLSLSPG

SEQ ID NO: 357 - protein, 972 aa, synthetic construct
  REGION 1..972: note = ACE2-740/201/knob/PGLALA/R273V
QSTIEEQAKTFLDKFNHEAEDLFYQSSLASWNYNTNITEENVQNMNNAGDKWSAFLKEQSTLAQMYPLQEIQNLTVKLQLQALQQNGSSVLSEDKSKRLNTILNTMSTIYSTGKVCNPDNPQECLLLEPGLNEIMANSLDYNERLWAWESWRSEVGKQLRPLYEEYVVLKNEMARANHYEDYGDYWRGDYEVNGVDGYDYSRGQLIEDVEHTFEEIKPLYEHLHAYVRAKLMNAYPSYISPIGCLPAHLLGDMWGVFWTNLYSLTVPFGQKPNIDVTDAMVDQAWDAQRIFKEAEKFFVSVGLPNMTQGFWENSMLTDPGNVQKAVCHPTAWDLGKGDFRILMCTKVTMDDFLTAHHEMGHIQYDMAYAAQPFLLRNGANEGFHEAVGEIMSLSAATPKHLKSIGLLSPDFQEDNETEINFLLKQALTIVGTLPFTYMLEKWRWMVFKGEIPKDQWMKKWWEMKREIVGVVEPVPHDETYCDPASLFHVSNDYSFIRYYTRTLYQFQFQEALCQAAKHEGPLHKCDISNSTEAGQKLFNMLRLGKSEPWTLALENVVGAKNMNVRPLLNYFEPLFTWLKDQNKNSFVGWSTDWSPYADQSIKVRISLKSALGDKAYEWNDNEMYLFRSSVAYAMRQYFLKVKNQMILFGEEDVRVANLKPRISFNFFVTAPKNVSDIIPRTEVEKAIRMSRSRINDAFRLNDNSLEFLGIQPTLGPPNQPPVSTSTSPTRSMAPGAVHLPQPVSTRDKTHTCPPCPAPEAAGGPSVFLFPPKPKDTLMISRTPEVTCVVVDVSHEDPEVKFNWYVDGVEVHNAKTKPREEQYNSTYRVVSVLTVLHQDWLNGKEYKCKVSNKALGAPIEKTISKAKGQPREPQVYTLPPCRDELTKNQVSLWCLVKGFYPSDIAVEWESNGQPENNYKTTPPVLDSDGSFFLYSKLTVDKSRWQQGNVFSCSVMHEALHNHYTQKSLSLSPG

SEQ ID NO: 358 - protein, 972 aa, synthetic construct
  REGION 1..972: note = ACE2-740/201/knob/PGLALA/H378A
QSTIEEQAKTFLDKFNHEAEDLFYQSSLASWNYNTNITEENVQNMNNAGDKWSAFLKEQSTLAQMYPLQEIQNLTVKLQLQALQQNGSSVLSEDKSKRLNTILNTMSTIYSTGKVCNPDNPQECLLLEPGLNEIMANSLDYNERLWAWESWRSEVGKQLRPLYEEYVVLKNEMARANHYEDYGDYWRGDYEVNGVDGYDYSRGQLIEDVEHTFEEIKPLYEHLHAYVRAKLMNAYPSYISPIGCLPAHLLGDMWGRFWTNLYSLTVPFGQKPNIDVTDAMVDQAWDAQRIFKEAEKFFVSVGLPNMTQGFWENSMLTDPGNVQKAVCHPTAWDLGKGDFRILMCTKVTMDDFLTAHHEMGAIQYDMAYAAQPFLLRNGANEGFHEAVGEIMSLSAATPKHLKSIGLLSPDFQEDNETEINFLLKQALTIVGTLPFTYMLEKWRWMVFKGEIPKDQWMKKWWEMKREIVGVVEPVPHDETYCDPASLFHVSNDYSFIRYYTRTLYQFQFQEALCQAAKHEGPLHKCDISNSTEAGQKLFNMLRLGKSEPWTLALENVVGAKNMNVRPLLNYFEPLFTWLKDQNKNSFVGWSTDWSPYADQSIKVRISLKSALGDKAYEWNDNEMYLFRSSVAYAMRQYFLKVKNQMILFGEEDVRVANLKPRISFNFFVTAPKNVSDIIPRTEVEKAIRMSRSRINDAFRLNDNSLEFLGIQPTLGPPNQPPVSTSTSPTRSMAPGAVHLPQPVSTRDKTHTCPPCPAPEAAGGPSVFLFPPKPKDTLMISRTPEVTCVVVDVSHEDPEVKFNWYVDGVEVHNAKTKPREEQYNSTYRVVSVLTVLHQDWLNGKEYKCKVSNKALGAPIEKTISKAKGQPREPQVYTLPPCRDELTKNQVSLWCLVKGFYPSDIAVEWESNGQPENNYKTTPPVLDSDGSFFLYSKLTVDKSRWQQGNVFSCSVMHEALHNHYTQKSLSLSPG

SEQ ID NO: 359 - protein, 972 aa, synthetic construct
  REGION 1..972: note = ACE2-740/201/knob/PGLALA/E402A
QSTIEEQAKTFLDKFNHEAEDLFYQSSLASWNYNTNITEENVQNMNNAGDKWSAFLKEQSTLAQMYPLQEIQNLTVKLQLQALQQNGSSVLSEDKSKRLNTILNTMSTIYSTGKVCNPDNPQECLLLEPGLNEIMANSLDYNERLWAWESWRSEVGKQLRPLYEEYVVLKNEMARANHYEDYGDYWRGDYEVNGVDGYDYSRGQLIEDVEHTFEEIKPLYEHLHAYVRAKLMNAYPSYISPIGCLPAHLLGDMWGRFWTNLYSLTVPFGQKPNIDVTDAMVDQAWDAQRIFKEAEKFFVSVGLPNMTQGFWENSMLTDPGNVQKAVCHPTAWDLGKGDFRILMCTKVTMDDFLTAHHEMGHIQYDMAYAAQPFLLRNGANEGFHAAVGEIMSLSAATPKHLKSIGLLSPDFQEDNETEINFLLKQALTIVGTLPFTYMLEKWRWMVFKGEIPKDQWMKKWWEMKREIVGVVEPVPHDETYCDPASLFHVSNDYSFIRYYTRTLYQFQFQEALCQAAKHEGPLHKCDISNSTEAGQKLFNMLRLGKSEPWTLALENVVGAKNMNVRPLLNYFEPLFTWLKDQNKNSFVGWSTDWSPYADQSIKVRISLKSALGDKAYEWNDNEMYLFRSSVAYAMRQYFLKVKNQMILFGEEDVRVANLKPRISFNFFVTAPKNVSDIIPRTEVEKAIRMSRSRINDAFRLNDNSLEFLGIQPTLGPPNQPPVSTSTSPTRSMAPGAVHLPQPVSTRDKTHTCPPCPAPEAAGGPSVFLFPPKPKDTLMISRTPEVTCVVVDVSHEDPEVKFNWYVDGVEVHNAKTKPREEQYNSTYRVVSVLTVLHQDWLNGKEYKCKVSNKALGAPIEKTISKAKGQPREPQVYTLPPCRDELTKNQVSLWCLVKGFYPSDIAVEWESNGQPENNYKTTPPVLDSDGSFFLYSKLTVDKSRWQQGNVFSCSVMHEALHNHYTQKSLSLSPG

SEQ ID NO: 360 - protein, 979 aa, synthetic construct
  REGION 1..979: note = ACE2-740/208/knob/PGLALA
QSTIEEQAKTFLDKFNHEAEDLFYQSSLASWNYNTNITEENVQNMNNAGDKWSAFLKEQSTLAQMYPLQEIQNLTVKLQLQALQQNGSSVLSEDKSKRLNTILNTMSTIYSTGKVCNPDNPQECLLLEPGLNEIMANSLDYNERLWAWESWRSEVGKQLRPLYEEYVVLKNEMARANHYEDYGDYWRGDYEVNGVDGYDYSRGQLIEDVEHTFEEIKPLYEHLHAYVRAKLMNAYPSYISPIGCLPAHLLGDMWGRFWTNLYSLTVPFGQKPNIDVTDAMVDQAWDAQRIFKEAEKFFVSVGLPNMTQGFWENSMLTDPGNVQKAVCHPTAWDLGKGDFRILMCTKVTMDDFLTAHHEMGHIQYDMAYAAQPFLLRNGANEGFHEAVGEIMSLSAATPKHLKSIGLLSPDFQEDNETEINFLLKQALTIVGTLPFTYMLEKWRWMVFKGEIPKDQWMKKWWEMKREIVGVVEPVPHDETYCDPASLFHVSNDYSFIRYYTRTLYQFQFQEALCQAAKHEGPLHKCDISNSTEAGQKLFNMLRLGKSEPWTLALENVVGAKNMNVRPLLNYFEPLFTWLKDQNKNSFVGWSTDWSPYADQSIKVRISLKSALGDKAYEWNDNEMYLFRSSVAYAMRQYFLKVKNQMILFGEEDVRVANLKPRISFNFFVTAPKNVSDIIPRTEVEKAIRMSRSRINDAFRLNDNSLEFLGIQPTLGPPNQPPVSTSTSPTRSMAPGAVHLPQPVSTRSQHTQPTDKTHTCPPCPAPEAAGGPSVFLFPPKPKDTLMISRTPEVTCVVVDVSHEDPEVKFNWYVDGVEVHNAKTKPREEQYNSTYRVVSVLTVLHQDWLNGKEYKCKVSNKALGAPIEKTISKAKGQPREPQVYTLPPCRDELTKNQVSLWCLVKGFYPSDIAVEWESNGQPENNYKTTPPVLDSDGSFFLYSKLTVDKSRWQQGNVFSCSVMHEALHNHYTQKSLSLSPG

SEQ ID NO: 361 - protein, 979 aa, synthetic construct
  REGION 1..979: note = ACE2-740/208/knob/PGLALA/R273A
QSTIEEQAKTFLDKFNHEAEDLFYQSSLASWNYNTNITEENVQNMNNAGDKWSAFLKEQSTLAQMYPLQEIQNLTVKLQLQALQQNGSSVLSEDKSKRLNTILNTMSTIYSTGKVCNPDNPQECLLLEPGLNEIMANSLDYNERLWAWESWRSEVGKQLRPLYEEYVVLKNEMARANHYEDYGDYWRGDYEVNGVDGYDYSRGQLIEDVEHTFEEIKPLYEHLHAYVRAKLMNAYPSYISPIGCLPAHLLGDMWGAFWTNLYSLTVPFGQKPNIDVTDAMVDQAWDAQRIFKEAEKFFVSVGLPNMTQGFWENSMLTDPGNVQKAVCHPTAWDLGKGDFRILMCTKVTMDDFLTAHHEMGHIQYDMAYAAQPFLLRNGANEGFHEAVGEIMSLSAATPKHLKSIGLLSPDFQEDNETEINFLLKQALTIVGTLPFTYMLEKWRWMVFKGEIPKDQWMKKWWEMKREIVGVVEPVPHDETYCDPASLFHVSNDYSFIRYYTRTLYQFQFQEALCQAAKHEGPLHKCDISNSTEAGQKLFNMLRLGKSEPWTLALENVVGAKNMNVRPLLNYFEPLFTWLKDQNKNSFVGWSTDWSPYADQSIKVRISLKSALGDKAYEWNDNEMYLFRSSVAYAMRQYFLKVKNQMILFGEEDVRVANLKPRISFNFFVTAPKNVSDIIPRTEVEKAIRMSRSRINDAFRLNDNSLEFLGIQPTLGPPNQPPVSTSTSPTRSMAPGAVHLPQPVSTRSQHTQPTDKTHTCPPCPAPEAAGGPSVFLFPPKPKDTLMISRTPEVTCVVVDVSHEDPEVKFNWYVDGVEVHNAKTKPREEQYNSTYRVVSVLTVLHQDWLNGKEYKCKVSNKALGAPIEKTISKAKGQPREPQVYTLPPCRDELTKNQVSLWCLVKGFYPSDIAVEWESNGQPENNYKTTPPVLDSDGSFFLYSKLTVDKSRWQQGNVFSCSVMHEALHNHYTQKSLSLSPG

SEQ ID NO: 362 - protein, 979 aa, synthetic construct
  REGION 1..979: note = ACE2-740/208/knob/PGLALA/R273G
QSTIEEQAKTFLDKFNHEAEDLFYQSSLASWNYNTNITEENVQNMNNAGDKWSAFLKEQSTLAQMYPLQEIQNLTVKLQLQALQQNGSSVLSEDKSKRLNTILNTMSTIYSTGKVCNPDNPQECLLLEPGLNEIMANSLDYNERLWAWESWRSEVGKQLRPLYEEYVVLKNEMARANHYEDYGDYWRGDYEVNGVDGYDYSRGQLIEDVEHTFEEIKPLYEHLHAYVRAKLMNAYPSYISPIGCLPAHLLGDMWGGFWTNLYSLTVPFGQKPNIDVTDAMVDQAWDAQRIFKEAEKFFVSVGLPNMTQGFWENSMLTDPGNVQKAVCHPTAWDLGKGDFRILMCTKVTMDDFLTAHHEMGHIQYDMAYAAQPFLLRNGANEGFHEAVGEIMSLSAATPKHLKSIGLLSPDFQEDNETEINFLLKQALTIVGTLPFTYMLEKWRWMVFKGEIPKDQWMKKWWEMKREIVGVVEPVPHDETYCDPASLFHVSNDYSFIRYYTRTLYQFQFQEALCQAAKHEGPLHKCDISNSTEAGQKLFNMLRLGKSEPWTLALENVVGAKNMNVRPLLNYFEPLFTWLKDQNKNSFVGWSTDWSPYADQSIKVRISLKSALGDKAYEWNDNEMYLFRSSVAYAMRQYFLKVKNQMILFGEEDVRVANLKPRISFNFFVTAPKNVSDIIPRTEVEKAIRMSRSRINDAFRLNDNSLEFLGIQPTLGPPNQPPVSTSTSPTRSMAPGAVHLPQPVSTRSQHTQPTDKTHTCPPCPAPEAAGGPSVFLFPPKPKDTLMISRTPEVTCVVVDVSHEDPEVKFNWYVDGVEVHNAKTKPREEQYNSTYRVVSVLTVLHQDWLNGKEYKCKVSNKALGAPIEKTISKAKGQPREPQVYTLPPCRDELTKNQVSLWCLVKGFYPSDIAVEWESNGQPENNYKTTPPVLDSDGSFFLYSKLTVDKSRWQQGNVFSCSVMHEALHNHYTQKSLSLSPG

SEQ ID NO: 363 - protein, 979 aa, synthetic construct
  REGION 1..979: note = ACE2-740/208/knob/PGLALA/R273V
QSTIEEQAKTFLDKFNHEAEDLFYQSSLASWNYNTNITEENVQNMNNAGDKWSAFLKEQSTLAQMYPLQEIQNLTVKLQLQALQQNGSSVLSEDKSKRLNTILNTMSTIYSTGKVCNPDNPQECLLLEPGLNEIMANSLDYNERLWAWESWRSEVGKQLRPLYEEYVVLKNEMARANHYEDYGDYWRGDYEVNGVDGYDYSRGQLIEDVEHTFEEIKPLYEHLHAYVRAKLMNAYPSYISPIGCLPAHLLGDMWGVFWTNLYSLTVPFGQKPNIDVTDAMVDQAWDAQRIFKEAEKFFVSVGLPNMTQGFWENSMLTDPGNVQKAVCHPTAWDLGKGDFRILMCTKVTMDDFLTAHHEMGHIQYDMAYAAQPFLLRNGANEGFHEAVGEIMSLSAATPKHLKSIGLLSPDFQEDNETEINFLLKQALTIVGTLPFTYMLEKWRWMVFKGEIPKDQWMKKWWEMKREIVGVVEPVPHDETYCDPASLFHVSNDYSFIRYYTRTLYQFQFQEALCQAAKHEGPLHKCDISNSTEAGQKLFNMLRLGKSEPWTLALENVVGAKNMNVRPLLNYFEPLFTWLKDQNKNSFVGWSTDWSPYADQSIKVRISLKSALGDKAYEWNDNEMYLFRSSVAYAMRQYFLKVKNQMILFGEEDVRVANLKPRISFNFFVTAPKNVSDIIPRTEVEKAIRMSRSRINDAFRLNDNSLEFLGIQPTLGPPNQPPVSTSTSPTRSMAPGAVHLPQPVSTRSQHTQPTDKTHTCPPCPAPEAAGGPSVFLFPPKPKDTLMISRTPEVTCVVVDVSHEDPEVKFNWYVDGVEVHNAKTKPREEQYNSTYRVVSVLTVLHQDWLNGKEYKCKVSNKALGAPIEKTISKAKGQPREPQVYTLPPCRDELTKNQVSLWCLVKGFYPSDIAVEWESNGQPENNYKTTPPVLDSDGSFFLYSKLTVDKSRWQQGNVFSCSVMHEALHNHYTQKSLSLSPG

SEQ ID NO: 364 - protein, 979 aa, synthetic construct
  REGION 1..979: note = ACE2-740/208/knob/PGLALA/H378A
QSTIEEQAKTFLDKFNHEAEDLFYQSSLASWNYNTNITEENVQNMNNAGDKWSAFLKEQSTLAQMYPLQEIQNLTVKLQLQALQQNGSSVLSEDKSKRLNTILNTMSTIYSTGKVCNPDNPQECLLLEPGLNEIMANSLDYNERLWAWESWRSEVGKQLRPLYEEYVVLKNEMARANHYEDYGDYWRGDYEVNGVDGYDYSRGQLIEDVEHTFEEIKPLYEHLHAYVRAKLMNAYPSYISPIGCLPAHLLGDMWGRFWTNLYSLTVPFGQKPNIDVTDAMVDQAWDAQRIFKEAEKFFVSVGLPNMTQGFWENSMLTDPGNVQKAVCHPTAWDLGKGDFRILMCTKVTMDDFLTAHHEMGAIQYDMAYAAQPFLLRNGANEGFHEAVGEIMSLSAATPKHLKSIGLLSPDFQEDNETEINFLLKQALTIVGTLPFTYMLEKWRWMVFKGEIPKDQWMKKWWEMKREIVGVVEPVPHDETYCDPASLFHVSNDYSFIRYYTRTLYQFQFQEALCQAAKHEGPLHKCDISNSTEAGQKLFNMLRLGKSEPWTLALENVVGAKNMNVRPLLNYFEPLFTWLKDQNKNSFVGWSTDWSPYADQSIKVRISLKSALGDKAYEWNDNEMYLFRSSVAYAMRQYFLKVKNQMILFGEEDVRVANLKPRISFNFFVTAPKNVSDIIPRTEVEKAIRMSRSRINDAFRLNDNSLEFLGIQPTLGPPNQPPVSTSTSPTRSMAPGAVHLPQPVSTRSQHTQPTDKTHTCPPCPAPEAAGGPSVFLFPPKPKDTLMISRTPEVTCVVVDVSHEDPEVKFNWYVDGVEVHNAKTKPREEQYNSTYRVVSVLTVLHQDWLNGKEYKCKVSNKALGAPIEKTISKAKGQPREPQVYTLPPCRDELTKNQVSLWCLVKGFYPSDIAVEWESNGQPENNYKTTPPVLDSDGSFFLYSKLTVDKSRWQQGNVFSCSVMHEALHNHYTQKSLSLSPG

SEQ ID NO: 365 - protein, 979 aa, synthetic construct
  REGION 1..979: note = ACE2-740/208/knob/PGLALA/E402A
QSTIEEQAKTFLDKFNHEAEDLFYQSSLASWNYNTNITEENVQNMNNAGDKWSAFLKEQSTLAQMYPLQEIQNLTVKLQLQALQQNGSSVLSEDKSKRLNTILNTMSTIYSTGKVCNPDNPQECLLLEPGLNEIMANSLDYNERLWAWESWRSEVGKQLRPLYEEYVVLKNEMARANHYEDYGDYWRGDYEVNGVDGYDYSRGQLIEDVEHTFEEIKPLYEHLHAYVRAKLMNAYPSYISPIGCLPAHLLGDMWGRFWTNLYSLTVPFGQKPNIDVTDAMVDQAWDAQRIFKEAEKFFVSVGLPNMTQGFWENSMLTDPGNVQKAVCHPTAWDLGKGDFRILMCTKVTMDDFLTAHHEMGHIQYDMAYAAQPFLLRNGANEGFHAAVGEIMSLSAATPKHLKSIGLLSPDFQEDNETEINFLLKQALTIVGTLPFTYMLEKWRWMVFKGEIPKDQWMKKWWEMKREIVGVVEPVPHDETYCDPASLFHVSNDYSFIRYYTRTLYQFQFQEALCQAAKHEGPLHKCDISNSTEAGQKLFNMLRLGKSEPWTLALENVVGAKNMNVRPLLNYFEPLFTWLKDQNKNSFVGWSTDWSPYADQSIKVRISLKSALGDKAYEWNDNEMYLFRSSVAYAMRQYFLKVKNQMILFGEEDVRVANLKPRISFNFFVTAPKNVSDIIPRTEVEKAIRMSRSRINDAFRLNDNSLEFLGIQPTLGPPNQPPVSTSTSPTRSMAPGAVHLPQPVSTRSQHTQPTDKTHTCPPCPAPEAAGGPSVFLFPPKPKDTLMISRTPEVTCVVVDVSHEDPEVKFNWYVDGVEVHNAKTKPREEQYNSTYRVVSVLTVLHQDWLNGKEYKCKVSNKALGAPIEKTISKAKGQPREPQVYTLPPCRDELTKNQVSLWCLVKGFYPSDIAVEWESNGQPENNYKTTPPVLDSDGSFFLYSKLTVDKSRWQQGNVFSCSVMHEALHNHYTQKSLSLSPG

SEQ ID NO: 366 - protein, 847 aa, synthetic construct
  REGION 1..847: note = ACE2-615/201/hole/PGLALA/RF
QSTIEEQAKTFLDKFNHEAEDLFYQSSLASWNYNTNITEENVQNMNNAGDKWSAFLKEQSTLAQMYPLQEIQNLTVKLQLQALQQNGSSVLSEDKSKRLNTILNTMSTIYSTGKVCNPDNPQECLLLEPGLNEIMANSLDYNERLWAWESWRSEVGKQLRPLYEEYVVLKNEMARANHYEDYGDYWRGDYEVNGVDGYDYSRGQLIEDVEHTFEEIKPLYEHLHAYVRAKLMNAYPSYISPIGCLPAHLLGDMWGRFWTNLYSLTVPFGQKPNIDVTDAMVDQAWDAQRIFKEAEKFFVSVGLPNMTQGFWENSMLTDPGNVQKAVCHPTAWDLGKGDFRILMCTKVTMDDFLTAHHEMGHIQYDMAYAAQPFLLRNGANEGFHEAVGEIMSLSAATPKHLKSIGLLSPDFQEDNETEINFLLKQALTIVGTLPFTYMLEKWRWMVFKGEIPKDQWMKKWWEMKREIVGVVEPVPHDETYCDPASLFHVSNDYSFIRYYTRTLYQFQFQEALCQAAKHEGPLHKCDISNSTEAGQKLFNMLRLGKSEPWTLALENVVGAKNMNVRPLLNYFEPLFTWLKDQNKNSFVGWSTDWSPYADTSTSPTRSMAPGAVHLPQPVSTRDKTHTCPPCPAPEAAGGPSVFLFPPKPKDTLMISRTPEVTCVVVDVSHEDPEVKFNWYVDGVEVHNAKTKPREEQYNSTYRVVSVLTVLHQDWLNGKEYKCKVSNKALGAPIEKTISKAKGQPREPQVCTLPPSRDELTKNQVSLSCAVKGFYPSDIAVEWESNGQPENNYKTTPPVLDSDGSFFLVSKLTVDKSRWQQGNVFSCSVMHEALHNRFTQKSLSLSPG

SEQ ID NO: 367 - protein, 847 aa, synthetic construct
  REGION 1..847: note = ACE2-615/201/hole/PGLALA/R273A/RF
QSTIEEQAKTFLDKFNHEAEDLFYQSSLASWNYNTNITEENVQNMNNAGDKWSAFLKEQSTLAQMYPLQEIQNLTVKLQLQALQQNGSSVLSEDKSKRLNTILNTMSTIYSTGKVCNPDNPQECLLLEPGLNEIMANSLDYNERLWAWESWRSEVGKQLRPLYEEYVVLKNEMARANHYEDYGDYWRGDYEVNGVDGYDYSRGQLIEDVEHTFEEIKPLYEHLHAYVRAKLMNAYPSYISPIGCLPAHLLGDMWGAFWTNLYSLTVPFGQKPNIDVTDAMVDQAWDAQRIFKEAEKFFVSVGLPNMTQGFWENSMLTDPGNVQKAVCHPTAWDLGKGDFRILMCTKVTMDDFLTAHHEMGHIQYDMAYAAQPFLLRNGANEGFHEAVGEIMSLSAATPKHLKSIGLLSPDFQEDNETEINFLLKQALTIVGTLPFTYMLEKWRWMVFKGEIPKDQWMKKWWEMKREIVGVVEPVPHDETYCDPASLFHVSNDYSFIRYYTRTLYQFQFQEALCQAAKHEGPLHKCDISNSTEAGQKLFNMLRLGKSEPWTLALENVVGAKNMNVRPLLNYFEPLFTWLKDQNKNSFVGWSTDWSPYADTSTSPTRSMAPGAVHLPQPVSTRDKTHTCPPCPAPEAAGGPSVFLFPPKPKDTLMISRTPEVTCVVVDVSHEDPEVKFNWYVDGVEVHNAKTKPREEQYNSTYRVVSVLTVLHQDWLNGKEYKCKVSNKALGAPIEKTISKAKGQPREPQVCTLPPSRDELTKNQVSLSCAVKGFYPSDIAVEWESNGQPENNYKTTPPVLDSDGSFFLVSKLTVDKSRWQQGNVFSCSVMHEALHNRFTQKSLSLSPG

SEQ ID NO: 368 - protein, 847 aa, synthetic construct
  REGION 1..847: note = ACE2-615/201/hole/PGLALA/R273G/RF
QSTIEEQAKTFLDKFNHEAEDLFYQSSLASWNYNTNITEENVQNMNNAGDKWSAFLKEQSTLAQMYPLQEIQNLTVKLQLQALQQNGSSVLSEDKSKRLNTILNTMSTIYSTGKVCNPDNPQECLLLEPGLNEIMANSLDYNERLWAWESWRSEVGKQLRPLYEEYVVLKNEMARANHYEDYGDYWRGDYEVNGVDGYDYSRGQLIEDVEHTFEEIKPLYEHLHAYVRAKLMNAYPSYISPIGCLPAHLLGDMWGGFWTNLYSLTVPFGQKPNIDVTDAMVDQAWDAQRIFKEAEKFFVSVGLPNMTQGFWENSMLTDPGNVQKAVCHPTAWDLGKGDFRILMCTKVTMDDFLTAHHEMGHIQYDMAYAAQPFLLRNGANEGFHEAVGEIMSLSAATPKHLKSIGLLSPDFQEDNETEINFLLKQALTIVGTLPFTYMLEKWRWMVFKGEIPKDQWMKKWWEMKREIVGVVEPVPHDETYCDPASLFHVSNDYSFIRYYTRTLYQFQFQEALCQAAKHEGPLHKCDISNSTEAGQKLFNMLRLGKSEPWTLALENVVGAKNMNVRPLLNYFEPLFTWLKDQNKNSFVGWSTDWSPYADTSTSPTRSMAPGAVHLPQPVSTRDKTHTCPPCPAPEAAGGPSVFLFPPKPKDTLMISRTPEVTCVVVDVSHEDPEVKFNWYVDGVEVHNAKTKPREEQYNSTYRVVSVLTVLHQDWLNGKEYKCKVSNKALGAPIEKTISKAKGQPREPQVCTLPPSRDELTKNQVSLSCAVKGFYPSDIAVEWESNGQPENNYKTTPPVLDSDGSFFLVSKLTVDKSRWQQGNVFSCSVMHEALHNRFTQKSLSLSPG

SEQ ID NO: 369 - protein, 847 aa, synthetic construct
  REGION 1..847: note = ACE2-615/201/hole/PGLALA/R273V/RF
QSTIEEQAKTFLDKFNHEAEDLFYQSSLASWNYNTNITEENVQNMNNAGDKWSAFLKEQSTLAQMYPLQEIQNLTVKLQLQALQQNGSSVLSEDKSKRLNTILNTMSTIYSTGKVCNPDNPQECLLLEPGLNEIMANSLDYNERLWAWESWRSEVGKQLRPLYEEYVVLKNEMARANHYEDYGDYWRGDYEVNGVDGYDYSRGQLIEDVEHTFEEIKPLYEHLHAYVRAKLMNAYPSYISPIGCLPAHLLGDMWGVFWTNLYSLTVPFGQKPNIDVTDAMVDQAWDAQRIFKEAEKFFVSVGLPNMTQGFWENSMLTDPGNVQKAVCHPTAWDLGKGDFRILMCTKVTMDDFLTAHHEMGHIQYDMAYAAQPFLLRNGANEGFHEAVGEIMSLSAATPKHLKSIGLLSPDFQEDNETEINFLLKQALTIVGTLPFTYMLEKWRWMVFKGEIPKDQWMKKWWEMKREIVGVVEPVPHDETYCDPASLFHVSNDYSFIRYYTRTLYQFQFQEALCQAAKHEGPLHKCDISNSTEAGQKLFNMLRLGKSEPWTLALENVVGAKNMNVRPLLNYFEPLFTWLKDQNKNSFVGWSTDWSPYADTSTSPTRSMAPGAVHLPQPVSTRDKTHTCPPCPAPEAAGGPSVFLFPPKPKDTLMISRTPEVTCVVVDVSHEDPEVKFNWYVDGVEVHNAKTKPREEQYNSTYRVVSVLTVLHQDWLNGKEYKCKVSNKALGAPIEKTISKAKGQPREPQVCTLPPSRDELTKNQVSLSCAVKGFYPSDIAVEWESNGQPENNYKTTPPVLDSDGSFFLVSKLTVDKSRWQQGNVFSCSVMHEALHNRFTQKSLSLSPG

SEQ ID NO: 370 - protein, 847 aa, synthetic construct
  REGION 1..847: note = ACE2-615/201/hole/PGLALA/H378A/RF
QSTIEEQAKTFLDKFNHEAEDLFYQSSLASWNYNTNITEENVQNMNNAGDKWSAFLKEQSTLAQMYPLQEIQNLTVKLQLQALQQNGSSVLSEDKSKRLNTILNTMSTIYSTGKVCNPDNPQECLLLEPGLNEIMANSLDYNERLWAWESWRSEVGKQLRPLYEEYVVLKNEMARANHYEDYGDYWRGDYEVNGVDGYDYSRGQLIEDVEHTFEEIKPLYEHLHAYVRAKLMNAYPSYISPIGCLPAHLLGDMWGRFWTNLYSLTVPFGQKPNIDVTDAMVDQAWDAQRIFKEAEKFFVSVGLPNMTQGFWENSMLTDPGNVQKAVCHPTAWDLGKGDFRILMCTKVTMDDFLTAHHEMGAIQYDMAYAAQPFLLRNGANEGFHEAVGEIMSLSAATPKHLKSIGLLSPDFQEDNETEINFLLKQALTIVGTLPFTYMLEKWRWMVFKGEIPKDQWMKKWWEMKREIVGVVEPVPHDETYCDPASLFHVSNDYSFIRYYTRTLYQFQFQEALCQAAKHEGPLHKCDISNSTEAGQKLFNMLRLGKSEPWTLALENVVGAKNMNVRPLLNYFEPLFTWLKDQNKNSFVGWSTDWSPYADTSTSPTRSMAPGAVHLPQPVSTRDKTHTCPPCPAPEAAGGPSVFLFPPKPKDTLMISRTPEVTCVVVDVSHEDPEVKFNWYVDGVEVHNAKTKPREEQYNSTYRVVSVLTVLHQDWLNGKEYKCKVSNKALGAPIEKTISKAKGQPREPQVCTLPPSRDELTKNQVSLSCAVKGFYPSDIAVEWESNGQPENNYKTTPPVLDSDGSFFLVSKLTVDKSRWQQGNVFSCSVMHEALHNRFTQKSLSLSPG

SEQ ID NO: 371 - protein, 847 aa, synthetic construct
  REGION 1..847: note = ACE2-615/201/hole/PGLALA/E402A/RF
QSTIEEQAKTFLDKFNHEAEDLFYQSSLASWNYNTNITEENVQNMNNAGDKWSAFLKEQSTLAQMYPLQEIQNLTVKLQLQALQQNGSSVLSEDKSKRLNTILNTMSTIYSTGKVCNPDNPQECLLLEPGLNEIMANSLDYNERLWAWESWRSEVGKQLRPLYEEYVVLKNEMARANHYEDYGDYWRGDYEVNGVDGYDYSRGQLIEDVEHTFEEIKPLYEHLHAYVRAKLMNAYPSYISPIGCLPAHLLGDMWGRFWTNLYSLTVPFGQKPNIDVTDAMVDQAWDAQRIFKEAEKFFVSVGLPNMTQGFWENSMLTDPGNVQKAVCHPTAWDLGKGDFRILMCTKVTMDDFLTAHHEMGHIQYDMAYAAQPFLLRNGANEGFHAAVGEIMSLSAATPKHLKSIGLLSPDFQEDNETEINFLLKQALTIVGTLPFTYMLEKWRWMVFKGEIPKDQWMKKWWEMKREIVGVVEPVPHDETYCDPASLFHVSNDYSFIRYYTRTLYQFQFQEALCQAAKHEGPLHKCDISNSTEAGQKLFNMLRLGKSEPWTLALENVVGAKNMNVRPLLNYFEPLFTWLKDQNKNSFVGWSTDWSPYADTSTSPTRSMAPGAVHLPQPVSTRDKTHTCPPCPAPEAAGGPSVFLFPPKPKDTLMISRTPEVTCVVVDVSHEDPEVKFNWYVDGVEVHNAKTKPREEQYNSTYRVVSVLTVLHQDWLNGKEYKCKVSNKALGAPIEKTISKAKGQPREPQVCTLPPSRDELTKNQVSLSCAVKGFYPSDIAVEWESNGQPENNYKTTPPVLDSDGSFFLVSKLTVDKSRWQQGNVFSCSVMHEALHNRFTQKSLSLSPG

SEQ ID NO: 372 - protein, 854 aa, synthetic construct
  REGION 1..854: note = ACE2-615/208/hole/PGLALA/RF
QSTIEEQAKTFLDKFNHEAEDLFYQSSLASWNYNTNITEENVQNMNNAGDKWSAFLKEQSTLAQMYPLQEIQNLTVKLQLQALQQNGSSVLSEDKSKRLNTILNTMSTIYSTGKVCNPDNPQECLLLEPGLNEIMANSLDYNERLWAWESWRSEVGKQLRPLYEEYVVLKNEMARANHYEDYGDYWRGDYEVNGVDGYDYSRGQLIEDVEHTFEEIKPLYEHLHAYVRAKLMNAYPSYISPIGCLPAHLLGDMWGRFWTNLYSLTVPFGQKPNIDVTDAMVDQAWDAQRIFKEAEKFFVSVGLPNMTQGFWENSMLTDPGNVQKAVCHPTAWDLGKGDFRILMCTKVTMDDFLTAHHEMGHIQYDMAYAAQPFLLRNGANEGFHEAVGEIMSLSAATPKHLKSIGLLSPDFQEDNETEINFLLKQALTIVGTLPFTYMLEKWRWMVFKGEIPKDQWMKKWWEMKREIVGVVEPVPHDETYCDPASLFHVSNDYSFIRYYTRTLYQFQFQEALCQAAKHEGPLHKCDISNSTEAGQKLFNMLRLGKSEPWTLALENVVGAKNMNVRPLLNYFEPLFTWLKDQNKNSFVGWSTDWSPYADTSTSPTRSMAPGAVHLPQPVSTRSQHTQPTDKTHTCPPCPAPEAAGGPSVFLFPPKPKDTLMISRTPEVTCVVVDVSHEDPEVKFNWYVDGVEVHNAKTKPREEQYNSTYRVVSVLTVLHQDWLNGKEYKCKVSNKALGAPIEKTISKAKGQPREPQVCTLPPSRDELTKNQVSLSCAVKGFYPSDIAVEWESNGQPENNYKTTPPVLDSDGSFFLVSKLTVDKSRWQQGNVFSCSVMHEALHNRFTQKSLSLSPG

SEQ ID NO: 373 - protein, 854 aa, synthetic construct
  REGION 1..854: note = ACE2-615/208/hole/PGLALA/R273A/RF
QSTIEEQAKTFLDKFNHEAEDLFYQSSLASWNYNTNITEENVQNMNNAGDKWSAFLKEQSTLAQMYPLQEIQNLTVKLQLQALQQNGSSVLSEDKSKRLNTILNTMSTIYSTGKVCNPDNPQECLLLEPGLNEIMANSLDYNERLWAWESWRSEVGKQLRPLYEEYVVLKNEMARANHYEDYGDYWRGDYEVNGVDGYDYSRGQLIEDVEHTFEEIKPLYEHLHAYVRAKLMNAYPSYISPIGCLPAHLLGDMWGAFWTNLYSLTVPFGQKPNIDVTDAMVDQAWDAQRIFKEAEKFFVSVGLPNMTQGFWENSMLTDPGNVQKAVCHPTAWDLGKGDFRILMCTKVTMDDFLTAHHEMGHIQYDMAYAAQPFLLRNGANEGFHEAVGEIMSLSAATPKHLKSIGLLSPDFQEDNETEINFLLKQALTIVGTLPFTYMLEKWRWMVFKGEIPKDQWMKKWWEMKREIVGVVEPVPHDETYCDPASLFHVSNDYSFIRYYTRTLYQFQFQEALCQAAKHEGPLHKCDISNSTEAGQKLFNMLRLGKSEPWTLALENVVGAKNMNVRPLLNYFEPLFTWLKDQNKNSFVGWSTDWSPYADTSTSPTRSMAPGAVHLPQPVSTRSQHTQPTDKTHTCPPCPAPEAAGGPSVFLFPPKPKDTLMISRTPEVTCVVVDVSHEDPEVKFNWYVDGVEVHNAKTKPREEQYNSTYRVVSVLTVLHQDWLNGKEYKCKVSNKALGAPIEKTISKAKGQPREPQVCTLPPSRDELTKNQVSLSCAVKGFYPSDIAVEWESNGQPENNYKTTPPVLDSDGSFFLVSKLTVDKSRWQQGNVFSCSVMHEALHNRFTQKSLSLSPG

SEQ ID NO: 374 - protein, 854 aa, synthetic construct
  REGION 1..854: note = ACE2-615/208/hole/PGLALA/R273G/RF
QSTIEEQAKTFLDKFNHEAEDLFYQSSLASWNYNTNITEENVQNMNNAGDKWSAFLKEQSTLAQMYPLQEIQNLTVKLQLQALQQNGSSVLSEDKSKRLNTILNTMSTIYSTGKVCNPDNPQECLLLEPGLNEIMANSLDYNERLWAWESWRSEVGKQLRPLYEEYVVLKNEMARANHYEDYGDYWRGDYEVNGVDGYDYSRGQLIEDVEHTFEEIKPLYEHLHAYVRAKLMNAYPSYISPIGCLPAHLLGDMWGGFWTNLYSLTVPFGQKPNIDVTDAMVDQAWDAQRIFKEAEKFFVSVGLPNMTQGFWENSMLTDPGNVQKAVCHPTAWDLGKGDFRILMCTKVTMDDFLTAHHEMGHIQYDMAYAAQPFLLRNGANEGFHEAVGEIMSLSAATPKHLKSIGLLSPDFQEDNETEINFLLKQALTIVGTLPFTYMLEKWRWMVFKGEIPKDQWMKKWWEMKREIVGVVEPVPHDETYCDPASLFHVSNDYSFIRYYTRTLYQFQFQEALCQAAKHEGPLHKCDISNSTEAGQKLFNMLRLGKSEPWTLALENVVGAKNMNVRPLLNYFEPLFTWLKDQNKNSFVGWSTDWSPYADTSTSPTRSMAPGAVHLPQPVSTRSQHTQPTDKTHTCPPCPAPEAAGGPSVFLFPPKPKDTLMISRTPEVTCVVVDVSHEDPEVKFNWYVDGVEVHNAKTKPREEQYNSTYRVVSVLTVLHQDWLNGKEYKCKVSNKALGAPIEKTISKAKGQPREPQVCTLPPSRDELTKNQVSLSCAVKGFYPSDIAVEWESNGQPENNYKTTPPVLDSDGSFFLVSKLTVDKSRWQQGNVFSCSVMHEALHNRFTQKSLSLSPG

SEQ ID NO: 375 - protein, 854 aa, synthetic construct
  REGION 1..854: note = ACE2-615/208/hole/PGLALA/R273V/RF
QSTIEEQAKTFLDKFNHEAEDLFYQSSLASWNYNTNITEENVQNMNNAGDKWSAFLKEQSTLAQMYPLQEIQNLTVKLQLQALQQNGSSVLSEDKSKRLNTILNTMSTIYSTGKVCNPDNPQECLLLEPGLNEIMANSLDYNERLWAWESWRSEVGKQLRPLYEEYVVLKNEMARANHYEDYGDYWRGDYEVNGVDGYDYSRGQLIEDVEHTFEEIKPLYEHLHAYVRAKLMNAYPSYISPIGCLPAHLLGDMWGVFWTNLYSLTVPFGQKPNIDVTDAMVDQAWDAQRIFKEAEKFFVSVGLPNMTQGFWENSMLTDPGNVQKAVCHPTAWDLGKGDFRILMCTKVTMDDFLTAHHEMGHIQYDMAYAAQPFLLRNGANEGFHEAVGEIMSLSAATPKHLKSIGLLSPDFQEDNETEINFLLKQALTIVGTLPFTYMLEKWRWMVFKGEIPKDQWMKKWWEMKREIVGVVEPVPHDETYCDPASLFHVSNDYSFIRYYTRTLYQFQFQEALCQAAKHEGPLHKCDISNSTEAGQKLFNMLRLGKSEPWTLALENVVGAKNMNVRPLLNYFEPLFTWLKDQNKNSFVGWSTDWSPYADTSTSPTRSMAPGAVHLPQPVSTRSQHTQPTDKTHTCPPCPAPEAAGGPSVFLFPPKPKDTLMISRTPEVTCVVVDVSHEDPEVKFNWYVDGVEVHNAKTKPREEQYNSTYRVVSVLTVLHQDWLNGKEYKCKVSNKALGAPIEKTISKAKGQPREPQVCTLPPSRDELTKNQVSLSCAVKGFYPSDIAVEWESNGQPENNYKTTPPVLDSDGSFFLVSKLTVDKSRWQQGNVFSCSVMHEALHNRFTQKSLSLSPG

SEQ ID NO: 376 - protein, 854 aa, synthetic construct
  REGION 1..854: note = ACE2-615/208/hole/PGLALA/H378A/RF
QSTIEEQAKTFLDKFNHEAEDLFYQSSLASWNYNTNITEENVQNMNNAGDKWSAFLKEQSTLAQMYPLQEIQNLTVKLQLQALQQNGSSVLSEDKSKRLNTILNTMSTIYSTGKVCNPDNPQECLLLEPGLNEIMANSLDYNERLWAWESWRSEVGKQLRPLYEEYVVLKNEMARANHYEDYGDYWRGDYEVNGVDGYDYSRGQLIEDVEHTFEEIKPLYEHLHAYVRAKLMNAYPSYISPIGCLPAHLLGDMWGRFWTNLYSLTVPFGQKPNIDVTDAMVDQAWDAQRIFKEAEKFFVSVGLPNMTQGFWENSMLTDPGNVQKAVCHPTAWDLGKGDFRILMCTKVTMDDFLTAHHEMGAIQYDMAYAAQPFLLRNGANEGFHEAVGEIMSLSAATPKHLKSIGLLSPDFQEDNETEINFLLKQALTIVGTLPFTYMLEKWRWMVFKGEIPKDQWMKKWWEMKREIVGVVEPVPHDETYCDPASLFHVSNDYSFIRYYTRTLYQFQFQEALCQAAKHEGPLHKCDISNSTEAGQKLFNMLRLGKSEPWTLALENVVGAKNMNVRPLLNYFEPLFTWLKDQNKNSFVGWSTDWSPYADTSTSPTRSMAPGAVHLPQPVSTRSQHTQPTDKTHTCPPCPAPEAAGGPSVFLFPPKPKDTLMISRTPEVTCVVVDVSHEDPEVKFNWYVDGVEVHNAKTKPREEQYNSTYRVVSVLTVLHQDWLNGKEYKCKVSNKALGAPIEKTISKAKGQPREPQVCTLPPSRDELTKNQVSLSCAVKGFYPSDIAVEWESNGQPENNYKTTPPVLDSDGSFFLVSKLTVDKSRWQQGNVFSCSVMHEALHNRFTQKSLSLSPG

SEQ ID NO: 377 - protein, 854 aa, synthetic construct
  REGION 1..854: note = ACE2-615/208/hole/PGLALA/E402A/RF
QSTIEEQAKTFLDKFNHEAEDLFYQSSLASWNYNTNITEENVQNMNNAGDKWSAFLKEQSTLAQMYPLQEIQNLTVKLQLQALQQNGSSVLSEDKSKRLNTILNTMSTIYSTGKVCNPDNPQECLLLEPGLNEIMANSLDYNERLWAWESWRSEVGKQLRPLYEEYVVLKNEMARANHYEDYGDYWRGDYEVNGVDGYDYSRGQLIEDVEHTFEEIKPLYEHLHAYVRAKLMNAYPSYISPIGCLPAHLLGDMWGRFWTNLYSLTVPFGQKPNIDVTDAMVDQAWDAQRIFKEAEKFFVSVGLPNMTQGFWENSMLTDPGNVQKAVCHPTAWDLGKGDFRILMCTKVTMDDFLTAHHEMGHIQYDMAYAAQPFLLRNGANEGFHAAVGEIMSLSAATPKHLKSIGLLSPDFQEDNETEINFLLKQALTIVGTLPFTYMLEKWRWMVFKGEIPKDQWMKKWWEMKREIVGVVEPVPHDETYCDPASLFHVSNDYSFIRYYTRTLYQFQFQEALCQAAKHEGPLHKCDISNSTEAGQKLFNMLRLGKSEPWTLALENVVGAKNMNVRPLLNYFEPLFTWLKDQNKNSFVGWSTDWSPYADTSTSPTRSMAPGAVHLPQPVSTRSQHTQPTDKTHTCPPCPAPEAAGGPSVFLFPPKPKDTLMISRTPEVTCVVVDVSHEDPEVKFNWYVDGVEVHNAKTKPREEQYNSTYRVVSVLTVLHQDWLNGKEYKCKVSNKALGAPIEKTISKAKGQPREPQVCTLPPSRDELTKNQVSLSCAVKGFYPSDIAVEWESNGQPENNYKTTPPVLDSDGSFFLVSKLTVDKSRWQQGNVFSCSVMHEALHNRFTQKSLSLSPG

SEQ ID NO: 378 - protein, 858 aa, synthetic construct
  REGION 1..858: note = ACE2-615/212/hole/PGLALA/RF
QSTIEEQAKTFLDKFNHEAEDLFYQSSLASWNYNTNITEENVQNMNNAGDKWSAFLKEQSTLAQMYPLQEIQNLTVKLQLQALQQNGSSVLSEDKSKRLNTILNTMSTIYSTGKVCNPDNPQECLLLEPGLNEIMANSLDYNERLWAWESWRSEVGKQLRPLYEEYVVLKNEMARANHYEDYGDYWRGDYEVNGVDGYDYSRGQLIEDVEHTFEEIKPLYEHLHAYVRAKLMNAYPSYISPIGCLPAHLLGDMWGRFWTNLYSLTVPFGQKPNIDVTDAMVDQAWDAQRIFKEAEKFFVSVGLPNMTQGFWENSMLTDPGNVQKAVCHPTAWDLGKGDFRILMCTKVTMDDFLTAHHEMGHIQYDMAYAAQPFLLRNGANEGFHEAVGEIMSLSAATPKHLKSIGLLSPDFQEDNETEINFLLKQALTIVGTLPFTYMLEKWRWMVFKGEIPKDQWMKKWWEMKREIVGVVEPVPHDETYCDPASLFHVSNDYSFIRYYTRTLYQFQFQEALCQAAKHEGPLHKCDISNSTEAGQKLFNMLRLGKSEPWTLALENVVGAKNMNVRPLLNYFEPLFTWLKDQNKNSFVGWSTDWSPYADTSTSPTRSMAPGAVHLPQPVSTRSQHTQPTPEPSDKTHTCPPCPAPEAAGGPSVFLFPPKPKDTLMISRTPEVTCVVVDVSHEDPEVKFNWYVDGVEVHNAKTKPREEQYNSTYRVVSVLTVLHQDWLNGKEYKCKVSNKALGAPIEKTISKAKGQPREPQVCTLPPSRDELTKNQVSLSCAVKGFYPSDIAVEWESNGQPENNYKTTPPVLDSDGSFFLVSKLTVDKSRWQQGNVFSCSVMHEALHNRFTQKSLSLSPG

SEQ ID NO: 379 - protein, 858 aa, synthetic construct
  REGION 1..858: note = ACE2-615/212/hole/PGLALA/R273A/RF
QSTIEEQAKTFLDKFNHEAEDLFYQSSLASWNYNTNITEENVQNMNNAGDKWSAFLKEQSTLAQMYPLQEIQNLTVKLQLQALQQNGSSVLSEDKSKRLNTILNTMSTIYSTGKVCNPDNPQECLLLEPGLNEIMANSLDYNERLWAWESWRSEVGKQLRPLYEEYVVLKNEMARANHYEDYGDYWRGDYEVNGVDGYDYSRGQLIEDVEHTFEEIKPLYEHLHAYVRAKLMNAYPSYISPIGCLPAHLLGDMWGAFWTNLYSLTVPFGQKPNIDVTDAMVDQAWDAQRIFKEAEKFFVSVGLPNMTQGFWENSMLTDPGNVQKAVCHPTAWDLGKGDFRILMCTKVTMDDFLTAHHEMGHIQYDMAYAAQPFLLRNGANEGFHEAVGEIMSLSAATPKHLKSIGLLSPDFQEDNETEINFLLKQALTIVGTLPFTYMLEKWRWMVFKGEIPKDQWMKKWWEMKREIVGVVEPVPHDETYCDPASLFHVSNDYSFIRYYTRTLYQFQFQEALCQAAKHEGPLHKCDISNSTEAGQKLFNMLRLGKSEPWTLALENVVGAKNMNVRPLLNYFEPLFTWLKDQNKNSFVGWSTDWSPYADTSTSPTRSMAPGAVHLPQPVSTRSQHTQPTPEPSDKTHTCPPCPAPEAAGGPSVFLFPPKPKDTLMISRTPEVTCVVVDVSHEDPEVKFNWYVDGVEVHNAKTKPREEQYNSTYRVVSVLTVLHQDWLNGKEYKCKVSNKALGAPIEKTISKAKGQPREPQVCTLPPSRDELTKNQVSLSCAVKGFYPSDIAVEWESNGQPENNYKTTPPVLDSDGSFFLVSKLTVDKSRWQQGNVFSCSVMHEALHNRFTQKSLSLSPG

SEQ ID NO: 380 - protein, 858 aa, synthetic construct
  REGION 1..858: note = ACE2-615/212/hole/PGLALA/R273G/RF
QSTIEEQAKTFLDKFNHEAEDLFYQSSLASWNYNTNITEENVQNMNNAGDKWSAFLKEQSTLAQMYPLQEIQNLTVKLQLQALQQNGSSVLSEDKSKRLNTILNTMSTIYSTGKVCNPDNPQECLLLEPGLNEIMANSLDYNERLWAWESWRSEVGKQLRPLYEEYVVLKNEMARANHYEDYGDYWRGDYEVNGVDGYDYSRGQLIEDVEHTFEEIKPLYEHLHAYVRAKLMNAYPSYISPIGCLPAHLLGDMWGGFWTNLYSLTVPFGQKPNIDVTDAMVDQAWDAQRIFKEAEKFFVSVGLPNMTQGFWENSMLTDPGNVQKAVCHPTAWDLGKGDFRILMCTKVTMDDFLTAHHEMGHIQYDMAYAAQPFLLRNGANEGFHEAVGEIMSLSAATPKHLKSIGLLSPDFQEDNETEINFLLKQALTIVGTLPFTYMLEKWRWMVFKGEIPKDQWMKKWWEMKREIVGVVEPVPHDETYCDPASLFHVSNDYSFIRYYTRTLYQFQFQEALCQAAKHEGPLHKCDISNSTEAGQKLFNMLRLGKSEPWTLALENVVGAKNMNVRPLLNYFEPLFTWLKDQNKNSFVGWSTDWSPYADTSTSPTRSMAPGAVHLPQPVSTRSQHTQPTPEPSDKTHTCPPCPAPEAAGGPSVFLFPPKPKDTLMISRTPEVTCVVVDVSHEDPEVKFNWYVDGVEVHNAKTKPREEQYNSTYRVVSVLTVLHQDWLNGKEYKCKVSNKALGAPIEKTISKAKGQPREPQVCTLPPSRDELTKNQVSLSCAVKGFYPSDIAVEWESNGQPENNYKTTPPVLDSDGSFFLVSKLTVDKSRWQQGNVFSCSVMHEALHNRFTQKSLSLSPG

SEQ ID NO: 381 - protein, 858 aa, synthetic construct
  REGION 1..858: note = ACE2-615/212/hole/PGLALA/R273V/RF
QSTIEEQAKTFLDKFNHEAEDLFYQSSLASWNYNTNITEENVQNMNNAGDKWSAFLKEQSTLAQMYPLQEIQNLTVKLQLQALQQNGSSVLSEDKSKRLNTILNTMSTIYSTGKVCNPDNPQECLLLEPGLNEIMANSLDYNERLWAWESWRSEVGKQLRPLYEEYVVLKNEMARANHYEDYGDYWRGDYEVNGVDGYDYSRGQLIEDVEHTFEEIKPLYEHLHAYVRAKLMNAYPSYISPIGCLPAHLLGDMWGVFWTNLYSLTVPFGQKPNIDVTDAMVDQAWDAQRIFKEAEKFFVSVGLPNMTQGFWENSMLTDPGNVQKAVCHPTAWDLGKGDFRILMCTKVTMDDFLTAHHEMGHIQYDMAYAAQPFLLRNGANEGFHEAVGEIMSLSAATPKHLKSIGLLSPDFQEDNETEINFLLKQALTIVGTLPFTYMLEKWRWMVFKGEIPKDQWMKKWWEMKREIVGVVEPVPHDETYCDPASLFHVSNDYSFIRYYTRTLYQFQFQEALCQAAKHEGPLHKCDISNSTEAGQKLFNMLRLGKSEPWTLALENVVGAKNMNVRPLLNYFEPLFTWLKDQNKNSFVGWSTDWSPYADTSTSPTRSMAPGAVHLPQPVSTRSQHTQPTPEPSDKTHTCPPCPAPEAAGGPSVFLFPPKPKDTLMISRTPEVTCVVVDVSHEDPEVKFNWYVDGVEVHNAKTKPREEQYNSTYRVVSVLTVLHQDWLNGKEYKCKVSNKALGAPIEKTISKAKGQPREPQVCTLPPSRDELTKNQVSLSCAVKGFYPSDIAVEWESNGQPENNYKTTPPVLDSDGSFFLVSKLTVDKSRWQQGNVFSCSVMHEALHNRFTQKSLSLSPG

SEQ ID NO: 382 - protein, 858 aa, synthetic construct
  REGION 1..858: note = ACE2-615/212/hole/PGLALA/H378A/RF
QSTIEEQAKTFLDKFNHEAEDLFYQSSLASWNYNTNITEENVQNMNNAGDKWSAFLKEQSTLAQMYPLQEIQNLTVKLQLQALQQNGSSVLSEDKSKRLNTILNTMSTIYSTGKVCNPDNPQECLLLEPGLNEIMANSLDYNERLWAWESWRSEVGKQLRPLYEEYVVLKNEMARANHYEDYGDYWRGDYEVNGVDGYDYSRGQLIEDVEHTFEEIKPLYEHLHAYVRAKLMNAYPSYISPIGCLPAHLLGDMWGRFWTNLYSLTVPFGQKPNIDVTDAMVDQAWDAQRIFKEAEKFFVSVGLPNMTQGFWENSMLTDPGNVQKAVCHPTAWDLGKGDFRILMCTKVTMDDFLTAHHEMGAIQYDMAYAAQPFLLRNGANEGFHEAVGEIMSLSAATPKHLKSIGLLSPDFQEDNETEINFLLKQALTIVGTLPFTYMLEKWRWMVFKGEIPKDQWMKKWWEMKREIVGVVEPVPHDETYCDPASLFHVSNDYSFIRYYTRTLYQFQFQEALCQAAKHEGPLHKCDISNSTEAGQKLFNMLRLGKSEPWTLALENVVGAKNMNVRPLLNYFEPLFTWLKDQNKNSFVGWSTDWSPYADTSTSPTRSMAPGAVHLPQPVSTRSQHTQPTPEPSDKTHTCPPCPAPEAAGGPSVFLFPPKPKDTLMISRTPEVTCVVVDVSHEDPEVKFNWYVDGVEVHNAKTKPREEQYNSTYRVVSVLTVLHQDWLNGKEYKCKVSNKALGAPIEKTISKAKGQPREPQVCTLPPSRDELTKNQVSLSCAVKGFYPSDIAVEWESNGQPENNYKTTPPVLDSDGSFFLVSKLTVDKSRWQQGNVFSCSVMHEALHNRFTQKSLSLSPG

SEQ ID NO: 383 - protein, 858 aa, synthetic construct
  REGION 1..858: note = ACE2-615/212/hole/PGLALA/E402A/RF
QSTIEEQAKTFLDKFNHEAEDLFYQSSLASWNYNTNITEENVQNMNNAGDKWSAFLKEQSTLAQMYPLQEIQNLTVKLQLQALQQNGSSVLSEDKSKRLNTILNTMSTIYSTGKVCNPDNPQECLLLEPGLNEIMANSLDYNERLWAWESWRSEVGKQLRPLYEEYVVLKNEMARANHYEDYGDYWRGDYEVNGVDGYDYSRGQLIEDVEHTFEEIKPLYEHLHAYVRAKLMNAYPSYISPIGCLPAHLLGDMWGRFWTNLYSLTVPFGQKPNIDVTDAMVDQAWDAQRIFKEAEKFFVSVGLPNMTQGFWENSMLTDPGNVQKAVCHPTAWDLGKGDFRILMCTKVTMDDFLTAHHEMGHIQYDMAYAAQPFLLRNGANEGFHAAVGEIMSLSAATPKHLKSIGLLSPDFQEDNETEINFLLKQALTIVGTLPFTYMLEKWRWMVFKGEIPKDQWMKKWWEMKREIVGVVEPVPHDETYCDPASLFHVSNDYSFIRYYTRTLYQFQFQEALCQAAKHEGPLHKCDISNSTEAGQKLFNMLRLGKSEPWTLALENVVGAKNMNVRPLLNYFEPLFTWLKDQNKNSFVGWSTDWSPYADTSTSPTRSMAPGAVHLPQPVSTRSQHTQPTPEPSDKTHTCPPCPAPEAAGGPSVFLFPPKPKDTLMISRTPEVTCVVVDVSHEDPEVKFNWYVDGVEVHNAKTKPREEQYNSTYRVVSVLTVLHQDWLNGKEYKCKVSNKALGAPIEKTISKAKGQPREPQVCTLPPSRDELTKNQVSLSCAVKGFYPSDIAVEWESNGQPENNYKTTPPVLDSDGSFFLVSKLTVDKSRWQQGNVFSCSVMHEALHNRFTQKSLSLSPG

SEQ ID NO: 384 - protein, 966 aa, synthetic construct
  REGION 1..966: note = ACE2-615/201/hole/PGLALA/RF/TMEM27CA
QSTIEEQAKTFLDKFNHEAEDLFYQSSLASWNYNTNITEENVQNMNNAGDKWSAFLKEQSTLAQMYPLQEIQNLTVKLQLQALQQNGSSVLSEDKSKRLNTILNTMSTIYSTGKVCNPDNPQECLLLEPGLNEIMANSLDYNERLWAWESWRSEVGKQLRPLYEEYVVLKNEMARANHYEDYGDYWRGDYEVNGVDGYDYSRGQLIEDVEHTFEEIKPLYEHLHAYVRAKLMNAYPSYISPIGCLPAHLLGDMWGRFWTNLYSLTVPFGQKPNIDVTDAMVDQAWDAQRIFKEAEKFFVSVGLPNMTQGFWENSMLTDPGNVQKAVCHPTAWDLGKGDFRILMCTKVTMDDFLTAHHEMGHIQYDMAYAAQPFLLRNGANEGFHEAVGEIMSLSAATPKHLKSIGLLSPDFQEDNETEINFLLKQALTIVGTLPFTYMLEKWRWMVFKGEIPKDQWMKKWWEMKREIVGVVEPVPHDETYCDPASLFHVSNDYSFIRYYTRTLYQFQFQEALCQAAKHEGPLHKCDISNSTEAGQKLFNMLRLGKSEPWTLALENVVGAKNMNVRPLLNYFEPLFTWLKDQNKNSFVGWSTDWSPYADNAFKVRLSIRTALGDKAYAWDTNEEYLFKAMVAFSMRKVPNREATEISHVLLANVTQRVSFWFVVTDPSKNHTLPAVEVQSAIRMNKNRINNAFFLNDQTLEFLKIPSTLAPPMDPSVPTSTSPTRSMAPGAVHLPQPVSTRDKTHTCPPCPAPEAAGGPSVFLFPPKPKDTLMISRTPEVTCVVVDVSHEDPEVKFNWYVDGVEVHNAKTKPREEQYNSTYRVVSVLTVLHQDWLNGKEYKCKVSNKALGAPIEKTISKAKGQPREPQVCTLPPSRDELTKNQVSLSCAVKGFYPSDIAVEWESNGQPENNYKTTPPVLDSDGSFFLVSKLTVDKSRWQQGNVFSCSVMHEALHNRFTQKSLSLSPG

SEQ ID NO: 385 - protein, 966 aa, synthetic construct
  REGION 1..966: note = ACE2-615/201/hole/PGLALA/R273A/RF/TMEM27CA
QSTIEEQAKTFLDKFNHEAEDLFYQSSLASWNYNTNITEENVQNMNNAGDKWSAFLKEQSTLAQMYPLQEIQNLTVKLQLQALQQNGSSVLSEDKSKRLNTILNTMSTIYSTGKVCNPDNPQECLLLEPGLNEIMANSLDYNERLWAWESWRSEVGKQLRPLYEEYVVLKNEMARANHYEDYGDYWRGDYEVNGVDGYDYSRGQLIEDVEHTFEEIKPLYEHLHAYVRAKLMNAYPSYISPIGCLPAHLLGDMWGAFWTNLYSLTVPFGQKPNIDVTDAMVDQAWDAQRIFKEAEKFFVSVGLPNMTQGFWENSMLTDPGNVQKAVCHPTAWDLGKGDFRILMCTKVTMDDFLTAHHEMGHIQYDMAYAAQPFLLRNGANEGFHEAVGEIMSLSAATPKHLKSIGLLSPDFQEDNETEINFLLKQALTIVGTLPFTYMLEKWRWMVFKGEIPKDQWMKKWWEMKREIVGVVEPVPHDETYCDPASLFHVSNDYSFIRYYTRTLYQFQFQEALCQAAKHEGPLHKCDISNSTEAGQKLFNMLRLGKSEPWTLALENVVGAKNMNVRPLLNYFEPLFTWLKDQNKNSFVGWSTDWSPYADNAFKVRLSIRTALGDKAYAWDTNEEYLFKAMVAFSMRKVPNREATEISHVLLANVTQRVSFWFVVTDPSKNHTLPAVEVQSAIRMNKNRINNAFFLNDQTLEFLKIPSTLAPPMDPSVPTSTSPTRSMAPGAVHLPQPVSTRDKTHTCPPCPAPEAAGGPSVFLFPPKPKDTLMISRTPEVTCVVVDVSHEDPEVKFNWYVDGVEVHNAKTKPREEQYNSTYRVVSVLTVLHQDWLNGKEYKCKVSNKALGAPIEKTISKAKGQPREPQVCTLPPSRDELTKNQVSLSCAVKGFYPSDIAVEWESNGQPENNYKTTPPVLDSDGSFFLVSKLTVDKSRWQQGNVFSCSVMHEALHNRFTQKSLSLSPG

SEQ ID NO: 386 - protein, 966 aa, synthetic construct
  REGION 1..966: note = ACE2-615/201/hole/PGLALA/R273G/RF/TMEM27CA
QSTIEEQAKTFLDKFNHEAEDLFYQSSLASWNYNTNITEENVQNMNNAGDKWSAFLKEQSTLAQMYPLQEIQNLTVKLQLQALQQNGSSVLSEDKSKRLNTILNTMSTIYSTGKVCNPDNPQECLLLEPGLNEIMANSLDYNERLWAWESWRSEVGKQLRPLYEEYVVLKNEMARANHYEDYGDYWRGDYEVNGVDGYDYSRGQLIEDVEHTFEEIKPLYEHLHAYVRAKLMNAYPSYISPIGCLPAHLLGDMWGGFWTNLYSLTVPFGQKPNIDVTDAMVDQAWDAQRIFKEAEKFFVSVGLPNMTQGFWENSMLTDPGNVQKAVCHPTAWDLGKGDFRILMCTKVTMDDFLTAHHEMGHIQYDMAYAAQPFLLRNGANEGFHEAVGEIMSLSAATPKHLKSIGLLSPDFQEDNETEINFLLKQALTIVGTLPFTYMLEKWRWMVFKGEIPKDQWMKKWWEMKREIVGVVEPVPHDETYCDPASLFHVSNDYSFIRYYTRTLYQFQFQEALCQAAKHEGPLHKCDISNSTEAGQKLFNMLRLGKSEPWTLALENVVGAKNMNVRPLLNYFEPLFTWLKDQNKNSFVGWSTDWSPYADNAFKVRLSIRTALGDKAYAWDTNEEYLFKAMVAFSMRKVPNREATEISHVLLANVTQRVSFWFVVTDPSKNHTLPAVEVQSAIRMNKNRINNAFFLNDQTLEFLKIPSTLAPPMDPSVPTSTSPTRSMAPGAVHLPQPVSTRDKTHTCPPCPAPEAAGGPSVFLFPPKPKDTLMISRTPEVTCVVVDVSHEDPEVKFNWYVDGVEVHNAKTKPREEQYNSTYRVVSVLTVLHQDWLNGKEYKCKVSNKALGAPIEKTISKAKGQPREPQVCTLPPSRDELTKNQVSLSCAVKGFYPSDIAVEWESNGQPENNYKTTPPVLDSDGSFFLVSKLTVDKSRWQQGNVFSCSVMHEALHNRFTQKSLSLSPG

SEQ ID NO: 387 - protein, 966 aa, synthetic construct
  REGION 1..966: note = ACE2-615/201/hole/PGLALA/R273V/RF/TMEM27CA
QSTIEEQAKTFLDKFNHEAEDLFYQSSLASWNYNTNITEENVQNMNNAGDKWSAFLKEQSTLAQMYPLQEIQNLTVKLQLQALQQNGSSVLSEDKSKRLNTILNTMSTIYSTGKVCNPDNPQECLLLEPGLNEIMANSLDYNERLWAWESWRSEVGKQLRPLYEEYVVLKNEMARANHYEDYGDYWRGDYEVNGVDGYDYSRGQLIEDVEHTFEEIKPLYEHLHAYVRAKLMNAYPSYISPIGCLPAHLLGDMWGVFWTNLYSLTVPFGQKPNIDVTDAMVDQAWDAQRIFKEAEKFFVSVGLPNMTQGFWENSMLTDPGNVQKAVCHPTAWDLGKGDFRILMCTKVTMDDFLTAHHEMGHIQYDMAYAAQPFLLRNGANEGFHEAVGEIMSLSAATPKHLKSIGLLSPDFQEDNETEINFLLKQALTIVGTLPFTYMLEKWRWMVFKGEIPKDQWMKKWWEMKREIVGVVEPVPHDETYCDPASLFHVSNDYSFIRYYTRTLYQFQFQEALCQAAKHEGPLHKCDISNSTEAGQKLFNMLRLGKSEPWTLALENVVGAKNMNVRPLLNYFEPLFTWLKDQNKNSFVGWSTDWSPYADNAFKVRLSIRTALGDKAYAWDTNEEYLFKAMVAFSMRKVPNREATEISHVLLANVTQRVSFWFVVTDPSKNHTLPAVEVQSAIRMNKNRINNAFFLNDQTLEFLKIPSTLAPPMDPSVPTSTSPTRSMAPGAVHLPQPVSTRDKTHTCPPCPAPEAAGGPSVFLFPPKPKDTLMISRTPEVTCVVVDVSHEDPEVKFNWYVDGVEVHNAKTKPREEQYNSTYRVVSVLTVLHQDWLNGKEYKCKVSNKALGAPIEKTISKAKGQPREPQVCTLPPSRDELTKNQVSLSCAVKGFYPSDIAVEWESNGQPENNYKTTPPVLDSDGSFFLVSKLTVDKSRWQQGNVFSCSVMHEALHNRFTQKSLSLSPG

SEQ ID NO: 388 - protein, 966 aa, synthetic construct
  REGION 1..966: note = ACE2-615/201/hole/PGLALA/H378A/RF/TMEM27CA
QSTIEEQAKTFLDKFNHEAEDLFYQSSLASWNYNTNITEENVQNMNNAGDKWSAFLKEQSTLAQMYPLQEIQNLTVKLQLQALQQNGSSVLSEDKSKRLNTILNTMSTIYSTGKVCNPDNPQECLLLEPGLNEIMANSLDYNERLWAWESWRSEVGKQLRPLYEEYVVLKNEMARANHYEDYGDYWRGDYEVNGVDGYDYSRGQLIEDVEHTFEEIKPLYEHLHAYVRAKLMNAYPSYISPIGCLPAHLLGDMWGRFWTNLYSLTVPFGQKPNIDVTDAMVDQAWDAQRIFKEAEKFFVSVGLPNMTQGFWENSMLTDPGNVQKAVCHPTAWDLGKGDFRILMCTKVTMDDFLTAHHEMGAIQYDMAYAAQPFLLRNGANEGFHEAVGEIMSLSAATPKHLKSIGLLSPDFQEDNETEINFLLKQALTIVGTLPFTYMLEKWRWMVFKGEIPKDQWMKKWWEMKREIVGVVEPVPHDETYCDPASLFHVSNDYSFIRYYTRTLYQFQFQEALCQAAKHEGPLHKCDISNSTEAGQKLFNMLRLGKSEPWTLALENVVGAKNMNVRPLLNYFEPLFTWLKDQNKNSFVGWSTDWSPYADNAFKVRLSIRTALGDKAYAWDTNEEYLFKAMVAFSMRKVPNREATEISHVLLANVTQRVSFWFVVTDPSKNHTLPAVEVQSAIRMNKNRINNAFFLNDQTLEFLKIPSTLAPPMDPSVPTSTSPTRSMAPGAVHLPQPVSTRDKTHTCPPCPAPEAAGGPSVFLFPPKPKDTLMISRTPEVTCVVVDVSHEDPEVKFNWYVDGVEVHNAKTKPREEQYNSTYRVVSVLTVLHQDWLNGKEYKCKVSNKALGAPIEKTISKAKGQPREPQVCTLPPSRDELTKNQVSLSCAVKGFYPSDIAVEWESNGQPENNYKTTPPVLDSDGSFFLVSKLTVDKSRWQQGNVFSCSVMHEALHNRFTQKSLSLSPG

SEQ ID NO: 389 - protein, 966 aa, synthetic construct
  REGION 1..966: note = ACE2-615/201/hole/PGLALA/E402A/RF/TMEM27CA
QSTIEEQAKTFLDKFNHEAEDLFYQSSLASWNYNTNITEENVQNMNNAGDKWSAFLKEQSTLAQMYPLQEIQNLTVKLQLQALQQNGSSVLSEDKSKRLNTILNTMSTIYSTGKVCNPDNPQECLLLEPGLNEIMANSLDYNERLWAWESWRSEVGKQLRPLYEEYVVLKNEMARANHYEDYGDYWRGDYEVNGVDGYDYSRGQLIEDVEHTFEEIKPLYEHLHAYVRAKLMNAYPSYISPIGCLPAHLLGDMWGRFWTNLYSLTVPFGQKPNIDVTDAMVDQAWDAQRIFKEAEKFFVSVGLPNMTQGFWENSMLTDPGNVQKAVCHPTAWDLGKGDFRILMCTKVTMDDFLTAHHEMGHIQYDMAYAAQPFLLRNGANEGFHAAVGEIMSLSAATPKHLKSIGLLSPDFQEDNETEINFLLKQALTIVGTLPFTYMLEKWRWMVFKGEIPKDQWMKKWWEMKREIVGVVEPVPHDETYCDPASLFHVSNDYSFIRYYTRTLYQFQFQEALCQAAKHEGPLHKCDISNSTEAGQKLFNMLRLGKSEPWTLALENVVGAKNMNVRPLLNYFEPLFTWLKDQNKNSFVGWSTDWSPYADNAFKVRLSIRTALGDKAYAWDTNEEYLFKAMVAFSMRKVPNREATEISHVLLANVTQRVSFWFVVTDPSKNHTLPAVEVQSAIRMNKNRINNAFFLNDQTLEFLKIPSTLAPPMDPSVPTSTSPTRSMAPGAVHLPQPVSTRDKTHTCPPCPAPEAAGGPSVFLFPPKPKDTLMISRTPEVTCVVVDVSHEDPEVKFNWYVDGVEVHNAKTKPREEQYNSTYRVVSVLTVLHQDWLNGKEYKCKVSNKALGAPIEKTISKAKGQPREPQVCTLPPSRDELTKNQVSLSCAVKGFYPSDIAVEWESNGQPENNYKTTPPVLDSDGSFFLVSKLTVDKSRWQQGNVFSCSVMHEALHNRFTQKSLSLSPG

SEQ ID NO: 390 - protein, 966 aa, synthetic construct
  REGION 1..966: note = ACE2-607/201/hole/PGLALA/RF/TMEM27
QSTIEEQAKTFLDKFNHEAEDLFYQSSLASWNYNTNITEENVQNMNNAGDKWSAFLKEQSTLAQMYPLQEIQNLTVKLQLQALQQNGSSVLSEDKSKRLNTILNTMSTIYSTGKVCNPDNPQECLLLEPGLNEIMANSLDYNERLWAWESWRSEVGKQLRPLYEEYVVLKNEMARANHYEDYGDYWRGDYEVNGVDGYDYSRGQLIEDVEHTFEEIKPLYEHLHAYVRAKLMNAYPSYISPIGCLPAHLLGDMWGRFWTNLYSLTVPFGQKPNIDVTDAMVDQAWDAQRIFKEAEKFFVSVGLPNMTQGFWENSMLTDPGNVQKAVCHPTAWDLGKGDFRILMCTKVTMDDFLTAHHEMGHIQYDMAYAAQPFLLRNGANEGFHEAVGEIMSLSAATPKHLKSIGLLSPDFQEDNETEINFLLKQALTIVGTLPFTYMLEKWRWMVFKGEIPKDQWMKKWWEMKREIVGVVEPVPHDETYCDPASLFHVSNDYSFIRYYTRTLYQFQFQEALCQAAKHEGPLHKCDISNSTEAGQKLFNMLRLGKSEPWTLALENVVGAKNMNVRPLLNYFEPLFTWLKDQNKNSFVGWSELCQPGAENAFKVRLSIRTALGDKAYAWDTNEEYLFKAMVAFSMRKVPNREATEISHVLLCNVTQRVSFWFVVTDPSKNHTLPAVEVQSAIRMNKNRINNAFFLNDQTLEFLKIPSTLAPPMDPSVPTSTSPTRSMAPGAVHLPQPVSTRDKTHTCPPCPAPEAAGGPSVFLFPPKPKDTLMISRTPEVTCVVVDVSHEDPEVKFNWYVDGVEVHNAKTKPREEQYNSTYRVVSVLTVLHQDWLNGKEYKCKVSNKALGAPIEKTISKAKGQPREPQVCTLPPSRDELTKNQVSLSCAVKGFYPSDIAVEWESNGQPENNYKTTPPVLDSDGSFFLVSKLTVDKSRWQQGNVFSCSVMHEALHNRFTQKSLSLSPG

SEQ ID NO: 391 - protein, 966 aa, synthetic construct
  REGION 1..966: note = ACE2-607/201/hole/PGLALA/R273A/RF/TMEM27
QSTIEEQAKTFLDKFNHEAEDLFYQSSLASWNYNTNITEENVQNMNNAGDKWSAFLKEQSTLAQMYPLQEIQNLTVKLQLQALQQNGSSVLSEDKSKRLNTILNTMSTIYSTGKVCNPDNPQECLLLEPGLNEIMANSLDYNERLWAWESWRSEVGKQLRPLYEEYVVLKNEMARANHYEDYGDYWRGDYEVNGVDGYDYSRGQLIEDVEHTFEEIKPLYEHLHAYVRAKLMNAYPSYISPIGCLPAHLLGDMWGAFWTNLYSLTVPFGQKPNIDVTDAMVDQAWDAQRIFKEAEKFFVSVGLPNMTQGFWENSMLTDPGNVQKAVCHPTAWDLGKGDFRILMCTKVTMDDFLTAHHEMGHIQYDMAYAAQPFLLRNGANEGFHEAVGEIMSLSAATPKHLKSIGLLSPDFQEDNETEINFLLKQALTIVGTLPFTYMLEKWRWMVFKGEIPKDQWMKKWWEMKREIVGVVEPVPHDETYCDPASLFHVSNDYSFIRYYTRTLYQFQFQEALCQAAKHEGPLHKCDISNSTEAGQKLFNMLRLGKSEPWTLALENVVGAKNMNVRPLLNYFEPLFTWLKDQNKNSFVGWSELCQPGAENAFKVRLSIRTALGDKAYAWDTNEEYLFKAMVAFSMRKVPNREATEISHVLLCNVTQRVSFWFVVTDPSKNHTLPAVEVQSAIRMNKNRINNAFFLNDQTLEFLKIPSTLAPPMDPSVPTSTSPTRSMAPGAVHLPQPVSTRDKTHTCPPCPAPEAAGGPSVFLFPPKPKDTLMISRTPEVTCVVVDVSHEDPEVKFNWYVDGVEVHNAKTKPREEQYNSTYRVVSVLTVLHQDWLNGKEYKCKVSNKALGAPIEKTISKAKGQPREPQVCTLPPSRDELTKNQVSLSCAVKGFYPSDIAVEWESNGQPENNYKTTPPVLDSDGSFFLVSKLTVDKSRWQQGNVFSCSVMHEALHNRFTQKSLSLSPG

SEQ ID NO: 392 - protein, 966 aa, synthetic construct
  REGION 1..966: note = ACE2-607/201/hole/PGLALA/R273G/RF/TMEM27
QSTIEEQAKTFLDKFNHEAEDLFYQSSLASWNYNTNITEENVQNMNNAGDKWSAFLKEQSTLAQMYPLQEIQNLTVKLQLQALQQNGSSVLSEDKSKRLNTILNTMSTIYSTGKVCNPDNPQECLLLEPGLNEIMANSLDYNERLWAWESWRSEVGKQLRPLYEEYVVLKNEMARANHYEDYGDYWRGDYEVNGVDGYDYSRGQLIEDVEHTFEEIKPLYEHLHAYVRAKLMNAYPSYISPIGCLPAHLLGDMWGGFWTNLYSLTVPFGQKPNIDVTDAMVDQAWDAQRIFKEAEKFFVSVGLPNMTQGFWENSMLTDPGNVQKAVCHPTAWDLGKGDFRILMCTKVTMDDFLTAHHEMGHIQYDMAYAAQPFLLRNGANEGFHEAVGEIMSLSAATPKHLKSIGLLSPDFQEDNETEINFLLKQALTIVGTLPFTYMLEKWRWMVFKGEIPKDQWMKKWWEMKREIVGVVEPVPHDETYCDPASLFHVSNDYSFIRYYTRTLYQFQFQEALCQAAKHEGPLHKCDISNSTEAGQKLFNMLRLGKSEPWTLALENVVGAKNMNVRPLLNYFEPLFTWLKDQNKNSFVGWSELCQPGAENAFKVRLSIRTALGDKAYAWDTNEEYLFKAMVAFSMRKVPNREATEISHVLLCNVTQRVSFWFVVTDPSKNHTLPAVEVQSAIRMNKNRINNAFFLNDQTLEFLKIPSTLAPPMDPSVPTSTSPTRSMAPGAVHLPQPVSTRDKTHTCPPCPAPEAAGGPSVFLFPPKPKDTLMISRTPEVTCVVVDVSHEDPEVKFNWYVDGVEVHNAKTKPREEQYNSTYRVVSVLTVLHQDWLNGKEYKCKVSNKALGAPIEKTISKAKGQPREPQVCTLPPSRDELTKNQVSLSCAVKGFYPSDIAVEWESNGQPENNYKTTPPVLDSDGSFFLVSKLTVDKSRWQQGNVFSCSVMHEALHNRFTQKSLSLSPG

SEQ ID NO: 393 - protein, 966 aa, synthetic construct
  REGION 1..966: note = ACE2-607/201/hole/PGLALA/R273V/RF/TMEM27
QSTIEEQAKTFLDKFNHEAEDLFYQSSLASWNYNTNITEENVQNMNNAGDKWSAFLKEQSTLAQMYPLQEIQNLTVKLQLQALQQNGSSVLSEDKSKRLNTILNTMSTIYSTGKVCNPDNPQECLLLEPGLNEIMANSLDYNERLWAWESWRSEVGKQLRPLYEEYVVLKNEMARANHYEDYGDYWRGDYEVNGVDGYDYSRGQLIEDVEHTFEEIKPLYEHLHAYVRAKLMNAYPSYISPIGCLPAHLLGDMWGVFWTNLYSLTVPFGQKPNIDVTDAMVDQAWDAQRIFKEAEKFFVSVGLPNMTQGFWENSMLTDPGNVQKAVCHPTAWDLGKGDFRILMCTKVTMDDFLTAHHEMGHIQYDMAYAAQPFLLRNGANEGFHEAVGEIMSLSAATPKHLKSIGLLSPDFQEDNETEINFLLKQALTIVGTLPFTYMLEKWRWMVFKGEIPKDQWMKKWWEMKREIVGVVEPVPHDETYCDPASLFHVSNDYSFIRYYTRTLYQFQFQEALCQAAKHEGPLHKCDISNSTEAGQKLFNMLRLGKSEPWTLALENVVGAKNMNVRPLLNYFEPLFTWLKDQNKNSFVGWSELCQPGAENAFKVRLSIRTALGDKAYAWDTNEEYLFKAMVAFSMRKVPNREATEISHVLLCNVTQRVSFWFVVTDPSKNHTLPAVEVQSAIRMNKNRINNAFFLNDQTLEFLKIPSTLAPPMDPSVPTSTSPTRSMAPGAVHLPQPVSTRDKTHTCPPCPAPEAAGGPSVFLFPPKPKDTLMISRTPEVTCVVVDVSHEDPEVKFNWYVDGVEVHNAKTKPREEQYNSTYRVVSVLTVLHQDWLNGKEYKCKVSNKALGAPIEKTISKAKGQPREPQVCTLPPSRDELTKNQVSLSCAVKGFYPSDIAVEWESNGQPENNYKTTPPVLDSDGSFFLVSKLTVDKSRWQQGNVFSCSVMHEALHNRFTQKSLSLSPG

SEQ ID NO: 394 - protein, 966 aa, synthetic construct
  REGION 1..966: note = ACE2-607/201/hole/PGLALA/H378A/RF/TMEM27
QSTIEEQAKTFLDKFNHEAEDLFYQSSLASWNYNTNITEENVQNMNNAGDKWSAFLKEQSTLAQMYPLQEIQNLTVKLQLQALQQNGSSVLSEDKSKRLNTILNTMSTIYSTGKVCNPDNPQECLLLEPGLNEIMANSLDYNERLWAWESWRSEVGKQLRPLYEEYVVLKNEMARANHYEDYGDYWRGDYEVNGVDGYDYSRGQLIEDVEHTFEEIKPLYEHLHAYVRAKLMNAYPSYISPIGCLPAHLLGDMWGRFWTNLYSLTVPFGQKPNIDVTDAMVDQAWDAQRIFKEAEKFFVSVGLPNMTQGFWENSMLTDPGNVQKAVCHPTAWDLGKGDFRILMCTKVTMDDFLTAHHEMGAIQYDMAYAAQPFLLRNGANEGFHEAVGEIMSLSAATPKHLKSIGLLSPDFQEDNETEINFLLKQALTIVGTLPFTYMLEKWRWMVFKGEIPKDQWMKKWWEMKREIVGVVEPVPHDETYCDPASLFHVSNDYSFIRYYTRTLYQFQFQEALCQAAKHEGPLHKCDISNSTEAGQKLFNMLRLGKSEPWTLALENVVGAKNMNVRPLLNYFEPLFTWLKDQNKNSFVGWSELCQPGAENAFKVRLSIRTALGDKAYAWDTNEEYLFKAMVAFSMRKVPNREATEISHVLLCNVTQRVSFWFVVTDPSKNHTLPAVEVQSAIRMNKNRINNAFFLNDQTLEFLKIPSTLAPPMDPSVPTSTSPTRSMAPGAVHLPQPVSTRDKTHTCPPCPAPEAAGGPSVFLFPPKPKDTLMISRTPEVTCVVVDVSHEDPEVKFNWYVDGVEVHNAKTKPREEQYNSTYRVVSVLTVLHQDWLNGKEYKCKVSNKALGAPIEKTISKAKGQPREPQVCTLPPSRDELTKNQVSLSCAVKGFYPSDIAVEWESNGQPENNYKTTPPVLDSDGSFFLVSKLTVDKSRWQQGNVFSCSVMHEALHNRFTQKSLSLSPG

SEQ ID NO: 395 - protein, 966 aa, synthetic construct
  REGION 1..966: note = ACE2-607/201/hole/PGLALA/E402A/RF/TMEM27
QSTIEEQAKTFLDKFNHEAEDLFYQSSLASWNYNTNITEENVQNMNNAGDKWSAFLKEQSTLAQMYPLQEIQNLTVKLQLQALQQNGSSVLSEDKSKRLNTILNTMSTIYSTGKVCNPDNPQECLLLEPGLNEIMANSLDYNERLWAWESWRSEVGKQLRPLYEEYVVLKNEMARANHYEDYGDYWRGDYEVNGVDGYDYSRGQLIEDVEHTFEEIKPLYEHLHAYVRAKLMNAYPSYISPIGCLPAHLLGDMWGRFWTNLYSLTVPFGQKPNIDVTDAMVDQAWDAQRIFKEAEKFFVSVGLPNMTQGFWENSMLTDPGNVQKAVCHPTAWDLGKGDFRILMCTKVTMDDFLTAHHEMGHIQYDMAYAAQPFLLRNGANEGFHAAVGEIMSLSAATPKHLKSIGLLSPDFQEDNETEINFLLKQALTIVGTLPFTYMLEKWRWMVFKGEIPKDQWMKKWWEMKREIVGVVEPVPHDETYCDPASLFHVSNDYSFIRYYTRTLYQFQFQEALCQAAKHEGPLHKCDISNSTEAGQKLFNMLRLGKSEPWTLALENVVGAKNMNVRPLLNYFEPLFTWLKDQNKNSFVGWSELCQPGAENAFKVRLSIRTALGDKAYAWDTNEEYLFKAMVAFSMRKVPNREATEISHVLLCNVTQRVSFWFVVTDPSKNHTLPAVEVQSAIRMNKNRINNAFFLNDQTLEFLKIPSTLAPPMDPSVPTSTSPTRSMAPGAVHLPQPVSTRDKTHTCPPCPAPEAAGGPSVFLFPPKPKDTLMISRTPEVTCVVVDVSHEDPEVKFNWYVDGVEVHNAKTKPREEQYNSTYRVVSVLTVLHQDWLNGKEYKCKVSNKALGAPIEKTISKAKGQPREPQVCTLPPSRDELTKNQVSLSCAVKGFYPSDIAVEWESNGQPENNYKTTPPVLDSDGSFFLVSKLTVDKSRWQQGNVFSCSVMHEALHNRFTQKSLSLSPG

SEQ ID NO: 396 - protein, 970 aa, synthetic construct
  REGION 1..970: note = ACE2-611/201/hole/PGLALA/RF/TMEM27
QSTIEEQAKTFLDKFNHEAEDLFYQSSLASWNYNTNITEENVQNMNNAGDKWSAFLKEQSTLAQMYPLQEIQNLTVKLQLQALQQNGSSVLSEDKSKRLNTILNTMSTIYSTGKVCNPDNPQECLLLEPGLNEIMANSLDYNERLWAWESWRSEVGKQLRPLYEEYVVLKNEMARANHYEDYGDYWRGDYEVNGVDGYDYSRGQLIEDVEHTFEEIKPLYEHLHAYVRAKLMNAYPSYISPIGCLPAHLLGDMWGRFWTNLYSLTVPFGQKPNIDVTDAMVDQAWDAQRIFKEAEKFFVSVGLPNMTQGFWENSMLTDPGNVQKAVCHPTAWDLGKGDFRILMCTKVTMDDFLTAHHEMGHIQYDMAYAAQPFLLRNGANEGFHEAVGEIMSLSAATPKHLKSIGLLSPDFQEDNETEINFLLKQALTIVGTLPFTYMLEKWRWMVFKGEIPKDQWMKKWWEMKREIVGVVEPVPHDETYCDPASLFHVSNDYSFIRYYTRTLYQFQFQEALCQAAKHEGPLHKCDISNSTEAGQKLFNMLRLGKSEPWTLALENVVGAKNMNVRPLLNYFEPLFTWLKDQNKNSFVGWSTDWSELCQPGAENAFKVRLSIRTALGDKAYAWDTNEEYLFKAMVAFSMRKVPNREATEISHVLLCNVTQRVSFWFVVTDPSKNHTLPAVEVQSAIRMNKNRINNAFFLNDQTLEFLKIPSTLAPPMDPSVPTSTSPTRSMAPGAVHLPQPVSTRDKTHTCPPCPAPEAAGGPSVFLFPPKPKDTLMISRTPEVTCVVVDVSHEDPEVKFNWYVDGVEVHNAKTKPREEQYNSTYRVVSVLTVLHQDWLNGKEYKCKVSNKALGAPIEKTISKAKGQPREPQVCTLPPSRDELTKNQVSLSCAVKGFYPSDIAVEWESNGQPENNYKTTPPVLDSDGSFFLVSKLTVDKSRWQQGNVFSCSVMHEALHNRFTQKSLSLSPG

SEQ ID NO: 397 - protein, 970 aa, synthetic construct
  REGION 1..970: note = ACE2-611/201/hole/PGLALA/R273A/RF/TMEM27
QSTIEEQAKTFLDKFNHEAEDLFYQSSLASWNYNTNITEENVQNMNNAGDKWSAFLKEQSTLAQMYPLQEIQNLTVKLQLQALQQNGSSVLSEDKSKRLNTILNTMSTIYSTGKVCNPDNPQECLLLEPGLNEIMANSLDYNERLWAWESWRSEVGKQLRPLYEEYVVLKNEMARANHYEDYGDYWRGDYEVNGVDGYDYSRGQLIEDVEHTFEEIKPLYEHLHAYVRAKLMNAYPSYISPIGCLPAHLLGDMWGAFWTNLYSLTVPFGQKPNIDVTDAMVDQAWDAQRIFKEAEKFFVSVGLPNMTQGFWENSMLTDPGNVQKAVCHPTAWDLGKGDFRILMCTKVTMDDFLTAHHEMGHIQYDMAYAAQPFLLRNGANEGFHEAVGEIMSLSAATPKHLKSIGLLSPDFQEDNETEINFLLKQALTIVGTLPFTYMLEKWRWMVFKGEIPKDQWMKKWWEMKREIVGVVEPVPHDETYCDPASLFHVSNDYSFIRYYTRTLYQFQFQEALCQAAKHEGPLHKCDISNSTEAGQKLFNMLRLGKSEPWTLALENVVGAKNMNVRPLLNYFEPLFTWLKDQNKNSFVGWSTDWSELCQPGAENAFKVRLSIRTALGDKAYAWDTNEEYLFKAMVAFSMRKVPNREATEISHVLLCNVTQRVSFWFVVTDPSKNHTLPAVEVQSAIRMNKNRINNAFFLNDQTLEFLKIPSTLAPPMDPSVPTSTSPTRSMAPGAVHLPQPVSTRDKTHTCPPCPAPEAAGGPSVFLFPPKPKDTLMISRTPEVTCVVVDVSHEDPEVKFNWYVDGVEVHNAKTKPREEQYNSTYRVVSVLTVLHQDWLNGKEYKCKVSNKALGAPIEKTISKAKGQPREPQVCTLPPSRDELTKNQVSLSCAVKGFYPSDIAVEWESNGQPENNYKTTPPVLDSDGSFFLVSKLTVDKSRWQQGNVFSCSVMHEALHNRFTQKSLSLSPG

SEQ ID NO: 398 - protein, 970 aa, synthetic construct
  REGION 1..970: note = ACE2-611/201/hole/PGLALA/R273G/RF/TMEM27
QSTIEEQAKTFLDKFNHEAEDLFYQSSLASWNYNTNITEENVQNMNNAGDKWSAFLKEQSTLAQMYPLQEIQNLTVKLQLQALQQNGSSVLSEDKSKRLNTILNTMSTIYSTGKVCNPDNPQECLLLEPGLNEIMANSLDYNERLWAWESWRSEVGKQLRPLYEEYVVLKNEMARANHYEDYGDYWRGDYEVNGVDGYDYSRGQLIEDVEHTFEEIKPLYEHLHAYVRAKLMNAYPSYISPIGCLPAHLLGDMWGGFWTNLYSLTVPFGQKPNIDVTDAMVDQAWDAQRIFKEAEKFFVSVGLPNMTQGFWENSMLTDPGNVQKAVCHPTAWDLGKGDFRILMCTKVTMDDFLTAHHEMGHIQYDMAYAAQPFLLRNGANEGFHEAVGEIMSLSAATPKHLKSIGLLSPDFQEDNETEINFLLKQALTIVGTLPFTYMLEKWRWMVFKGEIPKDQWMKKWWEMKREIVGVVEPVPHDETYCDPASLFHVSNDYSFIRYYTRTLYQFQFQEALCQAAKHEGPLHKCDISNSTEAGQKLFNMLRLGKSEPWTLALENVVGAKNMNVRPLLNYFEPLFTWLKDQNKNSFVGWSTDWSELCQPGAENAFKVRLSIRTALGDKAYAWDTNEEYLFKAMVAFSMRKVPNREATEISHVLLCNVTQRVSFWFVVTDPSKNHTLPAVEVQSAIRMNKNRINNAFFLNDQTLEFLKIPSTLAPPMDPSVPTSTSPTRSMAPGAVHLPQPVSTRDKTHTCPPCPAPEAAGGPSVFLFPPKPKDTLMISRTPEVTCVVVDVSHEDPEVKFNWYVDGVEVHNAKTKPREEQYNSTYRVVSVLTVLHQDWLNGKEYKCKVSNKALGAPIEKTISKAKGQPREPQVCTLPPSRDELTKNQVSLSCAVKGFYPSDIAVEWESNGQPENNYKTTPPVLDSDGSFFLVSKLTVDKSRWQQGNVFSCSVMHEALHNRFTQKSLSLSPG

SEQ ID NO: 399 - protein, 970 aa, synthetic construct
  REGION 1..970: note = ACE2-611/201/hole/PGLALA/R273V/RF/TMEM27
QSTIEEQAKTFLDKFNHEAEDLFYQSSLASWNYNTNITEENVQNMNNAGDKWSAFLKEQSTLAQMYPLQEIQNLTVKLQLQALQQNGSSVLSEDKSKRLNTILNTMSTIYSTGKVCNPDNPQECLLLEPGLNEIMANSLDYNERLWAWESWRSEVGKQLRPLYEEYVVLKNEMARANHYEDYGDYWRGDYEVNGVDGYDYSRGQLIEDVEHTFEEIKPLYEHLHAYVRAKLMNAYPSYISPIGCLPAHLLGDMWGVFWTNLYSLTVPFGQKPNIDVTDAMVDQAWDAQRIFKEAEKFFVSVGLPNMTQGFWENSMLTDPGNVQKAVCHPTAWDLGKGDFRILMCTKVTMDDFLTAHHEMGHIQYDMAYAAQPFLLRNGANEGFHEAVGEIMSLSAATPKHLKSIGLLSPDFQEDNETEINFLLKQALTIVGTLPFTYMLEKWRWMVFKGEIPKDQWMKKWWEMKREIVGVVEPVPHDETYCDPASLFHVSNDYSFIRYYTRTLYQFQFQEALCQAAKHEGPLHKCDISNSTEAGQKLFNMLRLGKSEPWTLALENVVGAKNMNVRPLLNYFEPLFTWLKDQNKNSFVGWSTDWSELCQPGAENAFKVRLSIRTALGDKAYAWDTNEEYLFKAMVAFSMRKVPNREATEISHVLLCNVTQRVSFWFVVTDPSKNHTLPAVEVQSAIRMNKNRINNAFFLNDQTLEFLKIPSTLAPPMDPSVPTSTSPTRSMAPGAVHLPQPVSTRDKTHTCPPCPAPEAAGGPSVFLFPPKPKDTLMISRTPEVTCVVVDVSHEDPEVKFNWYVDGVEVHNAKTKPREEQYNSTYRVVSVLTVLHQDWLNGKEYKCKVSNKALGAPIEKTISKAKGQPREPQVCTLPPSRDELTKNQVSLSCAVKGFYPSDIAVEWESNGQPENNYKTTPPVLDSDGSFFLVSKLTVDKSRWQQGNVFSCSVMHEALHNRFTQKSLSLSPG

SEQ ID NO: 400 - protein, 970 aa, synthetic construct
  REGION 1..970: note = ACE2-611/201/hole/PGLALA/H378A/RF/TMEM27
QSTIEEQAKTFLDKFNHEAEDLFYQSSLASWNYNTNITEENVQNMNNAGDKWSAFLKEQSTLAQMYPLQEIQNLTVKLQLQALQQNGSSVLSEDKSKRLNTILNTMSTIYSTGKVCNPDNPQECLLLEPGLNEIMANSLDYNERLWAWESWRSEVGKQLRPLYEEYVVLKNEMARANHYEDYGDYWRGDYEVNGVDGYDYSRGQLIEDVEHTFEEIKPLYEHLHAYVRAKLMNAYPSYISPIGCLPAHLLGDMWGRFWTNLYSLTVPFGQKPNIDVTDAMVDQAWDAQRIFKEAEKFFVSVGLPNMTQGFWENSMLTDPGNVQKAVCHPTAWDLGKGDFRILMCTKVTMDDFLTAHHEMGAIQYDMAYAAQPFLLRNGANEGFHEAVGEIMSLSAATPKHLKSIGLLSPDFQEDNETEINFLLKQALTIVGTLPFTYMLEKWRWMVFKGEIPKDQWMKKWWEMKREIVGVVEPVPHDETYCDPASLFHVSNDYSFIRYYTRTLYQFQFQEALCQAAKHEGPLHKCDISNSTEAGQKLFNMLRLGKSEPWTLALENVVGAKNMNVRPLLNYFEPLFTWLKDQNKNSFVGWSTDWSELCQPGAENAFKVRLSIRTALGDKAYAWDTNEEYLFKAMVAFSMRKVPNREATEISHVLLCNVTQRVSFWFVVTDPSKNHTLPAVEVQSAIRMNKNRINNAFFLNDQTLEFLKIPSTLAPPMDPSVPTSTSPTRSMAPGAVHLPQPVSTRDKTHTCPPCPAPEAAGGPSVFLFPPKPKDTLMISRTPEVTCVVVDVSHEDPEVKFNWYVDGVEVHNAKTKPREEQYNSTYRVVSVLTVLHQDWLNGKEYKCKVSNKALGAPIEKTISKAKGQPREPQVCTLPPSRDELTKNQVSLSCAVKGFYPSDIAVEWESNGQPENNYKTTPPVLDSDGSFFLVSKLTVDKSRWQQGNVFSCSVMHEALHNRFTQKSLSLSPG

SEQ ID NO: 401 - protein, 970 aa, synthetic construct
  REGION 1..970: note = ACE2-611/201/hole/PGLALA/E402A/RF/TMEM27
QSTIEEQAKTFLDKFNHEAEDLFYQSSLASWNYNTNITEENVQNMNNAGDKWSAFLKEQSTLAQMYPLQEIQNLTVKLQLQALQQNGSSVLSEDKSKRLNTILNTMSTIYSTGKVCNPDNPQECLLLEPGLNEIMANSLDYNERLWAWESWRSEVGKQLRPLYEEYVVLKNEMARANHYEDYGDYWRGDYEVNGVDGYDYSRGQLIEDVEHTFEEIKPLYEHLHAYVRAKLMNAYPSYISPIGCLPAHLLGDMWGRFWTNLYSLTVPFGQKPNIDVTDAMVDQAWDAQRIFKEAEKFFVSVGLPNMTQGFWENSMLTDPGNVQKAVCHPTAWDLGKGDFRILMCTKVTMDDFLTAHHEMGHIQYDMAYAAQPFLLRNGANEGFHAAVGEIMSLSAATPKHLKSIGLLSPDFQEDNETEINFLLKQALTIVGTLPFTYMLEKWRWMVFKGEIPKDQWMKKWWEMKREIVGVVEPVPHDETYCDPASLFHVSNDYSFIRYYTRTLYQFQFQEALCQAAKHEGPLHKCDISNSTEAGQKLFNMLRLGKSEPWTLALENVVGAKNMNVRPLLNYFEPLFTWLKDQNKNSFVGWSTDWSELCQPGAENAFKVRLSIRTALGDKAYAWDTNEEYLFKAMVAFSMRKVPNREATEISHVLLCNVTQRVSFWFVVTDPSKNHTLPAVEVQSAIRMNKNRINNAFFLNDQTLEFLKIPSTLAPPMDPSVPTSTSPTRSMAPGAVHLPQPVSTRDKTHTCPPCPAPEAAGGPSVFLFPPKPKDTLMISRTPEVTCVVVDVSHEDPEVKFNWYVDGVEVHNAKTKPREEQYNSTYRVVSVLTVLHQDWLNGKEYKCKVSNKALGAPIEKTISKAKGQPREPQVCTLPPSRDELTKNQVSLSCAVKGFYPSDIAVEWESNGQPENNYKTTPPVLDSDGSFFLVSKLTVDKSRWQQGNVFSCSVMHEALHNRFTQKSLSLSPG

SEQ ID NO: 402 - protein, 972 aa, synthetic construct
  REGION 1..972: note = ACE2-740/201/PGLALA
QSTIEEQAKTFLDKFNHEAEDLFYQSSLASWNYNTNITEENVQNMNNAGDKWSAFLKEQSTLAQMYPLQEIQNLTVKLQLQALQQNGSSVLSEDKSKRLNTILNTMSTIYSTGKVCNPDNPQECLLLEPGLNEIMANSLDYNERLWAWESWRSEVGKQLRPLYEEYVVLKNEMARANHYEDYGDYWRGDYEVNGVDGYDYSRGQLIEDVEHTFEEIKPLYEHLHAYVRAKLMNAYPSYISPIGCLPAHLLGDMWGRFWTNLYSLTVPFGQKPNIDVTDAMVDQAWDAQRIFKEAEKFFVSVGLPNMTQGFWENSMLTDPGNVQKAVCHPTAWDLGKGDFRILMCTKVTMDDFLTAHHEMGHIQYDMAYAAQPFLLRNGANEGFHEAVGEIMSLSAATPKHLKSIGLLSPDFQEDNETEINFLLKQALTIVGTLPFTYMLEKWRWMVFKGEIPKDQWMKKWWEMKREIVGVVEPVPHDETYCDPASLFHVSNDYSFIRYYTRTLYQFQFQEALCQAAKHEGPLHKCDISNSTEAGQKLFNMLRLGKSEPWTLALENVVGAKNMNVRPLLNYFEPLFTWLKDQNKNSFVGWSTDWSPYADQSIKVRISLKSALGDKAYEWNDNEMYLFRSSVAYAMRQYFLKVKNQMILFGEEDVRVANLKPRISFNFFVTAPKNVSDIIPRTEVEKAIRMSRSRINDAFRLNDNSLEFLGIQPTLGPPNQPPVSTSTSPTRSMAPGAVHLPQPVSTRDKTHTCPPCPAPEAAGGPSVFLFPPKPKDTLMISRTPEVTCVVVDVSHEDPEVKFNWYVDGVEVHNAKTKPREEQYNSTYRVVSVLTVLHQDWLNGKEYKCKVSNKALGAPIEKTISKAKGQPREPQVYTLPPSRDELTKNQVSLTCLVKGFYPSDIAVEWESNGQPENNYKTTPPVLDSDGSFFLYSKLTVDKSRWQQGNVFSCSVMHEALHNHYTQKSLSLSPG

SEQ ID NO: 403 - protein, 972 aa, synthetic construct
  REGION 1..972: note = ACE2-740/201/PGLALA/R273A
QSTIEEQAKTFLDKFNHEAEDLFYQSSLASWNYNTNITEENVQNMNNAGDKWSAFLKEQSTLAQMYPLQEIQNLTVKLQLQALQQNGSSVLSEDKSKRLNTILNTMSTIYSTGKVCNPDNPQECLLLEPGLNEIMANSLDYNERLWAWESWRSEVGKQLRPLYEEYVVLKNEMARANHYEDYGDYWRGDYEVNGVDGYDYSRGQLIEDVEHTFEEIKPLYEHLHAYVRAKLMNAYPSYISPIGCLPAHLLGDMWGAFWTNLYSLTVPFGQKPNIDVTDAMVDQAWDAQRIFKEAEKFFVSVGLPNMTQGFWENSMLTDPGNVQKAVCHPTAWDLGKGDFRILMCTKVTMDDFLTAHHEMGHIQYDMAYAAQPFLLRNGANEGFHEAVGEIMSLSAATPKHLKSIGLLSPDFQEDNETEINFLLKQALTIVGTLPFTYMLEKWRWMVFKGEIPKDQWMKKWWEMKREIVGVVEPVPHDETYCDPASLFHVSNDYSFIRYYTRTLYQFQFQEALCQAAKHEGPLHKCDISNSTEAGQKLFNMLRLGKSEPWTLALENVVGAKNMNVRPLLNYFEPLFTWLKDQNKNSFVGWSTDWSPYADQSIKVRISLKSALGDKAYEWNDNEMYLFRSSVAYAMRQYFLKVKNQMILFGEEDVRVANLKPRISFNFFVTAPKNVSDIIPRTEVEKAIRMSRSRINDAFRLNDNSLEFLGIQPTLGPPNQPPVSTSTSPTRSMAPGAVHLPQPVSTRDKTHTCPPCPAPEAAGGPSVFLFPPKPKDTLMISRTPEVTCVVVDVSHEDPEVKFNWYVDGVEVHNAKTKPREEQYNSTYRVVSVLTVLHQDWLNGKEYKCKVSNKALGAPIEKTISKAKGQPREPQVYTLPPSRDELTKNQVSLTCLVKGFYPSDIAVEWESNGQPENNYKTTPPVLDSDGSFFLYSKLTVDKSRWQQGNVFSCSVMHEALHNHYTQKSLSLSPG

SEQ ID NO: 404 - protein, 972 aa, synthetic construct
  REGION 1..972: note = ACE2-740/201/PGLALA/R273G
QSTIEEQAKTFLDKFNHEAEDLFYQSSLASWNYNTNITEENVQNMNNAGDKWSAFLKEQSTLAQMYPLQEIQNLTVKLQLQALQQNGSSVLSEDKSKRLNTILNTMSTIYSTGKVCNPDNPQECLLLEPGLNEIMANSLDYNERLWAWESWRSEVGKQLRPLYEEYVVLKNEMARANHYEDYGDYWRGDYEVNGVDGYDYSRGQLIEDVEHTFEEIKPLYEHLHAYVRAKLMNAYPSYISPIGCLPAHLLGDMWGGFWTNLYSLTVPFGQKPNIDVTDAMVDQAWDAQRIFKEAEKFFVSVGLPNMTQGFWENSMLTDPGNVQKAVCHPTAWDLGKGDFRILMCTKVTMDDFLTAHHEMGHIQYDMAYAAQPFLLRNGANEGFHEAVGEIMSLSAATPKHLKSIGLLSPDFQEDNETEINFLLKQALTIVGTLPFTYMLEKWRWMVFKGEIPKDQWMKKWWEMKREIVGVVEPVPHDETYCDPASLFHVSNDYSFIRYYTRTLYQFQFQEALCQAAKHEGPLHKCDISNSTEAGQKLFNMLRLGKSEPWTLALENVVGAKNMNVRPLLNYFEPLFTWLKDQNKNSFVGWSTDWSPYADQSIKVRISLKSALGDKAYEWNDNEMYLFRSSVAYAMRQYFLKVKNQMILFGEEDVRVANLKPRISFNFFVTAPKNVSDIIPRTEVEKAIRMSRSRINDAFRLNDNSLEFLGIQPTLGPPNQPPVSTSTSPTRSMAPGAVHLPQPVSTRDKTHTCPPCPAPEAAGGPSVFLFPPKPKDTLMISRTPEVTCVVVDVSHEDPEVKFNWYVDGVEVHNAKTKPREEQYNSTYRVVSVLTVLHQDWLNGKEYKCKVSNKALGAPIEKTISKAKGQPREPQVYTLPPSRDELTKNQVSLTCLVKGFYPSDIAVEWESNGQPENNYKTTPPVLDSDGSFFLYSKLTVDKSRWQQGNVFSCSVMHEALHNHYTQKSLSLSPG

SEQ ID NO: 405 - protein, 972 aa, synthetic construct
  REGION 1..972: note = ACE2-740/201/PGLALA/R273V
QSTIEEQAKTFLDKFNHEAEDLFYQSSLASWNYNTNITEENVQNMNNAGDKWSAFLKEQSTLAQMYPLQEIQNLTVKLQLQALQQNGSSVLSEDKSKRLNTILNTMSTIYSTGKVCNPDNPQECLLLEPGLNEIMANSLDYNERLWAWESWRSEVGKQLRPLYEEYVVLKNEMARANHYEDYGDYWRGDYEVNGVDGYDYSRGQLIEDVEHTFEEIKPLYEHLHAYVRAKLMNAYPSYISPIGCLPAHLLGDMWGVFWTNLYSLTVPFGQKPNIDVTDAMVDQAWDAQRIFKEAEKFFVSVGLPNMTQGFWENSMLTDPGNVQKAVCHPTAWDLGKGDFRILMCTKVTMDDFLTAHHEMGHIQYDMAYAAQPFLLRNGANEGFHEAVGEIMSLSAATPKHLKSIGLLSPDFQEDNETEINFLLKQALTIVGTLPFTYMLEKWRWMVFKGEIPKDQWMKKWWEMKREIVGVVEPVPHDETYCDPASLFHVSNDYSFIRYYTRTLYQFQFQEALCQAAKHEGPLHKCDISNSTEAGQKLFNMLRLGKSEPWTLALENVVGAKNMNVRPLLNYFEPLFTWLKDQNKNSFVGWSTDWSPYADQSIKVRISLKSALGDKAYEWNDNEMYLFRSSVAYAMRQYFLKVKNQMILFGEEDVRVANLKPRISFNFFVTAPKNVSDIIPRTEVEKAIRMSRSRINDAFRLNDNSLEFLGIQPTLGPPNQPPVSTSTSPTRSMAPGAVHLPQPVSTRDKTHTCPPCPAPEAAGGPSVFLFPPKPKDTLMISRTPEVTCVVVDVSHEDPEVKFNWYVDGVEVHNAKTKPREEQYNSTYRVVSVLTVLHQDWLNGKEYKCKVSNKALGAPIEKTISKAKGQPREPQVYTLPPSRDELTKNQVSLTCLVKGFYPSDIAVEWESNGQPENNYKTTPPVLDSDGSFFLYSKLTVDKSRWQQGNVFSCSVMHEALHNHYTQKSLSLSPG

SEQ ID NO: 406 - protein, 972 aa, synthetic construct
  REGION 1..972: note = ACE2-740/201/PGLALA/H378A
QSTIEEQAKTFLDKFNHEAEDLFYQSSLASWNYNTNITEENVQNMNNAGDKWSAFLKEQSTLAQMYPLQEIQNLTVKLQLQALQQNGSSVLSEDKSKRLNTILNTMSTIYSTGKVCNPDNPQECLLLEPGLNEIMANSLDYNERLWAWESWRSEVGKQLRPLYEEYVVLKNEMARANHYEDYGDYWRGDYEVNGVDGYDYSRGQLIEDVEHTFEEIKPLYEHLHAYVRAKLMNAYPSYISPIGCLPAHLLGDMWGRFWTNLYSLTVPFGQKPNIDVTDAMVDQAWDAQRIFKEAEKFFVSVGLPNMTQGFWENSMLTDPGNVQKAVCHPTAWDLGKGDFRILMCTKVTMDDFLTAHHEMGAIQYDMAYAAQPFLLRNGANEGFHEAVGEIMSLSAATPKHLKSIGLLSPDFQEDNETEINFLLKQALTIVGTLPFTYMLEKWRWMVFKGEIPKDQWMKKWWEMKREIVGVVEPVPHDETYCDPASLFHVSNDYSFIRYYTRTLYQFQFQEALCQAAKHEGPLHKCDISNSTEAGQKLFNMLRLGKSEPWTLALENVVGAKNMNVRPLLNYFEPLFTWLKDQNKNSFVGWSTDWSPYADQSIKVRISLKSALGDKAYEWNDNEMYLFRSSVAYAMRQYFLKVKNQMILFGEEDVRVANLKPRISFNFFVTAPKNVSDIIPRTEVEKAIRMSRSRINDAFRLNDNSLEFLGIQPTLGPPNQPPVSTSTSPTRSMAPGAVHLPQPVSTRDKTHTCPPCPAPEAAGGPSVFLFPPKPKDTLMISRTPEVTCVVVDVSHEDPEVKFNWYVDGVEVHNAKTKPREEQYNSTYRVVSVLTVLHQDWLNGKEYKCKVSNKALGAPIEKTISKAKGQPREPQVYTLPPSRDELTKNQVSLTCLVKGFYPSDIAVEWESNGQPENNYKTTPPVLDSDGSFFLYSKLTVDKSRWQQGNVFSCSVMHEALHNHYTQKSLSLSPG

SEQ ID NO: 407 - protein, 972 aa, synthetic construct
  REGION 1..972: note = ACE2-740/201/PGLALA/E402A
QSTIEEQAKTFLDKFNHEAEDLFYQSSLASWNYNTNITEENVQNMNNAGDKWSAFLKEQSTLAQMYPLQEIQNLTVKLQLQALQQNGSSVLSEDKSKRLNTILNTMSTIYSTGKVCNPDNPQECLLLEPGLNEIMANSLDYNERLWAWESWRSEVGKQLRPLYEEYVVLKNEMARANHYEDYGDYWRGDYEVNGVDGYDYSRGQLIEDVEHTFEEIKPLYEHLHAYVRAKLMNAYPSYISPIGCLPAHLLGDMWGRFWTNLYSLTVPFGQKPNIDVTDAMVDQAWDAQRIFKEAEKFFVSVGLPNMTQGFWENSMLTDPGNVQKAVCHPTAWDLGKGDFRILMCTKVTMDDFLTAHHEMGHIQYDMAYAAQPFLLRNGANEGFHAAVGEIMSLSAATPKHLKSIGLLSPDFQEDNETEINFLLKQALTIVGTLPFTYMLEKWRWMVFKGEIPKDQWMKKWWEMKREIVGVVEPVPHDETYCDPASLFHVSNDYSFIRYYTRTLYQFQFQEALCQAAKHEGPLHKCDISNSTEAGQKLFNMLRLGKSEPWTLALENVVGAKNMNVRPLLNYFEPLFTWLKDQNKNSFVGWSTDWSPYADQSIKVRISLKSALGDKAYEWNDNEMYLFRSSVAYAMRQYFLKVKNQMILFGEEDVRVANLKPRISFNFFVTAPKNVSDIIPRTEVEKAIRMSRSRINDAFRLNDNSLEFLGIQPTLGPPNQPPVSTSTSPTRSMAPGAVHLPQPVSTRDKTHTCPPCPAPEAAGGPSVFLFPPKPKDTLMISRTPEVTCVVVDVSHEDPEVKFNWYVDGVEVHNAKTKPREEQYNSTYRVVSVLTVLHQDWLNGKEYKCKVSNKALGAPIEKTISKAKGQPREPQVYTLPPSRDELTKNQVSLTCLVKGFYPSDIAVEWESNGQPENNYKTTPPVLDSDGSFFLYSKLTVDKSRWQQGNVFSCSVMHEALHNHYTQKSLSLSPG

SEQ ID NO: 408 - protein, 972 aa, synthetic construct
  REGION 1..972: note = ACE2-740/201/PGLALA/313
QSTIEEQAKTFLDFFDSQAEDLFYQSSLASWNYNTNITEENVQNMNNAGDKWSAFLKEQSTLAQMYPLQEIQNLTVKLQLQALQQNGSSVLSEDKSKRLNTILNTMSTIYSTGKVCNPDNPQECLLLEPGLNEIMANSLDYNERLWAWESWRSEVGKQLRPLYEEYVVLKNEMARANHYEDYGDYWRGDYEVNGVDGYDYSRGQLIEDVEHTFEEIKPLYEHLHAYVRAKLMNAYPSYISPIGCLPAHLLGDMWGRFWTNLYSLTVPFGQKPNIDVTDAMVDQAWDAQRIFKEAEKFFVSVGLPNMTQGFWENSMLTDPGNVQKAVCHPTAWDLGKGDFRILMCTKVTMDDFLTAHHEMGHIQYDMAYAAQPFLLRNGANEGFHEAVGEIMSLSAATPKHLKSIGLLSPDFQEDNETEINFLLKQALTIVGTLPFTYMLEKWRWMVFKGEIPKDQWMKKWWEMKREIVGVVEPVPHDETYCDPASLFHVSNDYSFIRYYTRTLYQFQFQEALCQAAKHEGPLHKCDISNSTEAGQKLFNMLRLGKSEPWTLALENVVGAKNMNVRPLLNYFEPLFTWLKDQNKNSFVGWSTDWSPYADQSIKVRISLKSALGDKAYEWNDNEMYLFRSSVAYAMRQYFLKVKNQMILFGEEDVRVANLKPRISFNFFVTAPKNVSDIIPRTEVEKAIRMSRSRINDAFRLNDNSLEFLGIQPTLGPPNQPPVSTSTSPTRSMAPGAVHLPQPVSTRDKTHTCPPCPAPEAAGGPSVFLFPPKPKDTLMISRTPEVTCVVVDVSHEDPEVKFNWYVDGVEVHNAKTKPREEQYNSTYRVVSVLTVLHQDWLNGKEYKCKVSNKALGAPIEKTISKAKGQPREPQVYTLPPSRDELTKNQVSLTCLVKGFYPSDIAVEWESNGQPENNYKTTPPVLDSDGSFFLYSKLTVDKSRWQQGNVFSCSVMHEALHNHYTQKSLSLSPG

SEQ ID NO: 409 - protein, 972 aa, synthetic construct
  REGION 1..972: note = ACE2-740/201/PGLALA/R273A/313
QSTIEEQAKTFLDFFDSQAEDLFYQSSLASWNYNTNITEENVQNMNNAGDKWSAFLKEQSTLAQMYPLQEIQNLTVKLQLQALQQNGSSVLSEDKSKRLNTILNTMSTIYSTGKVCNPDNPQECLLLEPGLNEIMANSLDYNERLWAWESWRSEVGKQLRPLYEEYVVLKNEMARANHYEDYGDYWRGDYEVNGVDGYDYSRGQLIEDVEHTFEEIKPLYEHLHAYVRAKLMNAYPSYISPIGCLPAHLLGDMWGAFWTNLYSLTVPFGQKPNIDVTDAMVDQAWDAQRIFKEAEKFFVSVGLPNMTQGFWENSMLTDPGNVQKAVCHPTAWDLGKGDFRILMCTKVTMDDFLTAHHEMGHIQYDMAYAAQPFLLRNGANEGFHEAVGEIMSLSAATPKHLKSIGLLSPDFQEDNETEINFLLKQALTIVGTLPFTYMLEKWRWMVFKGEIPKDQWMKKWWEMKREIVGVVEPVPHDETYCDPASLFHVSNDYSFIRYYTRTLYQFQFQEALCQAAKHEGPLHKCDISNSTEAGQKLFNMLRLGKSEPWTLALENVVGAKNMNVRPLLNYFEPLFTWLKDQNKNSFVGWSTDWSPYADQSIKVRISLKSALGDKAYEWNDNEMYLFRSSVAYAMRQYFLKVKNQMILFGEEDVRVANLKPRISFNFFVTAPKNVSDIIPRTEVEKAIRMSRSRINDAFRLNDNSLEFLGIQPTLGPPNQPPVSTSTSPTRSMAPGAVHLPQPVSTRDKTHTCPPCPAPEAAGGPSVFLFPPKPKDTLMISRTPEVTCVVVDVSHEDPEVKFNWYVDGVEVHNAKTKPREEQYNSTYRVVSVLTVLHQDWLNGKEYKCKVSNKALGAPIEKTISKAKGQPREPQVYTLPPSRDELTKNQVSLTCLVKGFYPSDIAVEWESNGQPENNYKTTPPVLDSDGSFFLYSKLTVDKSRWQQGNVFSCSVMHEALHNHYTQKSLSLSPG

SEQ ID NO: 410 - protein, 972 aa, synthetic construct
  REGION 1..972: note = ACE2-740/201/PGLALA/R273G/313
QSTIEEQAKTFLDFFDSQAEDLFYQSSLASWNYNTNITEENVQNMNNAGDKWSAFLKEQSTLAQMYPLQEIQNLTVKLQLQALQQNGSSVLSEDKSKRLNTILNTMSTIYSTGKVCNPDNPQECLLLEPGLNEIMANSLDYNERLWAWESWRSEVGKQLRPLYEEYVVLKNEMARANHYEDYGDYWRGDYEVNGVDGYDYSRGQLIEDVEHTFEEIKPLYEHLHAYVRAKLMNAYPSYISPIGCLPAHLLGDMWGGFWTNLYSLTVPFGQKPNIDVTDAMVDQAWDAQRIFKEAEKFFVSVGLPNMTQGFWENSMLTDPGNVQKAVCHPTAWDLGKGDFRILMCTKVTMDDFLTAHHEMGHIQYDMAYAAQPFLLRNGANEGFHEAVGEIMSLSAATPKHLKSIGLLSPDFQEDNETEINFLLKQALTIVGTLPFTYMLEKWRWMVFKGEIPKDQWMKKWWEMKREIVGVVEPVPHDETYCDPASLFHVSNDYSFIRYYTRTLYQFQFQEALCQAAKHEGPLHKCDISNSTEAGQKLFNMLRLGKSEPWTLALENVVGAKNMNVRPLLNYFEPLFTWLKDQNKNSFVGWSTDWSPYADQSIKVRISLKSALGDKAYEWNDNEMYLFRSSVAYAMRQYFLKVKNQMILFGEEDVRVANLKPRISFNFFVTAPKNVSDIIPRTEVEKAIRMSRSRINDAFRLNDNSLEFLGIQPTLGPPNQPPVSTSTSPTRSMAPGAVHLPQPVSTRDKTHTCPPCPAPEAAGGPSVFLFPPKPKDTLMISRTPEVTCVVVDVSHEDPEVKFNWYVDGVEVHNAKTKPREEQYNSTYRVVSVLTVLHQDWLNGKEYKCKVSNKALGAPIEKTISKAKGQPREPQVYTLPPSRDELTKNQVSLTCLVKGFYPSDIAVEWESNGQPENNYKTTPPVLDSDGSFFLYSKLTVDKSRWQQGNVFSCSVMHEALHNHYTQKSLSLSPG

SEQ ID NO: 411 - protein, 972 aa, synthetic construct
  REGION 1..972: note = ACE2-740/201/PGLALA/R273V/313
QSTIEEQAKTFLDFFDSQAEDLFYQSSLASWNYNTNITEENVQNMNNAGDKWSAFLKEQSTLAQMYPLQEIQNLTVKLQLQALQQNGSSVLSEDKSKRLNTILNTMSTIYSTGKVCNPDNPQECLLLEPGLNEIMANSLDYNERLWAWESWRSEVGKQLRPLYEEYVVLKNEMARANHYEDYGDYWRGDYEVNGVDGYDYSRGQLIEDVEHTFEEIKPLYEHLHAYVRAKLMNAYPSYISPIGCLPAHLLGDMWGVFWTNLYSLTVPFGQKPNIDVTDAMVDQAWDAQRIFKEAEKFFVSVGLPNMTQGFWENSMLTDPGNVQKAVCHPTAWDLGKGDFRILMCTKVTMDDFLTAHHEMGHIQYDMAYAAQPFLLRNGANEGFHEAVGEIMSLSAATPKHLKSIGLLSPDFQEDNETEINFLLKQALTIVGTLPFTYMLEKWRWMVFKGEIPKDQWMKKWWEMKREIVGVVEPVPHDETYCDPASLFHVSNDYSFIRYYTRTLYQFQFQEALCQAAKHEGPLHKCDISNSTEAGQKLFNMLRLGKSEPWTLALENVVGAKNMNVRPLLNYFEPLFTWLKDQNKNSFVGWSTDWSPYADQSIKVRISLKSALGDKAYEWNDNEMYLFRSSVAYAMRQYFLKVKNQMILFGEEDVRVANLKPRISFNFFVTAPKNVSDIIPRTEVEKAIRMSRSRINDAFRLNDNSLEFLGIQPTLGPPNQPPVSTSTSPTRSMAPGAVHLPQPVSTRDKTHTCPPCPAPEAAGGPSVFLFPPKPKDTLMISRTPEVTCVVVDVSHEDPEVKFNWYVDGVEVHNAKTKPREEQYNSTYRVVSVLTVLHQDWLNGKEYKCKVSNKALGAPIEKTISKAKGQPREPQVYTLPPSRDELTKNQVSLTCLVKGFYPSDIAVEWESNGQPENNYKTTPPVLDSDGSFFLYSKLTVDKSRWQQGNVFSCSVMHEALHNHYTQKSLSLSPG

SEQ ID NO: 412 - protein, 972 aa, synthetic construct
  REGION 1..972: note = ACE2-740/201/PGLALA/H378A/313
QSTIEEQAKTFLDFFDSQAEDLFYQSSLASWNYNTNITEENVQNMNNAGDKWSAFLKEQSTLAQMYPLQEIQNLTVKLQLQALQQNGSSVLSEDKSKRLNTILNTMSTIYSTGKVCNPDNPQECLLLEPGLNEIMANSLDYNERLWAWESWRSEVGKQLRPLYEEYVVLKNEMARANHYEDYGDYWRGDYEVNGVDGYDYSRGQLIEDVEHTFEEIKPLYEHLHAYVRAKLMNAYPSYISPIGCLPAHLLGDMWGRFWTNLYSLTVPFGQKPNIDVTDAMVDQAWDAQRIFKEAEKFFVSVGLPNMTQGFWENSMLTDPGNVQKAVCHPTAWDLGKGDFRILMCTKVTMDDFLTAHHEMGAIQYDMAYAAQPFLLRNGANEGFHEAVGEIMSLSAATPKHLKSIGLLSPDFQEDNETEINFLLKQALTIVGTLPFTYMLEKWRWMVFKGEIPKDQWMKKWWEMKREIVGVVEPVPHDETYCDPASLFHVSNDYSFIRYYTRTLYQFQFQEALCQAAKHEGPLHKCDISNSTEAGQKLFNMLRLGKSEPWTLALENVVGAKNMNVRPLLNYFEPLFTWLKDQNKNSFVGWSTDWSPYADQSIKVRISLKSALGDKAYEWNDNEMYLFRSSVAYAMRQYFLKVKNQMILFGEEDVRVANLKPRISFNFFVTAPKNVSDIIPRTEVEKAIRMSRSRINDAFRLNDNSLEFLGIQPTLGPPNQPPVSTSTSPTRSMAPGAVHLPQPVSTRDKTHTCPPCPAPEAAGGPSVFLFPPKPKDTLMISRTPEVTCVVVDVSHEDPEVKFNWYVDGVEVHNAKTKPREEQYNSTYRVVSVLTVLHQDWLNGKEYKCKVSNKALGAPIEKTISKAKGQPREPQVYTLPPSRDELTKNQVSLTCLVKGFYPSDIAVEWESNGQPENNYKTTPPVLDSDGSFFLYSKLTVDKSRWQQGNVFSCSVMHEALHNHYTQKSLSLSPG

SEQ ID NO: 413 - protein, 972 aa, synthetic construct
  REGION 1..972: note = ACE2-740/201/PGLALA/E402A/313
QSTIEEQAKTFLDFFDSQAEDLFYQSSLASWNYNTNITEENVQNMNNAGDKWSAFLKEQSTLAQMYPLQEIQNLTVKLQLQALQQNGSSVLSEDKSKRLNTILNTMSTIYSTGKVCNPDNPQECLLLEPGLNEIMANSLDYNERLWAWESWRSEVGKQLRPLYEEYVVLKNEMARANHYEDYGDYWRGDYEVNGVDGYDYSRGQLIEDVEHTFEEIKPLYEHLHAYVRAKLMNAYPSYISPIGCLPAHLLGDMWGRFWTNLYSLTVPFGQKPNIDVTDAMVDQAWDAQRIFKEAEKFFVSVGLPNMTQGFWENSMLTDPGNVQKAVCHPTAWDLGKGDFRILMCTKVTMDDFLTAHHEMGHIQYDMAYAAQPFLLRNGANEGFHAAVGEIMSLSAATPKHLKSIGLLSPDFQEDNETEINFLLKQALTIVGTLPFTYMLEKWRWMVFKGEIPKDQWMKKWWEMKREIVGVVEPVPHDETYCDPASLFHVSNDYSFIRYYTRTLYQFQFQEALCQAAKHEGPLHKCDISNSTEAGQKLFNMLRLGKSEPWTLALENVVGAKNMNVRPLLNYFEPLFTWLKDQNKNSFVGWSTDWSPYADQSIKVRISLKSALGDKAYEWNDNEMYLFRSSVAYAMRQYFLKVKNQMILFGEEDVRVANLKPRISFNFFVTAPKNVSDIIPRTEVEKAIRMSRSRINDAFRLNDNSLEFLGIQPTLGPPNQPPVSTSTSPTRSMAPGAVHLPQPVSTRDKTHTCPPCPAPEAAGGPSVFLFPPKPKDTLMISRTPEVTCVVVDVSHEDPEVKFNWYVDGVEVHNAKTKPREEQYNSTYRVVSVLTVLHQDWLNGKEYKCKVSNKALGAPIEKTISKAKGQPREPQVYTLPPSRDELTKNQVSLTCLVKGFYPSDIAVEWESNGQPENNYKTTPPVLDSDGSFFLYSKLTVDKSRWQQGNVFSCSVMHEALHNHYTQKSLSLSPG

SEQ ID NO: 414 - protein, 979 aa, synthetic construct
  REGION 1..979: note = ACE2-740/208/knob/PGLALA/313
QSTIEEQAKTFLDFFDSQAEDLFYQSSLASWNYNTNITEENVQNMNNAGDKWSAFLKEQSTLAQMYPLQEIQNLTVKLQLQALQQNGSSVLSEDKSKRLNTILNTMSTIYSTGKVCNPDNPQECLLLEPGLNEIMANSLDYNERLWAWESWRSEVGKQLRPLYEEYVVLKNEMARANHYEDYGDYWRGDYEVNGVDGYDYSRGQLIEDVEHTFEEIKPLYEHLHAYVRAKLMNAYPSYISPIGCLPAHLLGDMWGRFWTNLYSLTVPFGQKPNIDVTDAMVDQAWDAQRIFKEAEKFFVSVGLPNMTQGFWENSMLTDPGNVQKAVCHPTAWDLGKGDFRILMCTKVTMDDFLTAHHEMGHIQYDMAYAAQPFLLRNGANEGFHEAVGEIMSLSAATPKHLKSIGLLSPDFQEDNETEINFLLKQALTIVGTLPFTYMLEKWRWMVFKGEIPKDQWMKKWWEMKREIVGVVEPVPHDETYCDPASLFHVSNDYSFIRYYTRTLYQFQFQEALCQAAKHEGPLHKCDISNSTEAGQKLFNMLRLGKSEPWTLALENVVGAKNMNVRPLLNYFEPLFTWLKDQNKNSFVGWSTDWSPYADQSIKVRISLKSALGDKAYEWNDNEMYLFRSSVAYAMRQYFLKVKNQMILFGEEDVRVANLKPRISFNFFVTAPKNVSDIIPRTEVEKAIRMSRSRINDAFRLNDNSLEFLGIQPTLGPPNQPPVSTSTSPTRSMAPGAVHLPQPVSTRSQHTQPTDKTHTCPPCPAPEAAGGPSVFLFPPKPKDTLMISRTPEVTCVVVDVSHEDPEVKFNWYVDGVEVHNAKTKPREEQYNSTYRVVSVLTVLHQDWLNGKEYKCKVSNKALGAPIEKTISKAKGQPREPQVYTLPPCRDELTKNQVSLWCLVKGFYPSDIAVEWESNGQPENNYKTTPPVLDSDGSFFLYSKLTVDKSRWQQGNVFSCSVMHEALHNHYTQKSLSLSPG

SEQ ID NO: 415 - protein, 979 aa, synthetic construct
  REGION 1..979: note = ACE2-740/208/knob/PGLALA/R273A/313
QSTIEEQAKTFLDFFDSQAEDLFYQSSLASWNYNTNITEENVQNMNNAGDKWSAFLKEQSTLAQMYPLQEIQNLTVKLQLQALQQNGSSVLSEDKSKRLNTILNTMSTIYSTGKVCNPDNPQECLLLEPGLNEIMANSLDYNERLWAWESWRSEVGKQLRPLYEEYVVLKNEMARANHYEDYGDYWRGDYEVNGVDGYDYSRGQLIEDVEHTFEEIKPLYEHLHAYVRAKLMNAYPSYISPIGCLPAHLLGDMWGAFWTNLYSLTVPFGQKPNIDVTDAMVDQAWDAQRIFKEAEKFFVSVGLPNMTQGFWENSMLTDPGNVQKAVCHPTAWDLGKGDFRILMCTKVTMDDFLTAHHEMGHIQYDMAYAAQPFLLRNGANEGFHEAVGEIMSLSAATPKHLKSIGLLSPDFQEDNETEINFLLKQALTIVGTLPFTYMLEKWRWMVFKGEIPKDQWMKKWWEMKREIVGVVEPVPHDETYCDPASLFHVSNDYSFIRYYTRTLYQFQFQEALCQAAKHEGPLHKCDISNSTEAGQKLFNMLRLGKSEPWTLALENVVGAKNMNVRPLLNYFEPLFTWLKDQNKNSFVGWSTDWSPYADQSIKVRISLKSALGDKAYEWNDNEMYLFRSSVAYAMRQYFLKVKNQMILFGEEDVRVANLKPRISFNFFVTAPKNVSDIIPRTEVEKAIRMSRSRINDAFRLNDNSLEFLGIQPTLGPPNQPPVSTSTSPTRSMAPGAVHLPQPVSTRSQHTQPTDKTHTCPPCPAPEAAGGPSVFLFPPKPKDTLMISRTPEVTCVVVDVSHEDPEVKFNWYVDGVEVHNAKTKPREEQYNSTYRVVSVLTVLHQDWLNGKEYKCKVSNKALGAPIEKTISKAKGQPREPQVYTLPPCRDELTKNQVSLWCLVKGFYPSDIAVEWESNGQPENNYKTTPPVLDSDGSFFLYSKLTVDKSRWQQGNVFSCSVMHEALHNHYTQKSLSLSPG

SEQ ID NO: 416 - protein, 979 aa, synthetic construct
  REGION 1..979: note = ACE2-740/208/knob/PGLALA/R273G/313
QSTIEEQAKTFLDFFDSQAEDLFYQSSLASWNYNTNITEENVQNMNNAGDKWSAFLKEQSTLAQMYPLQEIQNLTVKLQLQALQQNGSSVLSEDKSKRLNTILNTMSTIYSTGKVCNPDNPQECLLLEPGLNEIMANSLDYNERLWAWESWRSEVGKQLRPLYEEYVVLKNEMARANHYEDYGDYWRGDYEVNGVDGYDYSRGQLIEDVEHTFEEIKPLYEHLHAYVRAKLMNAYPSYISPIGCLPAHLLGDMWGGFWTNLYSLTVPFGQKPNIDVTDAMVDQAWDAQRIFKEAEKFFVSVGLPNMTQGFWENSMLTDPGNVQKAVCHPTAWDLGKGDFRILMCTKVTMDDFLTAHHEMGHIQYDMAYAAQPFLLRNGANEGFHEAVGEIMSLSAATPKHLKSIGLLSPDFQEDNETEINFLLKQALTIVGTLPFTYMLEKWRWMVFKGEIPKDQWMKKWWEMKREIVGVVEPVPHDETYCDPASLFHVSNDYSFIRYYTRTLYQFQFQEALCQAAKHEGPLHKCDISNSTEAGQKLFNMLRLGKSEPWTLALENVVGAKNMNVRPLLNYFEPLFTWLKDQNKNSFVGWSTDWSPYADQSIKVRISLKSALGDKAYEWNDNEMYLFRSSVAYAMRQYFLKVKNQMILFGEEDVRVANLKPRISFNFFVTAPKNVSDIIPRTEVEKAIRMSRSRINDAFRLNDNSLEFLGIQPTLGPPNQPPVSTSTSPTRSMAPGAVHLPQPVSTRSQHTQPTDKTHTCPPCPAPEAAGGPSVFLFPPKPKDTLMISRTPEVTCVVVDVSHEDPEVKFNWYVDGVEVHNAKTKPREEQYNSTYRVVSVLTVLHQDWLNGKEYKCKVSNKALGAPIEKTISKAKGQPREPQVYTLPPCRDELTKNQVSLWCLVKGFYPSDIAVEWESNGQPENNYKTTPPVLDSDGSFFLYSKLTVDKSRWQQGNVFSCSVMHEALHNHYTQKSLSLSPG

SEQ ID NO: 417 - protein, 979 aa, synthetic construct
  REGION 1..979: note = ACE2-740/208/knob/PGLALA/R273V/313
QSTIEEQAKTFLDFFDSQAEDLFYQSSLASWNYNTNITEENVQNMNNAGDKWSAFLKEQSTLAQMYPLQEIQNLTVKLQLQALQQNGSSVLSEDKSKRLNTILNTMSTIYSTGKVCNPDNPQECLLLEPGLNEIMANSLDYNERLWAWESWRSEVGKQLRPLYEEYVVLKNEMARANHYEDYGDYWRGDYEVNGVDGYDYSRGQLIEDVEHTFEEIKPLYEHLHAYVRAKLMNAYPSYISPIGCLPAHLLGDMWGVFWTNLYSLTVPFGQKPNIDVTDAMVDQAWDAQRIFKEAEKFFVSVGLPNMTQGFWENSMLTDPGNVQKAVCHPTAWDLGKGDFRILMCTKVTMDDFLTAHHEMGHIQYDMAYAAQPFLLRNGANEGFHEAVGEIMSLSAATPKHLKSIGLLSPDFQEDNETEINFLLKQALTIVGTLPFTYMLEKWRWMVFKGEIPKDQWMKKWWEMKREIVGVVEPVPHDETYCDPASLFHVSNDYSFIRYYTRTLYQFQFQEALCQAAKHEGPLHKCDISNSTEAGQKLFNMLRLGKSEPWTLALENVVGAKNMNVRPLLNYFEPLFTWLKDQNKNSFVGWSTDWSPYADQSIKVRISLKSALGDKAYEWNDNEMYLFRSSVAYAMRQYFLKVKNQMILFGEEDVRVANLKPRISFNFFVTAPKNVSDIIPRTEVEKAIRMSRSRINDAFRLNDNSLEFLGIQPTLGPPNQPPVSTSTSPTRSMAPGAVHLPQPVSTRSQHTQPTDKTHTCPPCPAPEAAGGPSVFLFPPKPKDTLMISRTPEVTCVVVDVSHEDPEVKFNWYVDGVEVHNAKTKPREEQYNSTYRVVSVLTVLHQDWLNGKEYKCKVSNKALGAPIEKTISKAKGQPREPQVYTLPPCRDELTKNQVSLWCLVKGFYPSDIAVEWESNGQPENNYKTTPPVLDSDGSFFLYSKLTVDKSRWQQGNVFSCSVMHEALHNHYTQKSLSLSPG

SEQ ID NO: 418 - protein, 979 aa, synthetic construct
  REGION 1..979: note = ACE2-740/208/knob/PGLALA/H378A/313
QSTIEEQAKTFLDFFDSQAEDLFYQSSLASWNYNTNITEENVQNMNNAGDKWSAFLKEQSTLAQMYPLQEIQNLTVKLQLQALQQNGSSVLSEDKSKRLNTILNTMSTIYSTGKVCNPDNPQECLLLEPGLNEIMANSLDYNERLWAWESWRSEVGKQLRPLYEEYVVLKNEMARANHYEDYGDYWRGDYEVNGVDGYDYSRGQLIEDVEHTFEEIKPLYEHLHAYVRAKLMNAYPSYISPIGCLPAHLLGDMWGRFWTNLYSLTVPFGQKPNIDVTDAMVDQAWDAQRIFKEAEKFFVSVGLPNMTQGFWENSMLTDPGNVQKAVCHPTAWDLGKGDFRILMCTKVTMDDFLTAHHEMGAIQYDMAYAAQPFLLRNGANEGFHEAVGEIMSLSAATPKHLKSIGLLSPDFQEDNETEINFLLKQALTIVGTLPFTYMLEKWRWMVFKGEIPKDQWMKKWWEMKREIVGVVEPVPHDETYCDPASLFHVSNDYSFIRYYTRTLYQFQFQEALCQAAKHEGPLHKCDISNSTEAGQKLFNMLRLGKSEPWTLALENVVGAKNMNVRPLLNYFEPLFTWLKDQNKNSFVGWSTDWSPYADQSIKVRISLKSALGDKAYEWNDNEMYLFRSSVAYAMRQYFLKVKNQMILFGEEDVRVANLKPRISFNFFVTAPKNVSDIIPRTEVEKAIRMSRSRINDAFRLNDNSLEFLGIQPTLGPPNQPPVSTSTSPTRSMAPGAVHLPQPVSTRSQHTQPTDKTHTCPPCPAPEAAGGPSVFLFPPKPKDTLMISRTPEVTCVVVDVSHEDPEVKFNWYVDGVEVHNAKTKPREEQYNSTYRVVSVLTVLHQDWLNGKEYKCKVSNKALGAPIEKTISKAKGQPREPQVYTLPPCRDELTKNQVSLWCLVKGFYPSDIAVEWESNGQPENNYKTTPPVLDSDGSFFLYSKLTVDKSRWQQGNVFSCSVMHEALHNHYTQKSLSLSPG

SEQ ID NO: 419 - protein, 979 aa, synthetic construct
  REGION 1..979: note = ACE2-740/208/knob/PGLALA/E402A/313
QSTIEEQAKTFLDFFDSQAEDLFYQSSLASWNYNTNITEENVQNMNNAGDKWSAFLKEQSTLAQMYPLQEIQNLTVKLQLQALQQNGSSVLSEDKSKRLNTILNTMSTIYSTGKVCNPDNPQECLLLEPGLNEIMANSLDYNERLWAWESWRSEVGKQLRPLYEEYVVLKNEMARANHYEDYGDYWRGDYEVNGVDGYDYSRGQLIEDVEHTFEEIKPLYEHLHAYVRAKLMNAYPSYISPIGCLPAHLLGDMWGRFWTNLYSLTVPFGQKPNIDVTDAMVDQAWDAQRIFKEAEKFFVSVGLPNMTQGFWENSMLTDPGNVQKAVCHPTAWDLGKGDFRILMCTKVTMDDFLTAHHEMGHIQYDMAYAAQPFLLRNGANEGFHAAVGEIMSLSAATPKHLKSIGLLSPDFQEDNETEINFLLKQALTIVGTLPFTYMLEKWRWMVFKGEIPKDQWMKKWWEMKREIVGVVEPVPHDETYCDPASLFHVSNDYSFIRYYTRTLYQFQFQEALCQAAKHEGPLHKCDISNSTEAGQKLFNMLRLGKSEPWTLALENVVGAKNMNVRPLLNYFEPLFTWLKDQNKNSFVGWSTDWSPYADQSIKVRISLKSALGDKAYEWNDNEMYLFRSSVAYAMRQYFLKVKNQMILFGEEDVRVANLKPRISFNFFVTAPKNVSDIIPRTEVEKAIRMSRSRINDAFRLNDNSLEFLGIQPTLGPPNQPPVSTSTSPTRSMAPGAVHLPQPVSTRSQHTQPTDKTHTCPPCPAPEAAGGPSVFLFPPKPKDTLMISRTPEVTCVVVDVSHEDPEVKFNWYVDGVEVHNAKTKPREEQYNSTYRVVSVLTVLHQDWLNGKEYKCKVSNKALGAPIEKTISKAKGQPREPQVYTLPPCRDELTKNQVSLWCLVKGFYPSDIAVEWESNGQPENNYKTTPPVLDSDGSFFLYSKLTVDKSRWQQGNVFSCSVMHEALHNHYTQKSLSLSPG

SEQ ID NO: 420 - protein, 221 aa, synthetic construct; identical to SEQ ID NO: 73
  REGION 1..221: note = Fc6CC-hole/PGLALA/RF

SEQ ID NO: 421 - protein, 110 aa, synthetic construct
  REGION 1..110: note = REGN10987_VL (PDB:6XDG_A)
QSALTQPASVSGSPGQSITISCTGTSSDVGGYNYVSWYQQHPGKAPKLMIYDVSKRPSGVSNRFSGSKSGNTASLTISGLQSEDEADYYCNSLTSISTWVFGGGTKLTVL

SEQ ID NO: 422 - protein, 120 aa, synthetic construct
  REGION 1..120: note = REGN10987_VH (PDB:6XDG_C)
QVQLVESGGGVVQPGRSLRLSCAASGFTFSNYAMYWVRQAPGKGLEWVAVISYDGSNKYYADSVKGRFTISRDNSKNTLYLQMNSLRTEDTAVYYCASGSDYGDYLLVYWGQGTLVTVSS

SEQ ID NO: 423 - protein, 216 aa, synthetic construct
  REGION 1..216: note = REGN10987_VL-CL
QSALTQPASVSGSPGQSITISCTGTSSDVGGYNYVSWYQQHPGKAPKLMIYDVSKRPSGVSNRFSGSKSGNTASLTISGLQSEDEADYYCNSLTSISTWVFGGGTKLTVLGQPKAAPSVTLFPPSSEELQANKATLVCLISDFYPGAVTVAWKADSSPVKAGVETTTPSKQSNNKYAASSYLSLTPEQWKSHRSYSCQVTHEGSTVEKTVAPTECS

SEQ ID NO: 424 - protein, 449 aa, synthetic construct
  REGION 1..449: note = REGN10987_VH-CH
QVQLVESGGGVVQPGRSLRLSCAASGFTFSNYAMYWVRQAPGKGLEWVAVISYDGSNKYYADSVKGRFTISRDNSKNTLYLQMNSLRTEDTAVYYCASGSDYGDYLLVYWGQGTLVTVSSASTKGPSVFPLAPSSKSTSGGTAALGCLVKDYFPEPVTVSWNSGALTSGVHTFPAVLQSSGLYSLSSVVTVPSSSLGTQTYICNVNHKPSNTKVDKKVEPKSCDKTHTCPPCPAPELLGGPSVFLFPPKPKDTLMISRTPEVTCVVVDVSHEDPEVKFNWYVDGVEVHNAKTKPREEQYNSTYRVVSVLTVLHQDWLNGKEYKCKVSNKALPAPIEKTISKAKGQPREPQVYTLPPSRDELTKNQVSLTCLVKGFYPSDIAVEWESNGQPENNYKTTPPVLDSDGSFFLYSKLTVDKSRWQQGNVFSCSVMHEALHNHYTQKSLSLSPG

SEQ ID NO: 425 - protein, 449 aa, synthetic construct
  REGION 1..449: note = REGN10987_VH-CH/hole/PGLALA/RF/N82aS
QVQLVESGGGVVQPGRSLRLSCAASGFTFSNYAMYWVRQAPGKGLEWVAVISYDGSNKYYADSVKGRFTISRDNSKNTLYLQMSSLRTEDTAVYYCASGSDYGDYLLVYWGQGTLVTVSSASTKGPSVFPLAPSSKSTSGGTAALGCLVKDYFPEPVTVSWNSGALTSGVHTFPAVLQSSGLYSLSSVVTVPSSSLGTQTYICNVNHKPSNTKVDKKVEPKSCDKTHTCPPCPAPEAAGGPSVFLFPPKPKDTLMISRTPEVTCVVVDVSHEDPEVKFNWYVDGVEVHNAKTKPREEQYNSTYRVVSVLTVLHQDWLNGKEYKCKVSNKALGAPIEKTISKAKGQPREPQVCTLPPSRDELTKNQVSLSCAVKGFYPSDIAVEWESNGQPENNYKTTPPVLDSDGSFFLVSKLTVDKSRWQQGNVFSCSVMHEALHNRFTQKSLSLSPG

SEQ ID NO: 426 - protein, 605 aa, synthetic construct
  REGION 1..605: note = REGN10987_VH-CH/CLD201/knob/PGLALA
QVQLVESGGGVVQPGRSLRLSCAASGFTFSNYAMYWVRQAPGKGLEWVAVISYDGSNKYYADSVKGRFTISRDNSKNTLYLQMNSLRTEDTAVYYCASGSDYGDYLLVYWGQGTLVTVSSASTKGPSVFPLAPSSKSTSGGTAALGCLVKDYFPEPVTVSWNSGALTSGVHTFPAVLQSSGLYSLSSVVTVPSSSLGTQTYICNVNHKPSNTKVDKKVEPKSCTDWSPYADQSIKVRISLKSALGDKAYEWNDNEMYLFRSSVAYAMRQYFLKVKNQMILFGEEDVRVANLKPRISFNFFVTAPKNVSDIIPRTEVEKAIRMSRSRINDAFRLNDNSLEFLGIQPTLGPPNQPPVSTSTSPTRSMAPGAVHLPQPVSTRDKTHTCPPCPAPEAAGGPSVFLFPPKPKDTLMISRTPEVTCVVVDVSHEDPEVKFNWYVDGVEVHNAKTKPREEQYNSTYRVVSVLTVLHQDWLNGKEYKCKVSNKALGAPIEKTISKAKGQPREPQVYTLPPCRDELTKNQVSLWCLVKGFYPSDIAVEWESNGQPENNYKTTPPVLDSDGSFFLYSKLTVDKSRWQQGNVFSCSVMHEALHNHYTQKSLSLSPG

SEQ ID NO: 427 - protein, 107 aa, synthetic construct
  REGION 1..107: note = REGN10933_VK (PDB:6XDG_D)
DIQMTQSPSSLSASVGDRVTITCQASQDITNYLNWYQQKPGKAPKLLIYAASNLETGVPSRFSGSGSGTDFTFTISGLQPEDIATYYCQQYDNLPLTFGGGTKVEIK

SEQ ID NO: 428 - protein, 120 aa, synthetic construct
  REGION 1..120: note = REGN10933_VH (PDB:6XDG_B)
QVQLVESGGGLVKPGGSLRLSCAASGFTFSDYYMSWIRQAPGKGLEWVSYITYSGSTIYYADSVKGRFTISRDNAKSSLYLQMNSLRAEDTAVYYCARDRGTTMVPFDYWGQGTLVTVSS

SEQ ID NO: 429 - protein, 214 aa, synthetic construct
  REGION 1..214: note = REGN10933_VK-CK
DIQMTQSPSSLSASVGDRVTITCQASQDITNYLNWYQQKPGKAPKLLIYAASNLETGVPSRFSGSGSGTDFTFTISGLQPEDIATYYCQQYDNLPLTFGGGTKVEIKRTVAAPSVFIFPPSDEQLKSGTASVVCLLNNFYPREAKVQWKVDNALQSGNSQESVTEQDSKDSTYSLSSTLTLSKADYEKHKVYACEVTHQGLSSPVTKSFNRGEC

SEQ ID NO: 430 - protein, 449 aa, synthetic construct
  REGION 1..449: note = REGN10933_VH-CH
QVQLVESGGGLVKPGGSLRLSCAASGFTFSDYYMSWIRQAPGKGLEWVSYITYSGSTIYYADSVKGRFTISRDNAKSSLYLQMNSLRAEDTAVYYCARDRGTTMVPFDYWGQGTLVTVSSASTKGPSVFPLAPSSKSTSGGTAALGCLVKDYFPEPVTVSWNSGALTSGVHTFPAVLQSSGLYSLSSVVTVPSSSLGTQTYICNVNHKPSNTKVDKKVEPKSCDKTHTCPPCPAPELLGGPSVFLFPPKPKDTLMISRTPEVTCVVVDVSHEDPEVKFNWYVDGVEVHNAKTKPREEQYNSTYRVVSVLTVLHQDWLNGKEYKCKVSNKALPAPIEKTISKAKGQPREPQVYTLPPSRDELTKNQVSLTCLVKGFYPSDIAVEWESNGQPENNYKTTPPVLDSDGSFFLYSKLTVDKSRWQQGNVFSCSVMHEALHNHYTQKSLSLSPG

SEQ ID NO: 431 - protein, 449 aa, synthetic construct
  REGION 1..449: note = REGN10933_VH-CH/hole/PGLALA/RF/N82aS
QVQLVESGGGLVKPGGSLRLSCAASGFTFSDYYMSWIRQAPGKGLEWVSYITYSGSTIYYADSVKGRFTISRDNAKSSLYLQMSSLRAEDTAVYYCARDRGTTMVPFDYWGQGTLVTVSSASTKGPSVFPLAPSSKSTSGGTAALGCLVKDYFPEPVTVSWNSGALTSGVHTFPAVLQSSGLYSLSSVVTVPSSSLGTQTYICNVNHKPSNTKVDKKVEPKSCDKTHTCPPCPAPEAAGGPSVFLFPPKPKDTLMISRTPEVTCVVVDVSHEDPEVKFNWYVDGVEVHNAKTKPREEQYNSTYRVVSVLTVLHQDWLNGKEYKCKVSNKALGAPIEKTISKAKGQPREPQVCTLPPSRDELTKNQVSLSCAVKGFYPSDIAVEWESNGQPENNYKTTPPVLDSDGSFFLVSKLTVDKSRWQQGNVFSCSVMHEALHNRFTQKSLSLSPG

SEQ ID NO: 432 - protein, 605 aa, synthetic construct
  REGION 1..605: note = REGN10933_VH-CH/CLD201/knob/PGLALA
QVQLVESGGGLVKPGGSLRLSCAASGFTFSDYYMSWIRQAPGKGLEWVSYITYSGSTIYYADSVKGRFTISRDNAKSSLYLQMNSLRAEDTAVYYCARDRGTTMVPFDYWGQGTLVTVSSASTKGPSVFPLAPSSKSTSGGTAALGCLVKDYFPEPVTVSWNSGALTSGVHTFPAVLQSSGLYSLSSVVTVPSSSLGTQTYICNVNHKPSNTKVDKKVEPKSCTDWSPYADQSIKVRISLKSALGDKAYEWNDNEMYLFRSSVAYAMRQYFLKVKNQMILFGEEDVRVANLKPRISFNFFVTAPKNVSDIIPRTEVEKAIRMSRSRINDAFRLNDNSLEFLGIQPTLGPPNQPPVSTSTSPTRSMAPGAVHLPQPVSTRDKTHTCPPCPAPEAAGGPSVFLFPPKPKDTLMISRTPEVTCVVVDVSHEDPEVKFNWYVDGVEVHNAKTKPREEQYNSTYRVVSVLTVLHQDWLNGKEYKCKVSNKALGAPIEKTISKAKGQPREPQVYTLPPCRDELTKNQVSLWCLVKGFYPSDIAVEWESNGQPENNYKTTPPVLDSDGSFFLYSKLTVDKSRWQQGNVFSCSVMHEALHNHYTQKSLSLSPG

SEQ ID NO: 433 - protein, 107 aa, synthetic construct [sequence omitted]

SEQ ID NO: 434 - protein, 127 aa, synthetic construct [sequence omitted]

SEQ ID NO: 435 - protein, 214 aa, synthetic construct
  REGION 1..214: note = S309_VK-CK
EIVLTQSPGTLSLSPGERATLSCRASQTVSSTSLAWYQQKPGQAPRLLIYGASSRATGIPDRFSGSGSGTDFTLTISRLEPEDFAVYYCQQHDTSLTFGGGTKVEIKRTVAAPSVFIFPPSDEQLKSGTASVVCLLNNFYPREAKVQWKVDNALQSGNSQESVTEQDSKDSTYSLSSTLTLSKADYEKHKVYACEVTHQGLSSPVTKSFNRGEC

SEQ ID NO: 436 - protein, 456 aa, synthetic construct
  REGION 1..456: note = S309_VH-CH
QVQLVQSGAEVKKPGASVKVSCKASGYPFTSYGISWVRQAPGQGLEWMGWISTYNGNTNYAQKFQGRVTMTTDTSTTTGYMELRRLRSDDTAVYYCARDYTRGAWFGESLIGGFDNWGQGTLVTVSSASTKGPSVFPLAPSSKSTSGGTAALGCLVKDYFPEPVTVSWNSGALTSGVHTFPAVLQSSGLYSLSSVVTVPSSSLGTQTYICNVNHKPSNTKVDKKVEPKSCDKTHTCPPCPAPELLGGPSVFLFPPKPKDTLMISRTPEVTCVVVDVSHEDPEVKFNWYVDGVEVHNAKTKPREEQYNSTYRVVSVLTVLHQDWLNGKEYKCKVSNKALPAPIEKTISKAKGQPREPQVYTLPPSRDELTKNQVSLTCLVKGFYPSDIAVEWESNGQPENNYKTTPPVLDSDGSFFLYSKLTVDKSRWQQGNVFSCSVMHEALHNHYTQKSLSLSPG

SEQ ID NO: 437 - protein, 456 aa, synthetic construct
  REGION 1..456: note = S309_VH-CH/hole/PGLALA/RF
QVQLVQSGAEVKKPGASVKVSCKASGYPFTSYGISWVRQAPGQGLEWMGWISTYNGNTNYAQKFQGRVTMTTDTSTTTGYMELRRLRSDDTAVYYCARDYTRGAWFGESLIGGFDNWGQGTLVTVSSASTKGPSVFPLAPSSKSTSGGTAALGCLVKDYFPEPVTVSWNSGALTSGVHTFPAVLQSSGLYSLSSVVTVPSSSLGTQTYICNVNHKPSNTKVDKKVEPKSCDKTHTCPPCPAPEAAGGPSVFLFPPKPKDTLMISRTPEVTCVVVDVSHEDPEVKFNWYVDGVEVHNAKTKPREEQYNSTYRVVSVLTVLHQDWLNGKEYKCKVSNKALGAPIEKTISKAKGQPREPQVCTLPPSRDELTKNQVSLSCAVKGFYPSDIAVEWESNGQPENNYKTTPPVLDSDGSFFLVSKLTVDKSRWQQGNVFSCSVMHEALHNRFTQKSLSLSPG

SEQ ID NO: 438 - protein, 612 aa, synthetic construct
  REGION 1..612: note = S309_VH-CH/CLD201/knob/PGLALA
QVQLVQSGAEVKKPGASVKVSCKASGYPFTSYGISWVRQAPGQGLEWMGWISTYNGNTNYAQKFQGRVTMTTDTSTTTGYMELRRLRSDDTAVYYCARDYTRGAWFGESLIGGFDNWGQGTLVTVSSASTKGPSVFPLAPSSKSTSGGTAALGCLVKDYFPEPVTVSWNSGALTSGVHTFPAVLQSSGLYSLSSVVTVPSSSLGTQTYICNVNHKPSNTKVDKKVEPKSCTDWSPYADQSIKVRISLKSALGDKAYEWNDNEMYLFRSSVAYAMRQYFLKVKNQMILFGEEDVRVANLKPRISFNFFVTAPKNVSDIIPRTEVEKAIRMSRSRINDAFRLNDNSLEFLGIQPTLGPPNQPPVSTSTSPTRSMAPGAVHLPQPVSTRDKTHTCPPCPAPEAAGGPSVFLFPPKPKDTLMISRTPEVTCVVVDVSHEDPEVKFNWYVDGVEVHNAKTKPREEQYNSTYRVVSVLTVLHQDWLNGKEYKCKVSNKALGAPIEKTISKAKGQPREPQVYTLPPCRDELTKNQVSLWCLVKGFYPSDIAVEWESNGQPENNYKTTPPVLDSDGSFFLYSKLTVDKSRWQQGNVFSCSVMHEALHNHYTQKSLSLSPG

SEQ ID NO: 439 - protein, 107 aa, synthetic construct
  REGION 1..107: note = Bamlanivimab_11876_VK
DIQMTQSPSSLSASVGDRVTITCRASQSISSYLSWYQQKPGKAPKLLIYAASSLQSGVPSRFSGSGSGTDFTLTITSLQPEDFATYYCQQSYSTPRTFGQGTKVEIK

SEQ ID NO: 440 - protein, 125 aa, synthetic construct
  REGION 1..125: note = Bamlanivimab_11876_VH
QVQLVQSGAEVKKPGSSVKVSCKASGGTFSNYAISWVRQAPGQGLEWMGRIIPILGIANYAQKFQGRVTITADKSTSTAYMELSSLRSEDTAVYYCARGYYEARHYYYYYAMDVWGQGTAVTVSS

SEQ ID NO: 441 - protein, 214 aa, synthetic construct
  REGION 1..214: note = Bamlanivimab_11876_VK-CK
DIQMTQSPSSLSASVGDRVTITCRASQSISSYLSWYQQKPGKAPKLLIYAASSLQSGVPSRFSGSGSGTDFTLTITSLQPEDFATYYCQQSYSTPRTFGQGTKVEIKRTVAAPSVFIFPPSDEQLKSGTASVVCLLNNFYPREAKVQWKVDNALQSGNSQESVTEQDSKDSTYSLSSTLTLSKADYEKHKVYACEVTHQGLSSPVTKSFNRGEC

SEQ ID NO: 442 - protein, 454 aa, synthetic construct
  REGION 1..454: note = Bamlanivimab_11876_VH-CH
QVQLVQSGAEVKKPGSSVKVSCKASGGTFSNYAISWVRQAPGQGLEWMGRIIPILGIANYAQKFQGRVTITADKSTSTAYMELSSLRSEDTAVYYCARGYYEARHYYYYYAMDVWGQGTAVTVSSASTKGPSVFPLAPSSKSTSGGTAALGCLVKDYFPEPVTVSWNSGALTSGVHTFPAVLQSSGLYSLSSVVTVPSSSLGTQTYICNVNHKPSNTKVDKRVEPKSCDKTHTCPPCPAPELLGGPSVFLFPPKPKDTLMISRTPEVTCVVVDVSHEDPEVKFNWYVDGVEVHNAKTKPREEQYNSTYRVVSVLTVLHQDWLNGKEYKCKVSNKALPAPIEKTISKAKGQPREPQVYTLPPSREEMTKNQVSLTCLVKGFYPSDIAVEWESNGQPENNYKTTPPVLDSDGSFFLYSKLTVDKSRWQQGNVFSCSVMHEALHNHYTQKSLSLSPG

SEQ ID NO: 443 - protein, 109 aa, synthetic construct
  REGION 1..109: note = Etesevimab_11873_VK
DIVMTQSPSSLSASVGDRVTITCRASQSISRYLNWYQQKPGKAPKLLIYAASSLQSGVPSRFSGSGSGTDFTLTISSLQPEDFATYYCQQSYSTPPEYTFGQGTKLEIK

SEQ ID NO: 444 - protein, 119 aa, synthetic construct
  REGION 1..119: note = Etesevimab_11873_VH
EVQLVESGGGLVQPGGSLRLSCAASGFTVSSNYMSWVRQAPGKGLEWVSVIYSGGSTFYADSVKGRFTISRDNSMNTLFLQMNSLRAEDTAVYYCARVLPMYGDYLDYWGQGTLVTVSS

SEQ ID NO: 445 - protein, 216 aa, synthetic construct
  REGION 1..216: note = Etesevimab_11873_VK-CK
DIVMTQSPSSLSASVGDRVTITCRASQSISRYLNWYQQKPGKAPKLLIYAASSLQSGVPSRFSGSGSGTDFTLTISSLQPEDFATYYCQQSYSTPPEYTFGQGTKLEIKRTVAAPSVFIFPPSDEQLKSGTASVVCLLNNFYPREAKVQWKVDNALQSGNSQESVTEQDSKDSTYSLSSTLTLSKADYEKHKVYACEVTHQGLSSPVTKSFNRGEC

SEQ ID NO: 446 - protein, 448 aa, synthetic construct
  REGION 1..448: note = Etesevimab_11873_VH-CH
EVQLVESGGGLVQPGGSLRLSCAASGFTVSSNYMSWVRQAPGKGLEWVSVIYSGGSTFYADSVKGRFTISRDNSMNTLFLQMNSLRAEDTAVYYCARVLPMYGDYLDYWGQGTLVTVSSASTKGPSVFPLAPSSKSTSGGTAALGCLVKDYFPEPVTVSWNSGALTSGVHTFPAVLQSSGLYSLSSVVTVPSSSLGTQTYICNVNHKPSNTKVDKRVEPKSCDKTHTCPPCPAPEAAGGPSVFLFPPKPKDTLMISRTPEVTCVVVDVSHEDPEVKFNWYVDGVEVHNAKTKPREEQYNSTYRVVSVLTVLHQDWLNGKEYKCKVSNKALPAPIEKTISKAKGQPREPQVYTLPPSREEMTKNQVSLTCLVKGFYPSDIAVEWESNGQPENNYKTTPPVLDSDGSFFLYSKLTVDKSRWQQGNVFSCSVMHEALHNHYTQKSLSLSPG

SEQ ID NO: 447 - protein, 112 aa, synthetic construct
  REGION 1..112: note = Cilgavimab_11777_VK
DIVMTQSPDSLAVSLGERATINCKSSQSVLYSSNNKNYLAWYQQKPGQPPKLLMYWASTRESGVPDRFSGSGSGAEFTLTISSLQAEDVAIYYCQQYYSTLTFGGGTKVEIK

SEQ ID NO: 448 - protein, 131 aa, synthetic construct
  REGION 1..131: note = Cilgavimab_11777_VH
EVQLVESGGGLVKPGGSLRLSCAASGFTFRDVWMSWVRQAPGKGLEWVGRIKSKIDGGTTDYAAPVKGRFTISRDDSKNTLYLQMNSLKTEDTAVYYCTTAGSYYYDTVGPGLPEGKFDYWGQGTLVTVSS

SEQ ID NO: 449 - protein, 219 aa, synthetic construct
  REGION 1..219: note = Cilgavimab_11777_VK-CK
DIVMTQSPDSLAVSLGERATINCKSSQSVLYSSNNKNYLAWYQQKPGQPPKLLMYWASTRESGVPDRFSGSGSGAEFTLTISSLQAEDVAIYYCQQYYSTLTFGGGTKVEIKRTVAAPSVFIFPPSDEQLKSGTASVVCLLNNFYPREAKVQWKVDNALQSGNSQESVTEQDSKDSTYSLSSTLTLSKADYEKHKVYACEVTHQGLSSPVTKSFNRGEC

SEQ ID NO: 450 - protein, 460 aa, synthetic construct
  REGION 1..460: note = Cilgavimab_11777_VH-CH
EVQLVESGGGLVKPGGSLRLSCAASGFTFRDVWMSWVRQAPGKGLEWVGRIKSKIDGGTTDYAAPVKGRFTISRDDSKNTLYLQMNSLKTEDTAVYYCTTAGSYYYDTVGPGLPEGKFDYWGQGTLVTVSSASTKGPSVFPLAPSSKSTSGGTAALGCLVKDYFPEPVTVSWNSGALTSGVHTFPAVLQSSGLYSLSSVVTVPSSSLGTQTYICNVNHKPSNTKVDKRVEPKSCDKTHTCPPCPAPEFEGGPSVFLFPPKPKDTLYITREPEVTCVVVDVSHEDPEVKFNWYVDGVEVHNAKTKPREEQYNSTYRVVSVLTVLHQDWLNGKEYKCKVSNKALPASIEKTISKAKGQPREPQVYTLPPSREEMTKNQVSLTCLVKGFYPSDIAVEWESNGQPENNYKTTPPVLDSDGSFFLYSKLTVDKSRWQQGNVFSCSVMHEALHNHYTQKSLSLSPG

SEQ ID NO: 451 - protein, 109 aa, synthetic construct
  REGION 1..109: note = Tixagevimab_11776_VK
EIVLTQSPGTLSLSPGERATLSCRASQSVSSSYLAWYQQKPGQAPRLLIYGASSRATGIPDRFSGSGSGTDFTLTISRLEPEDFAVYYCQHYGSSRGWTFGQGTKVEIK

SEQ ID NO: 452 - protein, 123 aa, synthetic construct
  REGION 1..123: note = Tixagevimab_11776_VH
QMQLVQSGPEVKKPGTSVKVSCKASGFTFMSSAVQWVRQARGQRLEWIGWIVIGSGNTNYAQKFQERVTITRDMSTSTAYMELSSLRSEDTAVYYCAAPYCSSISCNDGFDIWGQGTMVTVSS

SEQ ID NO: 453 - protein, 216 aa, synthetic construct
  REGION 1..216: note = Tixagevimab_11776_VK-CK
EIVLTQSPGTLSLSPGERATLSCRASQSVSSSYLAWYQQKPGQAPRLLIYGASSRATGIPDRFSGSGSGTDFTLTISRLEPEDFAVYYCQHYGSSRGWTFGQGTKVEIKRTVAAPSVFIFPPSDEQLKSGTASVVCLLNNFYPREAKVQWKVDNALQSGNSQESVTEQDSKDSTYSLSSTLTLSKADYEKHKVYACEVTHQGLSSPVTKSFNRGEC

SEQ ID NO: 454 - protein, 452 aa, synthetic construct
  REGION 1..452: note = Tixagevimab_11776_Vh-CH
QMQLVQSGPEVKKPGTSVKVSCKASGFTFMSSAVQWVRQARGQRLEWIGWIVIGSGNTNYAQKFQERVTITRDMSTSTAYMELSSLRSEDTAVYYCAAPYCSSISCNDGFDIWGQGTMVTVSSASTKGPSVFPLAPSSKSTSGGTAALGCLVKDYFPEPVTVSWNSGALTSGVHTFPAVLQSSGLYSLSSVVTVPSSSLGTQTYICNVNHKPSNTKVDKRVEPKSCDKTHTCPPCPAPEFEGGPSVFLFPPKPKDTLYITREPEVTCVVVDVSHEDPEVKFNWYVDGVEVHNAKTKPREEQYNSTYRVVSVLTVLHQDWLNGKEYKCKVSNKALPASIEKTISKAKGQPREPQVYTLPPSREEMTKNQVSLTCLVKGFYPSDIAVEWESNGQPENNYKTTPPVLDSDGSFFLYSKLTVDKSRWQQGNVFSCSVMHEALHNHYTQKSLSLSPG

SEQ ID NO: 455 - protein, 107 aa, synthetic construct [sequence omitted]

SEQ ID NO: 456 - protein, 127 aa, synthetic construct
  REGION 1..127: note = Sotrovimab_s309_VH
QVQLVQSGAEVKKPGASVKVSCKASGYPFTSYGISWVRQAPGQGLEWMGWISTYQGNTNYAQKFQGRVTMTTDTSTTTGYMELRRLRSDDTAVYYCARDYTRGAWFGESLIGGFDNWGQGTLVTVSS

SEQ ID NO: 457 - protein, 214 aa, synthetic construct; identical to SEQ ID NO: 435
  REGION 1..214: note = Sotrovimab_s309_VK-CK

SEQ ID NO: 458 - protein, 456 aa, synthetic construct
  REGION 1..456: note = Sotrovimab_s309_VH-CH
QVQLVQSGAEVKKPGASVKVSCKASGYPFTSYGISWVRQAPGQGLEWMGWISTYQGNTNYAQKFQGRVTMTTDTSTTTGYMELRRLRSDDTAVYYCARDYTRGAWFGESLIGGFDNWGQGTLVTVSSASTKGPSVFPLAPSSKSTSGGTAALGCLVKDYFPEPVTVSWNSGALTSGVHTFPAVLQSSGLYSLSSVVTVPSSSLGTQTYICNVNHKPSNTKVDKKVEPKSCDKTHTCPPCPAPELLGGPSVFLFPPKPKDTLMISRTPEVTCVVVDVSHEDPEVKFNWYVDGVEVHNAKTKPREEQYNSTYRVVSVLTVLHQDWLNGKEYKCKVSNKALPAPIEKTISKAKGQPREPQVYTLPPSRDELTKNQVSLTCLVKGFYPSDIAVEWESNGQPENNYKTTPPVLDSDGSFFLYSKLTVDKSRWQQGNVFSCSVLHEALHSHYTQKSLSLSPG

SEQ ID NO: 459 - protein, 110 aa, synthetic construct
  REGION 1..110: note = Regdanvimab_11883_VL
ELVLTQPPSVSAAPGQKVTISCSGSSSNIGNNYVSWYQQLPGTAPKLLIYDNNKRPSGIPDRFSGSKSGTSATLGITGLQTGDEADYYCGTWDSSLSAGVFGGGTELTVL

SEQ ID NO: 460 - protein, 128 aa, synthetic construct
  REGION 1..128: note = Regdanvimab_11883_VH
QITLKESGPTLVKPTQTLTLTCSFSGFSLSTSGVGVGWIRQPPGKALEWLALIDWDDNKYHTTSLKTRLTISKDTSKNQVVLTMTNMDPVDTATYYCARIPGFLRYRNRYYYYGMDVWGQGTTVTVSS

SEQ ID NO: 461 - protein, 216 aa, synthetic construct
  REGION 1..216: note = Regdanvimab_11883_VL-CL
ELVLTQPPSVSAAPGQKVTISCSGSSSNIGNNYVSWYQQLPGTAPKLLIYDNNKRPSGIPDRFSGSKSGTSATLGITGLQTGDEADYYCGTWDSSLSAGVFGGGTELTVLGQPKAAPSVTLFPPSSEELQANKATLVCLISDFYPGAVTVAWKADGSPVKAGVETTKPSKQSNNKYAASSYLSLTPEQWKSHRSYSCQVTHEGSTVEKTVAPTECS

SEQ ID NO: 462 - protein, 457 aa, synthetic construct
  REGION 1..457: note = Regdanvimab_11883_VH-CH
QITLKESGPTLVKPTQTLTLTCSFSGFSLSTSGVGVGWIRQPPGKALEWLALIDWDDNKYHTTSLKTRLTISKDTSKNQVVLTMTNMDPVDTATYYCARIPGFLRYRNRYYYYGMDVWGQGTTVTVSSASTKGPSVFPLAPSSKSTSGGTAALGCLVKDYFPEPVTVSWNSGALTSGVHTFPAVLQSSGLYSLSSVVTVPSSSLGTQTYICNVNHKPSNTKVDKRVEPKSCDKTHTCPPCPAPELLGGPSVFLFPPKPKDTLMISRTPEVTCVVVDVSHEDPEVKFNWYVDGVEVHNAKTKPREEQYNSTYRVVSVLTVLHQDWLNGKEYKCKVSNKALPAPIEKTISKAKGQPREPQVYTLPPSRDELTKNQVSLTCLVKGFYPSDIAVEWESNGQPENNYKTTPPVLDSDGSFFLYSKLTVDKSRWQQGNVFSCSVMHEALHNHYTQKSLSLSPG

SEQ ID NO: 463 - protein, 107 aa, synthetic construct
  REGION 1..107: note = B13A_VK
DIQMTQTTSSLSASLGDRVTISCRASQDISNYLNWYQQKPDGTVKLLIYYTSRLQSGVPSRFSGSGTGTDYSLTISNLEQEDIATYFCQQGNTLPWTFGGGTKLEIK

SEQ ID NO: 464 - protein, 121 aa, synthetic construct
  REGION 1..121: note = B13A_VH
QVQLQQSGAELVKPGASVKISCKASGYAFSNYWMNWVKQRPGKGLEWIGQIYPGDGDTNYNGNFKGKATLTADKSSSTAYIQLSSLTSEDSAVYFCGRGFIATVVEVFDHWGLGTTLTVSS

SEQ ID NO: 465 - protein, 214 aa, synthetic construct
  REGION 1..214: note = B13A_VK-CK
DIQMTQTTSSLSASLGDRVTISCRASQDISNYLNWYQQKPDGTVKLLIYYTSRLQSGVPSRFSGSGTGTDYSLTISNLEQEDIATYFCQQGNTLPWTFGGGTKLEIKRTVAAPSVFIFPPSDEQLKSGTASVVCLLNNFYPREAKVQWKVDNALQSGNSQESVTEQDSKDSTYSLSSTLTLSKADYEKHKVYACEVTHQGLSSPVTKSFNRGEC

SEQ ID NO: 466 - protein, 450 aa, synthetic construct
  REGION 1..450: note = B13A_VH-CH/PGLALA
QVQLQQSGAELVKPGASVKISCKASGYAFSNYWMNWVKQRPGKGLEWIGQIYPGDGDTNYNGNFKGKATLTADKSSSTAYIQLSSLTSEDSAVYFCGRGFIATVVEVFDHWGLGTTLTVSSASTKGPSVFPLAPSSKSTSGGTAALGCLVKDYFPEPVTVSWNSGALTSGVHTFPAVLQSSGLYSLSSVVTVPSSSLGTQTYICNVNHKPSNTKVDKKVEPKSCDKTHTCPPCPAPEAAGGPSVFLFPPKPKDTLMISRTPEVTCVVVDVSHEDPEVKFNWYVDGVEVHNAKTKPREEQYNSTYRVVSVLTVLHQDWLNGKEYKCKVSNKALGAPIEKTISKAKGQPREPQVYTLPPSRDELTKNQVSLTCLVKGFYPSDIAVEWESNGQPENNYKTTPPVLDSDGSFFLYSKLTVDKSRWQQGNVFSCSVMHEALHNHYTQKSLSLSPG

SEQ ID NO: 467 - protein, 111 aa, synthetic construct
  REGION 1..111: note = O24A_VK
DIVLTQSPASLAVFLGQRATISCRASKSVSTSGYSYMHWYQQRPGQPPKLLIYLASNLESGVPARFSGSGSGTDFTLNIHPVEEEDAATYYCQHSRELPPTFGGGTKLEIK

SEQ ID NO: 468 - protein, 118 aa, synthetic construct
  REGION 1..118: note = O24A_VH
QAYLQQSGAELVRPGASVKMSCKASGYTFTSYSMHWVKQTPRQGLEWIGAIYPGNDDTSYNQKFKGKATLTVDRSSSTAYMQLSSLTSEDSAVYFCTRDYSNYPFDYWGQGTTLTVSS

SEQ ID NO: 469 - protein, 218 aa, synthetic construct
  REGION 1..218: note = O24A_VK-CK
DIVLTQSPASLAVFLGQRATISCRASKSVSTSGYSYMHWYQQRPGQPPKLLIYLASNLESGVPARFSGSGSGTDFTLNIHPVEEEDAATYYCQHSRELPPTFGGGTKLEIKRTVAAPSVFIFPPSDEQLKSGTASVVCLLNNFYPREAKVQWKVDNALQSGNSQESVTEQDSKDSTYSLSSTLTLSKADYEKHKVYACEVTHQGLSSPVTKSFNRGEC

SEQ ID NO: 470 - protein, 447 aa, synthetic construct
  REGION 1..447: note = O24A_VH-CH/PGLALA
QAYLQQSGAELVRPGASVKMSCKASGYTFTSYSMHWVKQTPRQGLEWIGAIYPGNDDTSYNQKFKGKATLTVDRSSSTAYMQLSSLTSEDSAVYFCTRDYSNYPFDYWGQGTTLTVSSASTKGPSVFPLAPSSKSTSGGTAALGCLVKDYFPEPVTVSWNSGALTSGVHTFPAVLQSSGLYSLSSVVTVPSSSLGTQTYICNVNHKPSNTKVDKKVEPKSCDKTHTCPPCPAPEAAGGPSVFLFPPKPKDTLMISRTPEVTCVVVDVSHEDPEVKFNWYVDGVEVHNAKTKPREEQYNSTYRVVSVLTVLHQDWLNGKEYKCKVSNKALGAPIEKTISKAKGQPREPQVYTLPPSRDELTKNQVSLTCLVKGFYPSDIAVEWESNGQPENNYKTTPPVLDSDGSFFLYSKLTVDKSRWQQGNVFSCSVMHEALHNHYTQKSLSLSPG

SEQ ID NO: 471 - protein, 991 aa, synthetic construct
  REGION 1..991: note = ACE2-740wt/201/hole/PGLALA/RF
MEWSWVFLFFLSVTTGVHSQSTIEEQAKTFLDKFNHEAEDLFYQSSLASWNYNTNITEENVQNMNNAGDKWSAFLKEQSTLAQMYPLQEIQNLTVKLQLQALQQNGSSVLSEDKSKRLNTILNTMSTIYSTGKVCNPDNPQECLLLEPGLNEIMANSLDYNERLWAWESWRSEVGKQLRPLYEEYVVLKNEMARANHYEDYGDYWRGDYEVNGVDGYDYSRGQLIEDVEHTFEEIKPLYEHLHAYVRAKLMNAYPSYISPIGCLPAHLLGDMWGRFWTNLYSLTVPFGQKPNIDVTDAMVDQAWDAQRIFKEAEKFFVSVGLPNMTQGFWENSMLTDPGNVQKAVCHPTAWDLGKGDFRILMCTKVTMDDFLTAHHEMGHIQYDMAYAAQPFLLRNGANEGFHEAVGEIMSLSAATPKHLKSIGLLSPDFQEDNETEINFLLKQALTIVGTLPFTYMLEKWRWMVFKGEIPKDQWMKKWWEMKREIVGVVEPVPHDETYCDPASLFHVSNDYSFIRYYTRTLYQFQFQEALCQAAKHEGPLHKCDISNSTEAGQKLFNMLRLGKSEPWTLALENVVGAKNMNVRPLLNYFEPLFTWLKDQNKNSFVGWSTDWSPYADQSIKVRISLKSALGDKAYEWNDNEMYLFRSSVAYAMRQYFLKVKNQMILFGEEDVRVANLKPRISFNFFVTAPKNVSDIIPRTEVEKAIRMSRSRINDAFRLNDNSLEFLGIQPTLGPPNQPPVSTSTSPTRSMAPGAVHLPQPVSTRDKTHTCPPCPAPEAAGGPSVFLFPPKPKDTLMISRTPEVTCVVVDVSHEDPEVKFNWYVDGVEVHNAKTKPREEQYNSTYRVVSVLTVLHQDWLNGKEYKCKVSNKALGAPIEKTISKAKGQPREPQVCTLPPSRDELTKNQVSLSCAVKGFYPSDIAVEWESNGQPENNYKTTPPVLDSDGSFFLVSKLTVDKSRWQQGNVFSCSVMHEALHNRFTQKSLSLSPG

SEQ ID NO: 472 - protein, 468 aa, synthetic construct
  REGION 1..468: note = REGN10987_VH/knob/PGLALA
MEWSWVFLFFLSVTTGVHSQVQLVESGGGVVQPGRSLRLSCAASGFTFSNYAMYWVRQAPGKGLEWVAVISYDGSNKYYADSVKGRFTISRDNSKNTLYLQMNSLRTEDTAVYYCASGSDYGDYLLVYWGQGTLVTVSSASTKGPSVFPLAPSSKSTSGGTAALGCLVKDYFPEPVTVSWNSGALTSGVHTFPAVLQSSGLYSLSSVVTVPSSSLGTQTYICNVNHKPSNTKVDKKVEPKSCDKTHTCPPCPAPEAAGGPSVFLFPPKPKDTLMISRTPEVTCVVVDVSHEDPEVKFNWYVDGVEVHNAKTKPREEQYNSTYRVVSVLTVLHQDWLNGKEYKCKVSNKALGAPIEKTISKAKGQPREPQVYTLPPCRDELTKNQVSLWCLVKGFYPSDIAVEWESNGQPENNYKTTPPVLDSDGSFFLYSKLTVDKSRWQQGNVFSCSVMHEALHNHYTQKSLSLSPG

SEQ ID NO: 473 - protein, 991 aa, synthetic construct
  REGION 1..991: note = ACE2-740HA/201/hole/PGLALA/RF
MEWSWVFLFFLSVTTGVHSQSTIEEQAKTFLDKFNHEAEDLFYQSSLASWNYNTNITEENVQNMNNAGDKWSAFLKEQSTLAQMYPLQEIQNLTVKLQLQALQQNGSSVLSEDKSKRLNTILNTMSTIYSTGKVCNPDNPQECLLLEPGLNEIMANSLDYNERLWAWESWRSEVGKQLRPLYEEYVVLKNEMARANHYEDYGDYWRGDYEVNGVDGYDYSRGQLIEDVEHTFEEIKPLYEHLHAYVRAKLMNAYPSYISPIGCLPAHLLGDMWGRFWTNLYSLTVPFGQKPNIDVTDAMVDQAWDAQRIFKEAEKFFVSVGLPNMTQGFWENSMLTDPGNVQKAVCHPTAWDLGKGDFRILMCTKVTMDDFLTAHHEMGAIQYDMAYAAQPFLLRNGANEGFHEAVGEIMSLSAATPKHLKSIGLLSPDFQEDNETEINFLLKQALTIVGTLPFTYMLEKWRWMVFKGEIPKDQWMKKWWEMKREIVGVVEPVPHDETYCDPASLFHVSNDYSFIRYYTRTLYQFQFQEALCQAAKHEGPLHKCDISNSTEAGQKLFNMLRLGKSEPWTLALENVVGAKNMNVRPLLNYFEPLFTWLKDQNKNSFVGWSTDWSPYADQSIKVRISLKSALGDKAYEWNDNEMYLFRSSVAYAMRQYFLKVKNQMILFGEEDVRVANLKPRISFNFFVTAPKNVSDIIPRTEVEKAIRMSRSRINDAFRLNDNSLEFLGIQPTLGPPNQPPVSTSTSPTRSMAPGAVHLPQPVSTRDKTHTCPPCPAPEAAGGPSVFLFPPKPKDTLMISRTPEVTCVVVDVSHEDPEVKFNWYVDGVEVHNAKTKPREEQYNSTYRVVSVLTVLHQDWLNGKEYKCKVSNKALGAPIEKTISKAKGQPREPQVCTLPPSRDELTKNQVSLSCAVKGFYPSDIAVEWESNGQPENNYKTTPPVLDSDGSFFLVSKLTVDKSRWQQGNVFSCSVMHEALHNRFTQKSLSLSPG

SEQ ID NO: 474 - protein, 468 aa, synthetic construct
  REGION 1..468: note = REGN10933_VH/knob/PGLALA
MEWSWVFLFFLSVTTGVHSQVQLVESGGGLVKPGGSLRLSCAASGFTFSDYYMSWIRQAPGKGLEWVSYITYSGSTIYYADSVKGRFTISRDNAKSSLYLQMNSLRAEDTAVYYCARDRGTTMVPFDYWGQGTLVTVSSASTKGPSVFPLAPSSKSTSGGTAALGCLVKDYFPEPVTVSWNSGALTSGVHTFPAVLQSSGLYSLSSVVTVPSSSLGTQTYICNVNHKPSNTKVDKKVEPKSCDKTHTCPPCPAPEAAGGPSVFLFPPKPKDTLMISRTPEVTCVVVDVSHEDPEVKFNWYVDGVEVHNAKTKPREEQYNSTYRVVSVLTVLHQDWLNGKEYKCKVSNKALGAPIEKTISKAKGQPREPQVYTLPPCRDELTKNQVSLWCLVKGFYPSDIAVEWESNGQPENNYKTTPPVLDSDGSFFLYSKLTVDKSRWQQGNVFSCSVMHEALHNHYTQKSLSLSPG

SEQ ID NO: 475 - protein, 473 aa, synthetic construct
  REGION 1..473: note = Bamlanivimab_11876_VH/knob/PGLALA
MEWSWVFLFFLSVTTGVHSQVQLVQSGAEVKKPGSSVKVSCKASGGTFSNYAISWVRQAPGQGLEWMGRIIPILGIANYAQKFQGRVTITADKSTSTAYMELSSLRSEDTAVYYCARGYYEARHYYYYYAMDVWGQGTAVTVSSASTKGPSVFPLAPSSKSTSGGTAALGCLVKDYFPEPVTVSWNSGALTSGVHTFPAVLQSSGLYSLSSVVTVPSSSLGTQTYICNVNHKPSNTKVDKKVEPKSCDKTHTCPPCPAPEAAGGPSVFLFPPKPKDTLMISRTPEVTCVVVDVSHEDPEVKFNWYVDGVEVHNAKTKPREEQYNSTYRVVSVLTVLHQDWLNGKEYKCKVSNKALGAPIEKTISKAKGQPREPQVYTLPPCRDELTKNQVSLWCLVKGFYPSDIAVEWESNGQPENNYKTTPPVLDSDGSFFLYSKLTVDKSRWQQGNVFSCSVMHEALHNHYTQKSLSLSPG

SEQ ID NO: 476 - protein, 467 aa, synthetic construct
  REGION 1..467: note = Etesevimab_11873_VH/knob/PGLALA
MEWSWVFLFFLSVTTGVHSEVQLVESGGGLVQPGGSLRLSCAASGFTVSSNYMSWVRQAPGKGLEWVSVIYSGGSTFYADSVKGRFTISRDNSMNTLFLQMNSLRAEDTAVYYCARVLPMYGDYLDYWGQGTLVTVSSASTKGPSVFPLAPSSKSTSGGTAALGCLVKDYFPEPVTVSWNSGALTSGVHTFPAVLQSSGLYSLSSVVTVPSSSLGTQTYICNVNHKPSNTKVDKKVEPKSCDKTHTCPPCPAPEAAGGPSVFLFPPKPKDTLMISRTPEVTCVVVDVSHEDPEVKFNWYVDGVEVHNAKTKPREEQYNSTYRVVSVLTVLHQDWLNGKEYKCKVSNKALGAPIEKTISKAKGQPREPQVYTLPPCRDELTKNQVSLWCLVKGFYPSDIAVEWESNGQPENNYKTTPPVLDSDGSFFLYSKLTVDKSRWQQGNVFSCSVMHEALHNHYTQKSLSLSPG

SEQ ID NO: 477 - protein, 991 aa, synthetic construct
  REGION 1..991: note = ACE2-740wt/201/hole/FES/YTE/RF
MEWSWVFLFFLSVTTGVHSQSTIEEQAKTFLDKFNHEAEDLFYQSSLASWNYNTNITEENVQNMNNAGDKWSAFLKEQSTLAQMYPLQEIQNLTVKLQLQALQQNGSSVLSEDKSKRLNTILNTMSTIYSTGKVCNPDNPQECLLLEPGLNEIMANSLDYNERLWAWESWRSEVGKQLRPLYEEYVVLKNEMARANHYEDYGDYWRGDYEVNGVDGYDYSRGQLIEDVEHTFEEIKPLYEHLHAYVRAKLMNAYPSYISPIGCLPAHLLGDMWGRFWTNLYSLTVPFGQKPNIDVTDAMVDQAWDAQRIFKEAEKFFVSVGLPNMTQGFWENSMLTDPGNVQKAVCHPTAWDLGKGDFRILMCTKVTMDDFLTAHHEMGHIQYDMAYAAQPFLLRNGANEGFHEAVGEIMSLSAATPKHLKSIGLLSPDFQEDNETEINFLLKQALTIVGTLPFTYMLEKWRWMVFKGEIPKDQWMKKWWEMKREIVGVVEPVPHDETYCDPASLFHVSNDYSFIRYYTRTLYQFQFQEALCQAAKHEGPLHKCDISNSTEAGQKLFNMLRLGKSEPWTLALENVVGAKNMNVRPLLNYFEPLFTWLKDQNKNSFVGWSTDWSPYADQSIKVRISLKSALGDKAYEWNDNEMYLFRSSVAYAMRQYFLKVKNQMILFGEEDVRVANLKPRISFNFFVTAPKNVSDIIPRTEVEKAIRMSRSRINDAFRLNDNSLEFLGIQPTLGPPNQPPVSTSTSPTRSMAPGAVHLPQPVSTRDKTHTCPPCPAPEFEGGPSVFLFPPKPKDTLYITREPEVTCVVVDVSHEDPEVKFNWYVDGVEVHNAKTKPREEQYNSTYRVVSVLTVLHQDWLNGKEYKCKVSNKALPASIEKTISKAKGQPREPQVCTLPPSRDELTKNQVSLSCAVKGFYPSDIAVEWESNGQPENNYKTTPPVLDSDGSFFLVSKLTVDKSRWQQGNVFSCSVMHEALHNRFTQKSLSLSPG

SEQ ID NO: 478 - protein, 479 aa, synthetic construct
  REGION 1..479: note = Cilgavimab_11777_VH/knob/FES/YTE
MEWSWVFLFFLSVTTGVHSEVQLVESGGGLVKPGGSLRLSCAASGFTFRDVWMSWVRQAPGKGLEWVGRIKSKIDGGTTDYAAPVKGRFTISRDDSKNTLYLQMNSLKTEDTAVYYCTTAGSYYYDTVGPGLPEGKFDYWGQGTLVTVSSASTKGPSVFPLAPSSKSTSGGTAALGCLVKDYFPEPVTVSWNSGALTSGVHTFPAVLQSSGLYSLSSVVTVPSSSLGTQTYICNVNHKPSNTKVDKKVEPKSCDKTHTCPPCPAPEFEGGPSVFLFPPKPKDTLYITREPEVTCVVVDVSHEDPEVKFNWYVDGVEVHNAKTKPREEQYNSTYRVVSVLTVLHQDWLNGKEYKCKVSNKALPASIEKTISKAKGQPREPQVYTLPPCRDELTKNQVSLWCLVKGFYPSDIAVEWESNGQPENNYKTTPPVLDSDGSFFLYSKLTVDKSRWQQGNVFSCSVMHEALHNHYTQKSLSLSPG

SEQ ID NO: 479 - protein, 991 aa, synthetic construct
  REGION 1..991: note = ACE2-740HA/201/hole/FES/YTE/RF
MEWSWVFLFFLSVTTGVHSQSTIEEQAKTFLDKFNHEAEDLFYQSSLASWNYNTNITEENVQNMNNAGDKWSAFLKEQSTLAQMYPLQEIQNLTVKLQLQALQQNGSSVLSEDKSKRLNTILNTMSTIYSTGKVCNPDNPQECLLLEPGLNEIMANSLDYNERLWAWESWRSEVGKQLRPLYEEYVVLKNEMARANHYEDYGDYWRGDYEVNGVDGYDYSRGQLIEDVEHTFEEIKPLYEHLHAYVRAKLMNAYPSYISPIGCLPAHLLGDMWGRFWTNLYSLTVPFGQKPNIDVTDAMVDQAWDAQRIFKEAEKFFVSVGLPNMTQGFWENSMLTDPGNVQKAVCHPTAWDLGKGDFRILMCTKVTMDDFLTAHHEMGAIQYDMAYAAQPFLLRNGANEGFHEAVGEIMSLSAATPKHLKSIGLLSPDFQEDNETEINFLLKQALTIVGTLPFTYMLEKWRWMVFKGEIPKDQWMKKWWEMKREIVGVVEPVPHDETYCDPASLFHVSNDYSFIRYYTRTLYQFQFQEALCQAAKHEGPLHKCDISNSTEAGQKLFNMLRLGKSEPWTLALENVVGAKNMNVRPLLNYFEPLFTWLKDQNKNSFVGWSTDWSPYADQSIKVRISLKSALGDKAYEWNDNEMYLFRSSVAYAMRQYFLKVKNQMILFGEEDVRVANLKPRISFNFFVTAPKNVSDIIPRTEVEKAIRMSRSRINDAFRLNDNSLEFLGIQPTLGPPNQPPVSTSTSPTRSMAPGAVHLPQPVSTRDKTHTCPPCPAPEFEGGPSVFLFPPKPKDTLYITREPEVTCVVVDVSHEDPEVKFNWYVDGVEVHNAKTKPREEQYNSTYRVVSVLTVLHQDWLNGKEYKCKVSNKALPASIEKTISKAKGQPREPQVCTLPPSRDELTKNQVSLSCAVKGFYPSDIAVEWESNGQPENNYKTTPPVLDSDGSFFLVSKLTVDKSRWQQGNVFSCSVMHEALHNRFTQKSLSLSPG

SEQ ID NO: 480 - protein, 471 aa, synthetic construct
  REGION 1..471: note = Tixagevimab_11776_VH/knob/FES/YTE
MEWSWVFLFFLSVTTGVHSQMQLVQSGPEVKKPGTSVKVSCKASGFTFMSSAVQWVRQARGQRLEWIGWIVIGSGNTNYAQKFQERVTITRDMSTSTAYMELSSLRSEDTAVYYCAAPYCSSISCNDGFDIWGQGTMVTVSSASTKGPSVFPLAPSSKSTSGGTAALGCLVKDYFPEPVTVSWNSGALTSGVHTFPAVLQSSGLYSLSSVVTVPSSSLGTQTYICNVNHKPSNTKVDKKVEPKSCDKTHTCPPCPAPEFEGGPSVFLFPPKPKDTLYITREPEVTCVVVDVSHEDPEVKFNWYVDGVEVHNAKTKPREEQYNSTYRVVSVLTVLHQDWLNGKEYKCKVSNKALPASIEKTISKAKGQPREPQVYTLPPCRDELTKNQVSLWCLVKGFYPSDIAVEWESNGQPENNYKTTPPVLDSDGSFFLYSKLTVDKSRWQQGNVFSCSVMHEALHNHYTQKSLSLSPG

SEQ ID NO: 481 - protein, 991 aa, synthetic construct
  REGION 1..991: note = ACE2-740wt/201/hole/PGLALA/RF/LS
MEWSWVFLFFLSVTTGVHSQSTIEEQAKTFLDKFNHEAEDLFYQSSLASWNYNTNITEENVQNMNNAGDKWSAFLKEQSTLAQMYPLQEIQNLTVKLQLQALQQNGSSVLSEDKSKRLNTILNTMSTIYSTGKVCNPDNPQECLLLEPGLNEIMANSLDYNERLWAWESWRSEVGKQLRPLYEEYVVLKNEMARANHYEDYGDYWRGDYEVNGVDGYDYSRGQLIEDVEHTFEEIKPLYEHLHAYVRAKLMNAYPSYISPIGCLPAHLLGDMWGRFWTNLYSLTVPFGQKPNIDVTDAMVDQAWDAQRIFKEAEKFFVSVGLPNMTQGFWENSMLTDPGNVQKAVCHPTAWDLGKGDFRILMCTKVTMDDFLTAHHEMGHIQYDMAYAAQPFLLRNGANEGFHEAVGEIMSLSAATPKHLKSIGLLSPDFQEDNETEINFLLKQALTIVGTLPFTYMLEKWRWMVFKGEIPKDQWMKKWWEMKREIVGVVEPVPHDETYCDPASLFHVSNDYSFIRYYTRTLYQFQFQEALCQAAKHEGPLHKCDISNSTEAGQKLFNMLRLGKSEPWTLALENVVGAKNMNVRPLLNYFEPLFTWLKDQNKNSFVGWSTDWSPYADQSIKVRISLKSALGDKAYEWNDNEMYLFRSSVAYAMRQYFLKVKNQMILFGEEDVRVANLKPRISFNFFVTAPKNVSDIIPRTEVEKAIRMSRSRINDAFRLNDNSLEFLGIQPTLGPPNQPPVSTSTSPTRSMAPGAVHLPQPVSTRDKTHTCPPCPAPEAAGGPSVFLFPPKPKDTLMISRTPEVTCVVVDVSHEDPEVKFNWYVDGVEVHNAKTKPREEQYNSTYRVVSVLTVLHQDWLNGKEYKCKVSNKALGAPIEKTISKAKGQPREPQVCTLPPSRDELTKNQVSLSCAVKGFYPSDIAVEWESNGQPENNYKTTPPVLDSDGSFFLVSKLTVDKSRWQQGNVFSCSVLHEALHSRFTQKSLSLSPG

SEQ ID NO: 482 - protein, 475 aa, synthetic construct
  REGION 1..475: note = Sotrovimab_11766_VH/knob/PGLALA/LS
MEWSWVFLFFLSVTTGVHSQVQLVQSGAEVKKPGASVKVSCKASGYPFTSYGISWVRQAPGQGLEWMGWISTYQGNTNYAQKFQGRVTMTTDTSTTTGYMELRRLRSDDTAVYYCARDYTRGAWFGESLIGGFDNWGQGTLVTVSSASTKGPSVFPLAPSSKSTSGGTAALGCLVKDYFPEPVTVSWNSGALTSGVHTFPAVLQSSGLYSLSSVVTVPSSSLGTQTYICNVNHKPSNTKVDKKVEPKSCDKTHTCPPCPAPEAAGGPSVFLFPPKPKDTLMISRTPEVTCVVVDVSHEDPEVKFNWYVDGVEVHNAKTKPREEQYNSTYRVVSVLTVLHQDWLNGKEYKCKVSNKALGAPIEKTISKAKGQPREPQVYTLPPCRDELTKNQVSLWCLVKGFYPSDIAVEWESNGQPENNYKTTPPVLDSDGSFFLYSKLTVDKSRWQQGNVFSCSVLHEALHSHYTQKSLSLSPG

SEQ ID NO: 483 - protein, 991 aa, synthetic construct
  REGION 1..991: note = ACE2-740HA/201/hole/PGLALA/RF/LS
MEWSWVFLFFLSVTTGVHSQSTIEEQAKTFLDKFNHEAEDLFYQSSLASWNYNTNITEENVQNMNNAGDKWSAFLKEQSTLAQMYPLQEIQNLTVKLQLQALQQNGSSVLSEDKSKRLNTILNTMSTIYSTGKVCNPDNPQECLLLEPGLNEIMANSLDYNERLWAWESWRSEVGKQLRPLYEEYVVLKNEMARANHYEDYGDYWRGDYEVNGVDGYDYSRGQLIEDVEHTFEEIKPLYEHLHAYVRAKLMNAYPSYISPIGCLPAHLLGDMWGRFWTNLYSLTVPFGQKPNIDVTDAMVDQAWDAQRIFKEAEKFFVSVGLPNMTQGFWENSMLTDPGNVQKAVCHPTAWDLGKGDFRILMCTKVTMDDFLTAHHEMGAIQYDMAYAAQPFLLRNGANEGFHEAVGEIMSLSAATPKHLKSIGLLSPDFQEDNETEINFLLKQALTIVGTLPFTYMLEKWRWMVFKGEIPKDQWMKKWWEMKREIVGVVEPVPHDETYCDPASLFHVSNDYSFIRYYTRTLYQFQFQEALCQAAKHEGPLHKCDISNSTEAGQKLFNMLRLGKSEPWTLALENVVGAKNMNVRPLLNYFEPLFTWLKDQNKNSFVGWSTDWSPYADQSIKVRISLKSALGDKAYEWNDNEMYLFRSSVAYAMRQYFLKVKNQMILFGEEDVRVANLKPRISFNFFVTAPKNVSDIIPRTEVEKAIRMSRSRINDAFRLNDNSLEFLGIQPTLGPPNQPPVSTSTSPTRSMAPGAVHLPQPVSTRDKTHTCPPCPAPEAAGGPSVFLFPPKPKDTLMISRTPEVTCVVVDVSHEDPEVKFNWYVDGVEVHNAKTKPREEQYNSTYRVVSVLTVLHQDWLNGKEYKCKVSNKALGAPIEKTISKAKGQPREPQVCTLPPSRDELTKNQVSLSCAVKGFYPSDIAVEWESNGQPENNYKTTPPVLDSDGSFFLVSKLTVDKSRWQQGNVFSCSVLHEALHSRFTQKSLSLSPG

SEQ ID NO: 484 - protein, 476 aa, synthetic construct
  REGION 1..476: note = Regdanvimab_11883_VH/knob/PGLALA
MEWSWVFLFFLSVTTGVHSQITLKESGPTLVKPTQTLTLTCSFSGFSLSTSGVGVGWIRQPPGKALEWLALIDWDDNKYHTTSLKTRLTISKDTSKNQVVLTMTNMDPVDTATYYCARIPGFLRYRNRYYYYGMDVWGQGTTVTVSSASTKGPSVFPLAPSSKSTSGGTAALGCLVKDYFPEPVTVSWNSGALTSGVHTFPAVLQSSGLYSLSSVVTVPSSSLGTQTYICNVNHKPSNTKVDKKVEPKSCDKTHTCPPCPAPEAAGGPSVFLFPPKPKDTLMISRTPEVTCVVVDVSHEDPEVKFNWYVDGVEVHNAKTKPREEQYNSTYRVVSVLTVLHQDWLNGKEYKCKVSNKALGAPIEKTISKAKGQPREPQVYTLPPCRDELTKNQVSLWCLVKGFYPSDIAVEWESNGQPENNYKTTPPVLDSDGSFFLYSKLTVDKSRWQQGNVFSCSVMHEALHNHYTQKSLSLSPG

SEQ ID NO: 485 - protein, 469 aa, synthetic construct
  REGION 1..469: note = B13A_VH/knob/PGLALA
MEWSWVFLFFLSVTTGVHSQVQLQQSGAELVKPGASVKISCKASGYAFSNYWMNWVKQRPGKGLEWIGQIYPGDGDTNYNGNFKGKATLTADKSSSTAYIQLSSLTSEDSAVYFCGRGFIATVVEVFDHWGLGTTLTVSSASTKGPSVFPLAPSSKSTSGGTAALGCLVKDYFPEPVTVSWNSGALTSGVHTFPAVLQSSGLYSLSSVVTVPSSSLGTQTYICNVNHKPSNTKVDKKVEPKSCDKTHTCPPCPAPEAAGGPSVFLFPPKPKDTLMISRTPEVTCVVVDVSHEDPEVKFNWYVDGVEVHNAKTKPREEQYNSTYRVVSVLTVLHQDWLNGKEYKCKVSNKALGAPIEKTISKAKGQPREPQVYTLPPCRDELTKNQVSLWCLVKGFYPSDIAVEWESNGQPENNYKTTPPVLDSDGSFFLYSKLTVDKSRWQQGNVFSCSVMHEALHNHYTQKSLSLSPG

SEQ ID NO: 486 - protein, 466 aa, synthetic construct
  REGION 1..466: note = O24A_VH/knob/PGLALA
MEWSWVFLFFLSVTTGVHSQAYLQQSGAELVRPGASVKMSCKASGYTFTSYSMHWVKQTPRQGLEWIGAIYPGNDDTSYNQKFKGKATLTVDRSSSTAYMQLSSLTSEDSAVYFCTRDYSNYPFDYWGQGTTLTVSSASTKGPSVFPLAPSSKSTSGGTAALGCLVKDYFPEPVTVSWNSGALTSGVHTFPAVLQSSGLYSLSSVVTVPSSSLGTQTYICNVNHKPSNTKVDKKVEPKSCDKTHTCPPCPAPEAAGGPSVFLFPPKPKDTLMISRTPEVTCVVVDVSHEDPEVKFNWYVDGVEVHNAKTKPREEQYNSTYRVVSVLTVLHQDWLNGKEYKCKVSNKALGAPIEKTISKAKGQPREPQVYTLPPCRDELTKNQVSLWCLVKGFYPSDIAVEWESNGQPENNYKTTPPVLDSDGSFFLYSKLTVDKSRWQQGNVFSCSVMHEALHNHYTQKSLSLSPG

SEQ ID NO: 487 - protein, 469 aa, synthetic construct
  REGION 1..469: note = B13A_VH/knob/FES/YTE
MEWSWVFLFFLSVTTGVHSQVQLQQSGAELVKPGASVKISCKASGYAFSNYWMNWVKQRPGKGLEWIGQIYPGDGDTNYNGNFKGKATLTADKSSSTAYIQLSSLTSEDSAVYFCGRGFIATVVEVFDHWGLGTTLTVSSASTKGPSVFPLAPSSKSTSGGTAALGCLVKDYFPEPVTVSWNSGALTSGVHTFPAVLQSSGLYSLSSVVTVPSSSLGTQTYICNVNHKPSNTKVDKKVEPKSCDKTHTCPPCPAPEFEGGPSVFLFPPKPKDTLYITREPEVTCVVVDVSHEDPEVKFNWYVDGVEVHNAKTKPREEQYNSTYRVVSVLTVLHQDWLNGKEYKCKVSNKALPASIEKTISKAKGQPREPQVYTLPPCRDELTKNQVSLWCLVKGFYPSDIAVEWESNGQPENNYKTTPPVLDSDGSFFLYSKLTVDKSRWQQGNVFSCSVMHEALHNHYTQKSLSLSPG

SEQ ID NO: 488 - protein, 466 aa, synthetic construct
  REGION 1..466: note = O24A_VH/knob/FES/YTE
MEWSWVFLFFLSVTTGVHSQAYLQQSGAELVRPGASVKMSCKASGYTFTSYSMHWVKQTPRQGLEWIGAIYPGNDDTSYNQKFKGKATLTVDRSSSTAYMQLSSLTSEDSAVYFCTRDYSNYPFDYWGQGTTLTVSSASTKGPSVFPLAPSSKSTSGGTAALGCLVKDYFPEPVTVSWNSGALTSGVHTFPAVLQSSGLYSLSSVVTVPSSSLGTQTYICNVNHKPSNTKVDKKVEPKSCDKTHTCPPCPAPEFEGGPSVFLFPPKPKDTLYITREPEVTCVVVDVSHEDPEVKFNWYVDGVEVHNAKTKPREEQYNSTYRVVSVLTVLHQDWLNGKEYKCKVSNKALPASIEKTISKAKGQPREPQVYTLPPCRDELTKNQVSLWCLVKGFYPSDIAVEWESNGQPENNYKTTPPVLDSDGSFFLYSKLTVDKSRWQQGNVFSCSVMHEALHNHYTQKSLSLSPG

SEQ ID NO: 489 - protein, 605 aa, synthetic construct
  REGION 1..605: note = REGN10987_VH/CLD201/hole/PGLALA/RF/N84S
QVQLVESGGGVVQPGRSLRLSCAASGFTFSNYAMYWVRQAPGKGLEWVAVISYDGSNKYYADSVKGRFTISRDNSKNTLYLQMSSLRTEDTAVYYCASGSDYGDYLLVYWGQGTLVTVSSASTKGPSVFPLAPSSKSTSGGTAALGCLVKDYFPEPVTVSWNSGALTSGVHTFPAVLQSSGLYSLSSVVTVPSSSLGTQTYICNVNHKPSNTKVDKKVEPKSCTDWSPYADQSIKVRISLKSALGDKAYEWNDNEMYLFRSSVAYAMRQYFLKVKNQMILFGEEDVRVANLKPRISFNFFVTAPKNVSDIIPRTEVEKAIRMSRSRINDAFRLNDNSLEFLGIQPTLGPPNQPPVSTSTSPTRSMAPGAVHLPQPVSTRDKTHTCPPCPAPEAAGGPSVFLFPPKPKDTLMISRTPEVTCVVVDVSHEDPEVKFNWYVDGVEVHNAKTKPREEQYNSTYRVVSVLTVLHQDWLNGKEYKCKVSNKALGAPIEKTISKAKGQPREPQVCTLPPSRDELTKNQVSLSCAVKGFYPSDIAVEWESNGQPENNYKTTPPVLDSDGSFFLVSKLTVDKSRWQQGNVFSCSVMHEALHNRFTQKSLSLSPG

SEQ ID NO: 490 - protein, 598 aa, synthetic construct
  REGION 1..598: note = REGN10987_(x)VL/CLD201/hole/PGLALA/RF
QSALTQPASVSGSPGQSITISCTGTSSDVGGYNYVSWYQQHPGKAPKLMIYDVSKRPSGVSNRFSGSKSGNTASLTISGLQSEDEADYYCNSLTSISTWVFGGGTKLTVLGQPKAAPSVTLFPPSSEELQANKATLVCLISDFYPGAVTVAWKADSSPVKAGVETTTPSKQSNNKYAASSYLSLTPEQWKSHRSYSCQVTHEGSTVEKTVAPTECSTDWSPYADQSIKVRISLKSALGDKAYEWNDNEMYLFRSSVAYAMRQYFLKVKNQMILFGEEDVRVANLKPRISFNFFVTAPKNVSDIIPRTEVEKAIRMSRSRINDAFRLNDNSLEFLGIQPTLGPPNQPPVSTSTSPTRSMAPGAVHLPQPVSTRDKTHTCPPCPAPEAAGGPSVFLFPPKPKDTLMISRTPEVTCVVVDVSHEDPEVKFNWYVDGVEVHNAKTKPREEQYNSTYRVVSVLTVLHQDWLNGKEYKCKVSNKALGAPIEKTISKAKGQPREPQVCTLPPSRDELTKNQVSLSCAVKGFYPSDIAVEWESNGQPENNYKTTPPVLDSDGSFFLVSKLTVDKSRWQQGNVFSCSVMHEALHNRFTQKSLSLSPG

SEQ ID NO: 491 - protein, 605 aa, synthetic construct
  REGION 1..605: note = REGN10933_VH/CLD201/hole/PGLALA/RF/N84S
QVQLVESGGGLVKPGGSLRLSCAASGFTFSDYYMSWIRQAPGKGLEWVSYITYSGSTIYYADSVKGRFTISRDNAKSSLYLQMSSLRAEDTAVYYCARDRGTTMVPFDYWGQGTLVTVSSASTKGPSVFPLAPSSKSTSGGTAALGCLVKDYFPEPVTVSWNSGALTSGVHTFPAVLQSSGLYSLSSVVTVPSSSLGTQTYICNVNHKPSNTKVDKKVEPKSCTDWSPYADQSIKVRISLKSALGDKAYEWNDNEMYLFRSSVAYAMRQYFLKVKNQMILFGEEDVRVANLKPRISFNFFVTAPKNVSDIIPRTEVEKAIRMSRSRINDAFRLNDNSLEFLGIQPTLGPPNQPPVSTSTSPTRSMAPGAVHLPQPVSTRDKTHTCPPCPAPEAAGGPSVFLFPPKPKDTLMISRTPEVTCVVVDVSHEDPEVKFNWYVDGVEVHNAKTKPREEQYNSTYRVVSVLTVLHQDWLNGKEYKCKVSNKALGAPIEKTISKAKGQPREPQVCTLPPSRDELTKNQVSLSCAVKGFYPSDIAVEWESNGQPENNYKTTPPVLDSDGSFFLVSKLTVDKSRWQQGNVFSCSVMHEALHNRFTQKSLSLSPG

SEQ ID NO: 492 - protein, 596 aa, synthetic construct
  REGION 1..596: note = REGN10933_(x)VK/CLD201/hole/PGLALA/RF
DIQMTQSPSSLSASVGDRVTITCQASQDITNYLNWYQQKPGKAPKLLIYAASNLETGVPSRFSGSGSGTDFTFTISGLQPEDIATYYCQQYDNLPLTFGGGTKVEIKRTVAAPSVFIFPPSDEQLKSGTASVVCLLNNFYPREAKVQWKVDNALQSGNSQESVTEQDSKDSTYSLSSTLTLSKADYEKHKVYACEVTHQGLSSPVTKSFNRGECTDWSPYADQSIKVRISLKSALGDKAYEWNDNEMYLFRSSVAYAMRQYFLKVKNQMILFGEEDVRVANLKPRISFNFFVTAPKNVSDIIPRTEVEKAIRMSRSRINDAFRLNDNSLEFLGIQPTLGPPNQPPVSTSTSPTRSMAPGAVHLPQPVSTRDKTHTCPPCPAPEAAGGPSVFLFPPKPKDTLMISRTPEVTCVVVDVSHEDPEVKFNWYVDGVEVHNAKTKPREEQYNSTYRVVSVLTVLHQDWLNGKEYKCKVSNKALGAPIEKTISKAKGQPREPQVCTLPPSRDELTKNQVSLSCAVKGFYPSDIAVEWESNGQPENNYKTTPPVLDSDGSFFLVSKLTVDKSRWQQGNVFSCSVMHEALHNRFTQKSLSLSPG

SEQ ID NO: 493 - protein, 610 aa, synthetic construct
  REGION 1..610: note = 11876_VH/CLD201/hole/PGLALA/RF/N82aS)
QVQLVQSGAEVKKPGSSVKVSCKASGGTFSNYAISWVRQAPGQGLEWMGRIIPILGIANYAQKFQGRVTITADKSTSTAYMELSSLRSEDTAVYYCARGYYEARHYYYYYAMDVWGQGTAVTVSSASTKGPSVFPLAPSSKSTSGGTAALGCLVKDYFPEPVTVSWNSGALTSGVHTFPAVLQSSGLYSLSSVVTVPSSSLGTQTYICNVNHKPSNTKVDKKVEPKSCTDWSPYADQSIKVRISLKSALGDKAYEWNDNEMYLFRSSVAYAMRQYFLKVKNQMILFGEEDVRVANLKPRISFNFFVTAPKNVSDIIPRTEVEKAIRMSRSRINDAFRLNDNSLEFLGIQPTLGPPNQPPVSTSTSPTRSMAPGAVHLPQPVSTRDKTHTCPPCPAPEAAGGPSVFLFPPKPKDTLMISRTPEVTCVVVDVSHEDPEVKFNWYVDGVEVHNAKTKPREEQYNSTYRVVSVLTVLHQDWLNGKEYKCKVSNKALGAPIEKTISKAKGQPREPQVCTLPPSRDELTKNQVSLSCAVKGFYPSDIAVEWESNGQPENNYKTTPPVLDSDGSFFLVSKLTVDKSRWQQGNVFSCSVMHEALHNRFTQKSLSLSPG

SEQ ID NO: 494 - protein, 596 aa, synthetic construct
  REGION 1..596: note = 11876_(x)VK/CLD201/hole/PGLALA/RF
DIQMTQSPSSLSASVGDRVTITCRASQSISSYLSWYQQKPGKAPKLLIYAASSLQSGVPSRFSGSGSGTDFTLTITSLQPEDFATYYCQQSYSTPRTFGQGTKVEIKRTVAAPSVFIFPPSDEQLKSGTASVVCLLNNFYPREAKVQWKVDNALQSGNSQESVTEQDSKDSTYSLSSTLTLSKADYEKHKVYACEVTHQGLSSPVTKSFNRGECTDWSPYADQSIKVRISLKSALGDKAYEWNDNEMYLFRSSVAYAMRQYFLKVKNQMILFGEEDVRVANLKPRISFNFFVTAPKNVSDIIPRTEVEKAIRMSRSRINDAFRLNDNSLEFLGIQPTLGPPNQPPVSTSTSPTRSMAPGAVHLPQPVSTRDKTHTCPPCPAPEAAGGPSVFLFPPKPKDTLMISRTPEVTCVVVDVSHEDPEVKFNWYVDGVEVHNAKTKPREEQYNSTYRVVSVLTVLHQDWLNGKEYKCKVSNKALGAPIEKTISKAKGQPREPQVCTLPPSRDELTKNQVSLSCAVKGFYPSDIAVEWESNGQPENNYKTTPPVLDSDGSFFLVSKLTVDKSRWQQGNVFSCSVMHEALHNRFTQKSLSLSPG

SEQ ID NO: 495 - protein, 604 aa, synthetic construct
  REGION 1..604: note = 11873_VH/CLD201/hole/PGLALA/RF/N83S
EVQLVESGGGLVQPGGSLRLSCAASGFTVSSNYMSWVRQAPGKGLEWVSVIYSGGSTFYADSVKGRFTISRDNSMNTLFLQMSSLRAEDTAVYYCARVLPMYGDYLDYWGQGTLVTVSSASTKGPSVFPLAPSSKSTSGGTAALGCLVKDYFPEPVTVSWNSGALTSGVHTFPAVLQSSGLYSLSSVVTVPSSSLGTQTYICNVNHKPSNTKVDKKVEPKSCTDWSPYADQSIKVRISLKSALGDKAYEWNDNEMYLFRSSVAYAMRQYFLKVKNQMILFGEEDVRVANLKPRISFNFFVTAPKNVSDIIPRTEVEKAIRMSRSRINDAFRLNDNSLEFLGIQPTLGPPNQPPVSTSTSPTRSMAPGAVHLPQPVSTRDKTHTCPPCPAPEAAGGPSVFLFPPKPKDTLMISRTPEVTCVVVDVSHEDPEVKFNWYVDGVEVHNAKTKPREEQYNSTYRVVSVLTVLHQDWLNGKEYKCKVSNKALGAPIEKTISKAKGQPREPQVCTLPPSRDELTKNQVSLSCAVKGFYPSDIAVEWESNGQPENNYKTTPPVLDSDGSFFLVSKLTVDKSRWQQGNVFSCSVMHEALHNRFTQKSLSLSPG

SEQ ID NO: 496 - protein, 598 aa, synthetic construct
  REGION 1..598: note = 11873_(x)VK/CLD201/hole/PGLALA/RF
DIVMTQSPSSLSASVGDRVTITCRASQSISRYLNWYQQKPGKAPKLLIYAASSLQSGVPSRFSGSGSGTDFTLTISSLQPEDFATYYCQQSYSTPPEYTFGQGTKLEIKRTVAAPSVFIFPPSDEQLKSGTASVVCLLNNFYPREAKVQWKVDNALQSGNSQESVTEQDSKDSTYSLSSTLTLSKADYEKHKVYACEVTHQGLSSPVTKSFNRGECTDWSPYADQSIKVRISLKSALGDKAYEWNDNEMYLFRSSVAYAMRQYFLKVKNQMILFGEEDVRVANLKPRISFNFFVTAPKNVSDIIPRTEVEKAIRMSRSRINDAFRLNDNSLEFLGIQPTLGPPNQPPVSTSTSPTRSMAPGAVHLPQPVSTRDKTHTCPPCPAPEAAGGPSVFLFPPKPKDTLMISRTPEVTCVVVDVSHEDPEVKFNWYVDGVEVHNAKTKPREEQYNSTYRVVSVLTVLHQDWLNGKEYKCKVSNKALGAPIEKTISKAKGQPREPQVCTLPPSRDELTKNQVSLSCAVKGFYPSDIAVEWESNGQPENNYKTTPPVLDSDGSFFLVSKLTVDKSRWQQGNVFSCSVMHEALHNRFTQKSLSLSPG

SEQ ID NO: 497 - protein, 616 aa, synthetic construct
  REGION 1..616: note = 11777_VH/CLD201/hole/FES/YTE/RF/N86S
EVQLVESGGGLVKPGGSLRLSCAASGFTFRDVWMSWVRQAPGKGLEWVGRIKSKIDGGTTDYAAPVKGRFTISRDDSKNTLYLQMSSLKTEDTAVYYCTTAGSYYYDTVGPGLPEGKFDYWGQGTLVTVSSASTKGPSVFPLAPSSKSTSGGTAALGCLVKDYFPEPVTVSWNSGALTSGVHTFPAVLQSSGLYSLSSVVTVPSSSLGTQTYICNVNHKPSNTKVDKKVEPKSCTDWSPYADQSIKVRISLKSALGDKAYEWNDNEMYLFRSSVAYAMRQYFLKVKNQMILFGEEDVRVANLKPRISFNFFVTAPKNVSDIIPRTEVEKAIRMSRSRINDAFRLNDNSLEFLGIQPTLGPPNQPPVSTSTSPTRSMAPGAVHLPQPVSTRDKTHTCPPCPAPEFEGGPSVFLFPPKPKDTLYITREPEVTCVVVDVSHEDPEVKFNWYVDGVEVHNAKTKPREEQYNSTYRVVSVLTVLHQDWLNGKEYKCKVSNKALPASIEKTISKAKGQPREPQVCTLPPSRDELTKNQVSLSCAVKGFYPSDIAVEWESNGQPENNYKTTPPVLDSDGSFFLVSKLTVDKSRWQQGNVFSCSVMHEALHNRFTQKSLSLSPG

SEQ ID NO: 498 - protein, 601 aa, synthetic construct
  REGION 1..601: note = 11777_(x)VK/CLD201/hole/FES/YTE/RF
DIVMTQSPDSLAVSLGERATINCKSSQSVLYSSNNKNYLAWYQQKPGQPPKLLMYWASTRESGVPDRFSGSGSGAEFTLTISSLQAEDVAIYYCQQYYSTLTFGGGTKVEIKRTVAAPSVFIFPPSDEQLKSGTASVVCLLNNFYPREAKVQWKVDNALQSGNSQESVTEQDSKDSTYSLSSTLTLSKADYEKHKVYACEVTHQGLSSPVTKSFNRGECTDWSPYADQSIKVRISLKSALGDKAYEWNDNEMYLFRSSVAYAMRQYFLKVKNQMILFGEEDVRVANLKPRISFNFFVTAPKNVSDIIPRTEVEKAIRMSRSRINDAFRLNDNSLEFLGIQPTLGPPNQPPVSTSTSPTRSMAPGAVHLPQPVSTRDKTHTCPPCPAPEFEGGPSVFLFPPKPKDTLYITREPEVTCVVVDVSHEDPEVKFNWYVDGVEVHNAKTKPREEQYNSTYRVVSVLTVLHQDWLNGKEYKCKVSNKALPASIEKTISKAKGQPREPQVCTLPPSRDELTKNQVSLSCAVKGFYPSDIAVEWESNGQPENNYKTTPPVLDSDGSFFLVSKLTVDKSRWQQGNVFSCSVMHEALHNRFTQKSLSLSPG

SEQ ID NO: 499 - protein, 608 aa, synthetic construct
  REGION 1..608: note = 11776_VH/CLD201/hole/FES/YTE/RF
QMQLVQSGPEVKKPGTSVKVSCKASGFTFMSSAVQWVRQARGQRLEWIGWIVIGSGNTNYAQKFQERVTITRDMSTSTAYMELSSLRSEDTAVYYCAAPYCSSISCNDGFDIWGQGTMVTVSSASTKGPSVFPLAPSSKSTSGGTAALGCLVKDYFPEPVTVSWNSGALTSGVHTFPAVLQSSGLYSLSSVVTVPSSSLGTQTYICNVNHKPSNTKVDKKVEPKSCTDWSPYADQSIKVRISLKSALGDKAYEWNDNEMYLFRSSVAYAMRQYFLKVKNQMILFGEEDVRVANLKPRISFNFFVTAPKNVSDIIPRTEVEKAIRMSRSRINDAFRLNDNSLEFLGIQPTLGPPNQPPVSTSTSPTRSMAPGAVHLPQPVSTRDKTHTCPPCPAPEFEGGPSVFLFPPKPKDTLYITREPEVTCVVVDVSHEDPEVKFNWYVDGVEVHNAKTKPREEQYNSTYRVVSVLTVLHQDWLNGKEYKCKVSNKALPASIEKTISKAKGQPREPQVCTLPPSRDELTKNQVSLSCAVKGFYPSDIAVEWESNGQPENNYKTTPPVLDSDGSFFLVSKLTVDKSRWQQGNVFSCSVMHEALHNRFTQKSLSLSPG

SEQ ID NO: 500 - protein, 598 aa, synthetic construct
  REGION 1..598: note = 11776_xVK/CLD201/hole/FES/YTE/RF
EIVLTQSPGTLSLSPGERATLSCRASQSVSSSYLAWYQQKPGQAPRLLIYGASSRATGIPDRFSGSGSGTDFTLTISRLEPEDFAVYYCQHYGSSRGWTFGQGTKVEIKRTVAAPSVFIFPPSDEQLKSGTASVVCLLNNFYPREAKVQWKVDNALQSGNSQESVTEQDSKDSTYSLSSTLTLSKADYEKHKVYACEVTHQGLSSPVTKSFNRGECTDWSPYADQSIKVRISLKSALGDKAYEWNDNEMYLFRSSVAYAMRQYFLKVKNQMILFGEEDVRVANLKPRISFNFFVTAPKNVSDIIPRTEVEKAIRMSRSRINDAFRLNDNSLEFLGIQPTLGPPNQPPVSTSTSPTRSMAPGAVHLPQPVSTRDKTHTCPPCPAPEFEGGPSVFLFPPKPKDTLYITREPEVTCVVVDVSHEDPEVKFNWYVDGVEVHNAKTKPREEQYNSTYRVVSVLTVLHQDWLNGKEYKCKVSNKALPASIEKTISKAKGQPREPQVCTLPPSRDELTKNQVSLSCAVKGFYPSDIAVEWESNGQPENNYKTTPPVLDSDGSFFLVSKLTVDKSRWQQGNVFSCSVMHEALHNRFTQKSLSLSPG

SEQ ID NO: 501 - protein, 612 aa, synthetic construct
  REGION 1..612: note = 11766_VH/CLD201/hole/PGLALA/RF/LS
QVQLVQSGAEVKKPGASVKVSCKASGYPFTSYGISWVRQAPGQGLEWMGWISTYQGNTNYAQKFQGRVTMTTDTSTTTGYMELRRLRSDDTAVYYCARDYTRGAWFGESLIGGFDNWGQGTLVTVSSASTKGPSVFPLAPSSKSTSGGTAALGCLVKDYFPEPVTVSWNSGALTSGVHTFPAVLQSSGLYSLSSVVTVPSSSLGTQTYICNVNHKPSNTKVDKKVEPKSCTDWSPYADQSIKVRISLKSALGDKAYEWNDNEMYLFRSSVAYAMRQYFLKVKNQMILFGEEDVRVANLKPRISFNFFVTAPKNVSDIIPRTEVEKAIRMSRSRINDAFRLNDNSLEFLGIQPTLGPPNQPPVSTSTSPTRSMAPGAVHLPQPVSTRDKTHTCPPCPAPEAAGGPSVFLFPPKPKDTLMISRTPEVTCVVVDVSHEDPEVKFNWYVDGVEVHNAKTKPREEQYNSTYRVVSVLTVLHQDWLNGKEYKCKVSNKALGAPIEKTISKAKGQPREPQVCTLPPSRDELTKNQVSLSCAVKGFYPSDIAVEWESNGQPENNYKTTPPVLDSDGSFFLVSKLTVDKSRWQQGNVFSCSVLHEALHSRFTQKSLSLSPG

SEQ ID NO: 502 - protein, 613 aa, synthetic construct
  REGION 1..613: note = 11883_VH/CLD201/hole/PGLALA/RF
QITLKESGPTLVKPTQTLTLTCSFSGFSLSTSGVGVGWIRQPPGKALEWLALIDWDDNKYHTTSLKTRLTISKDTSKNQVVLTMTNMDPVDTATYYCARIPGFLRYRNRYYYYGMDVWGQGTTVTVSSASTKGPSVFPLAPSSKSTSGGTAALGCLVKDYFPEPVTVSWNSGALTSGVHTFPAVLQSSGLYSLSSVVTVPSSSLGTQTYICNVNHKPSNTKVDKKVEPKSCTDWSPYADQSIKVRISLKSALGDKAYEWNDNEMYLFRSSVAYAMRQYFLKVKNQMILFGEEDVRVANLKPRISFNFFVTAPKNVSDIIPRTEVEKAIRMSRSRINDAFRLNDNSLEFLGIQPTLGPPNQPPVSTSTSPTRSMAPGAVHLPQPVSTRDKTHTCPPCPAPEAAGGPSVFLFPPKPKDTLMISRTPEVTCVVVDVSHEDPEVKFNWYVDGVEVHNAKTKPREEQYNSTYRVVSVLTVLHQDWLNGKEYKCKVSNKALGAPIEKTISKAKGQPREPQVCTLPPSRDELTKNQVSLSCAVKGFYPSDIAVEWESNGQPENNYKTTPPVLDSDGSFFLVSKLTVDKSRWQQGNVFSCSVMHEALHNRFTQKSLSLSPG

SEQ ID NO: 503 - protein, 223 aa, synthetic construct
  REGION 1..223: note = REGN10987_(x)VH/N84S
QVQLVESGGGVVQPGRSLRLSCAASGFTFSNYAMYWVRQAPGKGLEWVAVISYDGSNKYYADSVKGRFTISRDNSKNTLYLQMSSLRTEDTAVYYCASGSDYGDYLLVYWGQGTLVTVSSASTKGPSVFPLAPSSKSTSGGTAALGCLVKDYFPEPVTVSWNSGALTSGVHTFPAVLQSSGLYSLSSVVTVPSSSLGTQTYICNVNHKPSNTKVDKKVEPKSC

SEQ ID NO: 504 - protein, 223 aa, synthetic construct
  REGION 1..223: note = REGN10933_(x)VH/N84S
QVQLVESGGGLVKPGGSLRLSCAASGFTFSDYYMSWIRQAPGKGLEWVSYITYSGSTIYYADSVKGRFTISRDNAKSSLYLQMSSLRAEDTAVYYCARDRGTTMVPFDYWGQGTLVTVSSASTKGPSVFPLAPSSKSTSGGTAALGCLVKDYFPEPVTVSWNSGALTSGVHTFPAVLQSSGLYSLSSVVTVPSSSLGTQTYICNVNHKPSNTKVDKKVEPKSC

SEQ ID NO: 505 - protein, 228 aa, synthetic construct
  REGION 1..228: note = 11876_(x)VH
QVQLVQSGAEVKKPGSSVKVSCKASGGTFSNYAISWVRQAPGQGLEWMGRIIPILGIANYAQKFQGRVTITADKSTSTAYMELSSLRSEDTAVYYCARGYYEARHYYYYYAMDVWGQGTAVTVSSASTKGPSVFPLAPSSKSTSGGTAALGCLVKDYFPEPVTVSWNSGALTSGVHTFPAVLQSSGLYSLSSVVTVPSSSLGTQTYICNVNHKPSNTKVDKKVEPKSC

SEQ ID NO: 506 - protein, 222 aa, synthetic construct
  REGION 1..222: note = 11873_(x)VH/N83S
EVQLVESGGGLVQPGGSLRLSCAASGFTVSSNYMSWVRQAPGKGLEWVSVIYSGGSTFYADSVKGRFTISRDNSMNTLFLQMSSLRAEDTAVYYCARVLPMYGDYLDYWGQGTLVTVSSASTKGPSVFPLAPSSKSTSGGTAALGCLVKDYFPEPVTVSWNSGALTSGVHTFPAVLQSSGLYSLSSVVTVPSSSLGTQTYICNVNHKPSNTKVDKKVEPKSC

SEQ ID NO: 507 - protein, 234 aa, synthetic construct
  REGION 1..234: note = 11777_(x)VH/N86S
EVQLVESGGGLVKPGGSLRLSCAASGFTFRDVWMSWVRQAPGKGLEWVGRIKSKIDGGTTDYAAPVKGRFTISRDDSKNTLYLQMSSLKTEDTAVYYCTTAGSYYYDTVGPGLPEGKFDYWGQGTLVTVSSASTKGPSVFPLAPSSKSTSGGTAALGCLVKDYFPEPVTVSWNSGALTSGVHTFPAVLQSSGLYSLSSVVTVPSSSLGTQTYICNVNHKPSNTKVDKKVEPKSC

SEQ ID NO: 508 - protein, 226 aa, synthetic construct
  REGION 1..226: note = 11776_xVH
QMQLVQSGPEVKKPGTSVKVSCKASGFTFMSSAVQWVRQARGQRLEWIGWIVIGSGNTNYAQKFQERVTITRDMSTSTAYMELSSLRSEDTAVYYCAAPYCSSISCNDGFDIWGQGTMVTVSSASTKGPSVFPLAPSSKSTSGGTAALGCLVKDYFPEPVTVSWNSGALTSGVHTFPAVLQSSGLYSLSSVVTVPSSSLGTQTYICNVNHKPSNTKVDKKVEPKSC

SEQ ID NO: 509 - protein, 972 aa, synthetic construct; identical to SEQ ID NO: 358
  REGION 1..972: note = ACE2-740HA/201/knob/PGLALA

SEQ ID NO: 510 - protein, 847 aa, synthetic construct; identical to SEQ ID NO: 370
  REGION 1..847: note = ACE2-615HA/201/hole/PGLALA/RF

SEQ ID NO: 511 - protein, 847 aa, synthetic construct
  REGION 1..847: note = ACE2-615HA/201/knob/PGLALA
QSTIEEQAKTFLDKFNHEAEDLFYQSSLASWNYNTNITEENVQNMNNAGDKWSAFLKEQSTLAQMYPLQEIQNLTVKLQLQALQQNGSSVLSEDKSKRLNTILNTMSTIYSTGKVCNPDNPQECLLLEPGLNEIMANSLDYNERLWAWESWRSEVGKQLRPLYEEYVVLKNEMARANHYEDYGDYWRGDYEVNGVDGYDYSRGQLIEDVEHTFEEIKPLYEHLHAYVRAKLMNAYPSYISPIGCLPAHLLGDMWGRFWTNLYSLTVPFGQKPNIDVTDAMVDQAWDAQRIFKEAEKFFVSVGLPNMTQGFWENSMLTDPGNVQKAVCHPTAWDLGKGDFRILMCTKVTMDDFLTAHHEMGAIQYDMAYAAQPFLLRNGANEGFHEAVGEIMSLSAATPKHLKSIGLLSPDFQEDNETEINFLLKQALTIVGTLPFTYMLEKWRWMVFKGEIPKDQWMKKWWEMKREIVGVVEPVPHDETYCDPASLFHVSNDYSFIRYYTRTLYQFQFQEALCQAAKHEGPLHKCDISNSTEAGQKLFNMLRLGKSEPWTLALENVVGAKNMNVRPLLNYFEPLFTWLKDQNKNSFVGWSTDWSPYADTSTSPTRSMAPGAVHLPQPVSTRDKTHTCPPCPAPEAAGGPSVFLFPPKPKDTLMISRTPEVTCVVVDVSHEDPEVKFNWYVDGVEVHNAKTKPREEQYNSTYRVVSVLTVLHQDWLNGKEYKCKVSNKALGAPIEKTISKAKGQPREPQVYTLPPCRDELTKNQVSLWCLVKGFYPSDIAVEWESNGQPENNYKTTPPVLDSDGSFFLYSKLTVDKSRWQQGNVFSCSVMHEALHNHYTQKSLSLSPG

SEQ ID NO: 512 - protein, 972 aa, synthetic construct
  REGION 1..972: note = ACE2-740HA/201/knob/PGLALA/YTE
QSTIEEQAKTFLDKFNHEAEDLFYQSSLASWNYNTNITEENVQNMNNAGDKWSAFLKEQSTLAQMYPLQEIQNLTVKLQLQALQQNGSSVLSEDKSKRLNTILNTMSTIYSTGKVCNPDNPQECLLLEPGLNEIMANSLDYNERLWAWESWRSEVGKQLRPLYEEYVVLKNEMARANHYEDYGDYWRGDYEVNGVDGYDYSRGQLIEDVEHTFEEIKPLYEHLHAYVRAKLMNAYPSYISPIGCLPAHLLGDMWGRFWTNLYSLTVPFGQKPNIDVTDAMVDQAWDAQRIFKEAEKFFVSVGLPNMTQGFWENSMLTDPGNVQKAVCHPTAWDLGKGDFRILMCTKVTMDDFLTAHHEMGAIQYDMAYAAQPFLLRNGANEGFHEAVGEIMSLSAATPKHLKSIGLLSPDFQEDNETEINFLLKQALTIVGTLPFTYMLEKWRWMVFKGEIPKDQWMKKWWEMKREIVGVVEPVPHDETYCDPASLFHVSNDYSFIRYYTRTLYQFQFQEALCQAAKHEGPLHKCDISNSTEAGQKLFNMLRLGKSEPWTLALENVVGAKNMNVRPLLNYFEPLFTWLKDQNKNSFVGWSTDWSPYADQSIKVRISLKSALGDKAYEWNDNEMYLFRSSVAYAMRQYFLKVKNQMILFGEEDVRVANLKPRISFNFFVTAPKNVSDIIPRTEVEKAIRMSRSRINDAFRLNDNSLEFLGIQPTLGPPNQPPVSTSTSPTRSMAPGAVHLPQPVSTRDKTHTCPPCPAPEAAGGPSVFLFPPKPKDTLYITREPEVTCVVVDVSHEDPEVKFNWYVDGVEVHNAKTKPREEQYNSTYRVVSVLTVLHQDWLNGKEYKCKVSNKALGAPIEKTISKAKGQPREPQVYTLPPCRDELTKNQVSLWCLVKGFYPSDIAVEWESNGQPENNYKTTPPVLDSDGSFFLYSKLTVDKSRWQQGNVFSCSVMHEALHNHYTQKSLSLSPG

SEQ ID NO: 513 - protein, 847 aa, synthetic construct
  REGION 1..847: note = ACE2-615HA/201/hole/PGLALA/YTE/RF
QSTIEEQAKTFLDKFNHEAEDLFYQSSLASWNYNTNITEENVQNMNNAGDKWSAFLKEQSTLAQMYPLQEIQNLTVKLQLQALQQNGSSVLSEDKSKRLNTILNTMSTIYSTGKVCNPDNPQECLLLEPGLNEIMANSLDYNERLWAWESWRSEVGKQLRPLYEEYVVLKNEMARANHYEDYGDYWRGDYEVNGVDGYDYSRGQLIEDVEHTFEEIKPLYEHLHAYVRAKLMNAYPSYISPIGCLPAHLLGDMWGRFWTNLYSLTVPFGQKPNIDVTDAMVDQAWDAQRIFKEAEKFFVSVGLPNMTQGFWENSMLTDPGNVQKAVCHPTAWDLGKGDFRILMCTKVTMDDFLTAHHEMGAIQYDMAYAAQPFLLRNGANEGFHEAVGEIMSLSAATPKHLKSIGLLSPDFQEDNETEINFLLKQALTIVGTLPFTYMLEKWRWMVFKGEIPKDQWMKKWWEMKREIVGVVEPVPHDETYCDPASLFHVSNDYSFIRYYTRTLYQFQFQEALCQAAKHEGPLHKCDISNSTEAGQKLFNMLRLGKSEPWTLALENVVGAKNMNVRPLLNYFEPLFTWLKDQNKNSFVGWSTDWSPYADTSTSPTRSMAPGAVHLPQPVSTRDKTHTCPPCPAPEAAGGPSVFLFPPKPKDTLYITREPEVTCVVVDVSHEDPEVKFNWYVDGVEVHNAKTKPREEQYNSTYRVVSVLTVLHQDWLNGKEYKCKVSNKALGAPIEKTISKAKGQPREPQVCTLPPSRDELTKNQVSLSCAVKGFYPSDIAVEWESNGQPENNYKTTPPVLDSDGSFFLVSKLTVDKSRWQQGNVFSCSVMHEALHNRFTQKSLSLSPG

SEQ ID NO: 514 - protein, 972 aa, synthetic construct
  REGION 1..972: note = ACE2-740HA/201/hole/PGLALA/YTE/RF
QSTIEEQAKTFLDKFNHEAEDLFYQSSLASWNYNTNITEENVQNMNNAGDKWSAFLKEQSTLAQMYPLQEIQNLTVKLQLQALQQNGSSVLSEDKSKRLNTILNTMSTIYSTGKVCNPDNPQECLLLEPGLNEIMANSLDYNERLWAWESWRSEVGKQLRPLYEEYVVLKNEMARANHYEDYGDYWRGDYEVNGVDGYDYSRGQLIEDVEHTFEEIKPLYEHLHAYVRAKLMNAYPSYISPIGCLPAHLLGDMWGRFWTNLYSLTVPFGQKPNIDVTDAMVDQAWDAQRIFKEAEKFFVSVGLPNMTQGFWENSMLTDPGNVQKAVCHPTAWDLGKGDFRILMCTKVTMDDFLTAHHEMGAIQYDMAYAAQPFLLRNGANEGFHEAVGEIMSLSAATPKHLKSIGLLSPDFQEDNETEINFLLKQALTIVGTLPFTYMLEKWRWMVFKGEIPKDQWMKKWWEMKREIVGVVEPVPHDETYCDPASLFHVSNDYSFIRYYTRTLYQFQFQEALCQAAKHEGPLHKCDISNSTEAGQKLFNMLRLGKSEPWTLALENVVGAKNMNVRPLLNYFEPLFTWLKDQNKNSFVGWSTDWSPYADQSIKVRISLKSALGDKAYEWNDNEMYLFRSSVAYAMRQYFLKVKNQMILFGEEDVRVANLKPRISFNFFVTAPKNVSDIIPRTEVEKAIRMSRSRINDAFRLNDNSLEFLGIQPTLGPPNQPPVSTSTSPTRSMAPGAVHLPQPVSTRDKTHTCPPCPAPEAAGGPSVFLFPPKPKDTLYITREPEVTCVVVDVSHEDPEVKFNWYVDGVEVHNAKTKPREEQYNSTYRVVSVLTVLHQDWLNGKEYKCKVSNKALGAPIEKTISKAKGQPREPQVCTLPPSRDELTKNQVSLSCAVKGFYPSDIAVEWESNGQPENNYKTTPPVLDSDGSFFLVSKLTVDKSRWQQGNVFSCSVMHEALHNRFTQKSLSLSPG

SEQ ID NO: 515 - protein, 847 aa, synthetic construct
  REGION 1..847: note = ACE2-615HA/201/knob/PGLALA/YTE
QSTIEEQAKTFLDKFNHEAEDLFYQSSLASWNYNTNITEENVQNMNNAGDKWSAFLKEQSTLAQMYPLQEIQNLTVKLQLQALQQNGSSVLSEDKSKRLNTILNTMSTIYSTGKVCNPDNPQECLLLEPGLNEIMANSLDYNERLWAWESWRSEVGKQLRPLYEEYVVLKNEMARANHYEDYGDYWRGDYEVNGVDGYDYSRGQLIEDVEHTFEEIKPLYEHLHAYVRAKLMNAYPSYISPIGCLPAHLLGDMWGRFWTNLYSLTVPFGQKPNIDVTDAMVDQAWDAQRIFKEAEKFFVSVGLPNMTQGFWENSMLTDPGNVQKAVCHPTAWDLGKGDFRILMCTKVTMDDFLTAHHEMGAIQYDMAYAAQPFLLRNGANEGFHEAVGEIMSLSAATPKHLKSIGLLSPDFQEDNETEINFLLKQALTIVGTLPFTYMLEKWRWMVFKGEIPKDQWMKKWWEMKREIVGVVEPVPHDETYCDPASLFHVSNDYSFIRYYTRTLYQFQFQEALCQAAKHEGPLHKCDISNSTEAGQKLFNMLRLGKSEPWTLALENVVGAKNMNVRPLLNYFEPLFTWLKDQNKNSFVGWSTDWSPYADTSTSPTRSMAPGAVHLPQPVSTRDKTHTCPPCPAPEAAGGPSVFLFPPKPKDTLYITREPEVTCVVVDVSHEDPEVKFNWYVDGVEVHNAKTKPREEQYNSTYRVVSVLTVLHQDWLNGKEYKCKVSNKALGAPIEKTISKAKGQPREPQVYTLPPCRDELTKNQVSLWCLVKGFYPSDIAVEWESNGQPENNYKTTPPVLDSDGSFFLYSKLTVDKSRWQQGNVFSCSVMHEALHNHYTQKSLSLSPG

SEQ ID NO: 516 - protein, 972 aa, synthetic construct
  REGION 1..972: note = ACE2-740HA/201/knob/PGLALA/LS
QSTIEEQAKTFLDKFNHEAEDLFYQSSLASWNYNTNITEENVQNMNNAGDKWSAFLKEQSTLAQMYPLQEIQNLTVKLQLQALQQNGSSVLSEDKSKRLNTILNTMSTIYSTGKVCNPDNPQECLLLEPGLNEIMANSLDYNERLWAWESWRSEVGKQLRPLYEEYVVLKNEMARANHYEDYGDYWRGDYEVNGVDGYDYSRGQLIEDVEHTFEEIKPLYEHLHAYVRAKLMNAYPSYISPIGCLPAHLLGDMWGRFWTNLYSLTVPFGQKPNIDVTDAMVDQAWDAQRIFKEAEKFFVSVGLPNMTQGFWENSMLTDPGNVQKAVCHPTAWDLGKGDFRILMCTKVTMDDFLTAHHEMGAIQYDMAYAAQPFLLRNGANEGFHEAVGEIMSLSAATPKHLKSIGLLSPDFQEDNETEINFLLKQALTIVGTLPFTYMLEKWRWMVFKGEIPKDQWMKKWWEMKREIVGVVEPVPHDETYCDPASLFHVSNDYSFIRYYTRTLYQFQFQEALCQAAKHEGPLHKCDISNSTEAGQKLFNMLRLGKSEPWTLALENVVGAKNMNVRPLLNYFEPLFTWLKDQNKNSFVGWSTDWSPYADQSIKVRISLKSALGDKAYEWNDNEMYLFRSSVAYAMRQYFLKVKNQMILFGEEDVRVANLKPRISFNFFVTAPKNVSDIIPRTEVEKAIRMSRSRINDAFRLNDNSLEFLGIQPTLGPPNQPPVSTSTSPTRSMAPGAVHLPQPVSTRDKTHTCPPCPAPEAAGGPSVFLFPPKPKDTLMISRTPEVTCVVVDVSHEDPEVKFNWYVDGVEVHNAKTKPREEQYNSTYRVVSVLTVLHQDWLNGKEYKCKVSNKALGAPIEKTISKAKGQPREPQVYTLPPCRDELTKNQVSLWCLVKGFYPSDIAVEWESNGQPENNYKTTPPVLDSDGSFFLYSKLTVDKSRWQQGNVFSCSVLHEALHSHYTQKSLSLSPG

SEQ ID NO: 517 - protein, 847 aa, synthetic construct
  REGION 1..847: note = ACE2-615HA/201/hole/PGLALA/LS/RF
QSTIEEQAKTFLDKFNHEAEDLFYQSSLASWNYNTNITEENVQNMNNAGDKWSAFLKEQSTLAQMYPLQEIQNLTVKLQLQALQQNGSSVLSEDKSKRLNTILNTMSTIYSTGKVCNPDNPQECLLLEPGLNEIMANSLDYNERLWAWESWRSEVGKQLRPLYEEYVVLKNEMARANHYEDYGDYWRGDYEVNGVDGYDYSRGQLIEDVEHTFEEIKPLYEHLHAYVRAKLMNAYPSYISPIGCLPAHLLGDMWGRFWTNLYSLTVPFGQKPNIDVTDAMVDQAWDAQRIFKEAEKFFVSVGLPNMTQGFWENSMLTDPGNVQKAVCHPTAWDLGKGDFRILMCTKVTMDDFLTAHHEMGAIQYDMAYAAQPFLLRNGANEGFHEAVGEIMSLSAATPKHLKSIGLLSPDFQEDNETEINFLLKQALTIVGTLPFTYMLEKWRWMVFKGEIPKDQWMKKWWEMKREIVGVVEPVPHDETYCDPASLFHVSNDYSFIRYYTRTLYQFQFQEALCQAAKHEGPLHKCDISNSTEAGQKLFNMLRLGKSEPWTLALENVVGAKNMNVRPLLNYFEPLFTWLKDQNKNSFVGWSTDWSPYADTSTSPTRSMAPGAVHLPQPVSTRDKTHTCPPCPAPEAAGGPSVFLFPPKPKDTLMISRTPEVTCVVVDVSHEDPEVKFNWYVDGVEVHNAKTKPREEQYNSTYRVVSVLTVLHQDWLNGKEYKCKVSNKALGAPIEKTISKAKGQPREPQVCTLPPSRDELTKNQVSLSCAVKGFYPSDIAVEWESNGQPENNYKTTPPVLDSDGSFFLVSKLTVDKSRWQQGNVFSCSVLHEALHSRFTQKSLSLSPG

SEQ ID NO: 518 - protein, 972 aa, synthetic construct
  REGION 1..972: note = ACE2-740HA/201/hole/PGLALA/LS/RF
QSTIEEQAKTFLDKFNHEAEDLFYQSSLASWNYNTNITEENVQNMNNAGDKWSAFLKEQSTLAQMYPLQEIQNLTVKLQLQALQQNGSSVLSEDKSKRLNTILNTMSTIYSTGKVCNPDNPQECLLLEPGLNEIMANSLDYNERLWAWESWRSEVGKQLRPLYEEYVVLKNEMARANHYEDYGDYWRGDYEVNGVDGYDYSRGQLIEDVEHTFEEIKPLYEHLHAYVRAKLMNAYPSYISPIGCLPAHLLGDMWGRFWTNLYSLTVPFGQKPNIDVTDAMVDQAWDAQRIFKEAEKFFVSVGLPNMTQGFWENSMLTDPGNVQKAVCHPTAWDLGKGDFRILMCTKVTMDDFLTAHHEMGAIQYDMAYAAQPFLLRNGANEGFHEAVGEIMSLSAATPKHLKSIGLLSPDFQEDNETEINFLLKQALTIVGTLPFTYMLEKWRWMVFKGEIPKDQWMKKWWEMKREIVGVVEPVPHDETYCDPASLFHVSNDYSFIRYYTRTLYQFQFQEALCQAAKHEGPLHKCDISNSTEAGQKLFNMLRLGKSEPWTLALENVVGAKNMNVRPLLNYFEPLFTWLKDQNKNSFVGWSTDWSPYADQSIKVRISLKSALGDKAYEWNDNEMYLFRSSVAYAMRQYFLKVKNQMILFGEEDVRVANLKPRISFNFFVTAPKNVSDIIPRTEVEKAIRMSRSRINDAFRLNDNSLEFLGIQPTLGPPNQPPVSTSTSPTRSMAPGAVHLPQPVSTRDKTHTCPPCPAPEAAGGPSVFLFPPKPKDTLMISRTPEVTCVVVDVSHEDPEVKFNWYVDGVEVHNAKTKPREEQYNSTYRVVSVLTVLHQDWLNGKEYKCKVSNKALGAPIEKTISKAKGQPREPQVCTLPPSRDELTKNQVSLSCAVKGFYPSDIAVEWESNGQPENNYKTTPPVLDSDGSFFLVSKLTVDKSRWQQGNVFSCSVLHEALHSRFTQKSLSLSPG

SEQ ID NO: 519 - protein, 847 aa, synthetic construct
  REGION 1..847: note = ACE2-615HA/201/knob/PGLALA/LS
QSTIEEQAKTFLDKFNHEAEDLFYQSSLASWNYNTNITEENVQNMNNAGDKWSAFLKEQSTLAQMYPLQEIQNLTVKLQLQALQQNGSSVLSEDKSKRLNTILNTMSTIYSTGKVCNPDNPQECLLLEPGLNEIMANSLDYNERLWAWESWRSEVGKQLRPLYEEYVVLKNEMARANHYEDYGDYWRGDYEVNGVDGYDYSRGQLIEDVEHTFEEIKPLYEHLHAYVRAKLMNAYPSYISPIGCLPAHLLGDMWGRFWTNLYSLTVPFGQKPNIDVTDAMVDQAWDAQRIFKEAEKFFVSVGLPNMTQGFWENSMLTDPGNVQKAVCHPTAWDLGKGDFRILMCTKVTMDDFLTAHHEMGAIQYDMAYAAQPFLLRNGANEGFHEAVGEIMSLSAATPKHLKSIGLLSPDFQEDNETEINFLLKQALTIVGTLPFTYMLEKWRWMVFKGEIPKDQWMKKWWEMKREIVGVVEPVPHDETYCDPASLFHVSNDYSFIRYYTRTLYQFQFQEALCQAAKHEGPLHKCDISNSTEAGQKLFNMLRLGKSEPWTLALENVVGAKNMNVRPLLNYFEPLFTWLKDQNKNSFVGWSTDWSPYADTSTSPTRSMAPGAVHLPQPVSTRDKTHTCPPCPAPEAAGGPSVFLFPPKPKDTLMISRTPEVTCVVVDVSHEDPEVKFNWYVDGVEVHNAKTKPREEQYNSTYRVVSVLTVLHQDWLNGKEYKCKVSNKALGAPIEKTISKAKGQPREPQVYTLPPCRDELTKNQVSLWCLVKGFYPSDIAVEWESNGQPENNYKTTPPVLDSDGSFFLYSKLTVDKSRWQQGNVFSCSVLHEALHSHYTQKSLSLSPG

SEQ ID NO: 520 - protein, 972 aa, synthetic construct
  REGION 1..972: note = ACE2-740HA/201/knob/PGLALA/DHS
QSTIEEQAKTFLDKFNHEAEDLFYQSSLASWNYNTNITEENVQNMNNAGDKWSAFLKEQSTLAQMYPLQEIQNLTVKLQLQALQQNGSSVLSEDKSKRLNTILNTMSTIYSTGKVCNPDNPQECLLLEPGLNEIMANSLDYNERLWAWESWRSEVGKQLRPLYEEYVVLKNEMARANHYEDYGDYWRGDYEVNGVDGYDYSRGQLIEDVEHTFEEIKPLYEHLHAYVRAKLMNAYPSYISPIGCLPAHLLGDMWGRFWTNLYSLTVPFGQKPNIDVTDAMVDQAWDAQRIFKEAEKFFVSVGLPNMTQGFWENSMLTDPGNVQKAVCHPTAWDLGKGDFRILMCTKVTMDDFLTAHHEMGAIQYDMAYAAQPFLLRNGANEGFHEAVGEIMSLSAATPKHLKSIGLLSPDFQEDNETEINFLLKQALTIVGTLPFTYMLEKWRWMVFKGEIPKDQWMKKWWEMKREIVGVVEPVPHDETYCDPASLFHVSNDYSFIRYYTRTLYQFQFQEALCQAAKHEGPLHKCDISNSTEAGQKLFNMLRLGKSEPWTLALENVVGAKNMNVRPLLNYFEPLFTWLKDQNKNSFVGWSTDWSPYADQSIKVRISLKSALGDKAYEWNDNEMYLFRSSVAYAMRQYFLKVKNQMILFGEEDVRVANLKPRISFNFFVTAPKNVSDIIPRTEVEKAIRMSRSRINDAFRLNDNSLEFLGIQPTLGPPNQPPVSTSTSPTRSMAPGAVHLPQPVSTRDKTHTCPPCPAPEAAGGPSVFLFPPKPKDTLMISRTPEVTCVVVDVSHEDPEVKFNWYVDGVEVHNAKTKPREEQYNSTYRVVSVLTVDHHDWLNGKEYKCKVSNKALGAPIEKTISKAKGQPREPQVYTLPPCRDELTKNQVSLWCLVKGFYPSDIAVEWESNGQPENNYKTTPPVLDSDGSFFLYSKLTVDKSRWQQGNVFSCSVMHEALHSHYTQKSLSLSPG

SEQ ID NO: 521 - protein, 847 aa, synthetic construct
  REGION 1..847: note = ACE2-615HA/201/hole/PGLALA/DHS/RF
QSTIEEQAKTFLDKFNHEAEDLFYQSSLASWNYNTNITEENVQNMNNAGDKWSAFLKEQSTLAQMYPLQEIQNLTVKLQLQALQQNGSSVLSEDKSKRLNTILNTMSTIYSTGKVCNPDNPQECLLLEPGLNEIMANSLDYNERLWAWESWRSEVGKQLRPLYEEYVVLKNEMARANHYEDYGDYWRGDYEVNGVDGYDYSRGQLIEDVEHTFEEIKPLYEHLHAYVRAKLMNAYPSYISPIGCLPAHLLGDMWGRFWTNLYSLTVPFGQKPNIDVTDAMVDQAWDAQRIFKEAEKFFVSVGLPNMTQGFWENSMLTDPGNVQKAVCHPTAWDLGKGDFRILMCTKVTMDDFLTAHHEMGAIQYDMAYAAQPFLLRNGANEGFHEAVGEIMSLSAATPKHLKSIGLLSPDFQEDNETEINFLLKQALTIVGTLPFTYMLEKWRWMVFKGEIPKDQWMKKWWEMKREIVGVVEPVPHDETYCDPASLFHVSNDYSFIRYYTRTLYQFQFQEALCQAAKHEGPLHKCDISNSTEAGQKLFNMLRLGKSEPWTLALENVVGAKNMNVRPLLNYFEPLFTWLKDQNKNSFVGWSTDWSPYADTSTSPTRSMAPGAVHLPQPVSTRDKTHTCPPCPAPEAAGGPSVFLFPPKPKDTLMISRTPEVTCVVVDVSHEDPEVKFNWYVDGVEVHNAKTKPREEQYNSTYRVVSVLTVDHHDWLNGKEYKCKVSNKALGAPIEKTISKAKGQPREPQVCTLPPSRDELTKNQVSLSCAVKGFYPSDIAVEWESNGQPENNYKTTPPVLDSDGSFFLVSKLTVDKSRWQQGNVFSCSVMHEALHSRFTQKSLSLSPG

SEQ ID NO: 522 - protein, 972 aa, synthetic construct
  REGION 1..972: note = ACE2-740HA/201/hole/PGLALA/DHS/RF
QSTIEEQAKTFLDKFNHEAEDLFYQSSLASWNYNTNITEENVQNMNNAGDKWSAFLKEQSTLAQMYPLQEIQNLTVKLQLQALQQNGSSVLSEDKSKRLNTILNTMSTIYSTGKVCNPDNPQECLLLEPGLNEIMANSLDYNERLWAWESWRSEVGKQLRPLYEEYVVLKNEMARANHYEDYGDYWRGDYEVNGVDGYDYSRGQLIEDVEHTFEEIKPLYEHLHAYVRAKLMNAYPSYISPIGCLPAHLLGDMWGRFWTNLYSLTVPFGQKPNIDVTDAMVDQAWDAQRIFKEAEKFFVSVGLPNMTQGFWENSMLTDPGNVQKAVCHPTAWDLGKGDFRILMCTKVTMDDFLTAHHEMGAIQYDMAYAAQPFLLRNGANEGFHEAVGEIMSLSAATPKHLKSIGLLSPDFQEDNETEINFLLKQALTIVGTLPFTYMLEKWRWMVFKGEIPKDQWMKKWWEMKREIVGVVEPVPHDETYCDPASLFHVSNDYSFIRYYTRTLYQFQFQEALCQAAKHEGPLHKCDISNSTEAGQKLFNMLRLGKSEPWTLALENVVGAKNMNVRPLLNYFEPLFTWLKDQNKNSFVGWSTDWSPYADQSIKVRISLKSALGDKAYEWNDNEMYLFRSSVAYAMRQYFLKVKNQMILFGEEDVRVANLKPRISFNFFVTAPKNVSDIIPRTEVEKAIRMSRSRINDAFRLNDNSLEFLGIQPTLGPPNQPPVSTSTSPTRSMAPGAVHLPQPVSTRDKTHTCPPCPAPEAAGGPSVFLFPPKPKDTLMISRTPEVTCVVVDVSHEDPEVKFNWYVDGVEVHNAKTKPREEQYNSTYRVVSVLTVDHHDWLNGKEYKCKVSNKALGAPIEKTISKAKGQPREPQVCTLPPSRDELTKNQVSLSCAVKGFYPSDIAVEWESNGQPENNYKTTPPVLDSDGSFFLVSKLTVDKSRWQQGNVFSCSVMHEALHSRFTQKSLSLSPG

SEQ ID NO: 523 - protein, 847 aa, synthetic construct
  REGION 1..847: note = ACE2-615HA/201/knob/PGLALA/DHS
QSTIEEQAKTFLDKFNHEAEDLFYQSSLASWNYNTNITEENVQNMNNAGDKWSAFLKEQSTLAQMYPLQEIQNLTVKLQLQALQQNGSSVLSEDKSKRLNTILNTMSTIYSTGKVCNPDNPQECLLLEPGLNEIMANSLDYNERLWAWESWRSEVGKQLRPLYEEYVVLKNEMARANHYEDYGDYWRGDYEVNGVDGYDYSRGQLIEDVEHTFEEIKPLYEHLHAYVRAKLMNAYPSYISPIGCLPAHLLGDMWGRFWTNLYSLTVPFGQKPNIDVTDAMVDQAWDAQRIFKEAEKFFVSVGLPNMTQGFWENSMLTDPGNVQKAVCHPTAWDLGKGDFRILMCTKVTMDDFLTAHHEMGAIQYDMAYAAQPFLLRNGANEGFHEAVGEIMSLSAATPKHLKSIGLLSPDFQEDNETEINFLLKQALTIVGTLPFTYMLEKWRWMVFKGEIPKDQWMKKWWEMKREIVGVVEPVPHDETYCDPASLFHVSNDYSFIRYYTRTLYQFQFQEALCQAAKHEGPLHKCDISNSTEAGQKLFNMLRLGKSEPWTLALENVVGAKNMNVRPLLNYFEPLFTWLKDQNKNSFVGWSTDWSPYADTSTSPTRSMAPGAVHLPQPVSTRDKTHTCPPCPAPEAAGGPSVFLFPPKPKDTLMISRTPEVTCVVVDVSHEDPEVKFNWYVDGVEVHNAKTKPREEQYNSTYRVVSVLTVDHHDWLNGKEYKCKVSNKALGAPIEKTISKAKGQPREPQVYTLPPCRDELTKNQVSLWCLVKGFYPSDIAVEWESNGQPENNYKTTPPVLDSDGSFFLYSKLTVDKSRWQQGNVFSCSVMHEALHSHYTQKSLSLSPG

SEQ ID NO: 524 - protein, 972 aa, synthetic construct
  REGION 1..972: note = ACE2-740HA/201/hole/RF
QSTIEEQAKTFLDKFNHEAEDLFYQSSLASWNYNTNITEENVQNMNNAGDKWSAFLKEQSTLAQMYPLQEIQNLTVKLQLQALQQNGSSVLSEDKSKRLNTILNTMSTIYSTGKVCNPDNPQECLLLEPGLNEIMANSLDYNERLWAWESWRSEVGKQLRPLYEEYVVLKNEMARANHYEDYGDYWRGDYEVNGVDGYDYSRGQLIEDVEHTFEEIKPLYEHLHAYVRAKLMNAYPSYISPIGCLPAHLLGDMWGRFWTNLYSLTVPFGQKPNIDVTDAMVDQAWDAQRIFKEAEKFFVSVGLPNMTQGFWENSMLTDPGNVQKAVCHPTAWDLGKGDFRILMCTKVTMDDFLTAHHEMGAIQYDMAYAAQPFLLRNGANEGFHEAVGEIMSLSAATPKHLKSIGLLSPDFQEDNETEINFLLKQALTIVGTLPFTYMLEKWRWMVFKGEIPKDQWMKKWWEMKREIVGVVEPVPHDETYCDPASLFHVSNDYSFIRYYTRTLYQFQFQEALCQAAKHEGPLHKCDISNSTEAGQKLFNMLRLGKSEPWTLALENVVGAKNMNVRPLLNYFEPLFTWLKDQNKNSFVGWSTDWSPYADQSIKVRISLKSALGDKAYEWNDNEMYLFRSSVAYAMRQYFLKVKNQMILFGEEDVRVANLKPRISFNFFVTAPKNVSDIIPRTEVEKAIRMSRSRINDAFRLNDNSLEFLGIQPTLGPPNQPPVSTSTSPTRSMAPGAVHLPQPVSTRDKTHTCPPCPAPELLGGPSVFLFPPKPKDTLMISRTPEVTCVVVDVSHEDPEVKFNWYVDGVEVHNAKTKPREEQYNSTYRVVSVLTVLHQDWLNGKEYKCKVSNKALPAPIEKTISKAKGQPREPQVCTLPPSRDELTKNQVSLSCAVKGFYPSDIAVEWESNGQPENNYKTTPPVLDSDGSFFLVSKLTVDKSRWQQGNVFSCSVMHEALHNRFTQKSLSLSPG

SEQ ID NO: 525 - protein, 450 aa, synthetic construct
  REGION 1..450: note = B13A_VH/knob
QVQLQQSGAELVKPGASVKISCKASGYAFSNYWMNWVKQRPGKGLEWIGQIYPGDGDTNYNGNFKGKATLTADKSSSTAYIQLSSLTSEDSAVYFCGRGFIATVVEVFDHWGLGTTLTVSSASTKGPSVFPLAPSSKSTSGGTAALGCLVKDYFPEPVTVSWNSGALTSGVHTFPAVLQSSGLYSLSSVVTVPSSSLGTQTYICNVNHKPSNTKVDKKVEPKSCDKTHTCPPCPAPELLGGPSVFLFPPKPKDTLMISRTPEVTCVVVDVSHEDPEVKFNWYVDGVEVHNAKTKPREEQYNSTYRVVSVLTVLHQDWLNGKEYKCKVSNKALPAPIEKTISKAKGQPREPQVYTLPPCRDELTKNQVSLWCLVKGFYPSDIAVEWESNGQPENNYKTTPPVLDSDGSFFLYSKLTVDKSRWQQGNVFSCSVMHEALHNHYTQKSLSLSPG

SEQ ID NO: 526 - protein, 972 aa, synthetic construct
  REGION 1..972: note = ACE2-740HA/201/hole/YTE/RF
QSTIEEQAKTFLDKFNHEAEDLFYQSSLASWNYNTNITEENVQNMNNAGDKWSAFLKEQSTLAQMYPLQEIQNLTVKLQLQALQQNGSSVLSEDKSKRLNTILNTMSTIYSTGKVCNPDNPQECLLLEPGLNEIMANSLDYNERLWAWESWRSEVGKQLRPLYEEYVVLKNEMARANHYEDYGDYWRGDYEVNGVDGYDYSRGQLIEDVEHTFEEIKPLYEHLHAYVRAKLMNAYPSYISPIGCLPAHLLGDMWGRFWTNLYSLTVPFGQKPNIDVTDAMVDQAWDAQRIFKEAEKFFVSVGLPNMTQGFWENSMLTDPGNVQKAVCHPTAWDLGKGDFRILMCTKVTMDDFLTAHHEMGAIQYDMAYAAQPFLLRNGANEGFHEAVGEIMSLSAATPKHLKSIGLLSPDFQEDNETEINFLLKQALTIVGTLPFTYMLEKWRWMVFKGEIPKDQWMKKWWEMKREIVGVVEPVPHDETYCDPASLFHVSNDYSFIRYYTRTLYQFQFQEALCQAAKHEGPLHKCDISNSTEAGQKLFNMLRLGKSEPWTLALENVVGAKNMNVRPLLNYFEPLFTWLKDQNKNSFVGWSTDWSPYADQSIKVRISLKSALGDKAYEWNDNEMYLFRSSVAYAMRQYFLKVKNQMILFGEEDVRVANLKPRISFNFFVTAPKNVSDIIPRTEVEKAIRMSRSRINDAFRLNDNSLEFLGIQPTLGPPNQPPVSTSTSPTRSMAPGAVHLPQPVSTRDKTHTCPPCPAPELLGGPSVFLFPPKPKDTLYITREPEVTCVVVDVSHEDPEVKFNWYVDGVEVHNAKTKPREEQYNSTYRVVSVLTVLHQDWLNGKEYKCKVSNKALPAPIEKTISKAKGQPREPQVCTLPPSRDELTKNQVSLSCAVKGFYPSDIAVEWESNGQPENNYKTTPPVLDSDGSFFLVSKLTVDKSRWQQGNVFSCSVMHEALHNRFTQKSLSLSPG

SEQ ID NO: 527 - protein, 450 aa, synthetic construct
  REGION 1..450: note = B13A_VH/knob/YTE
QVQLQQSGAELVKPGASVKISCKASGYAFSNYWMNWVKQRPGKGLEWIGQIYPGDGDTNYNGNFKGKATLTADKSSSTAYIQLSSLTSEDSAVYFCGRGFIATVVEVFDHWGLGTTLTVSSASTKGPSVFPLAPSSKSTSGGTAALGCLVKDYFPEPVTVSWNSGALTSGVHTFPAVLQSSGLYSLSSVVTVPSSSLGTQTYICNVNHKPSNTKVDKKVEPKSCDKTHTCPPCPAPELLGGPSVFLFPPKPKDTLYITREPEVTCVVVDVSHEDPEVKFNWYVDGVEVHNAKTKPREEQYNSTYRVVSVLTVLHQDWLNGKEYKCKVSNKALPAPIEKTISKAKGQPREPQVYTLPPCRDELTKNQVSLWCLVKGFYPSDIAVEWESNGQPENNYKTTPPVLDSDGSFFLYSKLTVDKSRWQQGNVFSCSVMHEALHNHYTQKSLSLSPG

SEQ ID NO: 528 - protein, 450 aa, synthetic construct
  REGION 1..450: note = B13A_VH/knob/PGLALA/YTE
QVQLQQSGAELVKPGASVKISCKASGYAFSNYWMNWVKQRPGKGLEWIGQIYPGDGDTNYNGNFKGKATLTADKSSSTAYIQLSSLTSEDSAVYFCGRGFIATVVEVFDHWGLGTTLTVSSASTKGPSVFPLAPSSKSTSGGTAALGCLVKDYFPEPVTVSWNSGALTSGVHTFPAVLQSSGLYSLSSVVTVPSSSLGTQTYICNVNHKPSNTKVDKKVEPKSCDKTHTCPPCPAPEAAGGPSVFLFPPKPKDTLYITREPEVTCVVVDVSHEDPEVKFNWYVDGVEVHNAKTKPREEQYNSTYRVVSVLTVLHQDWLNGKEYKCKVSNKALGAPIEKTISKAKGQPREPQVYTLPPCRDELTKNQVSLWCLVKGFYPSDIAVEWESNGQPENNYKTTPPVLDSDGSFFLYSKLTVDKSRWQQGNVFSCSVMHEALHNHYTQKSLSLSPG

SEQ ID NO: 529 - protein, 972 aa, synthetic construct
  REGION 1..972: note = ACE2-740HA/201/hole/LS/RF
QSTIEEQAKTFLDKFNHEAEDLFYQSSLASWNYNTNITEENVQNMNNAGDKWSAFLKEQSTLAQMYPLQEIQNLTVKLQLQALQQNGSSVLSEDKSKRLNTILNTMSTIYSTGKVCNPDNPQECLLLEPGLNEIMANSLDYNERLWAWESWRSEVGKQLRPLYEEYVVLKNEMARANHYEDYGDYWRGDYEVNGVDGYDYSRGQLIEDVEHTFEEIKPLYEHLHAYVRAKLMNAYPSYISPIGCLPAHLLGDMWGRFWTNLYSLTVPFGQKPNIDVTDAMVDQAWDAQRIFKEAEKFFVSVGLPNMTQGFWENSMLTDPGNVQKAVCHPTAWDLGKGDFRILMCTKVTMDDFLTAHHEMGAIQYDMAYAAQPFLLRNGANEGFHEAVGEIMSLSAATPKHLKSIGLLSPDFQEDNETEINFLLKQALTIVGTLPFTYMLEKWRWMVFKGEIPKDQWMKKWWEMKREIVGVVEPVPHDETYCDPASLFHVSNDYSFIRYYTRTLYQFQFQEALCQAAKHEGPLHKCDISNSTEAGQKLFNMLRLGKSEPWTLALENVVGAKNMNVRPLLNYFEPLFTWLKDQNKNSFVGWSTDWSPYADQSIKVRISLKSALGDKAYEWNDNEMYLFRSSVAYAMRQYFLKVKNQMILFGEEDVRVANLKPRISFNFFVTAPKNVSDIIPRTEVEKAIRMSRSRINDAFRLNDNSLEFLGIQPTLGPPNQPPVSTSTSPTRSMAPGAVHLPQPVSTRDKTHTCPPCPAPELLGGPSVFLFPPKPKDTLMISRTPEVTCVVVDVSHEDPEVKFNWYVDGVEVHNAKTKPREEQYNSTYRVVSVLTVLHQDWLNGKEYKCKVSNKALPAPIEKTISKAKGQPREPQVCTLPPSRDELTKNQVSLSCAVKGFYPSDIAVEWESNGQPENNYKTTPPVLDSDGSFFLVSKLTVDKSRWQQGNVFSCSVLHEALHSRFTQKSLSLSPG

SEQ ID NO: 530 - protein, 450 aa, synthetic construct
  REGION 1..450: note = B13A_VH/knob/LS
QVQLQQSGAELVKPGASVKISCKASGYAFSNYWMNWVKQRPGKGLEWIGQIYPGDGDTNYNGNFKGKATLTADKSSSTAYIQLSSLTSEDSAVYFCGRGFIATVVEVFDHWGLGTTLTVSSASTKGPSVFPLAPSSKSTSGGTAALGCLVKDYFPEPVTVSWNSGALTSGVHTFPAVLQSSGLYSLSSVVTVPSSSLGTQTYICNVNHKPSNTKVDKKVEPKSCDKTHTCPPCPAPELLGGPSVFLFPPKPKDTLMISRTPEVTCVVVDVSHEDPEVKFNWYVDGVEVHNAKTKPREEQYNSTYRVVSVLTVLHQDWLNGKEYKCKVSNKALPAPIEKTISKAKGQPREPQVYTLPPCRDELTKNQVSLWCLVKGFYPSDIAVEWESNGQPENNYKTTPPVLDSDGSFFLYSKLTVDKSRWQQGNVFSCSVLHEALHSHYTQKSLSLSPG

SEQ ID NO: 531 - protein, 450 aa, synthetic construct
  REGION 1..450: note = B13A_VH/knob/PGLALA/LS
QVQLQQSGAELVKPGASVKISCKASGYAFSNYWMNWVKQRPGKGLEWIGQIYPGDGDTNYNGNFKGKATLTADKSSSTAYIQLSSLTSEDSAVYFCGRGFIATVVEVFDHWGLGTTLTVSSASTKGPSVFPLAPSSKSTSGGTAALGCLVKDYFPEPVTVSWNSGALTSGVHTFPAVLQSSGLYSLSSVVTVPSSSLGTQTYICNVNHKPSNTKVDKKVEPKSCDKTHTCPPCPAPEAAGGPSVFLFPPKPKDTLMISRTPEVTCVVVDVSHEDPEVKFNWYVDGVEVHNAKTKPREEQYNSTYRVVSVLTVLHQDWLNGKEYKCKVSNKALGAPIEKTISKAKGQPREPQVYTLPPCRDELTKNQVSLWCLVKGFYPSDIAVEWESNGQPENNYKTTPPVLDSDGSFFLYSKLTVDKSRWQQGNVFSCSVLHEALHSHYTQKSLSLSPG

SEQ ID NO: 532 - protein, 972 aa, synthetic construct
  REGION 1..972: note = ACE2-740HA/201/hole/DHS/RF
QSTIEEQAKTFLDKFNHEAEDLFYQSSLASWNYNTNITEENVQNMNNAGDKWSAFLKEQSTLAQMYPLQEIQNLTVKLQLQALQQNGSSVLSEDKSKRLNTILNTMSTIYSTGKVCNPDNPQECLLLEPGLNEIMANSLDYNERLWAWESWRSEVGKQLRPLYEEYVVLKNEMARANHYEDYGDYWRGDYEVNGVDGYDYSRGQLIEDVEHTFEEIKPLYEHLHAYVRAKLMNAYPSYISPIGCLPAHLLGDMWGRFWTNLYSLTVPFGQKPNIDVTDAMVDQAWDAQRIFKEAEKFFVSVGLPNMTQGFWENSMLTDPGNVQKAVCHPTAWDLGKGDFRILMCTKVTMDDFLTAHHEMGAIQYDMAYAAQPFLLRNGANEGFHEAVGEIMSLSAATPKHLKSIGLLSPDFQEDNETEINFLLKQALTIVGTLPFTYMLEKWRWMVFKGEIPKDQWMKKWWEMKREIVGVVEPVPHDETYCDPASLFHVSNDYSFIRYYTRTLYQFQFQEALCQAAKHEGPLHKCDISNSTEAGQKLFNMLRLGKSEPWTLALENVVGAKNMNVRPLLNYFEPLFTWLKDQNKNSFVGWSTDWSPYADQSIKVRISLKSALGDKAYEWNDNEMYLFRSSVAYAMRQYFLKVKNQMILFGEEDVRVANLKPRISFNFFVTAPKNVSDIIPRTEVEKAIRMSRSRINDAFRLNDNSLEFLGIQPTLGPPNQPPVSTSTSPTRSMAPGAVHLPQPVSTRDKTHTCPPCPAPELLGGPSVFLFPPKPKDTLMISRTPEVTCVVVDVSHEDPEVKFNWYVDGVEVHNAKTKPREEQYNSTYRVVSVLTVDHHDWLNGKEYKCKVSNKALPAPIEKTISKAKGQPREPQVCTLPPSRDELTKNQVSLSCAVKGFYPSDIAVEWESNGQPENNYKTTPPVLDSDGSFFLVSKLTVDKSRWQQGNVFSCSVMHEALHSRFTQKSLSLSPG

SEQ ID NO: 533 - protein, 450 aa, synthetic construct
  REGION 1..450: note = B13A_VH/knob/DHS
QVQLQQSGAELVKPGASVKISCKASGYAFSNYWMNWVKQRPGKGLEWIGQIYPGDGDTNYNGNFKGKATLTADKSSSTAYIQLSSLTSEDSAVYFCGRGFIATVVEVFDHWGLGTTLTVSSASTKGPSVFPLAPSSKSTSGGTAALGCLVKDYFPEPVTVSWNSGALTSGVHTFPAVLQSSGLYSLSSVVTVPSSSLGTQTYICNVNHKPSNTKVDKKVEPKSCDKTHTCPPCPAPELLGGPSVFLFPPKPKDTLMISRTPEVTCVVVDVSHEDPEVKFNWYVDGVEVHNAKTKPREEQYNSTYRVVSVLTVDHHDWLNGKEYKCKVSNKALPAPIEKTISKAKGQPREPQVYTLPPCRDELTKNQVSLWCLVKGFYPSDIAVEWESNGQPENNYKTTPPVLDSDGSFFLYSKLTVDKSRWQQGNVFSCSVMHEALHSHYTQKSLSLSPG

SEQ ID NO: 534 - protein, 450 aa, synthetic construct
  REGION 1..450: note = B13A_VH/knob/PGLALA/DHS
QVQLQQSGAELVKPGASVKISCKASGYAFSNYWMNWVKQRPGKGLEWIGQIYPGDGDTNYNGNFKGKATLTADKSSSTAYIQLSSLTSEDSAVYFCGRGFIATVVEVFDHWGLGTTLTVSSASTKGPSVFPLAPSSKSTSGGTAALGCLVKDYFPEPVTVSWNSGALTSGVHTFPAVLQSSGLYSLSSVVTVPSSSLGTQTYICNVNHKPSNTKVDKKVEPKSCDKTHTCPPCPAPEAAGGPSVFLFPPKPKDTLMISRTPEVTCVVVDVSHEDPEVKFNWYVDGVEVHNAKTKPREEQYNSTYRVVSVLTVDHHDWLNGKEYKCKVSNKALGAPIEKTISKAKGQPREPQVYTLPPCRDELTKNQVSLWCLVKGFYPSDIAVEWESNGQPENNYKTTPPVLDSDGSFFLYSKLTVDKSRWQQGNVFSCSVMHEALHSHYTQKSLSLSPG

SEQ ID NO: 535 - protein, 447 aa, synthetic construct
  REGION 1..447: note = O24A_VH/knob
QAYLQQSGAELVRPGASVKMSCKASGYTFTSYSMHWVKQTPRQGLEWIGAIYPGNDDTSYNQKFKGKATLTVDRSSSTAYMQLSSLTSEDSAVYFCTRDYSNYPFDYWGQGTTLTVSSASTKGPSVFPLAPSSKSTSGGTAALGCLVKDYFPEPVTVSWNSGALTSGVHTFPAVLQSSGLYSLSSVVTVPSSSLGTQTYICNVNHKPSNTKVDKKVEPKSCDKTHTCPPCPAPELLGGPSVFLFPPKPKDTLMISRTPEVTCVVVDVSHEDPEVKFNWYVDGVEVHNAKTKPREEQYNSTYRVVSVLTVLHQDWLNGKEYKCKVSNKALPAPIEKTISKAKGQPREPQVYTLPPCRDELTKNQVSLWCLVKGFYPSDIAVEWESNGQPENNYKTTPPVLDSDGSFFLYSKLTVDKSRWQQGNVFSCSVMHEALHNHYTQKSLSLSPG

SEQ ID NO: 536 - protein, 447 aa, synthetic construct
  REGION 1..447: note = O24A_VH/knob/YTE
QAYLQQSGAELVRPGASVKMSCKASGYTFTSYSMHWVKQTPRQGLEWIGAIYPGNDDTSYNQKFKGKATLTVDRSSSTAYMQLSSLTSEDSAVYFCTRDYSNYPFDYWGQGTTLTVSSASTKGPSVFPLAPSSKSTSGGTAALGCLVKDYFPEPVTVSWNSGALTSGVHTFPAVLQSSGLYSLSSVVTVPSSSLGTQTYICNVNHKPSNTKVDKKVEPKSCDKTHTCPPCPAPELLGGPSVFLFPPKPKDTLYITREPEVTCVVVDVSHEDPEVKFNWYVDGVEVHNAKTKPREEQYNSTYRVVSVLTVLHQDWLNGKEYKCKVSNKALPAPIEKTISKAKGQPREPQVYTLPPCRDELTKNQVSLWCLVKGFYPSDIAVEWESNGQPENNYKTTPPVLDSDGSFFLYSKLTVDKSRWQQGNVFSCSVMHEALHNHYTQKSLSLSPG

SEQ ID NO: 537 - protein, 447 aa, synthetic construct
  REGION 1..447: note = O24A_VH/knob/PGLALA/YTE
QAYLQQSGAELVRPGASVKMSCKASGYTFTSYSMHWVKQTPRQGLEWIGAIYPGNDDTSYNQKFKGKATLTVDRSSSTAYMQLSSLTSEDSAVYFCTRDYSNYPFDYWGQGTTLTVSSASTKGPSVFPLAPSSKSTSGGTAALGCLVKDYFPEPVTVSWNSGALTSGVHTFPAVLQSSGLYSLSSVVTVPSSSLGTQTYICNVNHKPSNTKVDKKVEPKSCDKTHTCPPCPAPEAAGGPSVFLFPPKPKDTLYITREPEVTCVVVDVSHEDPEVKFNWYVDGVEVHNAKTKPREEQYNSTYRVVSVLTVLHQDWLNGKEYKCKVSNKALGAPIEKTISKAKGQPREPQVYTLPPCRDELTKNQVSLWCLVKGFYPSDIAVEWESNGQPENNYKTTPPVLDSDGSFFLYSKLTVDKSRWQQGNVFSCSVMHEALHNHYTQKSLSLSPG

SEQ ID NO: 538 - protein, 447 aa, synthetic construct
  REGION 1..447: note = O24A_VH/knob/LS
QAYLQQSGAELVRPGASVKMSCKASGYTFTSYSMHWVKQTPRQGLEWIGAIYPGNDDTSYNQKFKGKATLTVDRSSSTAYMQLSSLTSEDSAVYFCTRDYSNYPFDYWGQGTTLTVSSASTKGPSVFPLAPSSKSTSGGTAALGCLVKDYFPEPVTVSWNSGALTSGVHTFPAVLQSSGLYSLSSVVTVPSSSLGTQTYICNVNHKPSNTKVDKKVEPKSCDKTHTCPPCPAPELLGGPSVFLFPPKPKDTLMISRTPEVTCVVVDVSHEDPEVKFNWYVDGVEVHNAKTKPREEQYNSTYRVVSVLTVLHQDWLNGKEYKCKVSNKALPAPIEKTISKAKGQPREPQVYTLPPCRDELTKNQVSLWCLVKGFYPSDIAVEWESNGQPENNYKTTPPVLDSDGSFFLYSKLTVDKSRWQQGNVFSCSVLHEALHSHYTQKSLSLSPG

SEQ ID NO: 539 - protein, 447 aa, synthetic construct
  REGION 1..447: note = O24A_VH/knob/PGLALA/LS
QAYLQQSGAELVRPGASVKMSCKASGYTFTSYSMHWVKQTPRQGLEWIGAIYPGNDDTSYNQKFKGKATLTVDRSSSTAYMQLSSLTSEDSAVYFCTRDYSNYPFDYWGQGTTLTVSSASTKGPSVFPLAPSSKSTSGGTAALGCLVKDYFPEPVTVSWNSGALTSGVHTFPAVLQSSGLYSLSSVVTVPSSSLGTQTYICNVNHKPSNTKVDKKVEPKSCDKTHTCPPCPAPEAAGGPSVFLFPPKPKDTLMISRTPEVTCVVVDVSHEDPEVKFNWYVDGVEVHNAKTKPREEQYNSTYRVVSVLTVLHQDWLNGKEYKCKVSNKALGAPIEKTISKAKGQPREPQVYTLPPCRDELTKNQVSLWCLVKGFYPSDIAVEWESNGQPENNYKTTPPVLDSDGSFFLYSKLTVDKSRWQQGNVFSCSVLHEALHSHYTQKSLSLSPG

SEQ ID NO: 540 - protein, 447 aa, synthetic construct
  REGION 1..447: note = O24A_VH/knob/DHS
QAYLQQSGAELVRPGASVKMSCKASGYTFTSYSMHWVKQTPRQGLEWIGAIYPGNDDTSYNQKFKGKATLTVDRSSSTAYMQLSSLTSEDSAVYFCTRDYSNYPFDYWGQGTTLTVSSASTKGPSVFPLAPSSKSTSGGTAALGCLVKDYFPEPVTVSWNSGALTSGVHTFPAVLQSSGLYSLSSVVTVPSSSLGTQTYICNVNHKPSNTKVDKKVEPKSCDKTHTCPPCPAPELLGGPSVFLFPPKPKDTLMISRTPEVTCVVVDVSHEDPEVKFNWYVDGVEVHNAKTKPREEQYNSTYRVVSVLTVDHHDWLNGKEYKCKVSNKALPAPIEKTISKAKGQPREPQVYTLPPCRDELTKNQVSLWCLVKGFYPSDIAVEWESNGQPENNYKTTPPVLDSDGSFFLYSKLTVDKSRWQQGNVFSCSVMHEALHSHYTQKSLSLSPG

SEQ ID NO: 541 - protein, 447 aa, synthetic construct
  REGION 1..447: note = O24A_VH/knob/PGLALA/DHS
QAYLQQSGAELVRPGASVKMSCKASGYTFTSYSMHWVKQTPRQGLEWIGAIYPGNDDTSYNQKFKGKATLTVDRSSSTAYMQLSSLTSEDSAVYFCTRDYSNYPFDYWGQGTTLTVSSASTKGPSVFPLAPSSKSTSGGTAALGCLVKDYFPEPVTVSWNSGALTSGVHTFPAVLQSSGLYSLSSVVTVPSSSLGTQTYICNVNHKPSNTKVDKKVEPKSCDKTHTCPPCPAPEAAGGPSVFLFPPKPKDTLMISRTPEVTCVVVDVSHEDPEVKFNWYVDGVEVHNAKTKPREEQYNSTYRVVSVLTVDHHDWLNGKEYKCKVSNKALGAPIEKTISKAKGQPREPQVYTLPPCRDELTKNQVSLWCLVKGFYPSDIAVEWESNGQPENNYKTTPPVLDSDGSFFLYSKLTVDKSRWQQGNVFSCSVMHEALHSHYTQKSLSLSPG

SEQ ID NO: 542 - protein, 972 aa, synthetic construct
  REGION 1..972: note = ACE2-740HA/201/knob
QSTIEEQAKTFLDKFNHEAEDLFYQSSLASWNYNTNITEENVQNMNNAGDKWSAFLKEQSTLAQMYPLQEIQNLTVKLQLQALQQNGSSVLSEDKSKRLNTILNTMSTIYSTGKVCNPDNPQECLLLEPGLNEIMANSLDYNERLWAWESWRSEVGKQLRPLYEEYVVLKNEMARANHYEDYGDYWRGDYEVNGVDGYDYSRGQLIEDVEHTFEEIKPLYEHLHAYVRAKLMNAYPSYISPIGCLPAHLLGDMWGRFWTNLYSLTVPFGQKPNIDVTDAMVDQAWDAQRIFKEAEKFFVSVGLPNMTQGFWENSMLTDPGNVQKAVCHPTAWDLGKGDFRILMCTKVTMDDFLTAHHEMGAIQYDMAYAAQPFLLRNGANEGFHEAVGEIMSLSAATPKHLKSIGLLSPDFQEDNETEINFLLKQALTIVGTLPFTYMLEKWRWMVFKGEIPKDQWMKKWWEMKREIVGVVEPVPHDETYCDPASLFHVSNDYSFIRYYTRTLYQFQFQEALCQAAKHEGPLHKCDISNSTEAGQKLFNMLRLGKSEPWTLALENVVGAKNMNVRPLLNYFEPLFTWLKDQNKNSFVGWSTDWSPYADQSIKVRISLKSALGDKAYEWNDNEMYLFRSSVAYAMRQYFLKVKNQMILFGEEDVRVANLKPRISFNFFVTAPKNVSDIIPRTEVEKAIRMSRSRINDAFRLNDNSLEFLGIQPTLGPPNQPPVSTSTSPTRSMAPGAVHLPQPVSTRDKTHTCPPCPAPELLGGPSVFLFPPKPKDTLMISRTPEVTCVVVDVSHEDPEVKFNWYVDGVEVHNAKTKPREEQYNSTYRVVSVLTVLHQDWLNGKEYKCKVSNKALPAPIEKTISKAKGQPREPQVYTLPPCRDELTKNQVSLWCLVKGFYPSDIAVEWESNGQPENNYKTTPPVLDSDGSFFLYSKLTVDKSRWQQGNVFSCSVMHEALHNHYTQKSLSLSPG

SEQ ID NO: 543 - protein, 847 aa, synthetic construct
  REGION 1..847: note = ACE2-615HA/201/hole/RF
QSTIEEQAKTFLDKFNHEAEDLFYQSSLASWNYNTNITEENVQNMNNAGDKWSAFLKEQSTLAQMYPLQEIQNLTVKLQLQALQQNGSSVLSEDKSKRLNTILNTMSTIYSTGKVCNPDNPQECLLLEPGLNEIMANSLDYNERLWAWESWRSEVGKQLRPLYEEYVVLKNEMARANHYEDYGDYWRGDYEVNGVDGYDYSRGQLIEDVEHTFEEIKPLYEHLHAYVRAKLMNAYPSYISPIGCLPAHLLGDMWGRFWTNLYSLTVPFGQKPNIDVTDAMVDQAWDAQRIFKEAEKFFVSVGLPNMTQGFWENSMLTDPGNVQKAVCHPTAWDLGKGDFRILMCTKVTMDDFLTAHHEMGAIQYDMAYAAQPFLLRNGANEGFHEAVGEIMSLSAATPKHLKSIGLLSPDFQEDNETEINFLLKQALTIVGTLPFTYMLEKWRWMVFKGEIPKDQWMKKWWEMKREIVGVVEPVPHDETYCDPASLFHVSNDYSFIRYYTRTLYQFQFQEALCQAAKHEGPLHKCDISNSTEAGQKLFNMLRLGKSEPWTLALENVVGAKNMNVRPLLNYFEPLFTWLKDQNKNSFVGWSTDWSPYADTSTSPTRSMAPGAVHLPQPVSTRDKTHTCPPCPAPELLGGPSVFLFPPKPKDTLMISRTPEVTCVVVDVSHEDPEVKFNWYVDGVEVHNAKTKPREEQYNSTYRVVSVLTVLHQDWLNGKEYKCKVSNKALPAPIEKTISKAKGQPREPQVCTLPPSRDELTKNQVSLSCAVKGFYPSDIAVEWESNGQPENNYKTTPPVLDSDGSFFLVSKLTVDKSRWQQGNVFSCSVMHEALHNRFTQKSLSLSPG

SEQ ID NO: 544 - protein, 847 aa, synthetic construct
  REGION 1..847: note = ACE2-615HA/201/knob
QSTIEEQAKTFLDKFNHEAEDLFYQSSLASWNYNTNITEENVQNMNNAGDKWSAFLKEQSTLAQMYPLQEIQNLTVKLQLQALQQNGSSVLSEDKSKRLNTILNTMSTIYSTGKVCNPDNPQECLLLEPGLNEIMANSLDYNERLWAWESWRSEVGKQLRPLYEEYVVLKNEMARANHYEDYGDYWRGDYEVNGVDGYDYSRGQLIEDVEHTFEEIKPLYEHLHAYVRAKLMNAYPSYISPIGCLPAHLLGDMWGRFWTNLYSLTVPFGQKPNIDVTDAMVDQAWDAQRIFKEAEKFFVSVGLPNMTQGFWENSMLTDPGNVQKAVCHPTAWDLGKGDFRILMCTKVTMDDFLTAHHEMGAIQYDMAYAAQPFLLRNGANEGFHEAVGEIMSLSAATPKHLKSIGLLSPDFQEDNETEINFLLKQALTIVGTLPFTYMLEKWRWMVFKGEIPKDQWMKKWWEMKREIVGVVEPVPHDETYCDPASLFHVSNDYSFIRYYTRTLYQFQFQEALCQAAKHEGPLHKCDISNSTEAGQKLFNMLRLGKSEPWTLALENVVGAKNMNVRPLLNYFEPLFTWLKDQNKNSFVGWSTDWSPYADTSTSPTRSMAPGAVHLPQPVSTRDKTHTCPPCPAPELLGGPSVFLFPPKPKDTLMISRTPEVTCVVVDVSHEDPEVKFNWYVDGVEVHNAKTKPREEQYNSTYRVVSVLTVLHQDWLNGKEYKCKVSNKALPAPIEKTISKAKGQPREPQVYTLPPCRDELTKNQVSLWCLVKGFYPSDIAVEWESNGQPENNYKTTPPVLDSDGSFFLYSKLTVDKSRWQQGNVFSCSVMHEALHNHYTQKSLSLSPG

SEQ ID NO: 545 - protein, 972 aa, synthetic construct
  REGION 1..972: note = ACE2-740HA/201/knob/YTE
QSTIEEQAKTFLDKFNHEAEDLFYQSSLASWNYNTNITEENVQNMNNAGDKWSAFLKEQSTLAQMYPLQEIQNLTVKLQLQALQQNGSSVLSEDKSKRLNTILNTMSTIYSTGKVCNPDNPQECLLLEPGLNEIMANSLDYNERLWAWESWRSEVGKQLRPLYEEYVVLKNEMARANHYEDYGDYWRGDYEVNGVDGYDYSRGQLIEDVEHTFEEIKPLYEHLHAYVRAKLMNAYPSYISPIGCLPAHLLGDMWGRFWTNLYSLTVPFGQKPNIDVTDAMVDQAWDAQRIFKEAEKFFVSVGLPNMTQGFWENSMLTDPGNVQKAVCHPTAWDLGKGDFRILMCTKVTMDDFLTAHHEMGAIQYDMAYAAQPFLLRNGANEGFHEAVGEIMSLSAATPKHLKSIGLLSPDFQEDNETEINFLLKQALTIVGTLPFTYMLEKWRWMVFKGEIPKDQWMKKWWEMKREIVGVVEPVPHDETYCDPASLFHVSNDYSFIRYYTRTLYQFQFQEALCQAAKHEGPLHKCDISNSTEAGQKLFNMLRLGKSEPWTLALENVVGAKNMNVRPLLNYFEPLFTWLKDQNKNSFVGWSTDWSPYADQSIKVRISLKSALGDKAYEWNDNEMYLFRSSVAYAMRQYFLKVKNQMILFGEEDVRVANLKPRISFNFFVTAPKNVSDIIPRTEVEKAIRMSRSRINDAFRLNDNSLEFLGIQPTLGPPNQPPVSTSTSPTRSMAPGAVHLPQPVSTRDKTHTCPPCPAPELLGGPSVFLFPPKPKDTLYITREPEVTCVVVDVSHEDPEVKFNWYVDGVEVHNAKTKPREEQYNSTYRVVSVLTVLHQDWLNGKEYKCKVSNKALPAPIEKTISKAKGQPREPQVYTLPPCRDELTKNQVSLWCLVKGFYPSDIAVEWESNGQPENNYKTTPPVLDSDGSFFLYSKLTVDKSRWQQGNVFSCSVMHEALHNHYTQKSLSLSPG

SEQ ID NO: 546 - protein, 847 aa, synthetic construct
  REGION 1..847: note = ACE2-615HA/201/hole/YTE/RF
QSTIEEQAKTFLDKFNHEAEDLFYQSSLASWNYNTNITEENVQNMNNAGDKWSAFLKEQSTLAQMYPLQEIQNLTVKLQLQALQQNGSSVLSEDKSKRLNTILNTMSTIYSTGKVCNPDNPQECLLLEPGLNEIMANSLDYNERLWAWESWRSEVGKQLRPLYEEYVVLKNEMARANHYEDYGDYWRGDYEVNGVDGYDYSRGQLIEDVEHTFEEIKPLYEHLHAYVRAKLMNAYPSYISPIGCLPAHLLGDMWGRFWTNLYSLTVPFGQKPNIDVTDAMVDQAWDAQRIFKEAEKFFVSVGLPNMTQGFWENSMLTDPGNVQKAVCHPTAWDLGKGDFRILMCTKVTMDDFLTAHHEMGAIQYDMAYAAQPFLLRNGANEGFHEAVGEIMSLSAATPKHLKSIGLLSPDFQEDNETEINFLLKQALTIVGTLPFTYMLEKWRWMVFKGEIPKDQWMKKWWEMKREIVGVVEPVPHDETYCDPASLFHVSNDYSFIRYYTRTLYQFQFQEALCQAAKHEGPLHKCDISNSTEAGQKLFNMLRLGKSEPWTLALENVVGAKNMNVRPLLNYFEPLFTWLKDQNKNSFVGWSTDWSPYADTSTSPTRSMAPGAVHLPQPVSTRDKTHTCPPCPAPELLGGPSVFLFPPKPKDTLYITREPEVTCVVVDVSHEDPEVKFNWYVDGVEVHNAKTKPREEQYNSTYRVVSVLTVLHQDWLNGKEYKCKVSNKALPAPIEKTISKAKGQPREPQVCTLPPSRDELTKNQVSLSCAVKGFYPSDIAVEWESNGQPENNYKTTPPVLDSDGSFFLVSKLTVDKSRWQQGNVFSCSVMHEALHNRFTQKSLSLSPG

SEQ ID NO: 547 - protein, 847 aa, synthetic construct
  REGION 1..847: note = ACE2-615HA/201/knob/YTE
QSTIEEQAKTFLDKFNHEAEDLFYQSSLASWNYNTNITEENVQNMNNAGDKWSAFLKEQSTLAQMYPLQEIQNLTVKLQLQALQQNGSSVLSEDKSKRLNTILNTMSTIYSTGKVCNPDNPQECLLLEPGLNEIMANSLDYNERLWAWESWRSEVGKQLRPLYEEYVVLKNEMARANHYEDYGDYWRGDYEVNGVDGYDYSRGQLIEDVEHTFEEIKPLYEHLHAYVRAKLMNAYPSYISPIGCLPAHLLGDMWGRFWTNLYSLTVPFGQKPNIDVTDAMVDQAWDAQRIFKEAEKFFVSVGLPNMTQGFWENSMLTDPGNVQKAVCHPTAWDLGKGDFRILMCTKVTMDDFLTAHHEMGAIQYDMAYAAQPFLLRNGANEGFHEAVGEIMSLSAATPKHLKSIGLLSPDFQEDNETEINFLLKQALTIVGTLPFTYMLEKWRWMVFKGEIPKDQWMKKWWEMKREIVGVVEPVPHDETYCDPASLFHVSNDYSFIRYYTRTLYQFQFQEALCQAAKHEGPLHKCDISNSTEAGQKLFNMLRLGKSEPWTLALENVVGAKNMNVRPLLNYFEPLFTWLKDQNKNSFVGWSTDWSPYADTSTSPTRSMAPGAVHLPQPVSTRDKTHTCPPCPAPELLGGPSVFLFPPKPKDTLYITREPEVTCVVVDVSHEDPEVKFNWYVDGVEVHNAKTKPREEQYNSTYRVVSVLTVLHQDWLNGKEYKCKVSNKALPAPIEKTISKAKGQPREPQVYTLPPCRDELTKNQVSLWCLVKGFYPSDIAVEWESNGQPENNYKTTPPVLDSDGSFFLYSKLTVDKSRWQQGNVFSCSVMHEALHNHYTQKSLSLSPG

SEQ ID NO: 548 - protein, 972 aa, synthetic construct
  REGION 1..972: note = ACE2-740HA/201/knob/LS
QSTIEEQAKTFLDKFNHEAEDLFYQSSLASWNYNTNITEENVQNMNNAGDKWSAFLKEQSTLAQMYPLQEIQNLTVKLQLQALQQNGSSVLSEDKSKRLNTILNTMSTIYSTGKVCNPDNPQECLLLEPGLNEIMANSLDYNERLWAWESWRSEVGKQLRPLYEEYVVLKNEMARANHYEDYGDYWRGDYEVNGVDGYDYSRGQLIEDVEHTFEEIKPLYEHLHAYVRAKLMNAYPSYISPIGCLPAHLLGDMWGRFWTNLYSLTVPFGQKPNIDVTDAMVDQAWDAQRIFKEAEKFFVSVGLPNMTQGFWENSMLTDPGNVQKAVCHPTAWDLGKGDFRILMCTKVTMDDFLTAHHEMGAIQYDMAYAAQPFLLRNGANEGFHEAVGEIMSLSAATPKHLKSIGLLSPDFQEDNETEINFLLKQALTIVGTLPFTYMLEKWRWMVFKGEIPKDQWMKKWWEMKREIVGVVEPVPHDETYCDPASLFHVSNDYSFIRYYTRTLYQFQFQEALCQAAKHEGPLHKCDISNSTEAGQKLFNMLRLGKSEPWTLALENVVGAKNMNVRPLLNYFEPLFTWLKDQNKNSFVGWSTDWSPYADQSIKVRISLKSALGDKAYEWNDNEMYLFRSSVAYAMRQYFLKVKNQMILFGEEDVRVANLKPRISFNFFVTAPKNVSDIIPRTEVEKAIRMSRSRINDAFRLNDNSLEFLGIQPTLGPPNQPPVSTSTSPTRSMAPGAVHLPQPVSTRDKTHTCPPCPAPELLGGPSVFLFPPKPKDTLMISRTPEVTCVVVDVSHEDPEVKFNWYVDGVEVHNAKTKPREEQYNSTYRVVSVLTVLHQDWLNGKEYKCKVSNKALPAPIEKTISKAKGQPREPQVYTLPPCRDELTKNQVSLWCLVKGFYPSDIAVEWESNGQPENNYKTTPPVLDSDGSFFLYSKLTVDKSRWQQGNVFSCSVLHEALHSHYTQKSLSLSPG

SEQ ID NO: 549 - protein, 847 aa, synthetic construct
  REGION 1..847: note = ACE2-615HA/201/hole/LS/RF
QSTIEEQAKTFLDKFNHEAEDLFYQSSLASWNYNTNITEENVQNMNNAGDKWSAFLKEQSTLAQMYPLQEIQNLTVKLQLQALQQNGSSVLSEDKSKRLNTILNTMSTIYSTGKVCNPDNPQECLLLEPGLNEIMANSLDYNERLWAWESWRSEVGKQLRPLYEEYVVLKNEMARANHYEDYGDYWRGDYEVNGVDGYDYSRGQLIEDVEHTFEEIKPLYEHLHAYVRAKLMNAYPSYISPIGCLPAHLLGDMWGRFWTNLYSLTVPFGQKPNIDVTDAMVDQAWDAQRIFKEAEKFFVSVGLPNMTQGFWENSMLTDPGNVQKAVCHPTAWDLGKGDFRILMCTKVTMDDFLTAHHEMGAIQYDMAYAAQPFLLRNGANEGFHEAVGEIMSLSAATPKHLKSIGLLSPDFQEDNETEINFLLKQALTIVGTLPFTYMLEKWRWMVFKGEIPKDQWMKKWWEMKREIVGVVEPVPHDETYCDPASLFHVSNDYSFIRYYTRTLYQFQFQEALCQAAKHEGPLHKCDISNSTEAGQKLFNMLRLGKSEPWTLALENVVGAKNMNVRPLLNYFEPLFTWLKDQNKNSFVGWSTDWSPYADTSTSPTRSMAPGAVHLPQPVSTRDKTHTCPPCPAPELLGGPSVFLFPPKPKDTLMISRTPEVTCVVVDVSHEDPEVKFNWYVDGVEVHNAKTKPREEQYNSTYRVVSVLTVLHQDWLNGKEYKCKVSNKALPAPIEKTISKAKGQPREPQVCTLPPSRDELTKNQVSLSCAVKGFYPSDIAVEWESNGQPENNYKTTPPVLDSDGSFFLVSKLTVDKSRWQQGNVFSCSVLHEALHSRFTQKSLSLSPG

SEQ ID NO: 550 - protein, 847 aa, synthetic construct
  REGION 1..847: note = ACE2-615HA/201/knob/LS
QSTIEEQAKTFLDKFNHEAEDLFYQSSLASWNYNTNITEENVQNMNNAGDKWSAFLKEQSTLAQMYPLQEIQNLTVKLQLQALQQNGSSVLSEDKSKRLNTILNTMSTIYSTGKVCNPDNPQECLLLEPGLNEIMANSLDYNERLWAWESWRSEVGKQLRPLYEEYVVLKNEMARANHYEDYGDYWRGDYEVNGVDGYDYSRGQLIEDVEHTFEEIKPLYEHLHAYVRAKLMNAYPSYISPIGCLPAHLLGDMWGRFWTNLYSLTVPFGQKPNIDVTDAMVDQAWDAQRIFKEAEKFFVSVGLPNMTQGFWENSMLTDPGNVQKAVCHPTAWDLGKGDFRILMCTKVTMDDFLTAHHEMGAIQYDMAYAAQPFLLRNGANEGFHEAVGEIMSLSAATPKHLKSIGLLSPDFQEDNETEINFLLKQALTIVGTLPFTYMLEKWRWMVFKGEIPKDQWMKKWWEMKREIVGVVEPVPHDETYCDPASLFHVSNDYSFIRYYTRTLYQFQFQEALCQAAKHEGPLHKCDISNSTEAGQKLFNMLRLGKSEPWTLALENVVGAKNMNVRPLLNYFEPLFTWLKDQNKNSFVGWSTDWSPYADTSTSPTRSMAPGAVHLPQPVSTRDKTHTCPPCPAPELLGGPSVFLFPPKPKDTLMISRTPEVTCVVVDVSHEDPEVKFNWYVDGVEVHNAKTKPREEQYNSTYRVVSVLTVLHQDWLNGKEYKCKVSNKALPAPIEKTISKAKGQPREPQVYTLPPCRDELTKNQVSLWCLVKGFYPSDIAVEWESNGQPENNYKTTPPVLDSDGSFFLYSKLTVDKSRWQQGNVFSCSVLHEALHSHYTQKSLSLSPG

SEQ ID NO: 551 - protein, 972 aa, synthetic construct
  REGION 1..972: note = ACE2-740HA/201/knob/DHS
QSTIEEQAKTFLDKFNHEAEDLFYQSSLASWNYNTNITEENVQNMNNAGDKWSAFLKEQSTLAQMYPLQEIQNLTVKLQLQALQQNGSSVLSEDKSKRLNTILNTMSTIYSTGKVCNPDNPQECLLLEPGLNEIMANSLDYNERLWAWESWRSEVGKQLRPLYEEYVVLKNEMARANHYEDYGDYWRGDYEVNGVDGYDYSRGQLIEDVEHTFEEIKPLYEHLHAYVRAKLMNAYPSYISPIGCLPAHLLGDMWGRFWTNLYSLTVPFGQKPNIDVTDAMVDQAWDAQRIFKEAEKFFVSVGLPNMTQGFWENSMLTDPGNVQKAVCHPTAWDLGKGDFRILMCTKVTMDDFLTAHHEMGAIQYDMAYAAQPFLLRNGANEGFHEAVGEIMSLSAATPKHLKSIGLLSPDFQEDNETEINFLLKQALTIVGTLPFTYMLEKWRWMVFKGEIPKDQWMKKWWEMKREIVGVVEPVPHDETYCDPASLFHVSNDYSFIRYYTRTLYQFQFQEALCQAAKHEGPLHKCDISNSTEAGQKLFNMLRLGKSEPWTLALENVVGAKNMNVRPLLNYFEPLFTWLKDQNKNSFVGWSTDWSPYADQSIKVRISLKSALGDKAYEWNDNEMYLFRSSVAYAMRQYFLKVKNQMILFGEEDVRVANLKPRISFNFFVTAPKNVSDIIPRTEVEKAIRMSRSRINDAFRLNDNSLEFLGIQPTLGPPNQPPVSTSTSPTRSMAPGAVHLPQPVSTRDKTHTCPPCPAPELLGGPSVFLFPPKPKDTLMISRTPEVTCVVVDVSHEDPEVKFNWYVDGVEVHNAKTKPREEQYNSTYRVVSVLTVDHHDWLNGKEYKCKVSNKALPAPIEKTISKAKGQPREPQVYTLPPCRDELTKNQVSLWCLVKGFYPSDIAVEWESNGQPENNYKTTPPVLDSDGSFFLYSKLTVDKSRWQQGNVFSCSVMHEALHSHYTQKSLSLSPG

SEQ ID NO: 552 - protein, 847 aa, synthetic construct
  REGION 1..847: note = ACE2-615HA/201/hole/DHS/RF
QSTIEEQAKTFLDKFNHEAEDLFYQSSLASWNYNTNITEENVQNMNNAGDKWSAFLKEQSTLAQMYPLQEIQNLTVKLQLQALQQNGSSVLSEDKSKRLNTILNTMSTIYSTGKVCNPDNPQECLLLEPGLNEIMANSLDYNERLWAWESWRSEVGKQLRPLYEEYVVLKNEMARANHYEDYGDYWRGDYEVNGVDGYDYSRGQLIEDVEHTFEEIKPLYEHLHAYVRAKLMNAYPSYISPIGCLPAHLLGDMWGRFWTNLYSLTVPFGQKPNIDVTDAMVDQAWDAQRIFKEAEKFFVSVGLPNMTQGFWENSMLTDPGNVQKAVCHPTAWDLGKGDFRILMCTKVTMDDFLTAHHEMGAIQYDMAYAAQPFLLRNGANEGFHEAVGEIMSLSAATPKHLKSIGLLSPDFQEDNETEINFLLKQALTIVGTLPFTYMLEKWRWMVFKGEIPKDQWMKKWWEMKREIVGVVEPVPHDETYCDPASLFHVSNDYSFIRYYTRTLYQFQFQEALCQAAKHEGPLHKCDISNSTEAGQKLFNMLRLGKSEPWTLALENVVGAKNMNVRPLLNYFEPLFTWLKDQNKNSFVGWSTDWSPYADTSTSPTRSMAPGAVHLPQPVSTRDKTHTCPPCPAPELLGGPSVFLFPPKPKDTLMISRTPEVTCVVVDVSHEDPEVKFNWYVDGVEVHNAKTKPREEQYNSTYRVVSVLTVDHHDWLNGKEYKCKVSNKALPAPIEKTISKAKGQPREPQVCTLPPSRDELTKNQVSLSCAVKGFYPSDIAVEWESNGQPENNYKTTPPVLDSDGSFFLVSKLTVDKSRWQQGNVFSCSVMHEALHSRFTQKSLSLSPG

SEQ ID NO: 553 - protein, 847 aa, synthetic construct
  REGION 1..847: note = ACE2-615HA/201/knob/DHS
QSTIEEQAKTFLDKFNHEAEDLFYQSSLASWNYNTNITEENVQNMNNAGDKWSAFLKEQSTLAQMYPLQEIQNLTVKLQLQALQQNGSSVLSEDKSKRLNTILNTMSTIYSTGKVCNPDNPQECLLLEPGLNEIMANSLDYNERLWAWESWRSEVGKQLRPLYEEYVVLKNEMARANHYEDYGDYWRGDYEVNGVDGYDYSRGQLIEDVEHTFEEIKPLYEHLHAYVRAKLMNAYPSYISPIGCLPAHLLGDMWGRFWTNLYSLTVPFGQKPNIDVTDAMVDQAWDAQRIFKEAEKFFVSVGLPNMTQGFWENSMLTDPGNVQKAVCHPTAWDLGKGDFRILMCTKVTMDDFLTAHHEMGAIQYDMAYAAQPFLLRNGANEGFHEAVGEIMSLSAATPKHLKSIGLLSPDFQEDNETEINFLLKQALTIVGTLPFTYMLEKWRWMVFKGEIPKDQWMKKWWEMKREIVGVVEPVPHDETYCDPASLFHVSNDYSFIRYYTRTLYQFQFQEALCQAAKHEGPLHKCDISNSTEAGQKLFNMLRLGKSEPWTLALENVVGAKNMNVRPLLNYFEPLFTWLKDQNKNSFVGWSTDWSPYADTSTSPTRSMAPGAVHLPQPVSTRDKTHTCPPCPAPELLGGPSVFLFPPKPKDTLMISRTPEVTCVVVDVSHEDPEVKFNWYVDGVEVHNAKTKPREEQYNSTYRVVSVLTVDHHDWLNGKEYKCKVSNKALPAPIEKTISKAKGQPREPQVYTLPPCRDELTKNQVSLWCLVKGFYPSDIAVEWESNGQPENNYKTTPPVLDSDGSFFLYSKLTVDKSRWQQGNVFSCSVMHEALHSHYTQKSLSLSPG

SEQ ID NO: 554 - protein, 450 aa, synthetic construct
  REGION 1..450: note = B13A_VH-CH/wt
QVQLQQSGAELVKPGASVKISCKASGYAFSNYWMNWVKQRPGKGLEWIGQIYPGDGDTNYNGNFKGKATLTADKSSSTAYIQLSSLTSEDSAVYFCGRGFIATVVEVFDHWGLGTTLTVSSASTKGPSVFPLAPSSKSTSGGTAALGCLVKDYFPEPVTVSWNSGALTSGVHTFPAVLQSSGLYSLSSVVTVPSSSLGTQTYICNVNHKPSNTKVDKKVEPKSCDKTHTCPPCPAPELLGGPSVFLFPPKPKDTLMISRTPEVTCVVVDVSHEDPEVKFNWYVDGVEVHNAKTKPREEQYNSTYRVVSVLTVLHQDWLNGKEYKCKVSNKALPAPIEKTISKAKGQPREPQVYTLPPSRDELTKNQVSLTCLVKGFYPSDIAVEWESNGQPENNYKTTPPVLDSDGSFFLYSKLTVDKSRWQQGNVFSCSVMHEALHNHYTQKSLSLSPG

SEQ ID NO: 555 - protein, 447 aa, synthetic construct
  REGION 1..447: note = O24A_VH-CH/wt
QAYLQQSGAELVRPGASVKMSCKASGYTFTSYSMHWVKQTPRQGLEWIGAIYPGNDDTSYNQKFKGKATLTVDRSSSTAYMQLSSLTSEDSAVYFCTRDYSNYPFDYWGQGTTLTVSSASTKGPSVFPLAPSSKSTSGGTAALGCLVKDYFPEPVTVSWNSGALTSGVHTFPAVLQSSGLYSLSSVVTVPSSSLGTQTYICNVNHKPSNTKVDKKVEPKSCDKTHTCPPCPAPELLGGPSVFLFPPKPKDTLMISRTPEVTCVVVDVSHEDPEVKFNWYVDGVEVHNAKTKPREEQYNSTYRVVSVLTVLHQDWLNGKEYKCKVSNKALPAPIEKTISKAKGQPREPQVYTLPPSRDELTKNQVSLTCLVKGFYPSDIAVEWESNGQPENNYKTTPPVLDSDGSFFLYSKLTVDKSRWQQGNVFSCSVMHEALHNHYTQKSLSLSPG

SEQ ID NO: 556 - protein, 605 aa, synthetic construct
  REGION 1..605: note = RG1_VH-CH1/N84S/K147E/K213E/CLD201/hole/DHS/RF
QVQLVESGGGVVQPGRSLRLSCAASGFTFSNYAMYWVRQAPGKGLEWVAVISYDGSNKYYADSVKGRFTISRDNSKNTLYLQMSSLRTEDTAVYYCASGSDYGDYLLVYWGQGTLVTVSSASTKGPSVFPLAPSSKSTSGGTAALGCLVEDYFPEPVTVSWNSGALTSGVHTFPAVLQSSGLYSLSSVVTVPSSSLGTQTYICNVNHKPSNTKVDEKVEPKSCTDWSPYADQSIKVRISLKSALGDKAYEWNDNEMYLFRSSVAYAMRQYFLKVKNQMILFGEEDVRVANLKPRISFNFFVTAPKNVSDIIPRTEVEKAIRMSRSRINDAFRLNDNSLEFLGIQPTLGPPNQPPVSTSTSPTRSMAPGAVHLPQPVSTRDKTHTCPPCPAPELLGGPSVFLFPPKPKDTLMISRTPEVTCVVVDVSHEDPEVKFNWYVDGVEVHNAKTKPREEQYNSTYRVVSVLTVDHHDWLNGKEYKCKVSNKALPAPIEKTISKAKGQPREPQVCTLPPSRDELTKNQVSLSCAVKGFYPSDIAVEWESNGQPENNYKTTPPVLDSDGSFFLVSKLTVDKSRWQQGNVFSCSVMHEALHSRFTQKSLSLSPG

SEQ ID NO: 557 - protein, 438 aa, synthetic construct
  REGION 1..438: note = RG2_VK-x-CH1/knob/DHS
DIQMTQSPSSLSASVGDRVTITCQASQDITNYLNWYQQKPGKAPKLLIYAASNLETGVPSRFSGSGSGTDFTFTISGLQPEDIATYYCQQYDNLPLTFGGGTKVEIKSSASTKGPSVFPLAPSSKSTSGGTAALGCLVKDYFPEPVTVSWNSGALTSGVHTFPAVLQSSGLYSLSSVVTVPSSSLGTQTYICNVNHKPSNTKVDKKVEPKSCDKTHTCPPCPAPELLGGPSVFLFPPKPKDTLMISRTPEVTCVVVDVSHEDPEVKFNWYVDGVEVHNAKTKPREEQYNSTYRVVSVLTVDHHDWLNGKEYKCKVSNKALPAPIEKTISKAKGQPREPQVYTLPPCRDELTKNQVSLWCLVKGFYPSDIAVEWESNGQPENNYKTTPPVLDSDGSFFLYSKLTVDKSRWQQGNVFSCSVMHEALHSHYTQKSLSLSPG

SEQ ID NO: 558 - protein, 605 aa, synthetic construct
  REGION 1..605: note = RG1_VH-CH1/N84S/Q39K/S183E/CLD201/hole/DHS/RF
QVQLVESGGGVVQPGRSLRLSCAASGFTFSNYAMYWVRKAPGKGLEWVAVISYDGSNKYYADSVKGRFTISRDNSKNTLYLQMSSLRTEDTAVYYCASGSDYGDYLLVYWGQGTLVTVSSASTKGPSVFPLAPSSKSTSGGTAALGCLVKDYFPEPVTVSWNSGALTSGVHTFPAVLQSSGLYSLESVVTVPSSSLGTQTYICNVNHKPSNTKVDKKVEPKSCTDWSPYADQSIKVRISLKSALGDKAYEWNDNEMYLFRSSVAYAMRQYFLKVKNQMILFGEEDVRVANLKPRISFNFFVTAPKNVSDIIPRTEVEKAIRMSRSRINDAFRLNDNSLEFLGIQPTLGPPNQPPVSTSTSPTRSMAPGAVHLPQPVSTRDKTHTCPPCPAPELLGGPSVFLFPPKPKDTLMISRTPEVTCVVVDVSHEDPEVKFNWYVDGVEVHNAKTKPREEQYNSTYRVVSVLTVDHHDWLNGKEYKCKVSNKALPAPIEKTISKAKGQPREPQVCTLPPSRDELTKNQVSLSCAVKGFYPSDIAVEWESNGQPENNYKTTPPVLDSDGSFFLVSKLTVDKSRWQQGNVFSCSVMHEALHSRFTQKSLSLSPG

SEQ ID NO: 559 - protein, 438 aa, synthetic construct
  REGION 1..438: note = RG2_VK-x-CH1/Q38E/S183K/knob/DHS
DIQMTQSPSSLSASVGDRVTITCQASQDITNYLNWYQEKPGKAPKLLIYAASNLETGVPSRFSGSGSGTDFTFTISGLQPEDIATYYCQQYDNLPLTFGGGTKVEIKSSASTKGPSVFPLAPSSKSTSGGTAALGCLVKDYFPEPVTVSWNSGALTSGVHTFPAVLQSSGLYSLKSVVTVPSSSLGTQTYICNVNHKPSNTKVDKKVEPKSCDKTHTCPPCPAPELLGGPSVFLFPPKPKDTLMISRTPEVTCVVVDVSHEDPEVKFNWYVDGVEVHNAKTKPREEQYNSTYRVVSVLTVDHHDWLNGKEYKCKVSNKALPAPIEKTISKAKGQPREPQVYTLPPCRDELTKNQVSLWCLVKGFYPSDIAVEWESNGQPENNYKTTPPVLDSDGSFFLYSKLTVDKSRWQQGNVFSCSVMHEALHSHYTQKSLSLSPG

SEQ ID NO: 560 - protein, 438 aa, synthetic construct
  REGION 1..438: note = RG2_VK-x-CH1/Q38K/S183K/knob/DHS
DIQMTQSPSSLSASVGDRVTITCQASQDITNYLNWYQKKPGKAPKLLIYAASNLETGVPSRFSGSGSGTDFTFTISGLQPEDIATYYCQQYDNLPLTFGGGTKVEIKSSASTKGPSVFPLAPSSKSTSGGTAALGCLVKDYFPEPVTVSWNSGALTSGVHTFPAVLQSSGLYSLKSVVTVPSSSLGTQTYICNVNHKPSNTKVDKKVEPKSCDKTHTCPPCPAPELLGGPSVFLFPPKPKDTLMISRTPEVTCVVVDVSHEDPEVKFNWYVDGVEVHNAKTKPREEQYNSTYRVVSVLTVDHHDWLNGKEYKCKVSNKALPAPIEKTISKAKGQPREPQVYTLPPCRDELTKNQVSLWCLVKGFYPSDIAVEWESNGQPENNYKTTPPVLDSDGSFFLYSKLTVDKSRWQQGNVFSCSVMHEALHSHYTQKSLSLSPG

SEQ ID NO: 561 - protein, 605 aa, synthetic construct
  REGION 1..605: note = RG2_VH-CH1/N84S/K147E/K213E/CLD201/hole/DHS/RF
QVQLVESGGGLVKPGGSLRLSCAASGFTFSDYYMSWIRQAPGKGLEWVSYITYSGSTIYYADSVKGRFTISRDNAKSSLYLQMSSLRAEDTAVYYCARDRGTTMVPFDYWGQGTLVTVSSASTKGPSVFPLAPSSKSTSGGTAALGCLVEDYFPEPVTVSWNSGALTSGVHTFPAVLQSSGLYSLSSVVTVPSSSLGTQTYICNVNHKPSNTKVDEKVEPKSCTDWSPYADQSIKVRISLKSALGDKAYEWNDNEMYLFRSSVAYAMRQYFLKVKNQMILFGEEDVRVANLKPRISFNFFVTAPKNVSDIIPRTEVEKAIRMSRSRINDAFRLNDNSLEFLGIQPTLGPPNQPPVSTSTSPTRSMAPGAVHLPQPVSTRDKTHTCPPCPAPELLGGPSVFLFPPKPKDTLMISRTPEVTCVVVDVSHEDPEVKFNWYVDGVEVHNAKTKPREEQYNSTYRVVSVLTVDHHDWLNGKEYKCKVSNKALPAPIEKTISKAKGQPREPQVCTLPPSRDELTKNQVSLSCAVKGFYPSDIAVEWESNGQPENNYKTTPPVLDSDGSFFLVSKLTVDKSRWQQGNVFSCSVMHEALHSRFTQKSLSLSPG

SEQ ID NO: 562 - protein, 441 aa, synthetic construct
  REGION 1..441: note = RG1_VL-x-CH1/knob/DHS
QSALTQPASVSGSPGQSITISCTGTSSDVGGYNYVSWYQQHPGKAPKLMIYDVSKRPSGVSNRFSGSKSGNTASLTISGLQSEDEADYYCNSLTSISTWVFGGGTKLTVLSSASTKGPSVFPLAPSSKSTSGGTAALGCLVKDYFPEPVTVSWNSGALTSGVHTFPAVLQSSGLYSLSSVVTVPSSSLGTQTYICNVNHKPSNTKVDKKVEPKSCDKTHTCPPCPAPELLGGPSVFLFPPKPKDTLMISRTPEVTCVVVDVSHEDPEVKFNWYVDGVEVHNAKTKPREEQYNSTYRVVSVLTVDHHDWLNGKEYKCKVSNKALPAPIEKTISKAKGQPREPQVYTLPPCRDELTKNQVSLWCLVKGFYPSDIAVEWESNGQPENNYKTTPPVLDSDGSFFLYSKLTVDKSRWQQGNVFSCSVMHEALHSHYTQKSLSLSPG

SEQ ID NO: 563 - protein, 605 aa, synthetic construct
  REGION 1..605: note = RG2_VH-CH1/N84S/Q39K/S183E/CLD201/hole/DHS/RF
QVQLVESGGGLVKPGGSLRLSCAASGFTFSDYYMSWIRKAPGKGLEWVSYITYSGSTIYYADSVKGRFTISRDNAKSSLYLQMSSLRAEDTAVYYCARDRGTTMVPFDYWGQGTLVTVSSASTKGPSVFPLAPSSKSTSGGTAALGCLVKDYFPEPVTVSWNSGALTSGVHTFPAVLQSSGLYSLESVVTVPSSSLGTQTYICNVNHKPSNTKVDKKVEPKSCTDWSPYADQSIKVRISLKSALGDKAYEWNDNEMYLFRSSVAYAMRQYFLKVKNQMILFGEEDVRVANLKPRISFNFFVTAPKNVSDIIPRTEVEKAIRMSRSRINDAFRLNDNSLEFLGIQPTLGPPNQPPVSTSTSPTRSMAPGAVHLPQPVSTRDKTHTCPPCPAPELLGGPSVFLFPPKPKDTLMISRTPEVTCVVVDVSHEDPEVKFNWYVDGVEVHNAKTKPREEQYNSTYRVVSVLTVDHHDWLNGKEYKCKVSNKALPAPIEKTISKAKGQPREPQVCTLPPSRDELTKNQVSLSCAVKGFYPSDIAVEWESNGQPENNYKTTPPVLDSDGSFFLVSKLTVDKSRWQQGNVFSCSVMHEALHSRFTQKSLSLSPG

SEQ ID NO: 564 - protein, 441 aa, synthetic construct
  REGION 1..441: note = RG1_VL-x-CH1/Q38E/S183K/knob/DHS
QSALTQPASVSGSPGQSITISCTGTSSDVGGYNYVSWYQEHPGKAPKLMIYDVSKRPSGVSNRFSGSKSGNTASLTISGLQSEDEADYYCNSLTSISTWVFGGGTKLTVLSSASTKGPSVFPLAPSSKSTSGGTAALGCLVKDYFPEPVTVSWNSGALTSGVHTFPAVLQSSGLYSLKSVVTVPSSSLGTQTYICNVNHKPSNTKVDKKVEPKSCDKTHTCPPCPAPELLGGPSVFLFPPKPKDTLMISRTPEVTCVVVDVSHEDPEVKFNWYVDGVEVHNAKTKPREEQYNSTYRVVSVLTVDHHDWLNGKEYKCKVSNKALPAPIEKTISKAKGQPREPQVYTLPPCRDELTKNQVSLWCLVKGFYPSDIAVEWESNGQPENNYKTTPPVLDSDGSFFLYSKLTVDKSRWQQGNVFSCSVMHEALHSHYTQKSLSLSPG

SEQ ID NO: 565 - protein, 441 aa, synthetic construct
  REGION 1..441: note = RG1_VL-x-CH1/Q38K/S183K/knob/DHS
QSALTQPASVSGSPGQSITISCTGTSSDVGGYNYVSWYQKHPGKAPKLMIYDVSKRPSGVSNRFSGSKSGNTASLTISGLQSEDEADYYCNSLTSISTWVFGGGTKLTVLSSASTKGPSVFPLAPSSKSTSGGTAALGCLVKDYFPEPVTVSWNSGALTSGVHTFPAVLQSSGLYSLKSVVTVPSSSLGTQTYICNVNHKPSNTKVDKKVEPKSCDKTHTCPPCPAPELLGGPSVFLFPPKPKDTLMISRTPEVTCVVVDVSHEDPEVKFNWYVDGVEVHNAKTKPREEQYNSTYRVVSVLTVDHHDWLNGKEYKCKVSNKALPAPIEKTISKAKGQPREPQVYTLPPCRDELTKNQVSLWCLVKGFYPSDIAVEWESNGQPENNYKTTPPVLDSDGSFFLYSKLTVDKSRWQQGNVFSCSVMHEALHSHYTQKSLSLSPG

SEQ ID NO: 566 - protein, 605 aa, synthetic construct
  REGION 1..605: note = RG1_VH-CH1/N84S/K147E/K213E/CLD201/knob/DHS
QVQLVESGGGVVQPGRSLRLSCAASGFTFSNYAMYWVRQAPGKGLEWVAVISYDGSNKYYADSVKGRFTISRDNSKNTLYLQMSSLRTEDTAVYYCASGSDYGDYLLVYWGQGTLVTVSSASTKGPSVFPLAPSSKSTSGGTAALGCLVEDYFPEPVTVSWNSGALTSGVHTFPAVLQSSGLYSLSSVVTVPSSSLGTQTYICNVNHKPSNTKVDEKVEPKSCTDWSPYADQSIKVRISLKSALGDKAYEWNDNEMYLFRSSVAYAMRQYFLKVKNQMILFGEEDVRVANLKPRISFNFFVTAPKNVSDIIPRTEVEKAIRMSRSRINDAFRLNDNSLEFLGIQPTLGPPNQPPVSTSTSPTRSMAPGAVHLPQPVSTRDKTHTCPPCPAPELLGGPSVFLFPPKPKDTLMISRTPEVTCVVVDVSHEDPEVKFNWYVDGVEVHNAKTKPREEQYNSTYRVVSVLTVDHHDWLNGKEYKCKVSNKALPAPIEKTISKAKGQPREPQVYTLPPCRDELTKNQVSLWCLVKGFYPSDIAVEWESNGQPENNYKTTPPVLDSDGSFFLYSKLTVDKSRWQQGNVFSCSVMHEALHSHYTQKSLSLSPG

SEQ ID NO: 567 - protein, 438 aa, synthetic construct
  REGION 1..438: note = RG2_VK-x-CH1/hole/DHS/RF
DIQMTQSPSSLSASVGDRVTITCQASQDITNYLNWYQQKPGKAPKLLIYAASNLETGVPSRFSGSGSGTDFTFTISGLQPEDIATYYCQQYDNLPLTFGGGTKVEIKSSASTKGPSVFPLAPSSKSTSGGTAALGCLVKDYFPEPVTVSWNSGALTSGVHTFPAVLQSSGLYSLSSVVTVPSSSLGTQTYICNVNHKPSNTKVDKKVEPKSCDKTHTCPPCPAPELLGGPSVFLFPPKPKDTLMISRTPEVTCVVVDVSHEDPEVKFNWYVDGVEVHNAKTKPREEQYNSTYRVVSVLTVDHHDWLNGKEYKCKVSNKALPAPIEKTISKAKGQPREPQVCTLPPSRDELTKNQVSLSCAVKGFYPSDIAVEWESNGQPENNYKTTPPVLDSDGSFFLVSKLTVDKSRWQQGNVFSCSVMHEALHSRFTQKSLSLSPG

SEQ ID NO: 568 - protein, 605 aa, synthetic construct
  REGION 1..605: note = RG1_VH-CH1/N84S/Q39K/S183E/CLD201/knob/DHS
QVQLVESGGGVVQPGRSLRLSCAASGFTFSNYAMYWVRKAPGKGLEWVAVISYDGSNKYYADSVKGRFTISRDNSKNTLYLQMSSLRTEDTAVYYCASGSDYGDYLLVYWGQGTLVTVSSASTKGPSVFPLAPSSKSTSGGTAALGCLVKDYFPEPVTVSWNSGALTSGVHTFPAVLQSSGLYSLESVVTVPSSSLGTQTYICNVNHKPSNTKVDKKVEPKSCTDWSPYADQSIKVRISLKSALGDKAYEWNDNEMYLFRSSVAYAMRQYFLKVKNQMILFGEEDVRVANLKPRISFNFFVTAPKNVSDIIPRTEVEKAIRMSRSRINDAFRLNDNSLEFLGIQPTLGPPNQPPVSTSTSPTRSMAPGAVHLPQPVSTRDKTHTCPPCPAPELLGGPSVFLFPPKPKDTLMISRTPEVTCVVVDVSHEDPEVKFNWYVDGVEVHNAKTKPREEQYNSTYRVVSVLTVDHHDWLNGKEYKCKVSNKALPAPIEKTISKAKGQPREPQVYTLPPCRDELTKNQVSLWCLVKGFYPSDIAVEWESNGQPENNYKTTPPVLDSDGSFFLYSKLTVDKSRWQQGNVFSCSVMHEALHSHYTQKSLSLSPG

SEQ ID NO: 569 - protein, 438 aa, synthetic construct
  REGION 1..438: note = RG2_VK-x-CH1/Q38E/S183K/hole/DHS/RF
DIQMTQSPSSLSASVGDRVTITCQASQDITNYLNWYQEKPGKAPKLLIYAASNLETGVPSRFSGSGSGTDFTFTISGLQPEDIATYYCQQYDNLPLTFGGGTKVEIKSSASTKGPSVFPLAPSSKSTSGGTAALGCLVKDYFPEPVTVSWNSGALTSGVHTFPAVLQSSGLYSLKSVVTVPSSSLGTQTYICNVNHKPSNTKVDKKVEPKSCDKTHTCPPCPAPELLGGPSVFLFPPKPKDTLMISRTPEVTCVVVDVSHEDPEVKFNWYVDGVEVHNAKTKPREEQYNSTYRVVSVLTVDHHDWLNGKEYKCKVSNKALPAPIEKTISKAKGQPREPQVCTLPPSRDELTKNQVSLSCAVKGFYPSDIAVEWESNGQPENNYKTTPPVLDSDGSFFLVSKLTVDKSRWQQGNVFSCSVMHEALHSRFTQKSLSLSPG

SEQ ID NO: 570 - protein, 438 aa, synthetic construct
  REGION 1..438: note = RG2_VK-x-CH1/Q38K/S183K/hole/DHS/RF
DIQMTQSPSSLSASVGDRVTITCQASQDITNYLNWYQKKPGKAPKLLIYAASNLETGVPSRFSGSGSGTDFTFTISGLQPEDIATYYCQQYDNLPLTFGGGTKVEIKSSASTKGPSVFPLAPSSKSTSGGTAALGCLVKDYFPEPVTVSWNSGALTSGVHTFPAVLQSSGLYSLKSVVTVPSSSLGTQTYICNVNHKPSNTKVDKKVEPKSCDKTHTCPPCPAPELLGGPSVFLFPPKPKDTLMISRTPEVTCVVVDVSHEDPEVKFNWYVDGVEVHNAKTKPREEQYNSTYRVVSVLTVDHHDWLNGKEYKCKVSNKALPAPIEKTISKAKGQPREPQVCTLPPSRDELTKNQVSLSCAVKGFYPSDIAVEWESNGQPENNYKTTPPVLDSDGSFFLVSKLTVDKSRWQQGNVFSCSVMHEALHSRFTQKSLSLSPG

SEQ ID NO: 571 - protein, 605 aa, synthetic construct
  REGION 1..605: note = RG2_VH-CH1/N84S/K147E/K213E/CLD201/knob/DHS
QVQLVESGGGLVKPGGSLRLSCAASGFTFSDYYMSWIRQAPGKGLEWVSYITYSGSTIYYADSVKGRFTISRDNAKSSLYLQMSSLRAEDTAVYYCARDRGTTMVPFDYWGQGTLVTVSSASTKGPSVFPLAPSSKSTSGGTAALGCLVEDYFPEPVTVSWNSGALTSGVHTFPAVLQSSGLYSLSSVVTVPSSSLGTQTYICNVNHKPSNTKVDEKVEPKSCTDWSPYADQSIKVRISLKSALGDKAYEWNDNEMYLFRSSVAYAMRQYFLKVKNQMILFGEEDVRVANLKPRISFNFFVTAPKNVSDIIPRTEVEKAIRMSRSRINDAFRLNDNSLEFLGIQPTLGPPNQPPVSTSTSPTRSMAPGAVHLPQPVSTRDKTHTCPPCPAPELLGGPSVFLFPPKPKDTLMISRTPEVTCVVVDVSHEDPEVKFNWYVDGVEVHNAKTKPREEQYNSTYRVVSVLTVDHHDWLNGKEYKCKVSNKALPAPIEKTISKAKGQPREPQVYTLPPCRDELTKNQVSLWCLVKGFYPSDIAVEWESNGQPENNYKTTPPVLDSDGSFFLYSKLTVDKSRWQQGNVFSCSVMHEALHSHYTQKSLSLSPG

SEQ ID NO: 572 - protein, 441 aa, synthetic construct
  REGION 1..441: note = RG1_VL-x-CH1/hole/DHS/RF
QSALTQPASVSGSPGQSITISCTGTSSDVGGYNYVSWYQQHPGKAPKLMIYDVSKRPSGVSNRFSGSKSGNTASLTISGLQSEDEADYYCNSLTSISTWVFGGGTKLTVLSSASTKGPSVFPLAPSSKSTSGGTAALGCLVKDYFPEPVTVSWNSGALTSGVHTFPAVLQSSGLYSLSSVVTVPSSSLGTQTYICNVNHKPSNTKVDKKVEPKSCDKTHTCPPCPAPELLGGPSVFLFPPKPKDTLMISRTPEVTCVVVDVSHEDPEVKFNWYVDGVEVHNAKTKPREEQYNSTYRVVSVLTVDHHDWLNGKEYKCKVSNKALPAPIEKTISKAKGQPREPQVCTLPPSRDELTKNQVSLSCAVKGFYPSDIAVEWESNGQPENNYKTTPPVLDSDGSFFLVSKLTVDKSRWQQGNVFSCSVMHEALHSRFTQKSLSLSPG

SEQ ID NO: 573 - protein, 605 aa, synthetic construct
  REGION 1..605: note = RG2_VH-CH1/N84S/Q39K/S183E/CLD201/knob/DHS
QVQLVESGGGLVKPGGSLRLSCAASGFTFSDYYMSWIRKAPGKGLEWVSYITYSGSTIYYADSVKGRFTISRDNAKSSLYLQMSSLRAEDTAVYYCARDRGTTMVPFDYWGQGTLVTVSSASTKGPSVFPLAPSSKSTSGGTAALGCLVKDYFPEPVTVSWNSGALTSGVHTFPAVLQSSGLYSLESVVTVPSSSLGTQTYICNVNHKPSNTKVDKKVEPKSCTDWSPYADQSIKVRISLKSALGDKAYEWNDNEMYLFRSSVAYAMRQYFLKVKNQMILFGEEDVRVANLKPRISFNFFVTAPKNVSDIIPRTEVEKAIRMSRSRINDAFRLNDNSLEFLGIQPTLGPPNQPPVSTSTSPTRSMAPGAVHLPQPVSTRDKTHTCPPCPAPELLGGPSVFLFPPKPKDTLMISRTPEVTCVVVDVSHEDPEVKFNWYVDGVEVHNAKTKPREEQYNSTYRVVSVLTVDHHDWLNGKEYKCKVSNKALPAPIEKTISKAKGQPREPQVYTLPPCRDELTKNQVSLWCLVKGFYPSDIAVEWESNGQPENNYKTTPPVLDSDGSFFLYSKLTVDKSRWQQGNVFSCSVMHEALHSHYTQKSLSLSPG

SEQ ID NO: 574 - protein, 441 aa, synthetic construct
  REGION 1..441: note = RG1_VL-x-CH1/Q38E/S183K/hole/DHS/RF
QSALTQPASVSGSPGQSITISCTGTSSDVGGYNYVSWYQEHPGKAPKLMIYDVSKRPSGVSNRFSGSKSGNTASLTISGLQSEDEADYYCNSLTSISTWVFGGGTKLTVLSSASTKGPSVFPLAPSSKSTSGGTAALGCLVKDYFPEPVTVSWNSGALTSGVHTFPAVLQSSGLYSLKSVVTVPSSSLGTQTYICNVNHKPSNTKVDKKVEPKSCDKTHTCPPCPAPELLGGPSVFLFPPKPKDTLMISRTPEVTCVVVDVSHEDPEVKFNWYVDGVEVHNAKTKPREEQYNSTYRVVSVLTVDHHDWLNGKEYKCKVSNKALPAPIEKTISKAKGQPREPQVCTLPPSRDELTKNQVSLSCAVKGFYPSDIAVEWESNGQPENNYKTTPPVLDSDGSFFLVSKLTVDKSRWQQGNVFSCSVMHEALHSRFTQKSLSLSPG

SEQ ID NO: 575 - protein, 441 aa, synthetic construct
  REGION 1..441: note = RG1_VL-x-CH1/Q38K/S183K/hole/DHS/RF
QSALTQPASVSGSPGQSITISCTGTSSDVGGYNYVSWYQKHPGKAPKLMIYDVSKRPSGVSNRFSGSKSGNTASLTISGLQSEDEADYYCNSLTSISTWVFGGGTKLTVLSSASTKGPSVFPLAPSSKSTSGGTAALGCLVKDYFPEPVTVSWNSGALTSGVHTFPAVLQSSGLYSLKSVVTVPSSSLGTQTYICNVNHKPSNTKVDKKVEPKSCDKTHTCPPCPAPELLGGPSVFLFPPKPKDTLMISRTPEVTCVVVDVSHEDPEVKFNWYVDGVEVHNAKTKPREEQYNSTYRVVSVLTVDHHDWLNGKEYKCKVSNKALPAPIEKTISKAKGQPREPQVCTLPPSRDELTKNQVSLSCAVKGFYPSDIAVEWESNGQPENNYKTTPPVLDSDGSFFLVSKLTVDKSRWQQGNVFSCSVMHEALHSRFTQKSLSLSPG

SEQ ID NO: 576 - protein, 216 aa, synthetic construct
  REGION 1..216: note = RG1_VL-CL/E123R/Q124K
QSALTQPASVSGSPGQSITISCTGTSSDVGGYNYVSWYQQHPGKAPKLMIYDVSKRPSGVSNRFSGSKSGNTASLTISGLQSEDEADYYCNSLTSISTWVFGGGTKLTVLGQPKAAPSVTLFPPSSRKLQANKATLVCLISDFYPGAVTVAWKADSSPVKAGVETTTPSKQSNNKYAASSYLSLTPEQWKSHRSYSCQVTHEGSTVEKTVAPTECS

SEQ ID NO: 577 - protein, 227 aa, synthetic construct
  REGION 1..227: note = RG2_VH-x-CK/N84S
QVQLVESGGGLVKPGGSLRLSCAASGFTFSDYYMSWIRQAPGKGLEWVSYITYSGSTIYYADSVKGRFTISRDNAKSSLYLQMSSLRAEDTAVYYCARDRGTTMVPFDYWGQGTLVTVSSASVAAPSVFIFPPSDEQLKSGTASVVCLLNNFYPREAKVQWKVDNALQSGNSQESVTEQDSKDSTYSLSSTLTLSKADYEKHKVYACEVTHQGLSSPVTKSFNRGEC

SEQ ID NO: 578 - protein, 216 aa, synthetic construct
  REGION 1..216: note = RG1_VL-CL/Q38E/V133K
QSALTQPASVSGSPGQSITISCTGTSSDVGGYNYVSWYQEHPGKAPKLMIYDVSKRPSGVSNRFSGSKSGNTASLTISGLQSEDEADYYCNSLTSISTWVFGGGTKLTVLGQPKAAPSVTLFPPSSEELQANKATLKCLISDFYPGAVTVAWKADSSPVKAGVETTTPSKQSNNKYAASSYLSLTPEQWKSHRSYSCQVTHEGSTVEKTVAPTECS

SEQ ID NO: 579 - protein, 227 aa, synthetic construct
  REGION 1..227: note = RG2_VH-x-CK/N84S/Q39K/V133E
QVQLVESGGGLVKPGGSLRLSCAASGFTFSDYYMSWIRKAPGKGLEWVSYITYSGSTIYYADSVKGRFTISRDNAKSSLYLQMSSLRAEDTAVYYCARDRGTTMVPFDYWGQGTLVTVSSASVAAPSVFIFPPSDEQLKSGTASVECLLNNFYPREAKVQWKVDNALQSGNSQESVTEQDSKDSTYSLSSTLTLSKADYEKHKVYACEVTHQGLSSPVTKSFNRGEC

SEQ ID NO: 580 - protein, 227 aa, synthetic construct
  REGION 1..227: note = RG2_VH-x-CK/N84S/Q39E/V133E
QVQLVESGGGLVKPGGSLRLSCAASGFTFSDYYMSWIREAPGKGLEWVSYITYSGSTIYYADSVKGRFTISRDNAKSSLYLQMSSLRAEDTAVYYCARDRGTTMVPFDYWGQGTLVTVSSASVAAPSVFIFPPSDEQLKSGTASVECLLNNFYPREAKVQWKVDNALQSGNSQESVTEQDSKDSTYSLSSTLTLSKADYEKHKVYACEVTHQGLSSPVTKSFNRGEC

SEQ ID NO: 581 - protein, 214 aa, synthetic construct
  REGION 1..214: note = RG2_VK-CK/E123R/Q124K
DIQMTQSPSSLSASVGDRVTITCQASQDITNYLNWYQQKPGKAPKLLIYAASNLETGVPSRFSGSGSGTDFTFTISGLQPEDIATYYCQQYDNLPLTFGGGTKVEIKRTVAAPSVFIFPPSDRKLKSGTASVVCLLNNFYPREAKVQWKVDNALQSGNSQESVTEQDSKDSTYSLSSTLTLSKADYEKHKVYACEVTHQGLSSPVTKSFNRGEC

SEQ ID NO: 582 - protein, 225 aa, synthetic construct
  REGION 1..225: note = RG1_VH-x-CL/N84S
QVQLVESGGGVVQPGRSLRLSCAASGFTFSNYAMYWVRQAPGKGLEWVAVISYDGSNKYYADSVKGRFTISRDNSKNTLYLQMSSLRTEDTAVYYCASGSDYGDYLLVYWGQGTLVTVSGQPKAAPSVTLFPPSSEELQANKATLVCLISDFYPGAVTVAWKADSSPVKAGVETTTPSKQSNNKYAASSYLSLTPEQWKSHRSYSCQVTHEGSTVEKTVAPTECS

SEQ ID NO: 583 - protein, 214 aa, synthetic construct
  REGION 1..214: note = RG2_VK-CK/Q38E/V133K
DIQMTQSPSSLSASVGDRVTITCQASQDITNYLNWYQEKPGKAPKLLIYAASNLETGVPSRFSGSGSGTDFTFTISGLQPEDIATYYCQQYDNLPLTFGGGTKVEIKRTVAAPSVFIFPPSDEQLKSGTASVKCLLNNFYPREAKVQWKVDNALQSGNSQESVTEQDSKDSTYSLSSTLTLSKADYEKHKVYACEVTHQGLSSPVTKSFNRGEC

SEQ ID NO: 584 - protein, 225 aa, synthetic construct
  REGION 1..225: note = RG1_VH-x-CL/N84S/Q39K/V133E
QVQLVESGGGVVQPGRSLRLSCAASGFTFSNYAMYWVRKAPGKGLEWVAVISYDGSNKYYADSVKGRFTISRDNSKNTLYLQMSSLRTEDTAVYYCASGSDYGDYLLVYWGQGTLVTVSGQPKAAPSVTLFPPSSEELQANKATLECLISDFYPGAVTVAWKADSSPVKAGVETTTPSKQSNNKYAASSYLSLTPEQWKSHRSYSCQVTHEGSTVEKTVAPTECS

SEQ ID NO: 585 - protein, 225 aa, synthetic construct
  REGION 1..225: note = RG1_VH-x-CL/N84S/Q39E/V133E
QVQLVESGGGVVQPGRSLRLSCAASGFTFSNYAMYWVREAPGKGLEWVAVISYDGSNKYYADSVKGRFTISRDNSKNTLYLQMSSLRTEDTAVYYCASGSDYGDYLLVYWGQGTLVTVSGQPKAAPSVTLFPPSSEELQANKATLECLISDFYPGAVTVAWKADSSPVKAGVETTTPSKQSNNKYAASSYLSLTPEQWKSHRSYSCQVTHEGSTVEKTVAPTECS

SEQ ID NO: 586 - protein, 217 aa, synthetic construct
  REGION 1..217: note = RG1_VL-CK/E123R/Q124K
QSALTQPASVSGSPGQSITISCTGTSSDVGGYNYVSWYQQHPGKAPKLMIYDVSKRPSGVSNRFSGSKSGNTASLTISGLQSEDEADYYCNSLTSISTWVFGGGTKLEIKRTVAAPSVFIFPPSDRKLKSGTASVVCLLNNFYPREAKVQWKVDNALQSGNSQESVTEQDSKDSTYSLSSTLTLSKADYEKHKVYACEVTHQGLSSPVTKSFNRGEC

SEQ ID NO: 587 - protein, 217 aa, synthetic construct
  REGION 1..217: note = RG1_VL-CK/Q38E/V133K
QSALTQPASVSGSPGQSITISCTGTSSDVGGYNYVSWYQEHPGKAPKLMIYDVSKRPSGVSNRFSGSKSGNTASLTISGLQSEDEADYYCNSLTSISTWVFGGGTKLEIKRTVAAPSVFIFPPSDEQLKSGTASVKCLLNNFYPREAKVQWKVDNALQSGNSQESVTEQDSKDSTYSLSSTLTLSKADYEKHKVYACEVTHQGLSSPVTKSFNRGEC

SEQ ID NO: 588 - protein, 227 aa, synthetic construct
  REGION 1..227: note = RG1_VH-x-CK/N84S
QVQLVESGGGVVQPGRSLRLSCAASGFTFSNYAMYWVRQAPGKGLEWVAVISYDGSNKYYADSVKGRFTISRDNSKNTLYLQMSSLRTEDTAVYYCASGSDYGDYLLVYWGQGTLVTVSSASVAAPSVFIFPPSDEQLKSGTASVVCLLNNFYPREAKVQWKVDNALQSGNSQESVTEQDSKDSTYSLSSTLTLSKADYEKHKVYACEVTHQGLSSPVTKSFNRGEC

SEQ ID NO: 589 - protein, 227 aa, synthetic construct
  REGION 1..227: note = RG1_VH-x-CK/N84S/Q39K/V133E
QVQLVESGGGVVQPGRSLRLSCAASGFTFSNYAMYWVRKAPGKGLEWVAVISYDGSNKYYADSVKGRFTISRDNSKNTLYLQMSSLRTEDTAVYYCASGSDYGDYLLVYWGQGTLVTVSSASVAAPSVFIFPPSDEQLKSGTASVECLLNNFYPREAKVQWKVDNALQSGNSQESVTEQDSKDSTYSLSSTLTLSKADYEKHKVYACEVTHQGLSSPVTKSFNRGEC

SEQ ID NO: 590 - protein, 227 aa, synthetic construct
  REGION 1..227: note = RG1_VH-x-CK/N84S/Q39E/V133E
QVQLVESGGGVVQPGRSLRLSCAASGFTFSNYAMYWVREAPGKGLEWVAVISYDGSNKYYADSVKGRFTISRDNSKNTLYLQMSSLRTEDTAVYYCASGSDYGDYLLVYWGQGTLVTVSSASVAAPSVFIFPPSDEQLKSGTASVECLLNNFYPREAKVQWKVDNALQSGNSQESVTEQDSKDSTYSLSSTLTLSKADYEKHKVYACEVTHQGLSSPVTKSFNRGEC

SEQ ID NO: 591 - protein, 606 aa, synthetic construct
  REGION 1..606: note = B13A_VH-CH1/K147E/K213E/CLD201/hole/RF
QVQLQQSGAELVKPGASVKISCKASGYAFSNYWMNWVKQRPGKGLEWIGQIYPGDGDTNYNGNFKGKATLTADKSSSTAYIQLSSLTSEDSAVYFCGRGFIATVVEVFDHWGLGTTLTVSSASTKGPSVFPLAPSSKSTSGGTAALGCLVEDYFPEPVTVSWNSGALTSGVHTFPAVLQSSGLYSLSSVVTVPSSSLGTQTYICNVNHKPSNTKVDEKVEPKSCTDWSPYADQSIKVRISLKSALGDKAYEWNDNEMYLFRSSVAYAMRQYFLKVKNQMILFGEEDVRVANLKPRISFNFFVTAPKNVSDIIPRTEVEKAIRMSRSRINDAFRLNDNSLEFLGIQPTLGPPNQPPVSTSTSPTRSMAPGAVHLPQPVSTRDKTHTCPPCPAPELLGGPSVFLFPPKPKDTLMISRTPEVTCVVVDVSHEDPEVKFNWYVDGVEVHNAKTKPREEQYNSTYRVVSVLTVLHQDWLNGKEYKCKVSNKALPAPIEKTISKAKGQPREPQVCTLPPSRDELTKNQVSLSCAVKGFYPSDIAVEWESNGQPENNYKTTPPVLDSDGSFFLVSKLTVDKSRWQQGNVFSCSVMHEALHNRFTQKSLSLSPG

SEQ ID NO: 592 - protein, 442 aa, synthetic construct
  REGION 1..442: note = O24A_VK-x-CH1/knob
DIVLTQSPASLAVFLGQRATISCRASKSVSTSGYSYMHWYQQRPGQPPKLLIYLASNLESGVPARFSGSGSGTDFTLNIHPVEEEDAATYYCQHSRELPPTFGGGTKVEIKSSASTKGPSVFPLAPSSKSTSGGTAALGCLVKDYFPEPVTVSWNSGALTSGVHTFPAVLQSSGLYSLSSVVTVPSSSLGTQTYICNVNHKPSNTKVDKKVEPKSCDKTHTCPPCPAPELLGGPSVFLFPPKPKDTLMISRTPEVTCVVVDVSHEDPEVKFNWYVDGVEVHNAKTKPREEQYNSTYRVVSVLTVLHQDWLNGKEYKCKVSNKALPAPIEKTISKAKGQPREPQVYTLPPCRDELTKNQVSLWCLVKGFYPSDIAVEWESNGQPENNYKTTPPVLDSDGSFFLYSKLTVDKSRWQQGNVFSCSVMHEALHNHYTQKSLSLSPG

SEQ ID NO: 593 - protein, 606 aa, synthetic construct
  REGION 1..606: note = B13A_VH-CH1/N84S/Q39K/S183E/CLD201/hole/RF
QVQLQQSGAELVKPGASVKISCKASGYAFSNYWMNWVKKRPGKGLEWIGQIYPGDGDTNYNGNFKGKATLTADKSSSTAYIQLSSLTSEDSAVYFCGRGFIATVVEVFDHWGLGTTLTVSSASTKGPSVFPLAPSSKSTSGGTAALGCLVKDYFPEPVTVSWNSGALTSGVHTFPAVLQSSGLYSLESVVTVPSSSLGTQTYICNVNHKPSNTKVDKKVEPKSCTDWSPYADQSIKVRISLKSALGDKAYEWNDNEMYLFRSSVAYAMRQYFLKVKNQMILFGEEDVRVANLKPRISFNFFVTAPKNVSDIIPRTEVEKAIRMSRSRINDAFRLNDNSLEFLGIQPTLGPPNQPPVSTSTSPTRSMAPGAVHLPQPVSTRDKTHTCPPCPAPELLGGPSVFLFPPKPKDTLMISRTPEVTCVVVDVSHEDPEVKFNWYVDGVEVHNAKTKPREEQYNSTYRVVSVLTVLHQDWLNGKEYKCKVSNKALPAPIEKTISKAKGQPREPQVCTLPPSRDELTKNQVSLSCAVKGFYPSDIAVEWESNGQPENNYKTTPPVLDSDGSFFLVSKLTVDKSRWQQGNVFSCSVMHEALHNRFTQKSLSLSPG

SEQ ID NO: 594 - protein, 442 aa, synthetic construct
  REGION 1..442: note = O24A_VK-x-CH1/Q38E/S183K/knob
DIVLTQSPASLAVFLGQRATISCRASKSVSTSGYSYMHWYQERPGQPPKLLIYLASNLESGVPARFSGSGSGTDFTLNIHPVEEEDAATYYCQHSRELPPTFGGGTKVEIKSSASTKGPSVFPLAPSSKSTSGGTAALGCLVKDYFPEPVTVSWNSGALTSGVHTFPAVLQSSGLYSLKSVVTVPSSSLGTQTYICNVNHKPSNTKVDKKVEPKSCDKTHTCPPCPAPELLGGPSVFLFPPKPKDTLMISRTPEVTCVVVDVSHEDPEVKFNWYVDGVEVHNAKTKPREEQYNSTYRVVSVLTVLHQDWLNGKEYKCKVSNKALPAPIEKTISKAKGQPREPQVYTLPPCRDELTKNQVSLWCLVKGFYPSDIAVEWESNGQPENNYKTTPPVLDSDGSFFLYSKLTVDKSRWQQGNVFSCSVMHEALHNHYTQKSLSLSPG

SEQ ID NO: 595 - protein, 442 aa, synthetic construct
  REGION 1..442: note = O24A_VK-x-CH1/Q38K/S183K/knob
DIVLTQSPASLAVFLGQRATISCRASKSVSTSGYSYMHWYQKRPGQPPKLLIYLASNLESGVPARFSGSGSGTDFTLNIHPVEEEDAATYYCQHSRELPPTFGGGTKVEIKSSASTKGPSVFPLAPSSKSTSGGTAALGCLVKDYFPEPVTVSWNSGALTSGVHTFPAVLQSSGLYSLKSVVTVPSSSLGTQTYICNVNHKPSNTKVDKKVEPKSCDKTHTCPPCPAPELLGGPSVFLFPPKPKDTLMISRTPEVTCVVVDVSHEDPEVKFNWYVDGVEVHNAKTKPREEQYNSTYRVVSVLTVLHQDWLNGKEYKCKVSNKALPAPIEKTISKAKGQPREPQVYTLPPCRDELTKNQVSLWCLVKGFYPSDIAVEWESNGQPENNYKTTPPVLDSDGSFFLYSKLTVDKSRWQQGNVFSCSVMHEALHNHYTQKSLSLSPG

SEQ ID NO: 596 - protein, 606 aa, synthetic construct
  REGION 1..606: note = B13A_VH-CH1/K147E/K213E/CLD201/hole/DHS/RF
QVQLQQSGAELVKPGASVKISCKASGYAFSNYWMNWVKQRPGKGLEWIGQIYPGDGDTNYNGNFKGKATLTADKSSSTAYIQLSSLTSEDSAVYFCGRGFIATVVEVFDHWGLGTTLTVSSASTKGPSVFPLAPSSKSTSGGTAALGCLVEDYFPEPVTVSWNSGALTSGVHTFPAVLQSSGLYSLSSVVTVPSSSLGTQTYICNVNHKPSNTKVDEKVEPKSCTDWSPYADQSIKVRISLKSALGDKAYEWNDNEMYLFRSSVAYAMRQYFLKVKNQMILFGEEDVRVANLKPRISFNFFVTAPKNVSDIIPRTEVEKAIRMSRSRINDAFRLNDNSLEFLGIQPTLGPPNQPPVSTSTSPTRSMAPGAVHLPQPVSTRDKTHTCPPCPAPELLGGPSVFLFPPKPKDTLMISRTPEVTCVVVDVSHEDPEVKFNWYVDGVEVHNAKTKPREEQYNSTYRVVSVLTVDHHDWLNGKEYKCKVSNKALPAPIEKTISKAKGQPREPQVCTLPPSRDELTKNQVSLSCAVKGFYPSDIAVEWESNGQPENNYKTTPPVLDSDGSFFLVSKLTVDKSRWQQGNVFSCSVMHEALHSRFTQKSLSLSPG

SEQ ID NO: 597 - protein, 442 aa, synthetic construct
  REGION 1..442: note = O24A_VK-x-CH1/knob/DHS
DIVLTQSPASLAVFLGQRATISCRASKSVSTSGYSYMHWYQQRPGQPPKLLIYLASNLESGVPARFSGSGSGTDFTLNIHPVEEEDAATYYCQHSRELPPTFGGGTKVEIKSSASTKGPSVFPLAPSSKSTSGGTAALGCLVKDYFPEPVTVSWNSGALTSGVHTFPAVLQSSGLYSLSSVVTVPSSSLGTQTYICNVNHKPSNTKVDKKVEPKSCDKTHTCPPCPAPELLGGPSVFLFPPKPKDTLMISRTPEVTCVVVDVSHEDPEVKFNWYVDGVEVHNAKTKPREEQYNSTYRVVSVLTVDHHDWLNGKEYKCKVSNKALPAPIEKTISKAKGQPREPQVYTLPPCRDELTKNQVSLWCLVKGFYPSDIAVEWESNGQPENNYKTTPPVLDSDGSFFLYSKLTVDKSRWQQGNVFSCSVMHEALHSHYTQKSLSLSPG

SEQ ID NO: 598 - protein, 606 aa, synthetic construct
  REGION 1..606: note = B13A_VH-CH1/N84S/Q39K/S183E/CLD201/hole/DHS/RF
QVQLQQSGAELVKPGASVKISCKASGYAFSNYWMNWVKKRPGKGLEWIGQIYPGDGDTNYNGNFKGKATLTADKSSSTAYIQLSSLTSEDSAVYFCGRGFIATVVEVFDHWGLGTTLTVSSASTKGPSVFPLAPSSKSTSGGTAALGCLVKDYFPEPVTVSWNSGALTSGVHTFPAVLQSSGLYSLESVVTVPSSSLGTQTYICNVNHKPSNTKVDKKVEPKSCTDWSPYADQSIKVRISLKSALGDKAYEWNDNEMYLFRSSVAYAMRQYFLKVKNQMILFGEEDVRVANLKPRISFNFFVTAPKNVSDIIPRTEVEKAIRMSRSRINDAFRLNDNSLEFLGIQPTLGPPNQPPVSTSTSPTRSMAPGAVHLPQPVSTRDKTHTCPPCPAPELLGGPSVFLFPPKPKDTLMISRTPEVTCVVVDVSHEDPEVKFNWYVDGVEVHNAKTKPREEQYNSTYRVVSVLTVDHHDWLNGKEYKCKVSNKALPAPIEKTISKAKGQPREPQVCTLPPSRDELTKNQVSLSCAVKGFYPSDIAVEWESNGQPENNYKTTPPVLDSDGSFFLVSKLTVDKSRWQQGNVFSCSVMHEALHSRFTQKSLSLSPG

SEQ ID NO: 599 - protein, 442 aa, synthetic construct
  REGION 1..442: note = O24A_VK-x-CH1/Q38E/S183K/knob/DHS
DIVLTQSPASLAVFLGQRATISCRASKSVSTSGYSYMHWYQERPGQPPKLLIYLASNLESGVPARFSGSGSGTDFTLNIHPVEEEDAATYYCQHSRELPPTFGGGTKVEIKSSASTKGPSVFPLAPSSKSTSGGTAALGCLVKDYFPEPVTVSWNSGALTSGVHTFPAVLQSSGLYSLKSVVTVPSSSLGTQTYICNVNHKPSNTKVDKKVEPKSCDKTHTCPPCPAPELLGGPSVFLFPPKPKDTLMISRTPEVTCVVVDVSHEDPEVKFNWYVDGVEVHNAKTKPREEQYNSTYRVVSVLTVDHHDWLNGKEYKCKVSNKALPAPIEKTISKAKGQPREPQVYTLPPCRDELTKNQVSLWCLVKGFYPSDIAVEWESNGQPENNYKTTPPVLDSDGSFFLYSKLTVDKSRWQQGNVFSCSVMHEALHSHYTQKSLSLSPG

SEQ ID NO: 600 - protein, 442 aa, synthetic construct
  REGION 1..442: note = O24A_VK-x-CH1/Q38K/S183K/knob/DHS
DIVLTQSPASLAVFLGQRATISCRASKSVSTSGYSYMHWYQKRPGQPPKLLIYLASNLESGVPARFSGSGSGTDFTLNIHPVEEEDAATYYCQHSRELPPTFGGGTKVEIKSSASTKGPSVFPLAPSSKSTSGGTAALGCLVKDYFPEPVTVSWNSGALTSGVHTFPAVLQSSGLYSLKSVVTVPSSSLGTQTYICNVNHKPSNTKVDKKVEPKSCDKTHTCPPCPAPELLGGPSVFLFPPKPKDTLMISRTPEVTCVVVDVSHEDPEVKFNWYVDGVEVHNAKTKPREEQYNSTYRVVSVLTVDHHDWLNGKEYKCKVSNKALPAPIEKTISKAKGQPREPQVYTLPPCRDELTKNQVSLWCLVKGFYPSDIAVEWESNGQPENNYKTTPPVLDSDGSFFLYSKLTVDKSRWQQGNVFSCSVMHEALHSHYTQKSLSLSPG

SEQ ID NO: 601 - protein, 603 aa, synthetic construct
  REGION 1..603: note = O24A_VH-CH1/K147E/K213E/CLD201/hole/RF
QAYLQQSGAELVRPGASVKMSCKASGYTFTSYSMHWVKQTPRQGLEWIGAIYPGNDDTSYNQKFKGKATLTVDRSSSTAYMQLSSLTSEDSAVYFCTRDYSNYPFDYWGQGTTLTVSSASTKGPSVFPLAPSSKSTSGGTAALGCLVEDYFPEPVTVSWNSGALTSGVHTFPAVLQSSGLYSLSSVVTVPSSSLGTQTYICNVNHKPSNTKVDEKVEPKSCTDWSPYADQSIKVRISLKSALGDKAYEWNDNEMYLFRSSVAYAMRQYFLKVKNQMILFGEEDVRVANLKPRISFNFFVTAPKNVSDIIPRTEVEKAIRMSRSRINDAFRLNDNSLEFLGIQPTLGPPNQPPVSTSTSPTRSMAPGAVHLPQPVSTRDKTHTCPPCPAPELLGGPSVFLFPPKPKDTLMISRTPEVTCVVVDVSHEDPEVKFNWYVDGVEVHNAKTKPREEQYNSTYRVVSVLTVLHQDWLNGKEYKCKVSNKALPAPIEKTISKAKGQPREPQVCTLPPSRDELTKNQVSLSCAVKGFYPSDIAVEWESNGQPENNYKTTPPVLDSDGSFFLVSKLTVDKSRWQQGNVFSCSVMHEALHNRFTQKSLSLSPG

SEQ ID NO: 602 - protein, 438 aa, synthetic construct
  REGION 1..438: note = B13A_VK-x-CH1/knob
DIQMTQTTSSLSASLGDRVTISCRASQDISNYLNWYQQKPDGTVKLLIYYTSRLQSGVPSRFSGSGTGTDYSLTISNLEQEDIATYFCQQGNTLPWTFGGGTKVEIKSSASTKGPSVFPLAPSSKSTSGGTAALGCLVKDYFPEPVTVSWNSGALTSGVHTFPAVLQSSGLYSLSSVVTVPSSSLGTQTYICNVNHKPSNTKVDKKVEPKSCDKTHTCPPCPAPELLGGPSVFLFPPKPKDTLMISRTPEVTCVVVDVSHEDPEVKFNWYVDGVEVHNAKTKPREEQYNSTYRVVSVLTVLHQDWLNGKEYKCKVSNKALPAPIEKTISKAKGQPREPQVYTLPPCRDELTKNQVSLWCLVKGFYPSDIAVEWESNGQPENNYKTTPPVLDSDGSFFLYSKLTVDKSRWQQGNVFSCSVMHEALHNHYTQKSLSLSPG

SEQ ID NO: 603 - protein, 603 aa, synthetic construct
  REGION 1..603: note = O24A_VH-CH1/N84S/Q39K/S183E/CLD201/hole/RF
QAYLQQSGAELVRPGASVKMSCKASGYTFTSYSMHWVKKTPRQGLEWIGAIYPGNDDTSYNQKFKGKATLTVDRSSSTAYMQLSSLTSEDSAVYFCTRDYSNYPFDYWGQGTTLTVSSASTKGPSVFPLAPSSKSTSGGTAALGCLVKDYFPEPVTVSWNSGALTSGVHTFPAVLQSSGLYSLESVVTVPSSSLGTQTYICNVNHKPSNTKVDKKVEPKSCTDWSPYADQSIKVRISLKSALGDKAYEWNDNEMYLFRSSVAYAMRQYFLKVKNQMILFGEEDVRVANLKPRISFNFFVTAPKNVSDIIPRTEVEKAIRMSRSRINDAFRLNDNSLEFLGIQPTLGPPNQPPVSTSTSPTRSMAPGAVHLPQPVSTRDKTHTCPPCPAPELLGGPSVFLFPPKPKDTLMISRTPEVTCVVVDVSHEDPEVKFNWYVDGVEVHNAKTKPREEQYNSTYRVVSVLTVLHQDWLNGKEYKCKVSNKALPAPIEKTISKAKGQPREPQVCTLPPSRDELTKNQVSLSCAVKGFYPSDIAVEWESNGQPENNYKTTPPVLDSDGSFFLVSKLTVDKSRWQQGNVFSCSVMHEALHNRFTQKSLSLSPG

SEQ ID NO: 604 - protein, 438 aa, synthetic construct
  REGION 1..438: note = B13A_VK-x-CH1/Q38E/S183K/knob
DIQMTQTTSSLSASLGDRVTISCRASQDISNYLNWYQEKPDGTVKLLIYYTSRLQSGVPSRFSGSGTGTDYSLTISNLEQEDIATYFCQQGNTLPWTFGGGTKVEIKSSASTKGPSVFPLAPSSKSTSGGTAALGCLVKDYFPEPVTVSWNSGALTSGVHTFPAVLQSSGLYSLKSVVTVPSSSLGTQTYICNVNHKPSNTKVDKKVEPKSCDKTHTCPPCPAPELLGGPSVFLFPPKPKDTLMISRTPEVTCVVVDVSHEDPEVKFNWYVDGVEVHNAKTKPREEQYNSTYRVVSVLTVLHQDWLNGKEYKCKVSNKALPAPIEKTISKAKGQPREPQVYTLPPCRDELTKNQVSLWCLVKGFYPSDIAVEWESNGQPENNYKTTPPVLDSDGSFFLYSKLTVDKSRWQQGNVFSCSVMHEALHNHYTQKSLSLSPG

SEQ ID NO: 605 - protein, 438 aa, synthetic construct
  REGION 1..438: note = B13A_VK-x-CH1/Q38K/S183K/knob
DIQMTQTTSSLSASLGDRVTISCRASQDISNYLNWYQKKPDGTVKLLIYYTSRLQSGVPSRFSGSGTGTDYSLTISNLEQEDIATYFCQQGNTLPWTFGGGTKVEIKSSASTKGPSVFPLAPSSKSTSGGTAALGCLVKDYFPEPVTVSWNSGALTSGVHTFPAVLQSSGLYSLKSVVTVPSSSLGTQTYICNVNHKPSNTKVDKKVEPKSCDKTHTCPPCPAPELLGGPSVFLFPPKPKDTLMISRTPEVTCVVVDVSHEDPEVKFNWYVDGVEVHNAKTKPREEQYNSTYRVVSVLTVLHQDWLNGKEYKCKVSNKALPAPIEKTISKAKGQPREPQVYTLPPCRDELTKNQVSLWCLVKGFYPSDIAVEWESNGQPENNYKTTPPVLDSDGSFFLYSKLTVDKSRWQQGNVFSCSVMHEALHNHYTQKSLSLSPG

SEQ ID NO: 606 - protein, 603 aa, synthetic construct
  REGION 1..603: note = O24A_VH-CH1/K147E/K213E/CLD201/hole/DHS/RF
QAYLQQSGAELVRPGASVKMSCKASGYTFTSYSMHWVKQTPRQGLEWIGAIYPGNDDTSYNQKFKGKATLTVDRSSSTAYMQLSSLTSEDSAVYFCTRDYSNYPFDYWGQGTTLTVSSASTKGPSVFPLAPSSKSTSGGTAALGCLVEDYFPEPVTVSWNSGALTSGVHTFPAVLQSSGLYSLSSVVTVPSSSLGTQTYICNVNHKPSNTKVDEKVEPKSCTDWSPYADQSIKVRISLKSALGDKAYEWNDNEMYLFRSSVAYAMRQYFLKVKNQMILFGEEDVRVANLKPRISFNFFVTAPKNVSDIIPRTEVEKAIRMSRSRINDAFRLNDNSLEFLGIQPTLGPPNQPPVSTSTSPTRSMAPGAVHLPQPVSTRDKTHTCPPCPAPELLGGPSVFLFPPKPKDTLMISRTPEVTCVVVDVSHEDPEVKFNWYVDGVEVHNAKTKPREEQYNSTYRVVSVLTVDHHDWLNGKEYKCKVSNKALPAPIEKTISKAKGQPREPQVCTLPPSRDELTKNQVSLSCAVKGFYPSDIAVEWESNGQPENNYKTTPPVLDSDGSFFLVSKLTVDKSRWQQGNVFSCSVMHEALHSRFTQKSLSLSPG

SEQ ID NO: 607 - protein, 438 aa, synthetic construct
  REGION 1..438: note = B13A_VK-x-CH1/knob/DHS
DIQMTQTTSSLSASLGDRVTISCRASQDISNYLNWYQQKPDGTVKLLIYYTSRLQSGVPSRFSGSGTGTDYSLTISNLEQEDIATYFCQQGNTLPWTFGGGTKVEIKSSASTKGPSVFPLAPSSKSTSGGTAALGCLVKDYFPEPVTVSWNSGALTSGVHTFPAVLQSSGLYSLSSVVTVPSSSLGTQTYICNVNHKPSNTKVDKKVEPKSCDKTHTCPPCPAPELLGGPSVFLFPPKPKDTLMISRTPEVTCVVVDVSHEDPEVKFNWYVDGVEVHNAKTKPREEQYNSTYRVVSVLTVDHHDWLNGKEYKCKVSNKALPAPIEKTISKAKGQPREPQVYTLPPCRDELTKNQVSLWCLVKGFYPSDIAVEWESNGQPENNYKTTPPVLDSDGSFFLYSKLTVDKSRWQQGNVFSCSVMHEALHSHYTQKSLSLSPG

SEQ ID NO: 608 - protein, 603 aa, synthetic construct
  REGION 1..603: note = O24A_VH-CH1/N84S/Q39K/S183E/CLD201/hole/DHS/RF
QAYLQQSGAELVRPGASVKMSCKASGYTFTSYSMHWVKKTPRQGLEWIGAIYPGNDDTSYNQKFKGKATLTVDRSSSTAYMQLSSLTSEDSAVYFCTRDYSNYPFDYWGQGTTLTVSSASTKGPSVFPLAPSSKSTSGGTAALGCLVKDYFPEPVTVSWNSGALTSGVHTFPAVLQSSGLYSLESVVTVPSSSLGTQTYICNVNHKPSNTKVDKKVEPKSCTDWSPYADQSIKVRISLKSALGDKAYEWNDNEMYLFRSSVAYAMRQYFLKVKNQMILFGEEDVRVANLKPRISFNFFVTAPKNVSDIIPRTEVEKAIRMSRSRINDAFRLNDNSLEFLGIQPTLGPPNQPPVSTSTSPTRSMAPGAVHLPQPVSTRDKTHTCPPCPAPELLGGPSVFLFPPKPKDTLMISRTPEVTCVVVDVSHEDPEVKFNWYVDGVEVHNAKTKPREEQYNSTYRVVSVLTVDHHDWLNGKEYKCKVSNKALPAPIEKTISKAKGQPREPQVCTLPPSRDELTKNQVSLSCAVKGFYPSDIAVEWESNGQPENNYKTTPPVLDSDGSFFLVSKLTVDKSRWQQGNVFSCSVMHEALHSRFTQKSLSLSPG

SEQ ID NO: 609 - protein, 438 aa, synthetic construct
  REGION 1..438: note = B13A_VK-x-CH1/Q38E/S183K/knob/DHS
DIQMTQTTSSLSASLGDRVTISCRASQDISNYLNWYQEKPDGTVKLLIYYTSRLQSGVPSRFSGSGTGTDYSLTISNLEQEDIATYFCQQGNTLPWTFGGGTKVEIKSSASTKGPSVFPLAPSSKSTSGGTAALGCLVKDYFPEPVTVSWNSGALTSGVHTFPAVLQSSGLYSLKSVVTVPSSSLGTQTYICNVNHKPSNTKVDKKVEPKSCDKTHTCPPCPAPELLGGPSVFLFPPKPKDTLMISRTPEVTCVVVDVSHEDPEVKFNWYVDGVEVHNAKTKPREEQYNSTYRVVSVLTVDHHDWLNGKEYKCKVSNKALPAPIEKTISKAKGQPREPQVYTLPPCRDELTKNQVSLWCLVKGFYPSDIAVEWESNGQPENNYKTTPPVLDSDGSFFLYSKLTVDKSRWQQGNVFSCSVMHEALHSHYTQKSLSLSPG

SEQ ID NO: 610 - protein, 438 aa, synthetic construct
  REGION 1..438: note = B13A_VK-x-CH1/Q38K/S183K/knob/DHS
DIQMTQTTSSLSASLGDRVTISCRASQDISNYLNWYQKKPDGTVKLLIYYTSRLQSGVPSRFSGSGTGTDYSLTISNLEQEDIATYFCQQGNTLPWTFGGGTKVEIKSSASTKGPSVFPLAPSSKSTSGGTAALGCLVKDYFPEPVTVSWNSGALTSGVHTFPAVLQSSGLYSLKSVVTVPSSSLGTQTYICNVNHKPSNTKVDKKVEPKSCDKTHTCPPCPAPELLGGPSVFLFPPKPKDTLMISRTPEVTCVVVDVSHEDPEVKFNWYVDGVEVHNAKTKPREEQYNSTYRVVSVLTVDHHDWLNGKEYKCKVSNKALPAPIEKTISKAKGQPREPQVYTLPPCRDELTKNQVSLWCLVKGFYPSDIAVEWESNGQPENNYKTTPPVLDSDGSFFLYSKLTVDKSRWQQGNVFSCSVMHEALHSHYTQKSLSLSPG

SEQ ID NO: 611 - protein, 606 aa, synthetic construct
  REGION 1..606: note = B13A_VH-CH1/K147E/K213E/CLD201/knob
QVQLQQSGAELVKPGASVKISCKASGYAFSNYWMNWVKQRPGKGLEWIGQIYPGDGDTNYNGNFKGKATLTADKSSSTAYIQLSSLTSEDSAVYFCGRGFIATVVEVFDHWGLGTTLTVSSASTKGPSVFPLAPSSKSTSGGTAALGCLVEDYFPEPVTVSWNSGALTSGVHTFPAVLQSSGLYSLSSVVTVPSSSLGTQTYICNVNHKPSNTKVDEKVEPKSCTDWSPYADQSIKVRISLKSALGDKAYEWNDNEMYLFRSSVAYAMRQYFLKVKNQMILFGEEDVRVANLKPRISFNFFVTAPKNVSDIIPRTEVEKAIRMSRSRINDAFRLNDNSLEFLGIQPTLGPPNQPPVSTSTSPTRSMAPGAVHLPQPVSTRDKTHTCPPCPAPELLGGPSVFLFPPKPKDTLMISRTPEVTCVVVDVSHEDPEVKFNWYVDGVEVHNAKTKPREEQYNSTYRVVSVLTVLHQDWLNGKEYKCKVSNKALPAPIEKTISKAKGQPREPQVYTLPPCRDELTKNQVSLWCLVKGFYPSDIAVEWESNGQPENNYKTTPPVLDSDGSFFLYSKLTVDKSRWQQGNVFSCSVMHEALHNHYTQKSLSLSPG

SEQ ID NO: 612 - protein, 442 aa, synthetic construct
  REGION 1..442: note = O24A_VK-x-CH1/hole/RF
DIVLTQSPASLAVFLGQRATISCRASKSVSTSGYSYMHWYQQRPGQPPKLLIYLASNLESGVPARFSGSGSGTDFTLNIHPVEEEDAATYYCQHSRELPPTFGGGTKVEIKSSASTKGPSVFPLAPSSKSTSGGTAALGCLVKDYFPEPVTVSWNSGALTSGVHTFPAVLQSSGLYSLSSVVTVPSSSLGTQTYICNVNHKPSNTKVDKKVEPKSCDKTHTCPPCPAPELLGGPSVFLFPPKPKDTLMISRTPEVTCVVVDVSHEDPEVKFNWYVDGVEVHNAKTKPREEQYNSTYRVVSVLTVLHQDWLNGKEYKCKVSNKALPAPIEKTISKAKGQPREPQVCTLPPSRDELTKNQVSLSCAVKGFYPSDIAVEWESNGQPENNYKTTPPVLDSDGSFFLVSKLTVDKSRWQQGNVFSCSVMHEALHNRFTQKSLSLSPG

SEQ ID NO: 613 - protein, 606 aa, synthetic construct
  REGION 1..606: note = B13A_VH-CH1/N84S/Q39K/S183E/CLD201/knob
QVQLQQSGAELVKPGASVKISCKASGYAFSNYWMNWVKKRPGKGLEWIGQIYPGDGDTNYNGNFKGKATLTADKSSSTAYIQLSSLTSEDSAVYFCGRGFIATVVEVFDHWGLGTTLTVSSASTKGPSVFPLAPSSKSTSGGTAALGCLVKDYFPEPVTVSWNSGALTSGVHTFPAVLQSSGLYSLESVVTVPSSSLGTQTYICNVNHKPSNTKVDKKVEPKSCTDWSPYADQSIKVRISLKSALGDKAYEWNDNEMYLFRSSVAYAMRQYFLKVKNQMILFGEEDVRVANLKPRISFNFFVTAPKNVSDIIPRTEVEKAIRMSRSRINDAFRLNDNSLEFLGIQPTLGPPNQPPVSTSTSPTRSMAPGAVHLPQPVSTRDKTHTCPPCPAPELLGGPSVFLFPPKPKDTLMISRTPEVTCVVVDVSHEDPEVKFNWYVDGVEVHNAKTKPREEQYNSTYRVVSVLTVLHQDWLNGKEYKCKVSNKALPAPIEKTISKAKGQPREPQVYTLPPCRDELTKNQVSLWCLVKGFYPSDIAVEWESNGQPENNYKTTPPVLDSDGSFFLYSKLTVDKSRWQQGNVFSCSVMHEALHNHYTQKSLSLSPG

SEQ ID NO: 614 - protein, 442 aa, synthetic construct
  REGION 1..442: note = O24A_VK-x-CH1/Q38E/S183K/hole/RF
DIVLTQSPASLAVFLGQRATISCRASKSVSTSGYSYMHWYQERPGQPPKLLIYLASNLESGVPARFSGSGSGTDFTLNIHPVEEEDAATYYCQHSRELPPTFGGGTKVEIKSSASTKGPSVFPLAPSSKSTSGGTAALGCLVKDYFPEPVTVSWNSGALTSGVHTFPAVLQSSGLYSLKSVVTVPSSSLGTQTYICNVNHKPSNTKVDKKVEPKSCDKTHTCPPCPAPELLGGPSVFLFPPKPKDTLMISRTPEVTCVVVDVSHEDPEVKFNWYVDGVEVHNAKTKPREEQYNSTYRVVSVLTVLHQDWLNGKEYKCKVSNKALPAPIEKTISKAKGQPREPQVCTLPPSRDELTKNQVSLSCAVKGFYPSDIAVEWESNGQPENNYKTTPPVLDSDGSFFLVSKLTVDKSRWQQGNVFSCSVMHEALHNRFTQKSLSLSPG

SEQ ID NO: 615 - protein, 442 aa, synthetic construct
  REGION 1..442: note = O24A_VK-x-CH1/Q38K/S183K/hole/RF
DIVLTQSPASLAVFLGQRATISCRASKSVSTSGYSYMHWYQKRPGQPPKLLIYLASNLESGVPARFSGSGSGTDFTLNIHPVEEEDAATYYCQHSRELPPTFGGGTKVEIKSSASTKGPSVFPLAPSSKSTSGGTAALGCLVKDYFPEPVTVSWNSGALTSGVHTFPAVLQSSGLYSLKSVVTVPSSSLGTQTYICNVNHKPSNTKVDKKVEPKSCDKTHTCPPCPAPELLGGPSVFLFPPKPKDTLMISRTPEVTCVVVDVSHEDPEVKFNWYVDGVEVHNAKTKPREEQYNSTYRVVSVLTVLHQDWLNGKEYKCKVSNKALPAPIEKTISKAKGQPREPQVCTLPPSRDELTKNQVSLSCAVKGFYPSDIAVEWESNGQPENNYKTTPPVLDSDGSFFLVSKLTVDKSRWQQGNVFSCSVMHEALHNRFTQKSLSLSPG

SEQ ID NO: 616 - protein, 606 aa, synthetic construct
  REGION 1..606: note = B13A_VH-CH1/K147E/K213E/CLD201/knob/DHS
QVQLQQSGAELVKPGASVKISCKASGYAFSNYWMNWVKQRPGKGLEWIGQIYPGDGDTNYNGNFKGKATLTADKSSSTAYIQLSSLTSEDSAVYFCGRGFIATVVEVFDHWGLGTTLTVSSASTKGPSVFPLAPSSKSTSGGTAALGCLVEDYFPEPVTVSWNSGALTSGVHTFPAVLQSSGLYSLSSVVTVPSSSLGTQTYICNVNHKPSNTKVDEKVEPKSCTDWSPYADQSIKVRISLKSALGDKAYEWNDNEMYLFRSSVAYAMRQYFLKVKNQMILFGEEDVRVANLKPRISFNFFVTAPKNVSDIIPRTEVEKAIRMSRSRINDAFRLNDNSLEFLGIQPTLGPPNQPPVSTSTSPTRSMAPGAVHLPQPVSTRDKTHTCPPCPAPELLGGPSVFLFPPKPKDTLMISRTPEVTCVVVDVSHEDPEVKFNWYVDGVEVHNAKTKPREEQYNSTYRVVSVLTVDHHDWLNGKEYKCKVSNKALPAPIEKTISKAKGQPREPQVYTLPPCRDELTKNQVSLWCLVKGFYPSDIAVEWESNGQPENNYKTTPPVLDSDGSFFLYSKLTVDKSRWQQGNVFSCSVMHEALHSHYTQKSLSLSPG

SEQ ID NO: 617 - protein, 442 aa, synthetic construct
  REGION 1..442: note = O24A_VK-x-CH1/hole/DHS/RF
DIVLTQSPASLAVFLGQRATISCRASKSVSTSGYSYMHWYQQRPGQPPKLLIYLASNLESGVPARFSGSGSGTDFTLNIHPVEEEDAATYYCQHSRELPPTFGGGTKVEIKSSASTKGPSVFPLAPSSKSTSGGTAALGCLVKDYFPEPVTVSWNSGALTSGVHTFPAVLQSSGLYSLSSVVTVPSSSLGTQTYICNVNHKPSNTKVDKKVEPKSCDKTHTCPPCPAPELLGGPSVFLFPPKPKDTLMISRTPEVTCVVVDVSHEDPEVKFNWYVDGVEVHNAKTKPREEQYNSTYRVVSVLTVDHHDWLNGKEYKCKVSNKALPAPIEKTISKAKGQPREPQVCTLPPSRDELTKNQVSLSCAVKGFYPSDIAVEWESNGQPENNYKTTPPVLDSDGSFFLVSKLTVDKSRWQQGNVFSCSVMHEALHSRFTQKSLSLSPG

SEQ ID NO: 618 - protein, 606 aa, synthetic construct
  REGION 1..606: note = B13A_VH-CH1/N84S/Q39K/S183E/CLD201/knob/DHS
QVQLQQSGAELVKPGASVKISCKASGYAFSNYWMNWVKKRPGKGLEWIGQIYPGDGDTNYNGNFKGKATLTADKSSSTAYIQLSSLTSEDSAVYFCGRGFIATVVEVFDHWGLGTTLTVSSASTKGPSVFPLAPSSKSTSGGTAALGCLVKDYFPEPVTVSWNSGALTSGVHTFPAVLQSSGLYSLESVVTVPSSSLGTQTYICNVNHKPSNTKVDKKVEPKSCTDWSPYADQSIKVRISLKSALGDKAYEWNDNEMYLFRSSVAYAMRQYFLKVKNQMILFGEEDVRVANLKPRISFNFFVTAPKNVSDIIPRTEVEKAIRMSRSRINDAFRLNDNSLEFLGIQPTLGPPNQPPVSTSTSPTRSMAPGAVHLPQPVSTRDKTHTCPPCPAPELLGGPSVFLFPPKPKDTLMISRTPEVTCVVVDVSHEDPEVKFNWYVDGVEVHNAKTKPREEQYNSTYRVVSVLTVDHHDWLNGKEYKCKVSNKALPAPIEKTISKAKGQPREPQVYTLPPCRDELTKNQVSLWCLVKGFYPSDIAVEWESNGQPENNYKTTPPVLDSDGSFFLYSKLTVDKSRWQQGNVFSCSVMHEALHSHYTQKSLSLSPG

SEQ ID NO: 619 - protein, 442 aa, synthetic construct
  REGION 1..442: note = O24A_VK-x-CH1/Q38E/S183K/hole/DHS/RF
DIVLTQSPASLAVFLGQRATISCRASKSVSTSGYSYMHWYQERPGQPPKLLIYLASNLESGVPARFSGSGSGTDFTLNIHPVEEEDAATYYCQHSRELPPTFGGGTKVEIKSSASTKGPSVFPLAPSSKSTSGGTAALGCLVKDYFPEPVTVSWNSGALTSGVHTFPAVLQSSGLYSLKSVVTVPSSSLGTQTYICNVNHKPSNTKVDKKVEPKSCDKTHTCPPCPAPELLGGPSVFLFPPKPKDTLMISRTPEVTCVVVDVSHEDPEVKFNWYVDGVEVHNAKTKPREEQYNSTYRVVSVLTVDHHDWLNGKEYKCKVSNKALPAPIEKTISKAKGQPREPQVCTLPPSRDELTKNQVSLSCAVKGFYPSDIAVEWESNGQPENNYKTTPPVLDSDGSFFLVSKLTVDKSRWQQGNVFSCSVMHEALHSRFTQKSLSLSPG

SEQ ID NO: 620 - protein, 442 aa, synthetic construct
  REGION 1..442: note = O24A_VK-x-CH1/Q38K/S183K/hole/DHS/RF
DIVLTQSPASLAVFLGQRATISCRASKSVSTSGYSYMHWYQKRPGQPPKLLIYLASNLESGVPARFSGSGSGTDFTLNIHPVEEEDAATYYCQHSRELPPTFGGGTKVEIKSSASTKGPSVFPLAPSSKSTSGGTAALGCLVKDYFPEPVTVSWNSGALTSGVHTFPAVLQSSGLYSLKSVVTVPSSSLGTQTYICNVNHKPSNTKVDKKVEPKSCDKTHTCPPCPAPELLGGPSVFLFPPKPKDTLMISRTPEVTCVVVDVSHEDPEVKFNWYVDGVEVHNAKTKPREEQYNSTYRVVSVLTVDHHDWLNGKEYKCKVSNKALPAPIEKTISKAKGQPREPQVCTLPPSRDELTKNQVSLSCAVKGFYPSDIAVEWESNGQPENNYKTTPPVLDSDGSFFLVSKLTVDKSRWQQGNVFSCSVMHEALHSRFTQKSLSLSPG

SEQ ID NO: 621 - protein, 603 aa, synthetic construct
  REGION 1..603: note = O24A_VH-CH1/K147E/K213E/CLD201/knob
QAYLQQSGAELVRPGASVKMSCKASGYTFTSYSMHWVKQTPRQGLEWIGAIYPGNDDTSYNQKFKGKATLTVDRSSSTAYMQLSSLTSEDSAVYFCTRDYSNYPFDYWGQGTTLTVSSASTKGPSVFPLAPSSKSTSGGTAALGCLVEDYFPEPVTVSWNSGALTSGVHTFPAVLQSSGLYSLSSVVTVPSSSLGTQTYICNVNHKPSNTKVDEKVEPKSCTDWSPYADQSIKVRISLKSALGDKAYEWNDNEMYLFRSSVAYAMRQYFLKVKNQMILFGEEDVRVANLKPRISFNFFVTAPKNVSDIIPRTEVEKAIRMSRSRINDAFRLNDNSLEFLGIQPTLGPPNQPPVSTSTSPTRSMAPGAVHLPQPVSTRDKTHTCPPCPAPELLGGPSVFLFPPKPKDTLMISRTPEVTCVVVDVSHEDPEVKFNWYVDGVEVHNAKTKPREEQYNSTYRVVSVLTVLHQDWLNGKEYKCKVSNKALPAPIEKTISKAKGQPREPQVYTLPPCRDELTKNQVSLWCLVKGFYPSDIAVEWESNGQPENNYKTTPPVLDSDGSFFLYSKLTVDKSRWQQGNVFSCSVMHEALHNHYTQKSLSLSPG

SEQ ID NO: 622 - protein, 438 aa, synthetic construct
  REGION 1..438: note = B13A_VK-x-CH1/hole/RF
DIQMTQTTSSLSASLGDRVTISCRASQDISNYLNWYQQKPDGTVKLLIYYTSRLQSGVPSRFSGSGTGTDYSLTISNLEQEDIATYFCQQGNTLPWTFGGGTKVEIKSSASTKGPSVFPLAPSSKSTSGGTAALGCLVKDYFPEPVTVSWNSGALTSGVHTFPAVLQSSGLYSLSSVVTVPSSSLGTQTYICNVNHKPSNTKVDKKVEPKSCDKTHTCPPCPAPELLGGPSVFLFPPKPKDTLMISRTPEVTCVVVDVSHEDPEVKFNWYVDGVEVHNAKTKPREEQYNSTYRVVSVLTVLHQDWLNGKEYKCKVSNKALPAPIEKTISKAKGQPREPQVCTLPPSRDELTKNQVSLSCAVKGFYPSDIAVEWESNGQPENNYKTTPPVLDSDGSFFLVSKLTVDKSRWQQGNVFSCSVMHEALHNRFTQKSLSLSPG

SEQ ID NO: 623 - protein, 603 aa, synthetic construct
  REGION 1..603: note = O24A_VH-CH1/N84S/Q39K/S183E/CLD201/knob
QAYLQQSGAELVRPGASVKMSCKASGYTFTSYSMHWVKKTPRQGLEWIGAIYPGNDDTSYNQKFKGKATLTVDRSSSTAYMQLSSLTSEDSAVYFCTRDYSNYPFDYWGQGTTLTVSSASTKGPSVFPLAPSSKSTSGGTAALGCLVKDYFPEPVTVSWNSGALTSGVHTFPAVLQSSGLYSLESVVTVPSSSLGTQTYICNVNHKPSNTKVDKKVEPKSCTDWSPYADQSIKVRISLKSALGDKAYEWNDNEMYLFRSSVAYAMRQYFLKVKNQMILFGEEDVRVANLKPRISFNFFVTAPKNVSDIIPRTEVEKAIRMSRSRINDAFRLNDNSLEFLGIQPTLGPPNQPPVSTSTSPTRSMAPGAVHLPQPVSTRDKTHTCPPCPAPELLGGPSVFLFPPKPKDTLMISRTPEVTCVVVDVSHEDPEVKFNWYVDGVEVHNAKTKPREEQYNSTYRVVSVLTVLHQDWLNGKEYKCKVSNKALPAPIEKTISKAKGQPREPQVYTLPPCRDELTKNQVSLWCLVKGFYPSDIAVEWESNGQPENNYKTTPPVLDSDGSFFLYSKLTVDKSRWQQGNVFSCSVMHEALHNHYTQKSLSLSPG

SEQ ID NO: 624 - protein, 438 aa, synthetic construct
  REGION 1..438: note = B13A_VK-x-CH1/Q38E/S183K/hole/RF
DIQMTQTTSSLSASLGDRVTISCRASQDISNYLNWYQEKPDGTVKLLIYYTSRLQSGVPSRFSGSGTGTDYSLTISNLEQEDIATYFCQQGNTLPWTFGGGTKVEIKSSASTKGPSVFPLAPSSKSTSGGTAALGCLVKDYFPEPVTVSWNSGALTSGVHTFPAVLQSSGLYSLKSVVTVPSSSLGTQTYICNVNHKPSNTKVDKKVEPKSCDKTHTCPPCPAPELLGGPSVFLFPPKPKDTLMISRTPEVTCVVVDVSHEDPEVKFNWYVDGVEVHNAKTKPREEQYNSTYRVVSVLTVLHQDWLNGKEYKCKVSNKALPAPIEKTISKAKGQPREPQVCTLPPSRDELTKNQVSLSCAVKGFYPSDIAVEWESNGQPENNYKTTPPVLDSDGSFFLVSKLTVDKSRWQQGNVFSCSVMHEALHNRFTQKSLSLSPG

SEQ ID NO: 625 - protein, 438 aa, synthetic construct
  REGION 1..438: note = B13A_VK-x-CH1/Q38K/S183K/hole/RF
DIQMTQTTSSLSASLGDRVTISCRASQDISNYLNWYQKKPDGTVKLLIYYTSRLQSGVPSRFSGSGTGTDYSLTISNLEQEDIATYFCQQGNTLPWTFGGGTKVEIKSSASTKGPSVFPLAPSSKSTSGGTAALGCLVKDYFPEPVTVSWNSGALTSGVHTFPAVLQSSGLYSLKSVVTVPSSSLGTQTYICNVNHKPSNTKVDKKVEPKSCDKTHTCPPCPAPELLGGPSVFLFPPKPKDTLMISRTPEVTCVVVDVSHEDPEVKFNWYVDGVEVHNAKTKPREEQYNSTYRVVSVLTVLHQDWLNGKEYKCKVSNKALPAPIEKTISKAKGQPREPQVCTLPPSRDELTKNQVSLSCAVKGFYPSDIAVEWESNGQPENNYKTTPPVLDSDGSFFLVSKLTVDKSRWQQGNVFSCSVMHEALHNRFTQKSLSLSPG

SEQ ID NO: 626 - protein, 603 aa, synthetic construct
  REGION 1..603: note = O24A_VH-CH1/K147E/K213E/CLD201/knob/DHS
QAYLQQSGAELVRPGASVKMSCKASGYTFTSYSMHWVKQTPRQGLEWIGAIYPGNDDTSYNQKFKGKATLTVDRSSSTAYMQLSSLTSEDSAVYFCTRDYSNYPFDYWGQGTTLTVSSASTKGPSVFPLAPSSKSTSGGTAALGCLVEDYFPEPVTVSWNSGALTSGVHTFPAVLQSSGLYSLSSVVTVPSSSLGTQTYICNVNHKPSNTKVDEKVEPKSCTDWSPYADQSIKVRISLKSALGDKAYEWNDNEMYLFRSSVAYAMRQYFLKVKNQMILFGEEDVRVANLKPRISFNFFVTAPKNVSDIIPRTEVEKAIRMSRSRINDAFRLNDNSLEFLGIQPTLGPPNQPPVSTSTSPTRSMAPGAVHLPQPVSTRDKTHTCPPCPAPELLGGPSVFLFPPKPKDTLMISRTPEVTCVVVDVSHEDPEVKFNWYVDGVEVHNAKTKPREEQYNSTYRVVSVLTVDHHDWLNGKEYKCKVSNKALPAPIEKTISKAKGQPREPQVYTLPPCRDELTKNQVSLWCLVKGFYPSDIAVEWESNGQPENNYKTTPPVLDSDGSFFLYSKLTVDKSRWQQGNVFSCSVMHEALHSHYTQKSLSLSPG

SEQ ID NO: 627 - protein, 438 aa, synthetic construct
  REGION 1..438: note = B13A_VK-x-CH1/hole/DHS/RF
DIQMTQTTSSLSASLGDRVTISCRASQDISNYLNWYQQKPDGTVKLLIYYTSRLQSGVPSRFSGSGTGTDYSLTISNLEQEDIATYFCQQGNTLPWTFGGGTKVEIKSSASTKGPSVFPLAPSSKSTSGGTAALGCLVKDYFPEPVTVSWNSGALTSGVHTFPAVLQSSGLYSLSSVVTVPSSSLGTQTYICNVNHKPSNTKVDKKVEPKSCDKTHTCPPCPAPELLGGPSVFLFPPKPKDTLMISRTPEVTCVVVDVSHEDPEVKFNWYVDGVEVHNAKTKPREEQYNSTYRVVSVLTVDHHDWLNGKEYKCKVSNKALPAPIEKTISKAKGQPREPQVCTLPPSRDELTKNQVSLSCAVKGFYPSDIAVEWESNGQPENNYKTTPPVLDSDGSFFLVSKLTVDKSRWQQGNVFSCSVMHEALHSRFTQKSLSLSPG

SEQ ID NO: 628 - protein, 603 aa, synthetic construct
  REGION 1..603: note = O24A_VH-CH1/N84S/Q39K/S183E/CLD201/knob/DHS
QAYLQQSGAELVRPGASVKMSCKASGYTFTSYSMHWVKKTPRQGLEWIGAIYPGNDDTSYNQKFKGKATLTVDRSSSTAYMQLSSLTSEDSAVYFCTRDYSNYPFDYWGQGTTLTVSSASTKGPSVFPLAPSSKSTSGGTAALGCLVKDYFPEPVTVSWNSGALTSGVHTFPAVLQSSGLYSLESVVTVPSSSLGTQTYICNVNHKPSNTKVDKKVEPKSCTDWSPYADQSIKVRISLKSALGDKAYEWNDNEMYLFRSSVAYAMRQYFLKVKNQMILFGEEDVRVANLKPRISFNFFVTAPKNVSDIIPRTEVEKAIRMSRSRINDAFRLNDNSLEFLGIQPTLGPPNQPPVSTSTSPTRSMAPGAVHLPQPVSTRDKTHTCPPCPAPELLGGPSVFLFPPKPKDTLMISRTPEVTCVVVDVSHEDPEVKFNWYVDGVEVHNAKTKPREEQYNSTYRVVSVLTVDHHDWLNGKEYKCKVSNKALPAPIEKTISKAKGQPREPQVYTLPPCRDELTKNQVSLWCLVKGFYPSDIAVEWESNGQPENNYKTTPPVLDSDGSFFLYSKLTVDKSRWQQGNVFSCSVMHEALHSHYTQKSLSLSPG

SEQ ID NO: 629 - protein, 438 aa, synthetic construct
  REGION 1..438: note = B13A_VK-x-CH1/Q38E/S183K/hole/DHS/RF
DIQMTQTTSSLSASLGDRVTISCRASQDISNYLNWYQEKPDGTVKLLIYYTSRLQSGVPSRFSGSGTGTDYSLTISNLEQEDIATYFCQQGNTLPWTFGGGTKVEIKSSASTKGPSVFPLAPSSKSTSGGTAALGCLVKDYFPEPVTVSWNSGALTSGVHTFPAVLQSSGLYSLKSVVTVPSSSLGTQTYICNVNHKPSNTKVDKKVEPKSCDKTHTCPPCPAPELLGGPSVFLFPPKPKDTLMISRTPEVTCVVVDVSHEDPEVKFNWYVDGVEVHNAKTKPREEQYNSTYRVVSVLTVDHHDWLNGKEYKCKVSNKALPAPIEKTISKAKGQPREPQVCTLPPSRDELTKNQVSLSCAVKGFYPSDIAVEWESNGQPENNYKTTPPVLDSDGSFFLVSKLTVDKSRWQQGNVFSCSVMHEALHSRFTQKSLSLSPG

SEQ ID NO: 630 - protein, 438 aa, synthetic construct
  REGION 1..438: note = B13A_VK-x-CH1/Q38K/S183K/hole/DHS/RF
DIQMTQTTSSLSASLGDRVTISCRASQDISNYLNWYQKKPDGTVKLLIYYTSRLQSGVPSRFSGSGTGTDYSLTISNLEQEDIATYFCQQGNTLPWTFGGGTKVEIKSSASTKGPSVFPLAPSSKSTSGGTAALGCLVKDYFPEPVTVSWNSGALTSGVHTFPAVLQSSGLYSLKSVVTVPSSSLGTQTYICNVNHKPSNTKVDKKVEPKSCDKTHTCPPCPAPELLGGPSVFLFPPKPKDTLMISRTPEVTCVVVDVSHEDPEVKFNWYVDGVEVHNAKTKPREEQYNSTYRVVSVLTVDHHDWLNGKEYKCKVSNKALPAPIEKTISKAKGQPREPQVCTLPPSRDELTKNQVSLSCAVKGFYPSDIAVEWESNGQPENNYKTTPPVLDSDGSFFLVSKLTVDKSRWQQGNVFSCSVMHEALHSRFTQKSLSLSPG

SEQ ID NO: 631 - protein, 214 aa, synthetic construct
  REGION 1..214: note = B13A_VK-Ck/E123R/Q124K
DIQMTQTTSSLSASLGDRVTISCRASQDISNYLNWYQQKPDGTVKLLIYYTSRLQSGVPSRFSGSGTGTDYSLTISNLEQEDIATYFCQQGNTLPWTFGGGTKLEIKRTVAAPSVFIFPPSDRKLKSGTASVVCLLNNFYPREAKVQWKVDNALQSGNSQESVTEQDSKDSTYSLSSTLTLSKADYEKHKVYACEVTHQGLSSPVTKSFNRGEC

SEQ ID NO: 632 - protein, 225 aa, synthetic construct
  REGION 1..225: note = O24A_VH-x-CK
QAYLQQSGAELVRPGASVKMSCKASGYTFTSYSMHWVKQTPRQGLEWIGAIYPGNDDTSYNQKFKGKATLTVDRSSSTAYMQLSSLTSEDSAVYFCTRDYSNYPFDYWGQGTLVTVSSASVAAPSVFIFPPSDEQLKSGTASVVCLLNNFYPREAKVQWKVDNALQSGNSQESVTEQDSKDSTYSLSSTLTLSKADYEKHKVYACEVTHQGLSSPVTKSFNRGEC

SEQ ID NO: 633 - protein, 214 aa, synthetic construct
  REGION 1..214: note = B13A_VK-CK/Q38E/V133K
DIQMTQTTSSLSASLGDRVTISCRASQDISNYLNWYQEKPDGTVKLLIYYTSRLQSGVPSRFSGSGTGTDYSLTISNLEQEDIATYFCQQGNTLPWTFGGGTKLEIKRTVAAPSVFIFPPSDEQLKSGTASVKCLLNNFYPREAKVQWKVDNALQSGNSQESVTEQDSKDSTYSLSSTLTLSKADYEKHKVYACEVTHQGLSSPVTKSFNRGEC

SEQ ID NO: 634 - protein, 225 aa, synthetic construct
  REGION 1..225: note = O24A_VH-x-CK/Q39K/V133E
QAYLQQSGAELVRPGASVKMSCKASGYTFTSYSMHWVKKTPRQGLEWIGAIYPGNDDTSYNQKFKGKATLTVDRSSSTAYMQLSSLTSEDSAVYFCTRDYSNYPFDYWGQGTLVTVSSASVAAPSVFIFPPSDEQLKSGTASVECLLNNFYPREAKVQWKVDNALQSGNSQESVTEQDSKDSTYSLSSTLTLSKADYEKHKVYACEVTHQGLSSPVTKSFNRGEC

SEQ ID NO: 635 - protein, 225 aa, synthetic construct
  REGION 1..225: note = O24A_VH-x-CK/Q39E/V133E
QAYLQQSGAELVRPGASVKMSCKASGYTFTSYSMHWVKETPRQGLEWIGAIYPGNDDTSYNQKFKGKATLTVDRSSSTAYMQLSSLTSEDSAVYFCTRDYSNYPFDYWGQGTLVTVSSASVAAPSVFIFPPSDEQLKSGTASVECLLNNFYPREAKVQWKVDNALQSGNSQESVTEQDSKDSTYSLSSTLTLSKADYEKHKVYACEVTHQGLSSPVTKSFNRGEC

SEQ ID NO: 636 - protein, 218 aa, synthetic construct
  REGION 1..218: note = O24A_VK-Ck/E123R/Q124K
DIVLTQSPASLAVFLGQRATISCRASKSVSTSGYSYMHWYQQRPGQPPKLLIYLASNLESGVPARFSGSGSGTDFTLNIHPVEEEDAATYYCQHSRELPPTFGGGTKLEIKRTVAAPSVFIFPPSDRKLKSGTASVVCLLNNFYPREAKVQWKVDNALQSGNSQESVTEQDSKDSTYSLSSTLTLSKADYEKHKVYACEVTHQGLSSPVTKSFNRGEC

SEQ ID NO: 637 - protein, 228 aa, synthetic construct
  REGION 1..228: note = B13A_VH-x-CK
QVQLQQSGAELVKPGASVKISCKASGYAFSNYWMNWVKQRPGKGLEWIGQIYPGDGDTNYNGNFKGKATLTADKSSSTAYIQLSSLTSEDSAVYFCGRGFIATVVEVFDHWGLGTLVTVSSASVAAPSVFIFPPSDEQLKSGTASVVCLLNNFYPREAKVQWKVDNALQSGNSQESVTEQDSKDSTYSLSSTLTLSKADYEKHKVYACEVTHQGLSSPVTKSFNRGEC

SEQ ID NO: 638 - protein, 218 aa, synthetic construct
  REGION 1..218: note = O24A_VK-CK/Q38E/V133K
DIVLTQSPASLAVFLGQRATISCRASKSVSTSGYSYMHWYQERPGQPPKLLIYLASNLESGVPARFSGSGSGTDFTLNIHPVEEEDAATYYCQHSRELPPTFGGGTKLEIKRTVAAPSVFIFPPSDEQLKSGTASVKCLLNNFYPREAKVQWKVDNALQSGNSQESVTEQDSKDSTYSLSSTLTLSKADYEKHKVYACEVTHQGLSSPVTKSFNRGEC

SEQ ID NO: 639 - protein, 228 aa, synthetic construct
  REGION 1..228: note = B13A_VH-x-CK/Q39K/V133E
QVQLQQSGAELVKPGASVKISCKASGYAFSNYWMNWVKKRPGKGLEWIGQIYPGDGDTNYNGNFKGKATLTADKSSSTAYIQLSSLTSEDSAVYFCGRGFIATVVEVFDHWGLGTLVTVSSASVAAPSVFIFPPSDEQLKSGTASVECLLNNFYPREAKVQWKVDNALQSGNSQESVTEQDSKDSTYSLSSTLTLSKADYEKHKVYACEVTHQGLSSPVTKSFNRGEC

SEQ ID NO: 640 - protein, 228 aa, synthetic construct
  REGION 1..228: note = B13A_VH-x-CK/Q39E/V133E
QVQLQQSGAELVKPGASVKISCKASGYAFSNYWMNWVKERPGKGLEWIGQIYPGDGDTNYNGNFKGKATLTADKSSSTAYIQLSSLTSEDSAVYFCGRGFIATVVEVFDHWGLGTLVTVSSASVAAPSVFIFPPSDEQLKSGTASVECLLNNFYPREAKVQWKVDNALQSGNSQESVTEQDSKDSTYSLSSTLTLSKADYEKHKVYACEVTHQGLSSPVTKSFNRGEC

SEQ ID NO: 641 - protein, 451 aa, synthetic construct
  REGION 1..451: note = Da_VH-CH1
EVQLLESGGGLVQPGGSLRLSCAVSGFTFNSFAMSWVRQAPGKGLEWVSAISGSGGGTYYADSVKGRFTISRDNSKNTLYLQMNSLRAEDTAVYFCAKDKILWFGEPVFDYWGQGTLVTVSSASTKGPSVFPLAPSSKSTSGGTAALGCLVKDYFPEPVTVSWNSGALTSGVHTFPAVLQSSGLYSLSSVVTVPSSSLGTQTYICNVNHKPSNTKVDKRVEPKSCDKTHTCPPCPAPELLGGPSVFLFPPKPKDTLMISRTPEVTCVVVDVSHEDPEVKFNWYVDGVEVHNAKTKPREEQYNSTYRVVSVLTVLHQDWLNGKEYKCKVSNKALPAPIEKTISKAKGQPREPQVYTLPPSREEMTKNQVSLTCLVKGFYPSDIAVEWESNGQPENNYKTTPPVLDSDGSFFLYSKLTVDKSRWQQGNVFSCSVMHEALHNHYTQKSLSLSPG

SEQ ID NO: 642 - protein, 451 aa, synthetic construct
  REGION 1..451: note = Da_VH-CH1/PGLALA
EVQLLESGGGLVQPGGSLRLSCAVSGFTFNSFAMSWVRQAPGKGLEWVSAISGSGGGTYYADSVKGRFTISRDNSKNTLYLQMNSLRAEDTAVYFCAKDKILWFGEPVFDYWGQGTLVTVSSASTKGPSVFPLAPSSKSTSGGTAALGCLVKDYFPEPVTVSWNSGALTSGVHTFPAVLQSSGLYSLSSVVTVPSSSLGTQTYICNVNHKPSNTKVDKRVEPKSCDKTHTCPPCPAPEAAGGPSVFLFPPKPKDTLMISRTPEVTCVVVDVSHEDPEVKFNWYVDGVEVHNAKTKPREEQYNSTYRVVSVLTVLHQDWLNGKEYKCKVSNKALGAPIEKTISKAKGQPREPQVYTLPPSREEMTKNQVSLTCLVKGFYPSDIAVEWESNGQPENNYKTTPPVLDSDGSFFLYSKLTVDKSRWQQGNVFSCSVMHEALHNHYTQKSLSLSPG

SEQ ID NO: 643 - protein, 607 aa, synthetic construct
  REGION 1..607: note = Da_VH-CH1/N84S/CLD201/hole/RF
EVQLLESGGGLVQPGGSLRLSCAVSGFTFNSFAMSWVRQAPGKGLEWVSAISGSGGGTYYADSVKGRFTISRDNSKNTLYLQMSSLRAEDTAVYFCAKDKILWFGEPVFDYWGQGTLVTVSSASTKGPSVFPLAPSSKSTSGGTAALGCLVKDYFPEPVTVSWNSGALTSGVHTFPAVLQSSGLYSLSSVVTVPSSSLGTQTYICNVNHKPSNTKVDKKVEPKSCTDWSPYADQSIKVRISLKSALGDKAYEWNDNEMYLFRSSVAYAMRQYFLKVKNQMILFGEEDVRVANLKPRISFNFFVTAPKNVSDIIPRTEVEKAIRMSRSRINDAFRLNDNSLEFLGIQPTLGPPNQPPVSTSTSPTRSMAPGAVHLPQPVSTRDKTHTCPPCPAPELLGGPSVFLFPPKPKDTLMISRTPEVTCVVVDVSHEDPEVKFNWYVDGVEVHNAKTKPREEQYNSTYRVVSVLTVLHQDWLNGKEYKCKVSNKALPAPIEKTISKAKGQPREPQVCTLPPSRDELTKNQVSLSCAVKGFYPSDIAVEWESNGQPENNYKTTPPVLDSDGSFFLVSKLTVDKSRWQQGNVFSCSVMHEALHNRFTQKSLSLSPG

SEQ ID NO: 644 - protein, 451 aa, synthetic construct
  REGION 1..451: note = Da_VH-CH1/N84S/knob
EVQLLESGGGLVQPGGSLRLSCAVSGFTFNSFAMSWVRQAPGKGLEWVSAISGSGGGTYYADSVKGRFTISRDNSKNTLYLQMSSLRAEDTAVYFCAKDKILWFGEPVFDYWGQGTLVTVSSASTKGPSVFPLAPSSKSTSGGTAALGCLVKDYFPEPVTVSWNSGALTSGVHTFPAVLQSSGLYSLSSVVTVPSSSLGTQTYICNVNHKPSNTKVDKKVEPKSCDKTHTCPPCPAPELLGGPSVFLFPPKPKDTLMISRTPEVTCVVVDVSHEDPEVKFNWYVDGVEVHNAKTKPREEQYNSTYRVVSVLTVLHQDWLNGKEYKCKVSNKALPAPIEKTISKAKGQPREPQVYTLPPCRDELTKNQVSLWCLVKGFYPSDIAVEWESNGQPENNYKTTPPVLDSDGSFFLYSKLTVDKSRWQQGNVFSCSVMHEALHNHYTQKSLSLSPG

SEQ ID NO: 645 - protein, 607 aa, synthetic construct
  REGION 1..607: note = Da_VH-CH1/N84S/CLD201/hole/PGLALA/RF
EVQLLESGGGLVQPGGSLRLSCAVSGFTFNSFAMSWVRQAPGKGLEWVSAISGSGGGTYYADSVKGRFTISRDNSKNTLYLQMSSLRAEDTAVYFCAKDKILWFGEPVFDYWGQGTLVTVSSASTKGPSVFPLAPSSKSTSGGTAALGCLVKDYFPEPVTVSWNSGALTSGVHTFPAVLQSSGLYSLSSVVTVPSSSLGTQTYICNVNHKPSNTKVDKKVEPKSCTDWSPYADQSIKVRISLKSALGDKAYEWNDNEMYLFRSSVAYAMRQYFLKVKNQMILFGEEDVRVANLKPRISFNFFVTAPKNVSDIIPRTEVEKAIRMSRSRINDAFRLNDNSLEFLGIQPTLGPPNQPPVSTSTSPTRSMAPGAVHLPQPVSTRDKTHTCPPCPAPEAAGGPSVFLFPPKPKDTLMISRTPEVTCVVVDVSHEDPEVKFNWYVDGVEVHNAKTKPREEQYNSTYRVVSVLTVLHQDWLNGKEYKCKVSNKALGAPIEKTISKAKGQPREPQVCTLPPSRDELTKNQVSLSCAVKGFYPSDIAVEWESNGQPENNYKTTPPVLDSDGSFFLVSKLTVDKSRWQQGNVFSCSVMHEALHNRFTQKSLSLSPG

SEQ ID NO: 646 - protein, 451 aa, synthetic construct
  REGION 1..451: note = Da_VH-CH1/N84S/knob/PGLALA
EVQLLESGGGLVQPGGSLRLSCAVSGFTFNSFAMSWVRQAPGKGLEWVSAISGSGGGTYYADSVKGRFTISRDNSKNTLYLQMSSLRAEDTAVYFCAKDKILWFGEPVFDYWGQGTLVTVSSASTKGPSVFPLAPSSKSTSGGTAALGCLVKDYFPEPVTVSWNSGALTSGVHTFPAVLQSSGLYSLSSVVTVPSSSLGTQTYICNVNHKPSNTKVDKKVEPKSCDKTHTCPPCPAPEAAGGPSVFLFPPKPKDTLMISRTPEVTCVVVDVSHEDPEVKFNWYVDGVEVHNAKTKPREEQYNSTYRVVSVLTVLHQDWLNGKEYKCKVSNKALGAPIEKTISKAKGQPREPQVYTLPPCRDELTKNQVSLWCLVKGFYPSDIAVEWESNGQPENNYKTTPPVLDSDGSFFLYSKLTVDKSRWQQGNVFSCSVMHEALHNHYTQKSLSLSPG

SEQ ID NO: 647 - protein, 607 aa, synthetic construct
  REGION 1..607: note = Da_VH-CH1/N84S/K147E/K213E/CLD201/hole/PGLALA/RF
EVQLLESGGGLVQPGGSLRLSCAVSGFTFNSFAMSWVRQAPGKGLEWVSAISGSGGGTYYADSVKGRFTISRDNSKNTLYLQMSSLRAEDTAVYFCAKDKILWFGEPVFDYWGQGTLVTVSSASTKGPSVFPLAPSSKSTSGGTAALGCLVEDYFPEPVTVSWNSGALTSGVHTFPAVLQSSGLYSLSSVVTVPSSSLGTQTYICNVNHKPSNTKVDEKVEPKSCTDWSPYADQSIKVRISLKSALGDKAYEWNDNEMYLFRSSVAYAMRQYFLKVKNQMILFGEEDVRVANLKPRISFNFFVTAPKNVSDIIPRTEVEKAIRMSRSRINDAFRLNDNSLEFLGIQPTLGPPNQPPVSTSTSPTRSMAPGAVHLPQPVSTRDKTHTCPPCPAPEAAGGPSVFLFPPKPKDTLMISRTPEVTCVVVDVSHEDPEVKFNWYVDGVEVHNAKTKPREEQYNSTYRVVSVLTVLHQDWLNGKEYKCKVSNKALGAPIEKTISKAKGQPREPQVCTLPPSRDELTKNQVSLSCAVKGFYPSDIAVEWESNGQPENNYKTTPPVLDSDGSFFLVSKLTVDKSRWQQGNVFSCSVMHEALHNRFTQKSLSLSPG

SEQ ID NO: 648 - protein, 441 aa, synthetic construct
  REGION 1..441: note = HA9_VK-x-CH1/knob/PGLALA
DIELTQSPSSLSASVGDRVTITCRSNTGTVTTSNYASWYQQKPGKAPKGLIGHTNNRAPGVPSRFSGSLSGADATLTISSLQPEDLATYYCALWYNNHWVFGQGTKVEIKSSASTKGPSVFPLAPSSKSTSGGTAALGCLVKDYFPEPVTVSWNSGALTSGVHTFPAVLQSSGLYSLSSVVTVPSSSLGTQTYICNVNHKPSNTKVDKKVEPKSCDKTHTCPPCPAPEAAGGPSVFLFPPKPKDTLMISRTPEVTCVVVDVSHEDPEVKFNWYVDGVEVHNAKTKPREEQYNSTYRVVSVLTVLHQDWLNGKEYKCKVSNKALGAPIEKTISKAKGQPREPQVYTLPPCRDELTKNQVSLWCLVKGFYPSDIAVEWESNGQPENNYKTTPPVLDSDGSFFLYSKLTVDKSRWQQGNVFSCSVMHEALHNHYTQKSLSLSPG

SEQ ID NO: 649 - protein, 607 aa, synthetic construct
  REGION 1..607: note = Da_VH-CH1/N84S/Q39K/S183E/CLD201/hole/PGLALA/RF
EVQLLESGGGLVQPGGSLRLSCAVSGFTFNSFAMSWVRKAPGKGLEWVSAISGSGGGTYYADSVKGRFTISRDNSKNTLYLQMSSLRAEDTAVYFCAKDKILWFGEPVFDYWGQGTLVTVSSASTKGPSVFPLAPSSKSTSGGTAALGCLVKDYFPEPVTVSWNSGALTSGVHTFPAVLQSSGLYSLESVVTVPSSSLGTQTYICNVNHKPSNTKVDKKVEPKSCTDWSPYADQSIKVRISLKSALGDKAYEWNDNEMYLFRSSVAYAMRQYFLKVKNQMILFGEEDVRVANLKPRISFNFFVTAPKNVSDIIPRTEVEKAIRMSRSRINDAFRLNDNSLEFLGIQPTLGPPNQPPVSTSTSPTRSMAPGAVHLPQPVSTRDKTHTCPPCPAPEAAGGPSVFLFPPKPKDTLMISRTPEVTCVVVDVSHEDPEVKFNWYVDGVEVHNAKTKPREEQYNSTYRVVSVLTVLHQDWLNGKEYKCKVSNKALGAPIEKTISKAKGQPREPQVCTLPPSRDELTKNQVSLSCAVKGFYPSDIAVEWESNGQPENNYKTTPPVLDSDGSFFLVSKLTVDKSRWQQGNVFSCSVMHEALHNRFTQKSLSLSPG

SEQ ID NO: 650 - protein, 441 aa, synthetic construct
  REGION 1..441: note = HA9_VK-x-CH1/Q38E/S183K/knob/PGLALA
DIELTQSPSSLSASVGDRVTITCRSNTGTVTTSNYASWYQEKPGKAPKGLIGHTNNRAPGVPSRFSGSLSGADATLTISSLQPEDLATYYCALWYNNHWVFGQGTKVEIKSSASTKGPSVFPLAPSSKSTSGGTAALGCLVKDYFPEPVTVSWNSGALTSGVHTFPAVLQSSGLYSLKSVVTVPSSSLGTQTYICNVNHKPSNTKVDKKVEPKSCDKTHTCPPCPAPEAAGGPSVFLFPPKPKDTLMISRTPEVTCVVVDVSHEDPEVKFNWYVDGVEVHNAKTKPREEQYNSTYRVVSVLTVLHQDWLNGKEYKCKVSNKALGAPIEKTISKAKGQPREPQVYTLPPCRDELTKNQVSLWCLVKGFYPSDIAVEWESNGQPENNYKTTPPVLDSDGSFFLYSKLTVDKSRWQQGNVFSCSVMHEALHNHYTQKSLSLSPG

SEQ ID NO: 651 - protein, 441 aa, synthetic construct
  REGION 1..441: note = HA9_VK-x-CH1/Q38K/S183K/knob/PGLALA
DIELTQSPSSLSASVGDRVTITCRSNTGTVTTSNYASWYQKKPGKAPKGLIGHTNNRAPGVPSRFSGSLSGADATLTISSLQPEDLATYYCALWYNNHWVFGQGTKVEIKSSASTKGPSVFPLAPSSKSTSGGTAALGCLVKDYFPEPVTVSWNSGALTSGVHTFPAVLQSSGLYSLKSVVTVPSSSLGTQTYICNVNHKPSNTKVDKKVEPKSCDKTHTCPPCPAPEAAGGPSVFLFPPKPKDTLMISRTPEVTCVVVDVSHEDPEVKFNWYVDGVEVHNAKTKPREEQYNSTYRVVSVLTVLHQDWLNGKEYKCKVSNKALGAPIEKTISKAKGQPREPQVYTLPPCRDELTKNQVSLWCLVKGFYPSDIAVEWESNGQPENNYKTTPPVLDSDGSFFLYSKLTVDKSRWQQGNVFSCSVMHEALHNHYTQKSLSLSPG

SEQ ID NO: 652 - protein, 602 aa, synthetic construct
  REGION 1..602: note = HA9_VH-CH1/N84S/K147E/K213E/CLD201/hole/PGLALA/RF
EVQLQESGGGLVQPGDSLRLSCAASGFTFSNYWLGWIRQAPGKGPEWVGDIYPGGGYTNYNEKFKGRFTISADTSKNIAYLQVSSLRAEDTAVYYCARSASWYFDVWGQGTLVTVSSASTKGPSVFPLAPSSKSTSGGTAALGCLVEDYFPEPVTVSWNSGALTSGVHTFPAVLQSSGLYSLSSVVTVPSSSLGTQTYICNVNHKPSNTKVDEKVEPKSCTDWSPYADQSIKVRISLKSALGDKAYEWNDNEMYLFRSSVAYAMRQYFLKVKNQMILFGEEDVRVANLKPRISFNFFVTAPKNVSDIIPRTEVEKAIRMSRSRINDAFRLNDNSLEFLGIQPTLGPPNQPPVSTSTSPTRSMAPGAVHLPQPVSTRDKTHTCPPCPAPEAAGGPSVFLFPPKPKDTLMISRTPEVTCVVVDVSHEDPEVKFNWYVDGVEVHNAKTKPREEQYNSTYRVVSVLTVLHQDWLNGKEYKCKVSNKALGAPIEKTISKAKGQPREPQVCTLPPSRDELTKNQVSLSCAVKGFYPSDIAVEWESNGQPENNYKTTPPVLDSDGSFFLVSKLTVDKSRWQQGNVFSCSVMHEALHNRFTQKSLSLSPG

SEQ ID NO: 653 - protein, 438 aa, synthetic construct
  REGION 1..438: note = Da_VK-x-CH1/knob/PGLALA
EIVLTQSPATLSLSPGERATLSCRASQSVSSYLAWYQQKPGQAPRLLIYDASNRATGIPARFSGSGSGTDFTLTISSLEPEDFAVYYCQQRSNWPPTFGQGTKVEIKSSASTKGPSVFPLAPSSKSTSGGTAALGCLVKDYFPEPVTVSWNSGALTSGVHTFPAVLQSSGLYSLSSVVTVPSSSLGTQTYICNVNHKPSNTKVDKKVEPKSCDKTHTCPPCPAPEAAGGPSVFLFPPKPKDTLMISRTPEVTCVVVDVSHEDPEVKFNWYVDGVEVHNAKTKPREEQYNSTYRVVSVLTVLHQDWLNGKEYKCKVSNKALGAPIEKTISKAKGQPREPQVYTLPPCRDELTKNQVSLWCLVKGFYPSDIAVEWESNGQPENNYKTTPPVLDSDGSFFLYSKLTVDKSRWQQGNVFSCSVMHEALHNHYTQKSLSLSPG

SEQ ID NO: 654 - protein, 602 aa, synthetic construct
  REGION 1..602: note = HA9_VH-CH1/N84S/Q39K/S183E/CLD201/hole/PGLALA/RF
EVQLQESGGGLVQPGDSLRLSCAASGFTFSNYWLGWIRKAPGKGPEWVGDIYPGGGYTNYNEKFKGRFTISADTSKNIAYLQVSSLRAEDTAVYYCARSASWYFDVWGQGTLVTVSSASTKGPSVFPLAPSSKSTSGGTAALGCLVKDYFPEPVTVSWNSGALTSGVHTFPAVLQSSGLYSLESVVTVPSSSLGTQTYICNVNHKPSNTKVDKKVEPKSCTDWSPYADQSIKVRISLKSALGDKAYEWNDNEMYLFRSSVAYAMRQYFLKVKNQMILFGEEDVRVANLKPRISFNFFVTAPKNVSDIIPRTEVEKAIRMSRSRINDAFRLNDNSLEFLGIQPTLGPPNQPPVSTSTSPTRSMAPGAVHLPQPVSTRDKTHTCPPCPAPEAAGGPSVFLFPPKPKDTLMISRTPEVTCVVVDVSHEDPEVKFNWYVDGVEVHNAKTKPREEQYNSTYRVVSVLTVLHQDWLNGKEYKCKVSNKALGAPIEKTISKAKGQPREPQVCTLPPSRDELTKNQVSLSCAVKGFYPSDIAVEWESNGQPENNYKTTPPVLDSDGSFFLVSKLTVDKSRWQQGNVFSCSVMHEALHNRFTQKSLSLSPG

SEQ ID NO: 655 - protein, 438 aa, synthetic construct
  REGION 1..438: note = Da_VK-x-CH1/Q38E/S183K/knob/PGLALA
EIVLTQSPATLSLSPGERATLSCRASQSVSSYLAWYQEKPGQAPRLLIYDASNRATGIPARFSGSGSGTDFTLTISSLEPEDFAVYYCQQRSNWPPTFGQGTKVEIKSSASTKGPSVFPLAPSSKSTSGGTAALGCLVKDYFPEPVTVSWNSGALTSGVHTFPAVLQSSGLYSLKSVVTVPSSSLGTQTYICNVNHKPSNTKVDKKVEPKSCDKTHTCPPCPAPEAAGGPSVFLFPPKPKDTLMISRTPEVTCVVVDVSHEDPEVKFNWYVDGVEVHNAKTKPREEQYNSTYRVVSVLTVLHQDWLNGKEYKCKVSNKALGAPIEKTISKAKGQPREPQVYTLPPCRDELTKNQVSLWCLVKGFYPSDIAVEWESNGQPENNYKTTPPVLDSDGSFFLYSKLTVDKSRWQQGNVFSCSVMHEALHNHYTQKSLSLSPG

SEQ ID NO: 656 - protein, 438 aa, synthetic construct
  REGION 1..438: note = Da_VK-x-CH1/Q38K/S183K/knob/PGLALA
EIVLTQSPATLSLSPGERATLSCRASQSVSSYLAWYQKKPGQAPRLLIYDASNRATGIPARFSGSGSGTDFTLTISSLEPEDFAVYYCQQRSNWPPTFGQGTKVEIKSSASTKGPSVFPLAPSSKSTSGGTAALGCLVKDYFPEPVTVSWNSGALTSGVHTFPAVLQSSGLYSLKSVVTVPSSSLGTQTYICNVNHKPSNTKVDKKVEPKSCDKTHTCPPCPAPEAAGGPSVFLFPPKPKDTLMISRTPEVTCVVVDVSHEDPEVKFNWYVDGVEVHNAKTKPREEQYNSTYRVVSVLTVLHQDWLNGKEYKCKVSNKALGAPIEKTISKAKGQPREPQVYTLPPCRDELTKNQVSLWCLVKGFYPSDIAVEWESNGQPENNYKTTPPVLDSDGSFFLYSKLTVDKSRWQQGNVFSCSVMHEALHNHYTQKSLSLSPG

SEQ ID NO: 657 - protein, 440 aa, synthetic construct
  REGION 1..440: note = Sp34_VK-CH1/knob/PGLALA
QAVVTQEPSLTVSPGGTVTLTCGSSTGAVTTSNYANWVQEKPGQAFRGLIGGTNKRAPGTPARFSGSLLGGKAALTLSGAQPEDEAEYYCALWYSNLWVFGGGTKLTVLSSASTKGPSVFPLAPSSKSTSGGTAALGCLVKDYFPEPVTVSWNSGALTSGVHTFPAVLQSSGLYSLSSVVTVPSSSLGTQTYICNVNHKPSNTKVDKKVEPKSCDKTHTCPPCPAPEAAGGPSVFLFPPKPKDTLMISRTPEVTCVVVDVSHEDPEVKFNWYVDGVEVHNAKTKPREEQYNSTYRVVSVLTVLHQDWLNGKEYKCKVSNKALGAPIEKTISKAKGQPREPQVYTLPPCRDELTKNQVSLWCLVKGFYPSDIAVEWESNGQPENNYKTTPPVLDSDGSFFLYSKLTVDKSRWQQGNVFSCSVMHEALHNHYTQKSLSLSPG

SEQ ID NO: 658 - protein, 440 aa, synthetic construct
  REGION 1..440: note = Sp34_VK-CH1/knob/Q38E/S183K/PGLALA
QAVVTQEPSLTVSPGGTVTLTCGSSTGAVTTSNYANWVQEKPGQAFRGLIGGTNKRAPGTPARFSGSLLGGKAALTLSGAQPEDEAEYYCALWYSNLWVFGGGTKLTVLSSASTKGPSVFPLAPSSKSTSGGTAALGCLVKDYFPEPVTVSWNSGALTSGVHTFPAVLQSSGLYSLKSVVTVPSSSLGTQTYICNVNHKPSNTKVDKKVEPKSCDKTHTCPPCPAPEAAGGPSVFLFPPKPKDTLMISRTPEVTCVVVDVSHEDPEVKFNWYVDGVEVHNAKTKPREEQYNSTYRVVSVLTVLHQDWLNGKEYKCKVSNKALGAPIEKTISKAKGQPREPQVYTLPPCRDELTKNQVSLWCLVKGFYPSDIAVEWESNGQPENNYKTTPPVLDSDGSFFLYSKLTVDKSRWQQGNVFSCSVMHEALHNHYTQKSLSLSPG

SEQ ID NO: 659 - protein, 440 aa, synthetic construct
  REGION 1..440: note = Sp34_VK-CH1/knob/Q38K/S183K/PGLALA
QAVVTQEPSLTVSPGGTVTLTCGSSTGAVTTSNYANWVQKKPGQAFRGLIGGTNKRAPGTPARFSGSLLGGKAALTLSGAQPEDEAEYYCALWYSNLWVFGGGTKLTVLSSASTKGPSVFPLAPSSKSTSGGTAALGCLVKDYFPEPVTVSWNSGALTSGVHTFPAVLQSSGLYSLKSVVTVPSSSLGTQTYICNVNHKPSNTKVDKKVEPKSCDKTHTCPPCPAPEAAGGPSVFLFPPKPKDTLMISRTPEVTCVVVDVSHEDPEVKFNWYVDGVEVHNAKTKPREEQYNSTYRVVSVLTVLHQDWLNGKEYKCKVSNKALGAPIEKTISKAKGQPREPQVYTLPPCRDELTKNQVSLWCLVKGFYPSDIAVEWESNGQPENNYKTTPPVLDSDGSFFLYSKLTVDKSRWQQGNVFSCSVMHEALHNHYTQKSLSLSPG

SEQ ID NO: 660 - protein, 440 aa, synthetic construct
  REGION 1..440: note = Sp34_VK-CH1/knob/PGLALA/RF
QAVVTQEPSLTVSPGGTVTLTCGSSTGAVTTSNYANWVQEKPGQAFRGLIGGTNKRAPGTPARFSGSLLGGKAALTLSGAQPEDEAEYYCALWYSNLWVFGGGTKLTVLSSASTKGPSVFPLAPSSKSTSGGTAALGCLVKDYFPEPVTVSWNSGALTSGVHTFPAVLQSSGLYSLSSVVTVPSSSLGTQTYICNVNHKPSNTKVDKKVEPKSCDKTHTCPPCPAPEAAGGPSVFLFPPKPKDTLMISRTPEVTCVVVDVSHEDPEVKFNWYVDGVEVHNAKTKPREEQYNSTYRVVSVLTVLHQDWLNGKEYKCKVSNKALGAPIEKTISKAKGQPREPQVYTLPPCRDELTKNQVSLWCLVKGFYPSDIAVEWESNGQPENNYKTTPPVLDSDGSFFLYSKLTVDKSRWQQGNVFSCSVMHEALHNRFTQKSLSLSPG

SEQ ID NO: 661 - protein, 440 aa, synthetic construct
  REGION 1..440: note = Sp34_VK-CH1/knob/Q38E/S183K/PGLALA/RF
QAVVTQEPSLTVSPGGTVTLTCGSSTGAVTTSNYANWVQEKPGQAFRGLIGGTNKRAPGTPARFSGSLLGGKAALTLSGAQPEDEAEYYCALWYSNLWVFGGGTKLTVLSSASTKGPSVFPLAPSSKSTSGGTAALGCLVKDYFPEPVTVSWNSGALTSGVHTFPAVLQSSGLYSLKSVVTVPSSSLGTQTYICNVNHKPSNTKVDKKVEPKSCDKTHTCPPCPAPEAAGGPSVFLFPPKPKDTLMISRTPEVTCVVVDVSHEDPEVKFNWYVDGVEVHNAKTKPREEQYNSTYRVVSVLTVLHQDWLNGKEYKCKVSNKALGAPIEKTISKAKGQPREPQVYTLPPCRDELTKNQVSLWCLVKGFYPSDIAVEWESNGQPENNYKTTPPVLDSDGSFFLYSKLTVDKSRWQQGNVFSCSVMHEALHNRFTQKSLSLSPG

SEQ ID NO: 662 - protein, 440 aa, synthetic construct
  REGION 1..440: note = Sp34_VK-CH1/knob/Q38K/S183K/PGLALA/RF
QAVVTQEPSLTVSPGGTVTLTCGSSTGAVTTSNYANWVQKKPGQAFRGLIGGTNKRAPGTPARFSGSLLGGKAALTLSGAQPEDEAEYYCALWYSNLWVFGGGTKLTVLSSASTKGPSVFPLAPSSKSTSGGTAALGCLVKDYFPEPVTVSWNSGALTSGVHTFPAVLQSSGLYSLKSVVTVPSSSLGTQTYICNVNHKPSNTKVDKKVEPKSCDKTHTCPPCPAPEAAGGPSVFLFPPKPKDTLMISRTPEVTCVVVDVSHEDPEVKFNWYVDGVEVHNAKTKPREEQYNSTYRVVSVLTVLHQDWLNGKEYKCKVSNKALGAPIEKTISKAKGQPREPQVYTLPPCRDELTKNQVSLWCLVKGFYPSDIAVEWESNGQPENNYKTTPPVLDSDGSFFLYSKLTVDKSRWQQGNVFSCSVMHEALHNRFTQKSLSLSPG

SEQ ID NO: 663 - protein, 447 aa, synthetic construct
  REGION 1..447: note = 4C8_VH-CH1
QVQLVQSGAEVKKPGSSVKVSCKASGYTFTSYVMHWVRQAPGQGLEWMGYIIPYNDATKYNEKFKGRVTITADKSTSTAYMELSSLRSEDTAVYYCARYNYDGYFDVWGQGTLVTVSSASTKGPSVFPLAPSSKSTSGGTAALGCLVKDYFPEPVTVSWNSGALTSGVHTFPAVLQSSGLYSLSSVVTVPSSSLGTQTYICNVNHKPSNTKVDKKVEPKSCDKTHTCPPCPAPELLGGPSVFLFPPKPKDTLMISRTPEVTCVVVDVSHEDPEVKFNWYVDGVEVHNAKTKPREEQYNSTYRVVSVLTVLHQDWLNGKEYKCKVSNKALPAPIEKTISKAKGQPREPQVYTLPPSRDELTKNQVSLTCLVKGFYPSDIAVEWESNGQPENNYKTTPPVLDSDGSFFLYSKLTVDKSRWQQGNVFSCSVMHEALHNHYTQKSLSLSPG

SEQ ID NO: 664 - protein, 447 aa, synthetic construct
  REGION 1..447: note = 4C8_VH-CH1/SIDE
QVQLVQSGAEVKKPGSSVKVSCKASGYTFTSYVMHWVRQAPGQGLEWMGYIIPYNDATKYNEKFKGRVTITADKSTSTAYMELSSLRSEDTAVYYCARYNYDGYFDVWGQGTLVTVSSASTKGPSVFPLAPSSKSTSGGTAALGCLVKDYFPEPVTVSWNSGALTSGVHTFPAVLQSSGLYSLSSVVTVPSSSLGTQTYICNVNHKPSNTKVDKKVEPKSCDKTHTCPPCPAPELLGGPDVFLFPPKPKDTLMISRTPEVTCVVVDVSHEDPEVKFNWYVDGVEVHNAKTKPREEQYNSTYRVVSVLTVLHQDWLNGKEYKCKVSNKALPAPEEKTISKAKGQPREPQVYTLPPSRDELTKNQVSLTCLVKGFYPSDIAVEWESNGQPENNYKTTPPVLDSDGSFFLYSKLTVDKSRWQQGNVFSCSVMHEALHNHYTQKSLSLSPG

SEQ ID NO: 665 - protein, 603 aa, synthetic construct
  REGION 1..603: note = 4C8_VH-CH1/CLD201/hole/RF
QVQLVQSGAEVKKPGSSVKVSCKASGYTFTSYVMHWVRQAPGQGLEWMGYIIPYNDATKYNEKFKGRVTITADKSTSTAYMELSSLRSEDTAVYYCARYNYDGYFDVWGQGTLVTVSSASTKGPSVFPLAPSSKSTSGGTAALGCLVKDYFPEPVTVSWNSGALTSGVHTFPAVLQSSGLYSLSSVVTVPSSSLGTQTYICNVNHKPSNTKVDKKVEPKSCTDWSPYADQSIKVRISLKSALGDKAYEWNDNEMYLFRSSVAYAMRQYFLKVKNQMILFGEEDVRVANLKPRISFNFFVTAPKNVSDIIPRTEVEKAIRMSRSRINDAFRLNDNSLEFLGIQPTLGPPNQPPVSTSTSPTRSMAPGAVHLPQPVSTRDKTHTCPPCPAPELLGGPSVFLFPPKPKDTLMISRTPEVTCVVVDVSHEDPEVKFNWYVDGVEVHNAKTKPREEQYNSTYRVVSVLTVLHQDWLNGKEYKCKVSNKALPAPIEKTISKAKGQPREPQVCTLPPSRDELTKNQVSLSCAVKGFYPSDIAVEWESNGQPENNYKTTPPVLDSDGSFFLVSKLTVDKSRWQQGNVFSCSVMHEALHNRFTQKSLSLSPG

SEQ ID NO: 666 - protein, 447 aa, synthetic construct
  REGION 1..447: note = 4C8_VH-CH1/knob
QVQLVQSGAEVKKPGSSVKVSCKASGYTFTSYVMHWVRQAPGQGLEWMGYIIPYNDATKYNEKFKGRVTITADKSTSTAYMELSSLRSEDTAVYYCARYNYDGYFDVWGQGTLVTVSSASTKGPSVFPLAPSSKSTSGGTAALGCLVKDYFPEPVTVSWNSGALTSGVHTFPAVLQSSGLYSLSSVVTVPSSSLGTQTYICNVNHKPSNTKVDKKVEPKSCDKTHTCPPCPAPELLGGPSVFLFPPKPKDTLMISRTPEVTCVVVDVSHEDPEVKFNWYVDGVEVHNAKTKPREEQYNSTYRVVSVLTVLHQDWLNGKEYKCKVSNKALPAPIEKTISKAKGQPREPQVYTLPPCRDELTKNQVSLWCLVKGFYPSDIAVEWESNGQPENNYKTTPPVLDSDGSFFLYSKLTVDKSRWQQGNVFSCSVMHEALHNHYTQKSLSLSPG

SEQ ID NO: 667 - protein, 603 aa, synthetic construct
  REGION 1..603: note = 4C8_VH-CH1/CLD201/hole/SIDE/RF
QVQLVQSGAEVKKPGSSVKVSCKASGYTFTSYVMHWVRQAPGQGLEWMGYIIPYNDATKYNEKFKGRVTITADKSTSTAYMELSSLRSEDTAVYYCARYNYDGYFDVWGQGTLVTVSSASTKGPSVFPLAPSSKSTSGGTAALGCLVKDYFPEPVTVSWNSGALTSGVHTFPAVLQSSGLYSLSSVVTVPSSSLGTQTYICNVNHKPSNTKVDKKVEPKSCTDWSPYADQSIKVRISLKSALGDKAYEWNDNEMYLFRSSVAYAMRQYFLKVKNQMILFGEEDVRVANLKPRISFNFFVTAPKNVSDIIPRTEVEKAIRMSRSRINDAFRLNDNSLEFLGIQPTLGPPNQPPVSTSTSPTRSMAPGAVHLPQPVSTRDKTHTCPPCPAPELLGGPDVFLFPPKPKDTLMISRTPEVTCVVVDVSHEDPEVKFNWYVDGVEVHNAKTKPREEQYNSTYRVVSVLTVLHQDWLNGKEYKCKVSNKALPAPEEKTISKAKGQPREPQVCTLPPSRDELTKNQVSLSCAVKGFYPSDIAVEWESNGQPENNYKTTPPVLDSDGSFFLVSKLTVDKSRWQQGNVFSCSVMHEALHNRFTQKSLSLSPG

SEQ ID NO: 668 - protein, 447 aa, synthetic construct
  REGION 1..447: note = 4C8_VH-CH1/knob/SIDE
QVQLVQSGAEVKKPGSSVKVSCKASGYTFTSYVMHWVRQAPGQGLEWMGYIIPYNDATKYNEKFKGRVTITADKSTSTAYMELSSLRSEDTAVYYCARYNYDGYFDVWGQGTLVTVSSASTKGPSVFPLAPSSKSTSGGTAALGCLVKDYFPEPVTVSWNSGALTSGVHTFPAVLQSSGLYSLSSVVTVPSSSLGTQTYICNVNHKPSNTKVDKKVEPKSCDKTHTCPPCPAPELLGGPDVFLFPPKPKDTLMISRTPEVTCVVVDVSHEDPEVKFNWYVDGVEVHNAKTKPREEQYNSTYRVVSVLTVLHQDWLNGKEYKCKVSNKALPAPEEKTISKAKGQPREPQVYTLPPCRDELTKNQVSLWCLVKGFYPSDIAVEWESNGQPENNYKTTPPVLDSDGSFFLYSKLTVDKSRWQQGNVFSCSVMHEALHNHYTQKSLSLSPG

SEQ ID NO: 669 - protein, 603 aa, synthetic construct
  REGION 1..603: note = 4C8_VH-CH1/K147E/K213E/CLD201/hole/PGLALA/RF
QVQLVQSGAEVKKPGSSVKVSCKASGYTFTSYVMHWVRQAPGQGLEWMGYIIPYNDATKYNEKFKGRVTITADKSTSTAYMELSSLRSEDTAVYYCARYNYDGYFDVWGQGTLVTVSSASTKGPSVFPLAPSSKSTSGGTAALGCLVEDYFPEPVTVSWNSGALTSGVHTFPAVLQSSGLYSLSSVVTVPSSSLGTQTYICNVNHKPSNTKVDEKVEPKSCTDWSPYADQSIKVRISLKSALGDKAYEWNDNEMYLFRSSVAYAMRQYFLKVKNQMILFGEEDVRVANLKPRISFNFFVTAPKNVSDIIPRTEVEKAIRMSRSRINDAFRLNDNSLEFLGIQPTLGPPNQPPVSTSTSPTRSMAPGAVHLPQPVSTRDKTHTCPPCPAPEAAGGPSVFLFPPKPKDTLMISRTPEVTCVVVDVSHEDPEVKFNWYVDGVEVHNAKTKPREEQYNSTYRVVSVLTVLHQDWLNGKEYKCKVSNKALGAPIEKTISKAKGQPREPQVCTLPPSRDELTKNQVSLSCAVKGFYPSDIAVEWESNGQPENNYKTTPPVLDSDGSFFLVSKLTVDKSRWQQGNVFSCSVMHEALHNRFTQKSLSLSPG

SEQ ID NO: 670 - protein, 603 aa, synthetic construct
  REGION 1..603: note = 4C8_VH-CH1/Q39K/S183E/CLD201/hole/PGLALA/RF
QVQLVQSGAEVKKPGSSVKVSCKASGYTFTSYVMHWVRKAPGQGLEWMGYIIPYNDATKYNEKFKGRVTITADKSTSTAYMELSSLRSEDTAVYYCARYNYDGYFDVWGQGTLVTVSSASTKGPSVFPLAPSSKSTSGGTAALGCLVKDYFPEPVTVSWNSGALTSGVHTFPAVLQSSGLYSLESVVTVPSSSLGTQTYICNVNHKPSNTKVDKKVEPKSCTDWSPYADQSIKVRISLKSALGDKAYEWNDNEMYLFRSSVAYAMRQYFLKVKNQMILFGEEDVRVANLKPRISFNFFVTAPKNVSDIIPRTEVEKAIRMSRSRINDAFRLNDNSLEFLGIQPTLGPPNQPPVSTSTSPTRSMAPGAVHLPQPVSTRDKTHTCPPCPAPEAAGGPSVFLFPPKPKDTLMISRTPEVTCVVVDVSHEDPEVKFNWYVDGVEVHNAKTKPREEQYNSTYRVVSVLTVLHQDWLNGKEYKCKVSNKALGAPIEKTISKAKGQPREPQVCTLPPSRDELTKNQVSLSCAVKGFYPSDIAVEWESNGQPENNYKTTPPVLDSDGSFFLVSKLTVDKSRWQQGNVFSCSVMHEALHNRFTQKSLSLSPG

SEQ ID NO: 671 - protein, 603 aa, synthetic construct
  REGION 1..603: note = 4C8_VH-CH1/K147E/K213E/CLD201/hole/RF
QVQLVQSGAEVKKPGSSVKVSCKASGYTFTSYVMHWVRQAPGQGLEWMGYIIPYNDATKYNEKFKGRVTITADKSTSTAYMELSSLRSEDTAVYYCARYNYDGYFDVWGQGTLVTVSSASTKGPSVFPLAPSSKSTSGGTAALGCLVEDYFPEPVTVSWNSGALTSGVHTFPAVLQSSGLYSLSSVVTVPSSSLGTQTYICNVNHKPSNTKVDEKVEPKSCTDWSPYADQSIKVRISLKSALGDKAYEWNDNEMYLFRSSVAYAMRQYFLKVKNQMILFGEEDVRVANLKPRISFNFFVTAPKNVSDIIPRTEVEKAIRMSRSRINDAFRLNDNSLEFLGIQPTLGPPNQPPVSTSTSPTRSMAPGAVHLPQPVSTRDKTHTCPPCPAPELLGGPSVFLFPPKPKDTLMISRTPEVTCVVVDVSHEDPEVKFNWYVDGVEVHNAKTKPREEQYNSTYRVVSVLTVLHQDWLNGKEYKCKVSNKALPAPIEKTISKAKGQPREPQVCTLPPSRDELTKNQVSLSCAVKGFYPSDIAVEWESNGQPENNYKTTPPVLDSDGSFFLVSKLTVDKSRWQQGNVFSCSVMHEALHNRFTQKSLSLSPG

SEQ ID NO: 672 - protein, 438 aa, synthetic construct
  REGION 1..438: note = Da_VK-x-CH1/knob
EIVLTQSPATLSLSPGERATLSCRASQSVSSYLAWYQQKPGQAPRLLIYDASNRATGIPARFSGSGSGTDFTLTISSLEPEDFAVYYCQQRSNWPPTFGQGTKVEIKSSASTKGPSVFPLAPSSKSTSGGTAALGCLVKDYFPEPVTVSWNSGALTSGVHTFPAVLQSSGLYSLSSVVTVPSSSLGTQTYICNVNHKPSNTKVDKKVEPKSCDKTHTCPPCPAPELLGGPSVFLFPPKPKDTLMISRTPEVTCVVVDVSHEDPEVKFNWYVDGVEVHNAKTKPREEQYNSTYRVVSVLTVLHQDWLNGKEYKCKVSNKALPAPIEKTISKAKGQPREPQVYTLPPCRDELTKNQVSLWCLVKGFYPSDIAVEWESNGQPENNYKTTPPVLDSDGSFFLYSKLTVDKSRWQQGNVFSCSVMHEALHNHYTQKSLSLSPG

SEQ ID NO: 673 - protein, 603 aa, synthetic construct
  REGION 1..603: note = 4C8_VH-CH1/Q39K/S183E/CLD201/hole/RF
QVQLVQSGAEVKKPGSSVKVSCKASGYTFTSYVMHWVRKAPGQGLEWMGYIIPYNDATKYNEKFKGRVTITADKSTSTAYMELSSLRSEDTAVYYCARYNYDGYFDVWGQGTLVTVSSASTKGPSVFPLAPSSKSTSGGTAALGCLVKDYFPEPVTVSWNSGALTSGVHTFPAVLQSSGLYSLESVVTVPSSSLGTQTYICNVNHKPSNTKVDKKVEPKSCTDWSPYADQSIKVRISLKSALGDKAYEWNDNEMYLFRSSVAYAMRQYFLKVKNQMILFGEEDVRVANLKPRISFNFFVTAPKNVSDIIPRTEVEKAIRMSRSRINDAFRLNDNSLEFLGIQPTLGPPNQPPVSTSTSPTRSMAPGAVHLPQPVSTRDKTHTCPPCPAPELLGGPSVFLFPPKPKDTLMISRTPEVTCVVVDVSHEDPEVKFNWYVDGVEVHNAKTKPREEQYNSTYRVVSVLTVLHQDWLNGKEYKCKVSNKALPAPIEKTISKAKGQPREPQVCTLPPSRDELTKNQVSLSCAVKGFYPSDIAVEWESNGQPENNYKTTPPVLDSDGSFFLVSKLTVDKSRWQQGNVFSCSVMHEALHNRFTQKSLSLSPG

SEQ ID NO: 674 - protein, 438 aa, synthetic construct
  REGION 1..438: note = Da_VK-x-CH1/Q38E/S183K/knob
EIVLTQSPATLSLSPGERATLSCRASQSVSSYLAWYQEKPGQAPRLLIYDASNRATGIPARFSGSGSGTDFTLTISSLEPEDFAVYYCQQRSNWPPTFGQGTKVEIKSSASTKGPSVFPLAPSSKSTSGGTAALGCLVKDYFPEPVTVSWNSGALTSGVHTFPAVLQSSGLYSLKSVVTVPSSSLGTQTYICNVNHKPSNTKVDKKVEPKSCDKTHTCPPCPAPELLGGPSVFLFPPKPKDTLMISRTPEVTCVVVDVSHEDPEVKFNWYVDGVEVHNAKTKPREEQYNSTYRVVSVLTVLHQDWLNGKEYKCKVSNKALPAPIEKTISKAKGQPREPQVYTLPPCRDELTKNQVSLWCLVKGFYPSDIAVEWESNGQPENNYKTTPPVLDSDGSFFLYSKLTVDKSRWQQGNVFSCSVMHEALHNHYTQKSLSLSPG

SEQ ID NO: 675 - protein, 438 aa, synthetic construct
  REGION 1..438: note = Da_VK-x-CH1/Q38K/S183K/knob
EIVLTQSPATLSLSPGERATLSCRASQSVSSYLAWYQKKPGQAPRLLIYDASNRATGIPARFSGSGSGTDFTLTISSLEPEDFAVYYCQQRSNWPPTFGQGTKVEIKSSASTKGPSVFPLAPSSKSTSGGTAALGCLVKDYFPEPVTVSWNSGALTSGVHTFPAVLQSSGLYSLKSVVTVPSSSLGTQTYICNVNHKPSNTKVDKKVEPKSCDKTHTCPPCPAPELLGGPSVFLFPPKPKDTLMISRTPEVTCVVVDVSHEDPEVKFNWYVDGVEVHNAKTKPREEQYNSTYRVVSVLTVLHQDWLNGKEYKCKVSNKALPAPIEKTISKAKGQPREPQVYTLPPCRDELTKNQVSLWCLVKGFYPSDIAVEWESNGQPENNYKTTPPVLDSDGSFFLYSKLTVDKSRWQQGNVFSCSVMHEALHNHYTQKSLSLSPG

SEQ ID NO: 676 - protein, 450 aa, synthetic construct
  REGION 1..450: note = B34_VH-CH1
QVQLVQSGAEVKKPGASVKVSCKASGYTFTNHIIHWVRQAPGQGLEWMGYINPYPGYHAYNEKFQGRATMTSDTSTSTVYMELSSLRSEDTAVYYCARDGYYRDTDVLDYWGQGTLVTVSSASTKGPSVFPLAPSSKSTSGGTAALGCLVKDYFPEPVTVSWNSGALTSGVHTFPAVLQSSGLYSLSSVVTVPSSSLGTQTYICNVNHKPSNTKVDKKVEPKSCDKTHTCPPCPAPELLGGPSVFLFPPKPKDTLMISRTPEVTCVVVDVSHEDPEVKFNWYVDGVEVHNAKTKPREEQYNSTYRVVSVLTVLHQDWLNGKEYKCKVSNKALPAPIEKTISKAKGQPREPQVYTLPPSRDELTKNQVSLTCLVKGFYPSDIAVEWESNGQPENNYKTTPPVLDSDGSFFLYSKLTVDKSRWQQGNVFSCSVMHEALHNHYTQKSLSLSPG

SEQ ID NO: 677 - protein, 450 aa, synthetic construct
  REGION 1..450: note = B34_VH-CH1/SIDE
QVQLVQSGAEVKKPGASVKVSCKASGYTFTNHIIHWVRQAPGQGLEWMGYINPYPGYHAYNEKFQGRATMTSDTSTSTVYMELSSLRSEDTAVYYCARDGYYRDTDVLDYWGQGTLVTVSSASTKGPSVFPLAPSSKSTSGGTAALGCLVKDYFPEPVTVSWNSGALTSGVHTFPAVLQSSGLYSLSSVVTVPSSSLGTQTYICNVNHKPSNTKVDKKVEPKSCDKTHTCPPCPAPELLGGPDVFLFPPKPKDTLMISRTPEVTCVVVDVSHEDPEVKFNWYVDGVEVHNAKTKPREEQYNSTYRVVSVLTVLHQDWLNGKEYKCKVSNKALPAPEEKTISKAKGQPREPQVYTLPPSRDELTKNQVSLTCLVKGFYPSDIAVEWESNGQPENNYKTTPPVLDSDGSFFLYSKLTVDKSRWQQGNVFSCSVMHEALHNHYTQKSLSLSPG

SEQ ID NO: 678 - protein, 606 aa, synthetic construct
  REGION 1..606: note = B34_VH-CH1/CLD201/hole/RF
QVQLVQSGAEVKKPGASVKVSCKASGYTFTNHIIHWVRQAPGQGLEWMGYINPYPGYHAYNEKFQGRATMTSDTSTSTVYMELSSLRSEDTAVYYCARDGYYRDTDVLDYWGQGTLVTVSSASTKGPSVFPLAPSSKSTSGGTAALGCLVKDYFPEPVTVSWNSGALTSGVHTFPAVLQSSGLYSLSSVVTVPSSSLGTQTYICNVNHKPSNTKVDKKVEPKSCTDWSPYADQSIKVRISLKSALGDKAYEWNDNEMYLFRSSVAYAMRQYFLKVKNQMILFGEEDVRVANLKPRISFNFFVTAPKNVSDIIPRTEVEKAIRMSRSRINDAFRLNDNSLEFLGIQPTLGPPNQPPVSTSTSPTRSMAPGAVHLPQPVSTRDKTHTCPPCPAPELLGGPSVFLFPPKPKDTLMISRTPEVTCVVVDVSHEDPEVKFNWYVDGVEVHNAKTKPREEQYNSTYRVVSVLTVLHQDWLNGKEYKCKVSNKALPAPIEKTISKAKGQPREPQVCTLPPSRDELTKNQVSLSCAVKGFYPSDIAVEWESNGQPENNYKTTPPVLDSDGSFFLVSKLTVDKSRWQQGNVFSCSVMHEALHNRFTQKSLSLSPG

SEQ ID NO: 679 - protein, 450 aa, synthetic construct
  REGION 1..450: note = B34_VH-CH1/knob
QVQLVQSGAEVKKPGASVKVSCKASGYTFTNHIIHWVRQAPGQGLEWMGYINPYPGYHAYNEKFQGRATMTSDTSTSTVYMELSSLRSEDTAVYYCARDGYYRDTDVLDYWGQGTLVTVSSASTKGPSVFPLAPSSKSTSGGTAALGCLVKDYFPEPVTVSWNSGALTSGVHTFPAVLQSSGLYSLSSVVTVPSSSLGTQTYICNVNHKPSNTKVDKKVEPKSCDKTHTCPPCPAPELLGGPSVFLFPPKPKDTLMISRTPEVTCVVVDVSHEDPEVKFNWYVDGVEVHNAKTKPREEQYNSTYRVVSVLTVLHQDWLNGKEYKCKVSNKALPAPIEKTISKAKGQPREPQVYTLPPCRDELTKNQVSLWCLVKGFYPSDIAVEWESNGQPENNYKTTPPVLDSDGSFFLYSKLTVDKSRWQQGNVFSCSVMHEALHNHYTQKSLSLSPG

SEQ ID NO: 680 - protein, 606 aa, synthetic construct
  REGION 1..606: note = B34_VH-CH1/CLD201/hole/SIDE/RF
QVQLVQSGAEVKKPGASVKVSCKASGYTFTNHIIHWVRQAPGQGLEWMGYINPYPGYHAYNEKFQGRATMTSDTSTSTVYMELSSLRSEDTAVYYCARDGYYRDTDVLDYWGQGTLVTVSSASTKGPSVFPLAPSSKSTSGGTAALGCLVKDYFPEPVTVSWNSGALTSGVHTFPAVLQSSGLYSLSSVVTVPSSSLGTQTYICNVNHKPSNTKVDKKVEPKSCTDWSPYADQSIKVRISLKSALGDKAYEWNDNEMYLFRSSVAYAMRQYFLKVKNQMILFGEEDVRVANLKPRISFNFFVTAPKNVSDIIPRTEVEKAIRMSRSRINDAFRLNDNSLEFLGIQPTLGPPNQPPVSTSTSPTRSMAPGAVHLPQPVSTRDKTHTCPPCPAPELLGGPDVFLFPPKPKDTLMISRTPEVTCVVVDVSHEDPEVKFNWYVDGVEVHNAKTKPREEQYNSTYRVVSVLTVLHQDWLNGKEYKCKVSNKALPAPEEKTISKAKGQPREPQVCTLPPSRDELTKNQVSLSCAVKGFYPSDIAVEWESNGQPENNYKTTPPVLDSDGSFFLVSKLTVDKSRWQQGNVFSCSVMHEALHNRFTQKSLSLSPG

SEQ ID NO: 681 - protein, 450 aa, synthetic construct
  REGION 1..450: note = B34_VH-CH1/knob/SIDE
QVQLVQSGAEVKKPGASVKVSCKASGYTFTNHIIHWVRQAPGQGLEWMGYINPYPGYHAYNEKFQGRATMTSDTSTSTVYMELSSLRSEDTAVYYCARDGYYRDTDVLDYWGQGTLVTVSSASTKGPSVFPLAPSSKSTSGGTAALGCLVKDYFPEPVTVSWNSGALTSGVHTFPAVLQSSGLYSLSSVVTVPSSSLGTQTYICNVNHKPSNTKVDKKVEPKSCDKTHTCPPCPAPELLGGPDVFLFPPKPKDTLMISRTPEVTCVVVDVSHEDPEVKFNWYVDGVEVHNAKTKPREEQYNSTYRVVSVLTVLHQDWLNGKEYKCKVSNKALPAPEEKTISKAKGQPREPQVYTLPPCRDELTKNQVSLWCLVKGFYPSDIAVEWESNGQPENNYKTTPPVLDSDGSFFLYSKLTVDKSRWQQGNVFSCSVMHEALHNHYTQKSLSLSPG

SEQ ID NO: 682 - protein, 606 aa, synthetic construct
  REGION 1..606: note = B34_VH-CH1/K147E/K213E/CLD201/hole/PGLALA/RF
QVQLVQSGAEVKKPGASVKVSCKASGYTFTNHIIHWVRQAPGQGLEWMGYINPYPGYHAYNEKFQGRATMTSDTSTSTVYMELSSLRSEDTAVYYCARDGYYRDTDVLDYWGQGTLVTVSSASTKGPSVFPLAPSSKSTSGGTAALGCLVEDYFPEPVTVSWNSGALTSGVHTFPAVLQSSGLYSLSSVVTVPSSSLGTQTYICNVNHKPSNTKVDEKVEPKSCTDWSPYADQSIKVRISLKSALGDKAYEWNDNEMYLFRSSVAYAMRQYFLKVKNQMILFGEEDVRVANLKPRISFNFFVTAPKNVSDIIPRTEVEKAIRMSRSRINDAFRLNDNSLEFLGIQPTLGPPNQPPVSTSTSPTRSMAPGAVHLPQPVSTRDKTHTCPPCPAPEAAGGPSVFLFPPKPKDTLMISRTPEVTCVVVDVSHEDPEVKFNWYVDGVEVHNAKTKPREEQYNSTYRVVSVLTVLHQDWLNGKEYKCKVSNKALGAPIEKTISKAKGQPREPQVCTLPPSRDELTKNQVSLSCAVKGFYPSDIAVEWESNGQPENNYKTTPPVLDSDGSFFLVSKLTVDKSRWQQGNVFSCSVMHEALHNRFTQKSLSLSPG

SEQ ID NO: 683 - protein, 606 aa, synthetic construct
  REGION 1..606: note = B34_VH-CH1/Q39K/S183E/CLD201/hole/PGLALA/RF
QVQLVQSGAEVKKPGASVKVSCKASGYTFTNHIIHWVRKAPGQGLEWMGYINPYPGYHAYNEKFQGRATMTSDTSTSTVYMELSSLRSEDTAVYYCARDGYYRDTDVLDYWGQGTLVTVSSASTKGPSVFPLAPSSKSTSGGTAALGCLVKDYFPEPVTVSWNSGALTSGVHTFPAVLQSSGLYSLESVVTVPSSSLGTQTYICNVNHKPSNTKVDKKVEPKSCTDWSPYADQSIKVRISLKSALGDKAYEWNDNEMYLFRSSVAYAMRQYFLKVKNQMILFGEEDVRVANLKPRISFNFFVTAPKNVSDIIPRTEVEKAIRMSRSRINDAFRLNDNSLEFLGIQPTLGPPNQPPVSTSTSPTRSMAPGAVHLPQPVSTRDKTHTCPPCPAPEAAGGPSVFLFPPKPKDTLMISRTPEVTCVVVDVSHEDPEVKFNWYVDGVEVHNAKTKPREEQYNSTYRVVSVLTVLHQDWLNGKEYKCKVSNKALGAPIEKTISKAKGQPREPQVCTLPPSRDELTKNQVSLSCAVKGFYPSDIAVEWESNGQPENNYKTTPPVLDSDGSFFLVSKLTVDKSRWQQGNVFSCSVMHEALHNRFTQKSLSLSPG

SEQ ID NO: 684 - protein, 606 aa, synthetic construct
  REGION 1..606: note = B34_VH-CH1/K147E/K213E/CLD201/hole/RF
QVQLVQSGAEVKKPGASVKVSCKASGYTFTNHIIHWVRQAPGQGLEWMGYINPYPGYHAYNEKFQGRATMTSDTSTSTVYMELSSLRSEDTAVYYCARDGYYRDTDVLDYWGQGTLVTVSSASTKGPSVFPLAPSSKSTSGGTAALGCLVEDYFPEPVTVSWNSGALTSGVHTFPAVLQSSGLYSLSSVVTVPSSSLGTQTYICNVNHKPSNTKVDEKVEPKSCTDWSPYADQSIKVRISLKSALGDKAYEWNDNEMYLFRSSVAYAMRQYFLKVKNQMILFGEEDVRVANLKPRISFNFFVTAPKNVSDIIPRTEVEKAIRMSRSRINDAFRLNDNSLEFLGIQPTLGPPNQPPVSTSTSPTRSMAPGAVHLPQPVSTRDKTHTCPPCPAPELLGGPSVFLFPPKPKDTLMISRTPEVTCVVVDVSHEDPEVKFNWYVDGVEVHNAKTKPREEQYNSTYRVVSVLTVLHQDWLNGKEYKCKVSNKALPAPIEKTISKAKGQPREPQVCTLPPSRDELTKNQVSLSCAVKGFYPSDIAVEWESNGQPENNYKTTPPVLDSDGSFFLVSKLTVDKSRWQQGNVFSCSVMHEALHNRFTQKSLSLSPG

SEQ ID NO: 685 - protein, 606 aa, synthetic construct
  REGION 1..606: note = B34_VH-CH1/Q39K/S183E/CLD201/hole/RF
QVQLVQSGAEVKKPGASVKVSCKASGYTFTNHIIHWVRKAPGQGLEWMGYINPYPGYHAYNEKFQGRATMTSDTSTSTVYMELSSLRSEDTAVYYCARDGYYRDTDVLDYWGQGTLVTVSSASTKGPSVFPLAPSSKSTSGGTAALGCLVKDYFPEPVTVSWNSGALTSGVHTFPAVLQSSGLYSLESVVTVPSSSLGTQTYICNVNHKPSNTKVDKKVEPKSCTDWSPYADQSIKVRISLKSALGDKAYEWNDNEMYLFRSSVAYAMRQYFLKVKNQMILFGEEDVRVANLKPRISFNFFVTAPKNVSDIIPRTEVEKAIRMSRSRINDAFRLNDNSLEFLGIQPTLGPPNQPPVSTSTSPTRSMAPGAVHLPQPVSTRDKTHTCPPCPAPELLGGPSVFLFPPKPKDTLMISRTPEVTCVVVDVSHEDPEVKFNWYVDGVEVHNAKTKPREEQYNSTYRVVSVLTVLHQDWLNGKEYKCKVSNKALPAPIEKTISKAKGQPREPQVCTLPPSRDELTKNQVSLSCAVKGFYPSDIAVEWESNGQPENNYKTTPPVLDSDGSFFLVSKLTVDKSRWQQGNVFSCSVMHEALHNRFTQKSLSLSPG

SEQ ID NO: 686 - protein, 214 aa, synthetic construct
  REGION 1..214: note = Da_VK-CK
EIVLTQSPATLSLSPGERATLSCRASQSVSSYLAWYQQKPGQAPRLLIYDASNRATGIPARFSGSGSGTDFTLTISSLEPEDFAVYYCQQRSNWPPTFGQGTKVEIKRTVAAPSVFIFPPSDEQLKSGTASVVCLLNNFYPREAKVQWKVDNALQSGNSQESVTEQDSKDSTYSLSSTLTLSKADYEKHKVYACEVTHQGLSSPVTKSFNRGEC

SEQ ID NO: 687 - protein, 214 aa, synthetic construct
  REGION 1..214: note = Da_VK-Ck/E123R/Q124K
EIVLTQSPATLSLSPGERATLSCRASQSVSSYLAWYQQKPGQAPRLLIYDASNRATGIPARFSGSGSGTDFTLTISSLEPEDFAVYYCQQRSNWPPTFGQGTKVEIKRTVAAPSVFIFPPSDRKLKSGTASVVCLLNNFYPREAKVQWKVDNALQSGNSQESVTEQDSKDSTYSLSSTLTLSKADYEKHKVYACEVTHQGLSSPVTKSFNRGEC

SEQ ID NO: 688 - protein, 224 aa, synthetic construct
  REGION 1..224: note = HA9_VH-x-CK/N84S
EVQLQESGGGLVQPGDSLRLSCAASGFTFSNYWLGWIRQAPGKGPEWVGDIYPGGGYTNYNEKFKGRFTISADTSKNIAYLQVSSLRAEDTAVYYCARSASWYFDVWGQGTLVTVSSASVAAPSVFIFPPSDEQLKSGTASVVCLLNNFYPREAKVQWKVDNALQSGNSQESVTEQDSKDSTYSLSSTLTLSKADYEKHKVYACEVTHQGLSSPVTKSFNRGEC

SEQ ID NO: 689 - protein, 214 aa, synthetic construct
  REGION 1..214: note = Da_VK-CK/Q38E/V133K
EIVLTQSPATLSLSPGERATLSCRASQSVSSYLAWYQEKPGQAPRLLIYDASNRATGIPARFSGSGSGTDFTLTISSLEPEDFAVYYCQQRSNWPPTFGQGTKVEIKRTVAAPSVFIFPPSDEQLKSGTASVKCLLNNFYPREAKVQWKVDNALQSGNSQESVTEQDSKDSTYSLSSTLTLSKADYEKHKVYACEVTHQGLSSPVTKSFNRGEC

SEQ ID NO: 690 - protein, 224 aa, synthetic construct
  REGION 1..224: note = HA9_VH-x-CK/N84S/Q39K/V133E
EVQLQESGGGLVQPGDSLRLSCAASGFTFSNYWLGWIRKAPGKGPEWVGDIYPGGGYTNYNEKFKGRFTISADTSKNIAYLQVSSLRAEDTAVYYCARSASWYFDVWGQGTLVTVSSASVAAPSVFIFPPSDEQLKSGTASVECLLNNFYPREAKVQWKVDNALQSGNSQESVTEQDSKDSTYSLSSTLTLSKADYEKHKVYACEVTHQGLSSPVTKSFNRGEC

SEQ ID NO: 691 - protein, 224 aa, synthetic construct
  REGION 1..224: note = HA9_VH-x-CK/N84S/Q39E/V133E
EVQLQESGGGLVQPGDSLRLSCAASGFTFSNYWLGWIREAPGKGPEWVGDIYPGGGYTNYNEKFKGRFTISADTSKNIAYLQVSSLRAEDTAVYYCARSASWYFDVWGQGTLVTVSSASVAAPSVFIFPPSDEQLKSGTASVECLLNNFYPREAKVQWKVDNALQSGNSQESVTEQDSKDSTYSLSSTLTLSKADYEKHKVYACEVTHQGLSSPVTKSFNRGEC

SEQ ID NO: 692 - protein, 217 aa, synthetic construct
  REGION 1..217: note = HA9_VK-Ck/E123R/Q124K
DIELTQSPSSLSASVGDRVTITCRSNTGTVTTSNYASWYQQKPGKAPKGLIGHTNNRAPGVPSRFSGSLSGADATLTISSLQPEDLATYYCALWYNNHWVFGQGTKVEIKRTVAAPSVFIFPPSDRKLKSGTASVVCLLNNFYPREAKVQWKVDNALQSGNSQESVTEQDSKDSTYSLSSTLTLSKADYEKHKVYACEVTHQGLSSPVTKSFNRGEC

SEQ ID NO: 693 - protein, 229 aa, synthetic construct
  REGION 1..229: note = Da_VH-x-CK/N84S
EVQLLESGGGLVQPGGSLRLSCAVSGFTFNSFAMSWVRQAPGKGLEWVSAISGSGGGTYYADSVKGRFTISRDNSKNTLYLQMSSLRAEDTAVYFCAKDKILWFGEPVFDYWGQGTLVTVSSASVAAPSVFIFPPSDEQLKSGTASVVCLLNNFYPREAKVQWKVDNALQSGNSQESVTEQDSKDSTYSLSSTLTLSKADYEKHKVYACEVTHQGLSSPVTKSFNRGEC

SEQ ID NO: 694 - protein, 217 aa, synthetic construct
  REGION 1..217: note = HA9_VK-CK/Q38E/V133K
DIELTQSPSSLSASVGDRVTITCRSNTGTVTTSNYASWYQEKPGKAPKGLIGHTNNRAPGVPSRFSGSLSGADATLTISSLQPEDLATYYCALWYNNHWVFGQGTKVEIKRTVAAPSVFIFPPSDEQLKSGTASVKCLLNNFYPREAKVQWKVDNALQSGNSQESVTEQDSKDSTYSLSSTLTLSKADYEKHKVYACEVTHQGLSSPVTKSFNRGEC

SEQ ID NO: 695 - protein, 229 aa, synthetic construct
  REGION 1..229: note = Da_VH-x-CK/N84S/Q39K/V133E
EVQLLESGGGLVQPGGSLRLSCAVSGFTFNSFAMSWVRKAPGKGLEWVSAISGSGGGTYYADSVKGRFTISRDNSKNTLYLQMSSLRAEDTAVYFCAKDKILWFGEPVFDYWGQGTLVTVSSASVAAPSVFIFPPSDEQLKSGTASVECLLNNFYPREAKVQWKVDNALQSGNSQESVTEQDSKDSTYSLSSTLTLSKADYEKHKVYACEVTHQGLSSPVTKSFNRGEC

SEQ ID NO: 696 - protein, 229 aa, synthetic construct
  REGION 1..229: note = Da_VH-x-CK/N84S/Q39E/V133E
EVQLLESGGGLVQPGGSLRLSCAVSGFTFNSFAMSWVREAPGKGLEWVSAISGSGGGTYYADSVKGRFTISRDNSKNTLYLQMSSLRAEDTAVYFCAKDKILWFGEPVFDYWGQGTLVTVSSASVAAPSVFIFPPSDEQLKSGTASVECLLNNFYPREAKVQWKVDNALQSGNSQESVTEQDSKDSTYSLSSTLTLSKADYEKHKVYACEVTHQGLSSPVTKSFNRGEC

SEQ ID NO: 697 - protein, 232 aa, synthetic construct
  REGION 1..232: note = Sp34_VH-cK/N84S
EVQLLESGGGLVQPGGSLRLSCAASGFTFSTYAMNWVRQAPGKGLEWVSRIRSKYNNYATYYADSVKGRFTISRDDSKNTLYLQMSSLRAEDTAVYYCVRHGNFGNSYVSWFAYWGQGTLVTVSSASVAAPSVFIFPPSDEQLKSGTASVVCLLNNFYPREAKVQWKVDNALQSGNSQESVTEQDSKDSTYSLSSTLTLSKADYEKHKVYACEVTHQGLSSPVTKSFNRGEC

SEQ ID NO: 698 - protein, 232 aa, synthetic construct
  REGION 1..232: note = Sp34_VH-CK/N84S/Q39K/V133E
EVQLLESGGGLVQPGGSLRLSCAASGFTFSTYAMNWVRKAPGKGLEWVSRIRSKYNNYATYYADSVKGRFTISRDDSKNTLYLQMSSLRAEDTAVYYCVRHGNFGNSYVSWFAYWGQGTLVTVSSASVAAPSVFIFPPSDEQLKSGTASVECLLNNFYPREAKVQWKVDNALQSGNSQESVTEQDSKDSTYSLSSTLTLSKADYEKHKVYACEVTHQGLSSPVTKSFNRGEC

SEQ ID NO: 699 - protein, 232 aa, synthetic construct
  REGION 1..232: note = Sp34_VH-CK/N84S/Q39E/V133E
EVQLLESGGGLVQPGGSLRLSCAASGFTFSTYAMNWVREAPGKGLEWVSRIRSKYNNYATYYADSVKGRFTISRDDSKNTLYLQMSSLRAEDTAVYYCVRHGNFGNSYVSWFAYWGQGTLVTVSSASVAAPSVFIFPPSDEQLKSGTASVECLLNNFYPREAKVQWKVDNALQSGNSQESVTEQDSKDSTYSLSSTLTLSKADYEKHKVYACEVTHQGLSSPVTKSFNRGEC

SEQ ID NO: 700 - protein, 214 aa, synthetic construct
  REGION 1..214: note = 4C8_VK-CK
EIVLTQSPATLSLSPGERATLSCRASQSISDYLHWYQQKPGQAPRLLIYYASQSITGIPARFSGSGSGTDFTLTISSLEPEDFAVYYCQNGHSFPPTFGGGTKVEIKRTVAAPSVFIFPPSDEQLKSGTASVVCLLNNFYPREAKVQWKVDNALQSGNSQESVTEQDSKDSTYSLSSTLTLSKADYEKHKVYACEVTHQGLSSPVTKSFNRGEC

SEQ ID NO: 701 - protein, 214 aa, synthetic construct
  REGION 1..214: note = 4C8_VK-Ck/E123R/Q124K
EIVLTQSPATLSLSPGERATLSCRASQSISDYLHWYQQKPGQAPRLLIYYASQSITGIPARFSGSGSGTDFTLTISSLEPEDFAVYYCQNGHSFPPTFGGGTKVEIKRTVAAPSVFIFPPSDRKLKSGTASVVCLLNNFYPREAKVQWKVDNALQSGNSQESVTEQDSKDSTYSLSSTLTLSKADYEKHKVYACEVTHQGLSSPVTKSFNRGEC

SEQ ID NO: 702 - protein, 214 aa, synthetic construct
  REGION 1..214: note = 4C8_VK-CK/Q38E/V133K
EIVLTQSPATLSLSPGERATLSCRASQSISDYLHWYQEKPGQAPRLLIYYASQSITGIPARFSGSGSGTDFTLTISSLEPEDFAVYYCQNGHSFPPTFGGGTKVEIKRTVAAPSVFIFPPSDEQLKSGTASVKCLLNNFYPREAKVQWKVDNALQSGNSQESVTEQDSKDSTYSLSSTLTLSKADYEKHKVYACEVTHQGLSSPVTKSFNRGEC

SEQ ID NO: 703 - protein, 214 aa, synthetic construct
  REGION 1..214: note = B34_VK-CK
DIQMTQSPSSLSASVGDRVTITCQASQDISNYLNWYQQKPGKAPKLLIYYTSRLHTGVPSRFSGSGSGTDFTFTISSLEPEDIATYYCQQGNTLPWTFGQGTKVEIKRTVAAPSVFIFPPSDEQLKSGTASVVCLLNNFYPREAKVQWKVDNALQSGNSQESVTEQDSKDSTYSLSSTLTLSKADYEKHKVYACEVTHQGLSSPVTKSFNRGEC

SEQ ID NO: 704 - protein, 214 aa, synthetic construct
  REGION 1..214: note = B34_VK-Ck/E123R/Q124K
DIQMTQSPSSLSASVGDRVTITCQASQDISNYLNWYQQKPGKAPKLLIYYTSRLHTGVPSRFSGSGSGTDFTFTISSLEPEDIATYYCQQGNTLPWTFGQGTKVEIKRTVAAPSVFIFPPSDRKLKSGTASVVCLLNNFYPREAKVQWKVDNALQSGNSQESVTEQDSKDSTYSLSSTLTLSKADYEKHKVYACEVTHQGLSSPVTKSFNRGEC

SEQ ID NO: 705 - protein, 214 aa, synthetic construct
  REGION 1..214: note = B34_VK-CK/Q38E/V133K
DIQMTQSPSSLSASVGDRVTITCQASQDISNYLNWYQEKPGKAPKLLIYYTSRLHTGVPSRFSGSGSGTDFTFTISSLEPEDIATYYCQQGNTLPWTFGQGTKVEIKRTVAAPSVFIFPPSDEQLKSGTASVKCLLNNFYPREAKVQWKVDNALQSGNSQESVTEQDSKDSTYSLSSTLTLSKADYEKHKVYACEVTHQGLSSPVTKSFNRGEC

SEQ ID NO: 706 - protein, 221 aa, synthetic construct
  REGION 1..221: note = Fc6/knob/PGLALA
CPPCPAPEAAGGPSVFLFPPKPKDTLMISRTPEVTCVVVDVSHEDPEVKFNWYVDGVEVHNAKTKPREEQYNSTYRVVSVLTVLHQDWLNGKEYKCKVSNKALGAPIEKTISKAKGQPREPQVYTLPPCRDELTKNQVSLWCLVKGFYPSDIAVEWESNGQPENNYKTTPPVLDSDGSFFLYSKLTVDKSRWQQGNVFSCSVMHEALHNHYTQKSLSLSPG

SEQ ID NO: 707 - protein, 606 aa, synthetic construct
  REGION 1..606: note = R_VH-CH1/K147E/K213E/CLD201/hole/RF
QVQLQQPGAELVKPGASVKMSCKASGYTFTSYNMHWVKQTPGRGLEWIGAIYPGNGDTSYNQKFKGKATLTADKSSSTAYMQLSSLTSEDSAVYYCARSTYYGGDWYFNVWGAGTTVTVSAASTKGPSVFPLAPSSKSTSGGTAALGCLVEDYFPEPVTVSWNSGALTSGVHTFPAVLQSSGLYSLSSVVTVPSSSLGTQTYICNVNHKPSNTKVDEKVEPKSCTDWSPYADQSIKVRISLKSALGDKAYEWNDNEMYLFRSSVAYAMRQYFLKVKNQMILFGEEDVRVANLKPRISFNFFVTAPKNVSDIIPRTEVEKAIRMSRSRINDAFRLNDNSLEFLGIQPTLGPPNQPPVSTSTSPTRSMAPGAVHLPQPVSTRDKTHTCPPCPAPELLGGPSVFLFPPKPKDTLMISRTPEVTCVVVDVSHEDPEVKFNWYVDGVEVHNAKTKPREEQYNSTYRVVSVLTVLHQDWLNGKEYKCKVSNKALPAPIEKTISKAKGQPREPQVCTLPPSRDELTKNQVSLSCAVKGFYPSDIAVEWESNGQPENNYKTTPPVLDSDGSFFLVSKLTVDKSRWQQGNVFSCSVMHEALHNRFTQKSLSLSPG

SEQ ID NO: 708 - protein, 438 aa, synthetic construct
  REGION 1..438: note = FMC63_VK-x-CH1/knob
DIQMTQTTSSLSASLGDRVTISCRASQDISKYLNWYQQKPDGTVKLLIYHTSRLHSGVPSRFSGSGSGTDYSLTISNLEQEDIATYFCQQGNTLPYTFGGGTKVEIKSSASTKGPSVFPLAPSSKSTSGGTAALGCLVKDYFPEPVTVSWNSGALTSGVHTFPAVLQSSGLYSLSSVVTVPSSSLGTQTYICNVNHKPSNTKVDKKVEPKSCDKTHTCPPCPAPELLGGPSVFLFPPKPKDTLMISRTPEVTCVVVDVSHEDPEVKFNWYVDGVEVHNAKTKPREEQYNSTYRVVSVLTVLHQDWLNGKEYKCKVSNKALPAPIEKTISKAKGQPREPQVYTLPPCRDELTKNQVSLWCLVKGFYPSDIAVEWESNGQPENNYKTTPPVLDSDGSFFLYSKLTVDKSRWQQGNVFSCSVMHEALHNHYTQKSLSLSPG

SEQ ID NO: 709 - protein, 606 aa, synthetic construct
  REGION 1..606: note = R_VH-CH1/Q39K/S183E/CLD201/hole/RF
QVQLQQPGAELVKPGASVKMSCKASGYTFTSYNMHWVKKTPGRGLEWIGAIYPGNGDTSYNQKFKGKATLTADKSSSTAYMQLSSLTSEDSAVYYCARSTYYGGDWYFNVWGAGTTVTVSAASTKGPSVFPLAPSSKSTSGGTAALGCLVKDYFPEPVTVSWNSGALTSGVHTFPAVLQSSGLYSLESVVTVPSSSLGTQTYICNVNHKPSNTKVDKKVEPKSCTDWSPYADQSIKVRISLKSALGDKAYEWNDNEMYLFRSSVAYAMRQYFLKVKNQMILFGEEDVRVANLKPRISFNFFVTAPKNVSDIIPRTEVEKAIRMSRSRINDAFRLNDNSLEFLGIQPTLGPPNQPPVSTSTSPTRSMAPGAVHLPQPVSTRDKTHTCPPCPAPELLGGPSVFLFPPKPKDTLMISRTPEVTCVVVDVSHEDPEVKFNWYVDGVEVHNAKTKPREEQYNSTYRVVSVLTVLHQDWLNGKEYKCKVSNKALPAPIEKTISKAKGQPREPQVCTLPPSRDELTKNQVSLSCAVKGFYPSDIAVEWESNGQPENNYKTTPPVLDSDGSFFLVSKLTVDKSRWQQGNVFSCSVMHEALHNRFTQKSLSLSPG

SEQ ID NO: 710 - protein, 438 aa, synthetic construct
  REGION 1..438: note = FMC63_VK-x-CH1/Q38E/S183K/knob
DIQMTQTTSSLSASLGDRVTISCRASQDISKYLNWYQEKPDGTVKLLIYHTSRLHSGVPSRFSGSGSGTDYSLTISNLEQEDIATYFCQQGNTLPYTFGGGTKVEIKSSASTKGPSVFPLAPSSKSTSGGTAALGCLVKDYFPEPVTVSWNSGALTSGVHTFPAVLQSSGLYSLKSVVTVPSSSLGTQTYICNVNHKPSNTKVDKKVEPKSCDKTHTCPPCPAPELLGGPSVFLFPPKPKDTLMISRTPEVTCVVVDVSHEDPEVKFNWYVDGVEVHNAKTKPREEQYNSTYRVVSVLTVLHQDWLNGKEYKCKVSNKALPAPIEKTISKAKGQPREPQVYTLPPCRDELTKNQVSLWCLVKGFYPSDIAVEWESNGQPENNYKTTPPVLDSDGSFFLYSKLTVDKSRWQQGNVFSCSVMHEALHNHYTQKSLSLSPG

SEQ ID NO: 711 - protein, 438 aa, synthetic construct
  REGION 1..438: note = FMC63_VK-x-CH1/Q38K/S183K/knob
DIQMTQTTSSLSASLGDRVTISCRASQDISKYLNWYQKKPDGTVKLLIYHTSRLHSGVPSRFSGSGSGTDYSLTISNLEQEDIATYFCQQGNTLPYTFGGGTKVEIKSSASTKGPSVFPLAPSSKSTSGGTAALGCLVKDYFPEPVTVSWNSGALTSGVHTFPAVLQSSGLYSLKSVVTVPSSSLGTQTYICNVNHKPSNTKVDKKVEPKSCDKTHTCPPCPAPELLGGPSVFLFPPKPKDTLMISRTPEVTCVVVDVSHEDPEVKFNWYVDGVEVHNAKTKPREEQYNSTYRVVSVLTVLHQDWLNGKEYKCKVSNKALPAPIEKTISKAKGQPREPQVYTLPPCRDELTKNQVSLWCLVKGFYPSDIAVEWESNGQPENNYKTTPPVLDSDGSFFLYSKLTVDKSRWQQGNVFSCSVMHEALHNHYTQKSLSLSPG

SEQ ID NO: 712 - protein, 605 aa, synthetic construct
  REGION 1..605: note = FMC63_VH-CH1/N84S/K147E/K213E/CLD201/hole/RF
EVKLQESGPGLVAPSQSLSVTCTVSGVSLPDYGVSWIRQPPRKGLEWLGVIWGSETTYYNSALKSRLTIIKDNSKSQVFLKMSSLQTDDTAIYYCAKHYYYGGSYAMDYWGQGTSVTVSSASTKGPSVFPLAPSSKSTSGGTAALGCLVEDYFPEPVTVSWNSGALTSGVHTFPAVLQSSGLYSLSSVVTVPSSSLGTQTYICNVNHKPSNTKVDEKVEPKSCTDWSPYADQSIKVRISLKSALGDKAYEWNDNEMYLFRSSVAYAMRQYFLKVKNQMILFGEEDVRVANLKPRISFNFFVTAPKNVSDIIPRTEVEKAIRMSRSRINDAFRLNDNSLEFLGIQPTLGPPNQPPVSTSTSPTRSMAPGAVHLPQPVSTRDKTHTCPPCPAPELLGGPSVFLFPPKPKDTLMISRTPEVTCVVVDVSHEDPEVKFNWYVDGVEVHNAKTKPREEQYNSTYRVVSVLTVLHQDWLNGKEYKCKVSNKALPAPIEKTISKAKGQPREPQVCTLPPSRDELTKNQVSLSCAVKGFYPSDIAVEWESNGQPENNYKTTPPVLDSDGSFFLVSKLTVDKSRWQQGNVFSCSVMHEALHNRFTQKSLSLSPG

SEQ ID NO: 713 - protein, 437 aa, synthetic construct
  REGION 1..437: note = R_VK-x-CH1/knob
QIVLSQSPAILSASPGEKVTMTCRASSSVSYIHWFQQKPGSSPKPWIYATSNLASGVPVRFSGSGSGTSYSLTISRVEAEDAATYYCQQWTSNPPTFGGGTKVEIKSSASTKGPSVFPLAPSSKSTSGGTAALGCLVKDYFPEPVTVSWNSGALTSGVHTFPAVLQSSGLYSLSSVVTVPSSSLGTQTYICNVNHKPSNTKVDKKVEPKSCDKTHTCPPCPAPELLGGPSVFLFPPKPKDTLMISRTPEVTCVVVDVSHEDPEVKFNWYVDGVEVHNAKTKPREEQYNSTYRVVSVLTVLHQDWLNGKEYKCKVSNKALPAPIEKTISKAKGQPREPQVYTLPPCRDELTKNQVSLWCLVKGFYPSDIAVEWESNGQPENNYKTTPPVLDSDGSFFLYSKLTVDKSRWQQGNVFSCSVMHEALHNHYTQKSLSLSPG

SEQ ID NO: 714 - protein, 605 aa, synthetic construct
  REGION 1..605: note = FMC63_VH-CH1/N84S/Q39K/S183E/CLD201/hole/RF
EVKLQESGPGLVAPSQSLSVTCTVSGVSLPDYGVSWIRKPPRKGLEWLGVIWGSETTYYNSALKSRLTIIKDNSKSQVFLKMSSLQTDDTAIYYCAKHYYYGGSYAMDYWGQGTSVTVSSASTKGPSVFPLAPSSKSTSGGTAALGCLVKDYFPEPVTVSWNSGALTSGVHTFPAVLQSSGLYSLESVVTVPSSSLGTQTYICNVNHKPSNTKVDKKVEPKSCTDWSPYADQSIKVRISLKSALGDKAYEWNDNEMYLFRSSVAYAMRQYFLKVKNQMILFGEEDVRVANLKPRISFNFFVTAPKNVSDIIPRTEVEKAIRMSRSRINDAFRLNDNSLEFLGIQPTLGPPNQPPVSTSTSPTRSMAPGAVHLPQPVSTRDKTHTCPPCPAPELLGGPSVFLFPPKPKDTLMISRTPEVTCVVVDVSHEDPEVKFNWYVDGVEVHNAKTKPREEQYNSTYRVVSVLTVLHQDWLNGKEYKCKVSNKALPAPIEKTISKAKGQPREPQVCTLPPSRDELTKNQVSLSCAVKGFYPSDIAVEWESNGQPENNYKTTPPVLDSDGSFFLVSKLTVDKSRWQQGNVFSCSVMHEALHNRFTQKSLSLSPG

SEQ ID NO: 715 - protein, 437 aa, synthetic construct
  REGION 1..437: note = R_VK-x-CH1/Q38E/S183K/knob
QIVLSQSPAILSASPGEKVTMTCRASSSVSYIHWFQEKPGSSPKPWIYATSNLASGVPVRFSGSGSGTSYSLTISRVEAEDAATYYCQQWTSNPPTFGGGTKVEIKSSASTKGPSVFPLAPSSKSTSGGTAALGCLVKDYFPEPVTVSWNSGALTSGVHTFPAVLQSSGLYSLKSVVTVPSSSLGTQTYICNVNHKPSNTKVDKKVEPKSCDKTHTCPPCPAPELLGGPSVFLFPPKPKDTLMISRTPEVTCVVVDVSHEDPEVKFNWYVDGVEVHNAKTKPREEQYNSTYRVVSVLTVLHQDWLNGKEYKCKVSNKALPAPIEKTISKAKGQPREPQVYTLPPCRDELTKNQVSLWCLVKGFYPSDIAVEWESNGQPENNYKTTPPVLDSDGSFFLYSKLTVDKSRWQQGNVFSCSVMHEALHNHYTQKSLSLSPG

SEQ ID NO: 716 - protein, 437 aa, synthetic construct
  REGION 1..437: note = R_VK-x-CH1/Q38K/S183K/knob
QIVLSQSPAILSASPGEKVTMTCRASSSVSYIHWFQKKPGSSPKPWIYATSNLASGVPVRFSGSGSGTSYSLTISRVEAEDAATYYCQQWTSNPPTFGGGTKVEIKSSASTKGPSVFPLAPSSKSTSGGTAALGCLVKDYFPEPVTVSWNSGALTSGVHTFPAVLQSSGLYSLKSVVTVPSSSLGTQTYICNVNHKPSNTKVDKKVEPKSCDKTHTCPPCPAPELLGGPSVFLFPPKPKDTLMISRTPEVTCVVVDVSHEDPEVKFNWYVDGVEVHNAKTKPREEQYNSTYRVVSVLTVLHQDWLNGKEYKCKVSNKALPAPIEKTISKAKGQPREPQVYTLPPCRDELTKNQVSLWCLVKGFYPSDIAVEWESNGQPENNYKTTPPVLDSDGSFFLYSKLTVDKSRWQQGNVFSCSVMHEALHNHYTQKSLSLSPG

SEQ ID NO: 717 - protein, 1019 aa, synthetic construct
  REGION 1..1019: note = FMC63_VK-x-CH1/knob/41BBL
DIQMTQTTSSLSASLGDRVTISCRASQDISKYLNWYQQKPDGTVKLLIYHTSRLHSGVPSRFSGSGSGTDYSLTISNLEQEDIATYFCQQGNTLPYTFGGGTKVEIKSSASTKGPSVFPLAPSSKSTSGGTAALGCLVKDYFPEPVTVSWNSGALTSGVHTFPAVLQSSGLYSLSSVVTVPSSSLGTQTYICNVNHKPSNTKVDKKVEPKSCDKTHTCPPCPAPELLGGPSVFLFPPKPKDTLMISRTPEVTCVVVDVSHEDPEVKFNWYVDGVEVHNAKTKPREEQYNSTYRVVSVLTVLHQDWLNGKEYKCKVSNKALPAPIEKTISKAKGQPREPQVYTLPPCRDELTKNQVSLWCLVKGFYPSDIAVEWESNGQPENNYKTTPPVLDSDGSFFLYSKLTVDKSRWQQGNVFSCSVMHEALHNHYTQKSLSLSPGGGGSGGGGSREGPELSPDDPAGLLDLRQGMFAQLVAQNVLLIDGPLSWYSDPGLAGVSLTGGLSYKEDTKELVVAKAGVYYVFFQLELRRVVAGEGSGSVSLALHLQPLRSAAGAAALALTVDLPPASSEARNSAFGFQGRLLHLSAGQRLGVHLHTEARARHAWQLTQGATVLGLFRVTPEIPAGLPSPRSEGGGGSGGGGSREGPELSPDDPAGLLDLRQGMFAQLVAQNVLLIDGPLSWYSDPGLAGVSLTGGLSYKEDTKELVVAKAGVYYVFFQLELRRVVAGEGSGSVSLALHLQPLRSAAGAAALALTVDLPPASSEARNSAFGFQGRLLHLSAGQRLGVHLHTEARARHAWQLTQGATVLGLFRVTPEIPAGLPSPRSEGGGGSGGGGSREGPELSPDDPAGLLDLRQGMFAQLVAQNVLLIDGPLSWYSDPGLAGVSLTGGLSYKEDTKELVVAKAGVYYVFFQLELRRVVAGEGSGSVSLALHLQPLRSAAGAAALALTVDLPPASSEARNSAFGFQGRLLHLSAGQRLGVHLHTEARARHAWQLTQGATVLGLFRVTPEIPAGLPSPRSE

SEQ ID NO: 718 - protein, 1019 aa, synthetic construct
  REGION 1..1019: note = FMC63_VK-x-CH1/Q38E/S183K/knob/41BBL
DIQMTQTTSSLSASLGDRVTISCRASQDISKYLNWYQEKPDGTVKLLIYHTSRLHSGVPSRFSGSGSGTDYSLTISNLEQEDIATYFCQQGNTLPYTFGGGTKVEIKSSASTKGPSVFPLAPSSKSTSGGTAALGCLVKDYFPEPVTVSWNSGALTSGVHTFPAVLQSSGLYSLKSVVTVPSSSLGTQTYICNVNHKPSNTKVDKKVEPKSCDKTHTCPPCPAPELLGGPSVFLFPPKPKDTLMISRTPEVTCVVVDVSHEDPEVKFNWYVDGVEVHNAKTKPREEQYNSTYRVVSVLTVLHQDWLNGKEYKCKVSNKALPAPIEKTISKAKGQPREPQVYTLPPCRDELTKNQVSLWCLVKGFYPSDIAVEWESNGQPENNYKTTPPVLDSDGSFFLYSKLTVDKSRWQQGNVFSCSVMHEALHNHYTQKSLSLSPGGGGSGGGGSREGPELSPDDPAGLLDLRQGMFAQLVAQNVLLIDGPLSWYSDPGLAGVSLTGGLSYKEDTKELVVAKAGVYYVFFQLELRRVVAGEGSGSVSLALHLQPLRSAAGAAALALTVDLPPASSEARNSAFGFQGRLLHLSAGQRLGVHLHTEARARHAWQLTQGATVLGLFRVTPEIPAGLPSPRSEGGGGSGGGGSREGPELSPDDPAGLLDLRQGMFAQLVAQNVLLIDGPLSWYSDPGLAGVSLTGGLSYKEDTKELVVAKAGVYYVFFQLELRRVVAGEGSGSVSLALHLQPLRSAAGAAALALTVDLPPASSEARNSAFGFQGRLLHLSAGQRLGVHLHTEARARHAWQLTQGATVLGLFRVTPEIPAGLPSPRSEGGGGSGGGGSREGPELSPDDPAGLLDLRQGMFAQLVAQNVLLIDGPLSWYSDPGLAGVSLTGGLSYKEDTKELVVAKAGVYYVFFQLELRRVVAGEGSGSVSLALHLQPLRSAAGAAALALTVDLPPASSEARNSAFGFQGRLLHLSAGQRLGVHLHTEARARHAWQLTQGATVLGLFRVTPEIPAGLPSPRSE

SEQ ID NO: 719 - protein, 1019 aa, synthetic construct
  REGION 1..1019: note = FMC63_VK-x-CH1/Q38K/S183K/knob/41BBL
DIQMTQTTSSLSASLGDRVTISCRASQDISKYLNWYQKKPDGTVKLLIYHTSRLHSGVPSRFSGSGSGTDYSLTISNLEQEDIATYFCQQGNTLPYTFGGGTKVEIKSSASTKGPSVFPLAPSSKSTSGGTAALGCLVKDYFPEPVTVSWNSGALTSGVHTFPAVLQSSGLYSLKSVVTVPSSSLGTQTYICNVNHKPSNTKVDKKVEPKSCDKTHTCPPCPAPELLGGPSVFLFPPKPKDTLMISRTPEVTCVVVDVSHEDPEVKFNWYVDGVEVHNAKTKPREEQYNSTYRVVSVLTVLHQDWLNGKEYKCKVSNKALPAPIEKTISKAKGQPREPQVYTLPPCRDELTKNQVSLWCLVKGFYPSDIAVEWESNGQPENNYKTTPPVLDSDGSFFLYSKLTVDKSRWQQGNVFSCSVMHEALHNHYTQKSLSLSPGGGGSGGGGSREGPELSPDDPAGLLDLRQGMFAQLVAQNVLLIDGPLSWYSDPGLAGVSLTGGLSYKEDTKELVVAKAGVYYVFFQLELRRVVAGEGSGSVSLALHLQPLRSAAGAAALALTVDLPPASSEARNSAFGFQGRLLHLSAGQRLGVHLHTEARARHAWQLTQGATVLGLFRVTPEIPAGLPSPRSEGGGGSGGGGSREGPELSPDDPAGLLDLRQGMFAQLVAQNVLLIDGPLSWYSDPGLAGVSLTGGLSYKEDTKELVVAKAGVYYVFFQLELRRVVAGEGSGSVSLALHLQPLRSAAGAAALALTVDLPPASSEARNSAFGFQGRLLHLSAGQRLGVHLHTEARARHAWQLTQGATVLGLFRVTPEIPAGLPSPRSEGGGGSGGGGSREGPELSPDDPAGLLDLRQGMFAQLVAQNVLLIDGPLSWYSDPGLAGVSLTGGLSYKEDTKELVVAKAGVYYVFFQLELRRVVAGEGSGSVSLALHLQPLRSAAGAAALALTVDLPPASSEARNSAFGFQGRLLHLSAGQRLGVHLHTEARARHAWQLTQGATVLGLFRVTPEIPAGLPSPRSE

SEQ ID NO: 720 - protein, 1018 aa, synthetic construct
  REGION 1..1018: note = R_VK-x-CH1/knob/41BBL
QIVLSQSPAILSASPGEKVTMTCRASSSVSYIHWFQQKPGSSPKPWIYATSNLASGVPVRFSGSGSGTSYSLTISRVEAEDAATYYCQQWTSNPPTFGGGTKVEIKSSASTKGPSVFPLAPSSKSTSGGTAALGCLVKDYFPEPVTVSWNSGALTSGVHTFPAVLQSSGLYSLSSVVTVPSSSLGTQTYICNVNHKPSNTKVDKKVEPKSCDKTHTCPPCPAPELLGGPSVFLFPPKPKDTLMISRTPEVTCVVVDVSHEDPEVKFNWYVDGVEVHNAKTKPREEQYNSTYRVVSVLTVLHQDWLNGKEYKCKVSNKALPAPIEKTISKAKGQPREPQVYTLPPCRDELTKNQVSLWCLVKGFYPSDIAVEWESNGQPENNYKTTPPVLDSDGSFFLYSKLTVDKSRWQQGNVFSCSVMHEALHNHYTQKSLSLSPGGGGSGGGGSREGPELSPDDPAGLLDLRQGMFAQLVAQNVLLIDGPLSWYSDPGLAGVSLTGGLSYKEDTKELVVAKAGVYYVFFQLELRRVVAGEGSGSVSLALHLQPLRSAAGAAALALTVDLPPASSEARNSAFGFQGRLLHLSAGQRLGVHLHTEARARHAWQLTQGATVLGLFRVTPEIPAGLPSPRSEGGGGSGGGGSREGPELSPDDPAGLLDLRQGMFAQLVAQNVLLIDGPLSWYSDPGLAGVSLTGGLSYKEDTKELVVAKAGVYYVFFQLELRRVVAGEGSGSVSLALHLQPLRSAAGAAALALTVDLPPASSEARNSAFGFQGRLLHLSAGQRLGVHLHTEARARHAWQLTQGATVLGLFRVTPEIPAGLPSPRSEGGGGSGGGGSREGPELSPDDPAGLLDLRQGMFAQLVAQNVLLIDGPLSWYSDPGLAGVSLTGGLSYKEDTKELVVAKAGVYYVFFQLELRRVVAGEGSGSVSLALHLQPLRSAAGAAALALTVDLPPASSEARNSAFGFQGRLLHLSAGQRLGVHLHTEARARHAWQLTQGATVLGLFRVTPEIPAGLPSPRSE

SEQ ID NO: 721 - protein, 1018 aa, synthetic construct
  REGION 1..1018: note = R_VK-x-CH1/Q38E/S183K/knob/41BBL
QIVLSQSPAILSASPGEKVTMTCRASSSVSYIHWFQEKPGSSPKPWIYATSNLASGVPVRFSGSGSGTSYSLTISRVEAEDAATYYCQQWTSNPPTFGGGTKVEIKSSASTKGPSVFPLAPSSKSTSGGTAALGCLVKDYFPEPVTVSWNSGALTSGVHTFPAVLQSSGLYSLKSVVTVPSSSLGTQTYICNVNHKPSNTKVDKKVEPKSCDKTHTCPPCPAPELLGGPSVFLFPPKPKDTLMISRTPEVTCVVVDVSHEDPEVKFNWYVDGVEVHNAKTKPREEQYNSTYRVVSVLTVLHQDWLNGKEYKCKVSNKALPAPIEKTISKAKGQPREPQVYTLPPCRDELTKNQVSLWCLVKGFYPSDIAVEWESNGQPENNYKTTPPVLDSDGSFFLYSKLTVDKSRWQQGNVFSCSVMHEALHNHYTQKSLSLSPGGGGSGGGGSREGPELSPDDPAGLLDLRQGMFAQLVAQNVLLIDGPLSWYSDPGLAGVSLTGGLSYKEDTKELVVAKAGVYYVFFQLELRRVVAGEGSGSVSLALHLQPLRSAAGAAALALTVDLPPASSEARNSAFGFQGRLLHLSAGQRLGVHLHTEARARHAWQLTQGATVLGLFRVTPEIPAGLPSPRSEGGGGSGGGGSREGPELSPDDPAGLLDLRQGMFAQLVAQNVLLIDGPLSWYSDPGLAGVSLTGGLSYKEDTKELVVAKAGVYYVFFQLELRRVVAGEGSGSVSLALHLQPLRSAAGAAALALTVDLPPASSEARNSAFGFQGRLLHLSAGQRLGVHLHTEARARHAWQLTQGATVLGLFRVTPEIPAGLPSPRSEGGGGSGGGGSREGPELSPDDPAGLLDLRQGMFAQLVAQNVLLIDGPLSWYSDPGLAGVSLTGGLSYKEDTKELVVAKAGVYYVFFQLELRRVVAGEGSGSVSLALHLQPLRSAAGAAALALTVDLPPASSEARNSAFGFQGRLLHLSAGQRLGVHLHTEARARHAWQLTQGATVLGLFRVTPEIPAGLPSPRSE

SEQ ID NO: 722 - protein, 1018 aa, synthetic construct
  REGION 1..1018: note = R_VK-x-CH1/Q38K/S183K/knob/41BBL
QIVLSQSPAILSASPGEKVTMTCRASSSVSYIHWFQKKPGSSPKPWIYATSNLASGVPVRFSGSGSGTSYSLTISRVEAEDAATYYCQQWTSNPPTFGGGTKVEIKSSASTKGPSVFPLAPSSKSTSGGTAALGCLVKDYFPEPVTVSWNSGALTSGVHTFPAVLQSSGLYSLKSVVTVPSSSLGTQTYICNVNHKPSNTKVDKKVEPKSCDKTHTCPPCPAPELLGGPSVFLFPPKPKDTLMISRTPEVTCVVVDVSHEDPEVKFNWYVDGVEVHNAKTKPREEQYNSTYRVVSVLTVLHQDWLNGKEYKCKVSNKALPAPIEKTISKAKGQPREPQVYTLPPCRDELTKNQVSLWCLVKGFYPSDIAVEWESNGQPENNYKTTPPVLDSDGSFFLYSKLTVDKSRWQQGNVFSCSVMHEALHNHYTQKSLSLSPGGGGSGGGGSREGPELSPDDPAGLLDLRQGMFAQLVAQNVLLIDGPLSWYSDPGLAGVSLTGGLSYKEDTKELVVAKAGVYYVFFQLELRRVVAGEGSGSVSLALHLQPLRSAAGAAALALTVDLPPASSEARNSAFGFQGRLLHLSAGQRLGVHLHTEARARHAWQLTQGATVLGLFRVTPEIPAGLPSPRSEGGGGSGGGGSREGPELSPDDPAGLLDLRQGMFAQLVAQNVLLIDGPLSWYSDPGLAGVSLTGGLSYKEDTKELVVAKAGVYYVFFQLELRRVVAGEGSGSVSLALHLQPLRSAAGAAALALTVDLPPASSEARNSAFGFQGRLLHLSAGQRLGVHLHTEARARHAWQLTQGATVLGLFRVTPEIPAGLPSPRSEGGGGSGGGGSREGPELSPDDPAGLLDLRQGMFAQLVAQNVLLIDGPLSWYSDPGLAGVSLTGGLSYKEDTKELVVAKAGVYYVFFQLELRRVVAGEGSGSVSLALHLQPLRSAAGAAALALTVDLPPASSEARNSAFGFQGRLLHLSAGQRLGVHLHTEARARHAWQLTQGATVLGLFRVTPEIPAGLPSPRSE

SEQ ID NO: 723 - protein, 606 aa, synthetic construct
  REGION 1..606: note = R_VH-CH1/K147E/K213E/CLD201/hole/PGLALA/RF
QVQLQQPGAELVKPGASVKMSCKASGYTFTSYNMHWVKQTPGRGLEWIGAIYPGNGDTSYNQKFKGKATLTADKSSSTAYMQLSSLTSEDSAVYYCARSTYYGGDWYFNVWGAGTTVTVSAASTKGPSVFPLAPSSKSTSGGTAALGCLVEDYFPEPVTVSWNSGALTSGVHTFPAVLQSSGLYSLSSVVTVPSSSLGTQTYICNVNHKPSNTKVDEKVEPKSCTDWSPYADQSIKVRISLKSALGDKAYEWNDNEMYLFRSSVAYAMRQYFLKVKNQMILFGEEDVRVANLKPRISFNFFVTAPKNVSDIIPRTEVEKAIRMSRSRINDAFRLNDNSLEFLGIQPTLGPPNQPPVSTSTSPTRSMAPGAVHLPQPVSTRDKTHTCPPCPAPEAAGGPSVFLFPPKPKDTLMISRTPEVTCVVVDVSHEDPEVKFNWYVDGVEVHNAKTKPREEQYNSTYRVVSVLTVLHQDWLNGKEYKCKVSNKALGAPIEKTISKAKGQPREPQVCTLPPSRDELTKNQVSLSCAVKGFYPSDIAVEWESNGQPENNYKTTPPVLDSDGSFFLVSKLTVDKSRWQQGNVFSCSVMHEALHNRFTQKSLSLSPG

SEQ ID NO: 724 - protein, 1019 aa, synthetic construct
  REGION 1..1019: note = FMC63_VK-x-CH1/knob/PGLALA/41BBL
DIQMTQTTSSLSASLGDRVTISCRASQDISKYLNWYQQKPDGTVKLLIYHTSRLHSGVPSRFSGSGSGTDYSLTISNLEQEDIATYFCQQGNTLPYTFGGGTKVEIKSSASTKGPSVFPLAPSSKSTSGGTAALGCLVKDYFPEPVTVSWNSGALTSGVHTFPAVLQSSGLYSLSSVVTVPSSSLGTQTYICNVNHKPSNTKVDKKVEPKSCDKTHTCPPCPAPEAAGGPSVFLFPPKPKDTLMISRTPEVTCVVVDVSHEDPEVKFNWYVDGVEVHNAKTKPREEQYNSTYRVVSVLTVLHQDWLNGKEYKCKVSNKALGAPIEKTISKAKGQPREPQVYTLPPCRDELTKNQVSLWCLVKGFYPSDIAVEWESNGQPENNYKTTPPVLDSDGSFFLYSKLTVDKSRWQQGNVFSCSVMHEALHNHYTQKSLSLSPGGGGSGGGGSREGPELSPDDPAGLLDLRQGMFAQLVAQNVLLIDGPLSWYSDPGLAGVSLTGGLSYKEDTKELVVAKAGVYYVFFQLELRRVVAGEGSGSVSLALHLQPLRSAAGAAALALTVDLPPASSEARNSAFGFQGRLLHLSAGQRLGVHLHTEARARHAWQLTQGATVLGLFRVTPEIPAGLPSPRSEGGGGSGGGGSREGPELSPDDPAGLLDLRQGMFAQLVAQNVLLIDGPLSWYSDPGLAGVSLTGGLSYKEDTKELVVAKAGVYYVFFQLELRRVVAGEGSGSVSLALHLQPLRSAAGAAALALTVDLPPASSEARNSAFGFQGRLLHLSAGQRLGVHLHTEARARHAWQLTQGATVLGLFRVTPEIPAGLPSPRSEGGGGSGGGGSREGPELSPDDPAGLLDLRQGMFAQLVAQNVLLIDGPLSWYSDPGLAGVSLTGGLSYKEDTKELVVAKAGVYYVFFQLELRRVVAGEGSGSVSLALHLQPLRSAAGAAALALTVDLPPASSEARNSAFGFQGRLLHLSAGQRLGVHLHTEARARHAWQLTQGATVLGLFRVTPEIPAGLPSPRSE

SEQ ID NO: 725 - protein, 606 aa, synthetic construct
  REGION 1..606: note = R_VH-CH1/Q39K/S183E/CLD201/hole/PGLALA/RF
QVQLQQPGAELVKPGASVKMSCKASGYTFTSYNMHWVKKTPGRGLEWIGAIYPGNGDTSYNQKFKGKATLTADKSSSTAYMQLSSLTSEDSAVYYCARSTYYGGDWYFNVWGAGTTVTVSAASTKGPSVFPLAPSSKSTSGGTAALGCLVKDYFPEPVTVSWNSGALTSGVHTFPAVLQSSGLYSLESVVTVPSSSLGTQTYICNVNHKPSNTKVDKKVEPKSCTDWSPYADQSIKVRISLKSALGDKAYEWNDNEMYLFRSSVAYAMRQYFLKVKNQMILFGEEDVRVANLKPRISFNFFVTAPKNVSDIIPRTEVEKAIRMSRSRINDAFRLNDNSLEFLGIQPTLGPPNQPPVSTSTSPTRSMAPGAVHLPQPVSTRDKTHTCPPCPAPEAAGGPSVFLFPPKPKDTLMISRTPEVTCVVVDVSHEDPEVKFNWYVDGVEVHNAKTKPREEQYNSTYRVVSVLTVLHQDWLNGKEYKCKVSNKALGAPIEKTISKAKGQPREPQVCTLPPSRDELTKNQVSLSCAVKGFYPSDIAVEWESNGQPENNYKTTPPVLDSDGSFFLVSKLTVDKSRWQQGNVFSCSVMHEALHNRFTQKSLSLSPG

SEQ ID NO: 726 - protein, 1019 aa, synthetic construct
  REGION 1..1019: note = FMC63_VK-x-CH1/Q38E/S183K/knob/PGLALA/41BBL
DIQMTQTTSSLSASLGDRVTISCRASQDISKYLNWYQEKPDGTVKLLIYHTSRLHSGVPSRFSGSGSGTDYSLTISNLEQEDIATYFCQQGNTLPYTFGGGTKVEIKSSASTKGPSVFPLAPSSKSTSGGTAALGCLVKDYFPEPVTVSWNSGALTSGVHTFPAVLQSSGLYSLKSVVTVPSSSLGTQTYICNVNHKPSNTKVDKKVEPKSCDKTHTCPPCPAPEAAGGPSVFLFPPKPKDTLMISRTPEVTCVVVDVSHEDPEVKFNWYVDGVEVHNAKTKPREEQYNSTYRVVSVLTVLHQDWLNGKEYKCKVSNKALGAPIEKTISKAKGQPREPQVYTLPPCRDELTKNQVSLWCLVKGFYPSDIAVEWESNGQPENNYKTTPPVLDSDGSFFLYSKLTVDKSRWQQGNVFSCSVMHEALHNHYTQKSLSLSPGGGGSGGGGSREGPELSPDDPAGLLDLRQGMFAQLVAQNVLLIDGPLSWYSDPGLAGVSLTGGLSYKEDTKELVVAKAGVYYVFFQLELRRVVAGEGSGSVSLALHLQPLRSAAGAAALALTVDLPPASSEARNSAFGFQGRLLHLSAGQRLGVHLHTEARARHAWQLTQGATVLGLFRVTPEIPAGLPSPRSEGGGGSGGGGSREGPELSPDDPAGLLDLRQGMFAQLVAQNVLLIDGPLSWYSDPGLAGVSLTGGLSYKEDTKELVVAKAGVYYVFFQLELRRVVAGEGSGSVSLALHLQPLRSAAGAAALALTVDLPPASSEARNSAFGFQGRLLHLSAGQRLGVHLHTEARARHAWQLTQGATVLGLFRVTPEIPAGLPSPRSEGGGGSGGGGSREGPELSPDDPAGLLDLRQGMFAQLVAQNVLLIDGPLSWYSDPGLAGVSLTGGLSYKEDTKELVVAKAGVYYVFFQLELRRVVAGEGSGSVSLALHLQPLRSAAGAAALALTVDLPPASSEARNSAFGFQGRLLHLSAGQRLGVHLHTEARARHAWQLTQGATVLGLFRVTPEIPAGLPSPRSE

SEQ ID NO: 727 - protein, 1019 aa, synthetic construct
  REGION 1..1019: note = FMC63_VK-x-CH1/Q38K/S183K/knob/PGLALA/41BBL
DIQMTQTTSSLSASLGDRVTISCRASQDISKYLNWYQKKPDGTVKLLIYHTSRLHSGVPSRFSGSGSGTDYSLTISNLEQEDIATYFCQQGNTLPYTFGGGTKVEIKSSASTKGPSVFPLAPSSKSTSGGTAALGCLVKDYFPEPVTVSWNSGALTSGVHTFPAVLQSSGLYSLKSVVTVPSSSLGTQTYICNVNHKPSNTKVDKKVEPKSCDKTHTCPPCPAPEAAGGPSVFLFPPKPKDTLMISRTPEVTCVVVDVSHEDPEVKFNWYVDGVEVHNAKTKPREEQYNSTYRVVSVLTVLHQDWLNGKEYKCKVSNKALGAPIEKTISKAKGQPREPQVYTLPPCRDELTKNQVSLWCLVKGFYPSDIAVEWESNGQPENNYKTTPPVLDSDGSFFLYSKLTVDKSRWQQGNVFSCSVMHEALHNHYTQKSLSLSPGGGGSGGGGSREGPELSPDDPAGLLDLRQGMFAQLVAQNVLLIDGPLSWYSDPGLAGVSLTGGLSYKEDTKELVVAKAGVYYVFFQLELRRVVAGEGSGSVSLALHLQPLRSAAGAAALALTVDLPPASSEARNSAFGFQGRLLHLSAGQRLGVHLHTEARARHAWQLTQGATVLGLFRVTPEIPAGLPSPRSEGGGGSGGGGSREGPELSPDDPAGLLDLRQGMFAQLVAQNVLLIDGPLSWYSDPGLAGVSLTGGLSYKEDTKELVVAKAGVYYVFFQLELRRVVAGEGSGSVSLALHLQPLRSAAGAAALALTVDLPPASSEARNSAFGFQGRLLHLSAGQRLGVHLHTEARARHAWQLTQGATVLGLFRVTPEIPAGLPSPRSEGGGGSGGGGSREGPELSPDDPAGLLDLRQGMFAQLVAQNVLLIDGPLSWYSDPGLAGVSLTGGLSYKEDTKELVVAKAGVYYVFFQLELRRVVAGEGSGSVSLALHLQPLRSAAGAAALALTVDLPPASSEARNSAFGFQGRLLHLSAGQRLGVHLHTEARARHAWQLTQGATVLGLFRVTPEIPAGLPSPRSE

SEQ ID NO: 728 - protein, 605 aa, synthetic construct
  REGION 1..605: note = FMC63_VH-CH1/N84S/K147E/K213E/CLD201/hole/PGLALA/RF
EVKLQESGPGLVAPSQSLSVTCTVSGVSLPDYGVSWIRQPPRKGLEWLGVIWGSETTYYNSALKSRLTIIKDNSKSQVFLKMSSLQTDDTAIYYCAKHYYYGGSYAMDYWGQGTSVTVSSASTKGPSVFPLAPSSKSTSGGTAALGCLVEDYFPEPVTVSWNSGALTSGVHTFPAVLQSSGLYSLSSVVTVPSSSLGTQTYICNVNHKPSNTKVDEKVEPKSCTDWSPYADQSIKVRISLKSALGDKAYEWNDNEMYLFRSSVAYAMRQYFLKVKNQMILFGEEDVRVANLKPRISFNFFVTAPKNVSDIIPRTEVEKAIRMSRSRINDAFRLNDNSLEFLGIQPTLGPPNQPPVSTSTSPTRSMAPGAVHLPQPVSTRDKTHTCPPCPAPEAAGGPSVFLFPPKPKDTLMISRTPEVTCVVVDVSHEDPEVKFNWYVDGVEVHNAKTKPREEQYNSTYRVVSVLTVLHQDWLNGKEYKCKVSNKALGAPIEKTISKAKGQPREPQVCTLPPSRDELTKNQVSLSCAVKGFYPSDIAVEWESNGQPENNYKTTPPVLDSDGSFFLVSKLTVDKSRWQQGNVFSCSVMHEALHNRFTQKSLSLSPG

SEQ ID NO: 729 - protein, 1018 aa, synthetic construct
  REGION 1..1018: note = R_VK-x-CH1/knob/PGLALA/41BBL
QIVLSQSPAILSASPGEKVTMTCRASSSVSYIHWFQQKPGSSPKPWIYATSNLASGVPVRFSGSGSGTSYSLTISRVEAEDAATYYCQQWTSNPPTFGGGTKVEIKSSASTKGPSVFPLAPSSKSTSGGTAALGCLVKDYFPEPVTVSWNSGALTSGVHTFPAVLQSSGLYSLSSVVTVPSSSLGTQTYICNVNHKPSNTKVDKKVEPKSCDKTHTCPPCPAPEAAGGPSVFLFPPKPKDTLMISRTPEVTCVVVDVSHEDPEVKFNWYVDGVEVHNAKTKPREEQYNSTYRVVSVLTVLHQDWLNGKEYKCKVSNKALGAPIEKTISKAKGQPREPQVYTLPPCRDELTKNQVSLWCLVKGFYPSDIAVEWESNGQPENNYKTTPPVLDSDGSFFLYSKLTVDKSRWQQGNVFSCSVMHEALHNHYTQKSLSLSPGGGGSGGGGSREGPELSPDDPAGLLDLRQGMFAQLVAQNVLLIDGPLSWYSDPGLAGVSLTGGLSYKEDTKELVVAKAGVYYVFFQLELRRVVAGEGSGSVSLALHLQPLRSAAGAAALALTVDLPPASSEARNSAFGFQGRLLHLSAGQRLGVHLHTEARARHAWQLTQGATVLGLFRVTPEIPAGLPSPRSEGGGGSGGGGSREGPELSPDDPAGLLDLRQGMFAQLVAQNVLLIDGPLSWYSDPGLAGVSLTGGLSYKEDTKELVVAKAGVYYVFFQLELRRVVAGEGSGSVSLALHLQPLRSAAGAAALALTVDLPPASSEARNSAFGFQGRLLHLSAGQRLGVHLHTEARARHAWQLTQGATVLGLFRVTPEIPAGLPSPRSEGGGGSGGGGSREGPELSPDDPAGLLDLRQGMFAQLVAQNVLLIDGPLSWYSDPGLAGVSLTGGLSYKEDTKELVVAKAGVYYVFFQLELRRVVAGEGSGSVSLALHLQPLRSAAGAAALALTVDLPPASSEARNSAFGFQGRLLHLSAGQRLGVHLHTEARARHAWQLTQGATVLGLFRVTPEIPAGLPSPRSE

SEQ ID NO: 730 - protein, 605 aa, synthetic construct
  REGION 1..605: note = FMC63_VH-CH1/N84S/Q39K/S183E/CLD201/hole/PGLALA/RF
EVKLQESGPGLVAPSQSLSVTCTVSGVSLPDYGVSWIRKPPRKGLEWLGVIWGSETTYYNSALKSRLTIIKDNSKSQVFLKMSSLQTDDTAIYYCAKHYYYGGSYAMDYWGQGTSVTVSSASTKGPSVFPLAPSSKSTSGGTAALGCLVKDYFPEPVTVSWNSGALTSGVHTFPAVLQSSGLYSLESVVTVPSSSLGTQTYICNVNHKPSNTKVDKKVEPKSCTDWSPYADQSIKVRISLKSALGDKAYEWNDNEMYLFRSSVAYAMRQYFLKVKNQMILFGEEDVRVANLKPRISFNFFVTAPKNVSDIIPRTEVEKAIRMSRSRINDAFRLNDNSLEFLGIQPTLGPPNQPPVSTSTSPTRSMAPGAVHLPQPVSTRDKTHTCPPCPAPEAAGGPSVFLFPPKPKDTLMISRTPEVTCVVVDVSHEDPEVKFNWYVDGVEVHNAKTKPREEQYNSTYRVVSVLTVLHQDWLNGKEYKCKVSNKALGAPIEKTISKAKGQPREPQVCTLPPSRDELTKNQVSLSCAVKGFYPSDIAVEWESNGQPENNYKTTPPVLDSDGSFFLVSKLTVDKSRWQQGNVFSCSVMHEALHNRFTQKSLSLSPG

SEQ ID NO: 731 - protein, 1018 aa, synthetic construct
  REGION 1..1018: note = R_VK-x-CH1/Q38E/S183K/knob/PGLALA/41BBL
QIVLSQSPAILSASPGEKVTMTCRASSSVSYIHWFQEKPGSSPKPWIYATSNLASGVPVRFSGSGSGTSYSLTISRVEAEDAATYYCQQWTSNPPTFGGGTKVEIKSSASTKGPSVFPLAPSSKSTSGGTAALGCLVKDYFPEPVTVSWNSGALTSGVHTFPAVLQSSGLYSLKSVVTVPSSSLGTQTYICNVNHKPSNTKVDKKVEPKSCDKTHTCPPCPAPEAAGGPSVFLFPPKPKDTLMISRTPEVTCVVVDVSHEDPEVKFNWYVDGVEVHNAKTKPREEQYNSTYRVVSVLTVLHQDWLNGKEYKCKVSNKALGAPIEKTISKAKGQPREPQVYTLPPCRDELTKNQVSLWCLVKGFYPSDIAVEWESNGQPENNYKTTPPVLDSDGSFFLYSKLTVDKSRWQQGNVFSCSVMHEALHNHYTQKSLSLSPGGGGSGGGGSREGPELSPDDPAGLLDLRQGMFAQLVAQNVLLIDGPLSWYSDPGLAGVSLTGGLSYKEDTKELVVAKAGVYYVFFQLELRRVVAGEGSGSVSLALHLQPLRSAAGAAALALTVDLPPASSEARNSAFGFQGRLLHLSAGQRLGVHLHTEARARHAWQLTQGATVLGLFRVTPEIPAGLPSPRSEGGGGSGGGGSREGPELSPDDPAGLLDLRQGMFAQLVAQNVLLIDGPLSWYSDPGLAGVSLTGGLSYKEDTKELVVAKAGVYYVFFQLELRRVVAGEGSGSVSLALHLQPLRSAAGAAALALTVDLPPASSEARNSAFGFQGRLLHLSAGQRLGVHLHTEARARHAWQLTQGATVLGLFRVTPEIPAGLPSPRSEGGGGSGGGGSREGPELSPDDPAGLLDLRQGMFAQLVAQNVLLIDGPLSWYSDPGLAGVSLTGGLSYKEDTKELVVAKAGVYYVFFQLELRRVVAGEGSGSVSLALHLQPLRSAAGAAALALTVDLPPASSEARNSAFGFQGRLLHLSAGQRLGVHLHTEARARHAWQLTQGATVLGLFRVTPEIPAGLPSPRSE

SEQ ID NO: 732 - protein, 1018 aa, synthetic construct
  REGION 1..1018: note = R_VK-x-CH1/Q38K/S183K/knob/PGLALA/41BBL
QIVLSQSPAILSASPGEKVTMTCRASSSVSYIHWFQKKPGSSPKPWIYATSNLASGVPVRFSGSGSGTSYSLTISRVEAEDAATYYCQQWTSNPPTFGGGTKVEIKSSASTKGPSVFPLAPSSKSTSGGTAALGCLVKDYFPEPVTVSWNSGALTSGVHTFPAVLQSSGLYSLKSVVTVPSSSLGTQTYICNVNHKPSNTKVDKKVEPKSCDKTHTCPPCPAPEAAGGPSVFLFPPKPKDTLMISRTPEVTCVVVDVSHEDPEVKFNWYVDGVEVHNAKTKPREEQYNSTYRVVSVLTVLHQDWLNGKEYKCKVSNKALGAPIEKTISKAKGQPREPQVYTLPPCRDELTKNQVSLWCLVKGFYPSDIAVEWESNGQPENNYKTTPPVLDSDGSFFLYSKLTVDKSRWQQGNVFSCSVMHEALHNHYTQKSLSLSPGGGGSGGGGSREGPELSPDDPAGLLDLRQGMFAQLVAQNVLLIDGPLSWYSDPGLAGVSLTGGLSYKEDTKELVVAKAGVYYVFFQLELRRVVAGEGSGSVSLALHLQPLRSAAGAAALALTVDLPPASSEARNSAFGFQGRLLHLSAGQRLGVHLHTEARARHAWQLTQGATVLGLFRVTPEIPAGLPSPRSEGGGGSGGGGSREGPELSPDDPAGLLDLRQGMFAQLVAQNVLLIDGPLSWYSDPGLAGVSLTGGLSYKEDTKELVVAKAGVYYVFFQLELRRVVAGEGSGSVSLALHLQPLRSAAGAAALALTVDLPPASSEARNSAFGFQGRLLHLSAGQRLGVHLHTEARARHAWQLTQGATVLGLFRVTPEIPAGLPSPRSEGGGGSGGGGSREGPELSPDDPAGLLDLRQGMFAQLVAQNVLLIDGPLSWYSDPGLAGVSLTGGLSYKEDTKELVVAKAGVYYVFFQLELRRVVAGEGSGSVSLALHLQPLRSAAGAAALALTVDLPPASSEARNSAFGFQGRLLHLSAGQRLGVHLHTEARARHAWQLTQGATVLGLFRVTPEIPAGLPSPRSE

SEQ ID NO: 733 - protein, 213 aa, synthetic construct
  REGION 1..213: note = R_VK-Ck/E123R/Q124K
QIVLSQSPAILSASPGEKVTMTCRASSSVSYIHWFQQKPGSSPKPWIYATSNLASGVPVRFSGSGSGTSYSLTISRVEAEDAATYYCQQWTSNPPTFGGGTKLEIKRTVAAPSVFIFPPSDRKLKSGTASVVCLLNNFYPREAKVQWKVDNALQSGNSQESVTEQDSKDSTYSLSSTLTLSKADYEKHKVYACEVTHQGLSSPVTKSFNRGEC

SEQ ID NO: 734 - protein, 227 aa, synthetic construct
  REGION 1..227: note = FMC63_VH-x-CK/N84S
EVKLQESGPGLVAPSQSLSVTCTVSGVSLPDYGVSWIRQPPRKGLEWLGVIWGSETTYYNSALKSRLTIIKDNSKSQVFLKMSSLQTDDTAIYYCAKHYYYGGSYAMDYWGQGTLVTVSSASVAAPSVFIFPPSDEQLKSGTASVVCLLNNFYPREAKVQWKVDNALQSGNSQESVTEQDSKDSTYSLSSTLTLSKADYEKHKVYACEVTHQGLSSPVTKSFNRGEC

SEQ ID NO: 735 - protein, 213 aa, synthetic construct
  REGION 1..213: note = R_VK-CK/Q38E/V133K
QIVLSQSPAILSASPGEKVTMTCRASSSVSYIHWFQEKPGSSPKPWIYATSNLASGVPVRFSGSGSGTSYSLTISRVEAEDAATYYCQQWTSNPPTFGGGTKLEIKRTVAAPSVFIFPPSDEQLKSGTASVKCLLNNFYPREAKVQWKVDNALQSGNSQESVTEQDSKDSTYSLSSTLTLSKADYEKHKVYACEVTHQGLSSPVTKSFNRGEC

SEQ ID NO: 736 - protein, 227 aa, synthetic construct
  REGION 1..227: note = FMC63_VH-x-CK/N84S/Q39K/V133E
EVKLQESGPGLVAPSQSLSVTCTVSGVSLPDYGVSWIRKPPRKGLEWLGVIWGSETTYYNSALKSRLTIIKDNSKSQVFLKMSSLQTDDTAIYYCAKHYYYGGSYAMDYWGQGTLVTVSSASVAAPSVFIFPPSDEQLKSGTASVECLLNNFYPREAKVQWKVDNALQSGNSQESVTEQDSKDSTYSLSSTLTLSKADYEKHKVYACEVTHQGLSSPVTKSFNRGEC

SEQ ID NO: 737 - protein, 227 aa, synthetic construct
  REGION 1..227: note = FMC63_VH-x-CK/N84S/Q39E/V133E
EVKLQESGPGLVAPSQSLSVTCTVSGVSLPDYGVSWIREPPRKGLEWLGVIWGSETTYYNSALKSRLTIIKDNSKSQVFLKMSSLQTDDTAIYYCAKHYYYGGSYAMDYWGQGTLVTVSSASVAAPSVFIFPPSDEQLKSGTASVECLLNNFYPREAKVQWKVDNALQSGNSQESVTEQDSKDSTYSLSSTLTLSKADYEKHKVYACEVTHQGLSSPVTKSFNRGEC

SEQ ID NO: 738 - protein, 214 aa, synthetic construct
  REGION 1..214: note = FMC63_VK-Ck/E123R/Q124K
DIQMTQTTSSLSASLGDRVTISCRASQDISKYLNWYQQKPDGTVKLLIYHTSRLHSGVPSRFSGSGSGTDYSLTISNLEQEDIATYFCQQGNTLPYTFGGGTKLEIKRTVAAPSVFIFPPSDRKLKSGTASVVCLLNNFYPREAKVQWKVDNALQSGNSQESVTEQDSKDSTYSLSSTLTLSKADYEKHKVYACEVTHQGLSSPVTKSFNRGEC

SEQ ID NO: 739 - protein, 228 aa, synthetic construct
  REGION 1..228: note = R_VH-x-CK
QVQLQQPGAELVKPGASVKMSCKASGYTFTSYNMHWVKQTPGRGLEWIGAIYPGNGDTSYNQKFKGKATLTADKSSSTAYMQLSSLTSEDSAVYYCARSTYYGGDWYFNVWGAGTLVTVSSASVAAPSVFIFPPSDEQLKSGTASVVCLLNNFYPREAKVQWKVDNALQSGNSQESVTEQDSKDSTYSLSSTLTLSKADYEKHKVYACEVTHQGLSSPVTKSFNRGEC

SEQ ID NO: 740 - protein, 214 aa, synthetic construct
  REGION 1..214: note = FMC63_VK-CK/Q38E/V133K
DIQMTQTTSSLSASLGDRVTISCRASQDISKYLNWYQEKPDGTVKLLIYHTSRLHSGVPSRFSGSGSGTDYSLTISNLEQEDIATYFCQQGNTLPYTFGGGTKLEIKRTVAAPSVFIFPPSDEQLKSGTASVKCLLNNFYPREAKVQWKVDNALQSGNSQESVTEQDSKDSTYSLSSTLTLSKADYEKHKVYACEVTHQGLSSPVTKSFNRGEC

SEQ ID NO: 741 - protein, 228 aa, synthetic construct
  REGION 1..228: note = R_VH-x-CK/Q39K/V133E
QVQLQQPGAELVKPGASVKMSCKASGYTFTSYNMHWVKKTPGRGLEWIGAIYPGNGDTSYNQKFKGKATLTADKSSSTAYMQLSSLTSEDSAVYYCARSTYYGGDWYFNVWGAGTLVTVSSASVAAPSVFIFPPSDEQLKSGTASVECLLNNFYPREAKVQWKVDNALQSGNSQESVTEQDSKDSTYSLSSTLTLSKADYEKHKVYACEVTHQGLSSPVTKSFNRGEC

SEQ ID NO: 742 - protein, 228 aa, synthetic construct
  REGION 1..228: note = R_VH-x-CK/Q39E/V133E
QVQLQQPGAELVKPGASVKMSCKASGYTFTSYNMHWVKETPGRGLEWIGAIYPGNGDTSYNQKFKGKATLTADKSSSTAYMQLSSLTSEDSAVYYCARSTYYGGDWYFNVWGAGTLVTVSSASVAAPSVFIFPPSDEQLKSGTASVECLLNNFYPREAKVQWKVDNALQSGNSQESVTEQDSKDSTYSLSSTLTLSKADYEKHKVYACEVTHQGLSSPVTKSFNRGEC

SEQ ID NO: 743 - protein, 216 aa, synthetic construct
  REGION 1..216: note = EM901-L1_BCMA/VK-CK
EIVLTQSPGTLSLSPGERATLSCRASQSVSDEYLSWYQQKPGQAPRLLIHSASTRATGIPDRFSGSGSGTDFTLAISRLEPEDFAVYYCQQYGYPPDFTFGQGTKVEIKRTVAAPSVFIFPPSDRKLKSGTASVVCLLNNFYPREAKVQWKVDNALQSGNSQESVTEQDSKDSTYSLSSTLTLSKADYEKHKVYACEVTHQGLSSPVTKSFNRGEC

SEQ ID NO: 744 - protein, 232 aa, synthetic construct; identical to SEQ ID NO: 39
  REGION 1..232: note = EM901-L2_CD3/VH-CL

SEQ ID NO: 745 - protein, 670 aa, synthetic construct
  REGION 1..670: note = EM901-H1_BCMA/VH-CH1_CD3/VL-CH1
EVQLLESGGGLVQPGGSLRLSCAASGFTFSDNAMGWVRQAPGKGLEWVSAISGPGSSTYYADSVKGRFTISRDNSKNTLYLQMNSLRAEDTAVYYCAKVLGWFDYWGQGTLVTVSSASTKGPSVFPLAPSSKSTSGGTAALGCLVEDYFPEPVTVSWNSGALTSGVHTFPAVLQSSGLYSLSSVVTVPSSSLGTQTYICNVNHKPSNTKVDEKVEPKSCDGGGGSGGGGSQAVVTQEPSLTVSPGGTVTLTCGSSTGAVTTSNYANWVQEKPGQAFRGLIGGTNKRAPGTPARFSGSLLGGKAALTLSGAQPEDEAEYYCALWYSNLWVFGGGTKLTVLSSASTKGPSVFPLAPSSKSTSGGTAALGCLVKDYFPEPVTVSWNSGALTSGVHTFPAVLQSSGLYSLSSVVTVPSSSLGTQTYICNVNHKPSNTKVDKKVEPKSCDKTHTCPPCPAPEAAGGPSVFLFPPKPKDTLMISRTPEVTCVVVDVSHEDPEVKFNWYVDGVEVHNAKTKPREEQYNSTYRVVSVLTVLHQDWLNGKEYKCKVSNKALGAPIEKTISKAKGQPREPQVYTLPPCRDELTKNQVSLWCLVKGFYPSDIAVEWESNGQPENNYKTTPPVLDSDGSFFLYSKLTVDKSRWQQGNVFSCSVMHEALHNHYTQKSLSLSPG

SEQ ID NO: 746 - protein, 445 aa, synthetic construct
  REGION 1..445: note = EM901-H2_BCMA/VH-CH1
EVQLLESGGGLVQPGGSLRLSCAASGFTFSDNAMGWVRQAPGKGLEWVSAISGPGSSTYYADSVKGRFTISRDNSKNTLYLQMNSLRAEDTAVYYCAKVLGWFDYWGQGTLVTVSSASTKGPSVFPLAPSSKSTSGGTAALGCLVEDYFPEPVTVSWNSGALTSGVHTFPAVLQSSGLYSLSSVVTVPSSSLGTQTYICNVNHKPSNTKVDEKVEPKSCDKTHTCPPCPAPEAAGGPSVFLFPPKPKDTLMISRTPEVTCVVVDVSHEDPEVKFNWYVDGVEVHNAKTKPREEQYNSTYRVVSVLTVLHQDWLNGKEYKCKVSNKALGAPIEKTISKAKGQPREPQVCTLPPSRDELTKNQVSLSCAVKGFYPSDIAVEWESNGQPENNYKTTPPVLDSDGSFFLVSKLTVDKSRWQQGNVFSCSVMHEALHNHYTQKSLSLSPG

SEQ ID NO: 747 - protein, 221 aa, synthetic construct; identical to SEQ ID NO: 73
  REGION 1..221: note = Fc6/hole/PGLALA/RF

SEQ ID NO: 748 - protein, 216 aa, synthetic construct
  REGION 1..216: note = 42-L_BCMA/VK-CK
EIVLTQSPGTLSLSPGERATLSCRASQSVSDEYLSWYQQKPGQAPRLLIHSASTRATGIPDRFSGSGSGTDFTLAISRLEPEDFAVYYCQQYGYPPDFTFGQGTKVEIKRTVAAPSVFIFPPSDEQLKSGTASVVCLLNNFYPREAKVQWKVDNALQSGNSQESVTEQDSKDSTYSLSSTLTLSKADYEKHKVYACEVTHQGLSSPVTKSFNRGEC

SEQ ID NO: 749 - protein, 445 aa, synthetic construct
  REGION 1..445: note = 42-H_BCMA/VH-CH1/knob/PGLALA
EVQLLESGGGLVQPGGSLRLSCAASGFTFSDNAMGWVRQAPGKGLEWVSAISGPGSSTYYADSVKGRFTISRDNSKNTLYLQMNSLRAEDTAVYYCAKVLGWFDYWGQGTLVTVSSASTKGPSVFPLAPSSKSTSGGTAALGCLVKDYFPEPVTVSWNSGALTSGVHTFPAVLQSSGLYSLSSVVTVPSSSLGTQTYICNVNHKPSNTKVDKKVEPKSCDKTHTCPPCPAPEAAGGPSVFLFPPKPKDTLMISRTPEVTCVVVDVSHEDPEVKFNWYVDGVEVHNAKTKPREEQYNSTYRVVSVLTVLHQDWLNGKEYKCKVSNKALGAPIEKTISKAKGQPREPQVYTLPPCRDELTKNQVSLWCLVKGFYPSDIAVEWESNGQPENNYKTTPPVLDSDGSFFLYSKLTVDKSRWQQGNVFSCSVMHEALHNHYTQKSLSLSPG

SEQ ID NO: 750 - protein, 219 aa, synthetic construct; identical to SEQ ID NO: 38
  REGION 1..219: note = Glofitamab-L1_CD20/VK-CK

SEQ ID NO: 751 - protein, 232 aa, synthetic construct; identical to SEQ ID NO: 39
  REGION 1..232: note = Glofitamab-L2_CD3/VH-CL

SEQ ID NO: 752 - protein, 673 aa, synthetic construct; identical to SEQ ID NO: 40
  REGION 1..673: note = Glofitamab-H1_CD20/VH-CH1_CD3/VL-CH1

SEQ ID NO: 753 - protein, 448 aa, synthetic construct; identical to SEQ ID NO: 41
  REGION 1..448: note = Glofitamab-H2_CD20/VH-CH1

SEQ ID NO: 754 - protein, 219 aa, synthetic construct; identical to SEQ ID NO: 46
  REGION 1..219: note = Ob-L_CD20/VK-CK

SEQ ID NO: 755 - protein, 448 aa, synthetic construct; identical to SEQ ID NO: 47
  REGION 1..448: note = Ob-H_CD20/VH-CH1/knob/PGLALA

SEQ ID NO: 756 - protein, 111 aa, synthetic construct
  REGION 1..111: note = 9-K4A_VK
DIVLTQSPASLAVSLGQRATISCRASKSVSTSGYSYMHWYQQKPGQPPKLLIYLASNLESGVPARFSGSGSGTDFTLNIHPVEEEDAATYYCQHSRELPPTFGGGTKLEIK

SEQ ID NO: 757 - protein, 118 aa, synthetic construct
  REGION 1..118: note = 9-K4A_VH
QAYLQQSGAELVRPGASVKMSCKASGYTFPNYSFHWVKQTPRQGLEWIGAIYPGNDDTSYNQRFKGKATLTVDKSSSTAYMQLSSLTSEDSAVYFCARDYSNYPFDCWGQGTTLTVSS

SEQ ID NO: 758 - protein, 111 aa, synthetic construct; identical to SEQ ID NO: 756
  REGION 1..111: note = 5-P24_VK

SEQ ID NO: 759 - protein, 118 aa, synthetic construct
  REGION 1..118: note = 5-P24_VH
QAYLQQSGAELVRPGASVKMSCKASGYTFTSYSMHWVKQTPRQGLEWIGAIYPGNGDTSYTQKFKGKATLTVDKSSSTAYMQLSSLTSEDSAVYFCARDYSNYPFDYWGQGTTLTVSS

SEQ ID NO: 760 - protein, 111 aa, synthetic construct
  REGION 1..111: note = 3-P7A_VK
DIVLTQSPASLPVSLGQRATISCRASKSVSTSGYSYMHWYQQRPGQPPKLLIYLASNLESGVPARFSASGSGTDFTLNIHPVEEEDAATYYCQHSRELPPTFGGGTKVEIK

SEQ ID NO: 761 - protein, 118 aa, synthetic construct
  REGION 1..118: note = 3-P7A_VH
QAYLQQSGAELVRPGASVKMSCKASGYTFTSYSMHWVKQTPRQGLEWIGAIYPGNDDTSYNQKFKGKATLTVDKSSSTAYMQLSSLTSEDSAVYFCTRDYTNYPFDYWGQGTTLTVSS

SEQ ID NO: 762 - protein, 112 aa, synthetic construct
  REGION 1..112: note = 10-L12A_VK
DIVLTQSPASLAVSLGQRATISCRASKSVSTSGYSYLHWYQQKPGQPPKLLLIYLASNLESGVPARFSGSGSGTDFTLNIHPVEEEDAATYYCQHSRELPPTFGGGTKLEIK

SEQ ID NO: 763 - protein, 118 aa, synthetic construct
  REGION 1..118: note = 10-L12A_VH
QAYLQQSGAELVRPGASVKMSCKASGYTFTSYSMHWVKQTPRQGLEWIGAIYPGNGDTSYNQKFKGKATLTVDKSSSTAYMQLSSLTSEDSAVYFCTRDYSNYPFDYWGQGTTLTVSS

SEQ ID NO: 764 - protein, 723 aa, synthetic construct
  REGION 1..723: note = ACE2 ECD (18-740)
QSTIEEQAKTFLDKFNHEAEDLFYQSSLASWNYNTNITEENVQNMNNAGDKWSAFLKEQSTLAQMYPLQEIQNLTVKLQLQALQQNGSSVLSEDKSKRLNTILNTMSTIYSTGKVCNPDNPQECLLLEPGLNEIMANSLDYNERLWAWESWRSEVGKQLRPLYEEYVVLKNEMARANHYEDYGDYWRGDYEVNGVDGYDYSRGQLIEDVEHTFEEIKPLYEHLHAYVRAKLMNAYPSYISPIGCLPAHLLGDMWGRFWTNLYSLTVPFGQKPNIDVTDAMVDQAWDAQRIFKEAEKFFVSVGLPNMTQGFWENSMLTDPGNVQKAVCHPTAWDLGKGDFRILMCTKVTMDDFLTAHHEMGHIQYDMAYAAQPFLLRNGANEGFHEAVGEIMSLSAATPKHLKSIGLLSPDFQEDNETEINFLLKQALTIVGTLPFTYMLEKWRWMVFKGEIPKDQWMKKWWEMKREIVGVVEPVPHDETYCDPASLFHVSNDYSFIRYYTRTLYQFQFQEALCQAAKHEGPLHKCDISNSTEAGQKLFNMLRLGKSEPWTLALENVVGAKNMNVRPLLNYFEPLFTWLKDQNKNSFVGWSTDWSPYADQSIKVRISLKSALGDKAYEWNDNEMYLFRSSVAYAMRQYFLKVKNQMILFGEEDVRVANLKPRISFNFFVTAPKNVSDIIPRTEVEKAIRMSRSRINDAFRLNDNSLEFLGIQPTLGPPNQPPVS

SEQ ID NO: 765 - protein, 723 aa, synthetic construct
  REGION 1..723: note = ACE2 ECD (18-740) R273Q
QSTIEEQAKTFLDKFNHEAEDLFYQSSLASWNYNTNITEENVQNMNNAGDKWSAFLKEQSTLAQMYPLQEIQNLTVKLQLQALQQNGSSVLSEDKSKRLNTILNTMSTIYSTGKVCNPDNPQECLLLEPGLNEIMANSLDYNERLWAWESWRSEVGKQLRPLYEEYVVLKNEMARANHYEDYGDYWRGDYEVNGVDGYDYSRGQLIEDVEHTFEEIKPLYEHLHAYVRAKLMNAYPSYISPIGCLPAHLLGDMWGQFWTNLYSLTVPFGQKPNIDVTDAMVDQAWDAQRIFKEAEKFFVSVGLPNMTQGFWENSMLTDPGNVQKAVCHPTAWDLGKGDFRILMCTKVTMDDFLTAHHEMGHIQYDMAYAAQPFLLRNGANEGFHEAVGEIMSLSAATPKHLKSIGLLSPDFQEDNETEINFLLKQALTIVGTLPFTYMLEKWRWMVFKGEIPKDQWMKKWWEMKREIVGVVEPVPHDETYCDPASLFHVSNDYSFIRYYTRTLYQFQFQEALCQAAKHEGPLHKCDISNSTEAGQKLFNMLRLGKSEPWTLALENVVGAKNMNVRPLLNYFEPLFTWLKDQNKNSFVGWSTDWSPYADQSIKVRISLKSALGDKAYEWNDNEMYLFRSSVAYAMRQYFLKVKNQMILFGEEDVRVANLKPRISFNFFVTAPKNVSDIIPRTEVEKAIRMSRSRINDAFRLNDNSLEFLGIQPTLGPPNQPPVS

SEQ ID NO: 766 - protein, 723 aa, synthetic construct
  REGION 1..723: note = ACE2 ECD (18-740) R273A
QSTIEEQAKTFLDKFNHEAEDLFYQSSLASWNYNTNITEENVQNMNNAGDKWSAFLKEQSTLAQMYPLQEIQNLTVKLQLQALQQNGSSVLSEDKSKRLNTILNTMSTIYSTGKVCNPDNPQECLLLEPGLNEIMANSLDYNERLWAWESWRSEVGKQLRPLYEEYVVLKNEMARANHYEDYGDYWRGDYEVNGVDGYDYSRGQLIEDVEHTFEEIKPLYEHLHAYVRAKLMNAYPSYISPIGCLPAHLLGDMWGAFWTNLYSLTVPFGQKPNIDVTDAMVDQAWDAQRIFKEAEKFFVSVGLPNMTQGFWENSMLTDPGNVQKAVCHPTAWDLGKGDFRILMCTKVTMDDFLTAHHEMGHIQYDMAYAAQPFLLRNGANEGFHEAVGEIMSLSAATPKHLKSIGLLSPDFQEDNETEINFLLKQALTIVGTLPFTYMLEKWRWMVFKGEIPKDQWMKKWWEMKREIVGVVEPVPHDETYCDPASLFHVSNDYSFIRYYTRTLYQFQFQEALCQAAKHEGPLHKCDISNSTEAGQKLFNMLRLGKSEPWTLALENVVGAKNMNVRPLLNYFEPLFTWLKDQNKNSFVGWSTDWSPYADQSIKVRISLKSALGDKAYEWNDNEMYLFRSSVAYAMRQYFLKVKNQMILFGEEDVRVANLKPRISFNFFVTAPKNVSDIIPRTEVEKAIRMSRSRINDAFRLNDNSLEFLGIQPTLGPPNQPPVS

SEQ ID NO: 767 - protein, 723 aa, synthetic construct
  REGION 1..723: note = ACE2 ECD (18-740) R273G
QSTIEEQAKTFLDKFNHEAEDLFYQSSLASWNYNTNITEENVQNMNNAGDKWSAFLKEQSTLAQMYPLQEIQNLTVKLQLQALQQNGSSVLSEDKSKRLNTILNTMSTIYSTGKVCNPDNPQECLLLEPGLNEIMANSLDYNERLWAWESWRSEVGKQLRPLYEEYVVLKNEMARANHYEDYGDYWRGDYEVNGVDGYDYSRGQLIEDVEHTFEEIKPLYEHLHAYVRAKLMNAYPSYISPIGCLPAHLLGDMWGGFWTNLYSLTVPFGQKPNIDVTDAMVDQAWDAQRIFKEAEKFFVSVGLPNMTQGFWENSMLTDPGNVQKAVCHPTAWDLGKGDFRILMCTKVTMDDFLTAHHEMGHIQYDMAYAAQPFLLRNGANEGFHEAVGEIMSLSAATPKHLKSIGLLSPDFQEDNETEINFLLKQALTIVGTLPFTYMLEKWRWMVFKGEIPKDQWMKKWWEMKREIVGVVEPVPHDETYCDPASLFHVSNDYSFIRYYTRTLYQFQFQEALCQAAKHEGPLHKCDISNSTEAGQKLFNMLRLGKSEPWTLALENVVGAKNMNVRPLLNYFEPLFTWLKDQNKNSFVGWSTDWSPYADQSIKVRISLKSALGDKAYEWNDNEMYLFRSSVAYAMRQYFLKVKNQMILFGEEDVRVANLKPRISFNFFVTAPKNVSDIIPRTEVEKAIRMSRSRINDAFRLNDNSLEFLGIQPTLGPPNQPPVS

SEQ ID NO: 768 - protein, 723 aa, synthetic construct
  REGION 1..723: note = ACE2 ECD (18-740) R273V
QSTIEEQAKTFLDKFNHEAEDLFYQSSLASWNYNTNITEENVQNMNNAGDKWSAFLKEQSTLAQMYPLQEIQNLTVKLQLQALQQNGSSVLSEDKSKRLNTILNTMSTIYSTGKVCNPDNPQECLLLEPGLNEIMANSLDYNERLWAWESWRSEVGKQLRPLYEEYVVLKNEMARANHYEDYGDYWRGDYEVNGVDGYDYSRGQLIEDVEHTFEEIKPLYEHLHAYVRAKLMNAYPSYISPIGCLPAHLLGDMWGVFWTNLYSLTVPFGQKPNIDVTDAMVDQAWDAQRIFKEAEKFFVSVGLPNMTQGFWENSMLTDPGNVQKAVCHPTAWDLGKGDFRILMCTKVTMDDFLTAHHEMGHIQYDMAYAAQPFLLRNGANEGFHEAVGEIMSLSAATPKHLKSIGLLSPDFQEDNETEINFLLKQALTIVGTLPFTYMLEKWRWMVFKGEIPKDQWMKKWWEMKREIVGVVEPVPHDETYCDPASLFHVSNDYSFIRYYTRTLYQFQFQEALCQAAKHEGPLHKCDISNSTEAGQKLFNMLRLGKSEPWTLALENVVGAKNMNVRPLLNYFEPLFTWLKDQNKNSFVGWSTDWSPYADQSIKVRISLKSALGDKAYEWNDNEMYLFRSSVAYAMRQYFLKVKNQMILFGEEDVRVANLKPRISFNFFVTAPKNVSDIIPRTEVEKAIRMSRSRINDAFRLNDNSLEFLGIQPTLGPPNQPPVS

SEQ ID NO: 769 - protein, 723 aa, synthetic construct
  REGION 1..723: note = ACE2 ECD (18-740) H378A
QSTIEEQAKTFLDKFNHEAEDLFYQSSLASWNYNTNITEENVQNMNNAGDKWSAFLKEQSTLAQMYPLQEIQNLTVKLQLQALQQNGSSVLSEDKSKRLNTILNTMSTIYSTGKVCNPDNPQECLLLEPGLNEIMANSLDYNERLWAWESWRSEVGKQLRPLYEEYVVLKNEMARANHYEDYGDYWRGDYEVNGVDGYDYSRGQLIEDVEHTFEEIKPLYEHLHAYVRAKLMNAYPSYISPIGCLPAHLLGDMWGRFWTNLYSLTVPFGQKPNIDVTDAMVDQAWDAQRIFKEAEKFFVSVGLPNMTQGFWENSMLTDPGNVQKAVCHPTAWDLGKGDFRILMCTKVTMDDFLTAHHEMGAIQYDMAYAAQPFLLRNGANEGFHEAVGEIMSLSAATPKHLKSIGLLSPDFQEDNETEINFLLKQALTIVGTLPFTYMLEKWRWMVFKGEIPKDQWMKKWWEMKREIVGVVEPVPHDETYCDPASLFHVSNDYSFIRYYTRTLYQFQFQEALCQAAKHEGPLHKCDISNSTEAGQKLFNMLRLGKSEPWTLALENVVGAKNMNVRPLLNYFEPLFTWLKDQNKNSFVGWSTDWSPYADQSIKVRISLKSALGDKAYEWNDNEMYLFRSSVAYAMRQYFLKVKNQMILFGEEDVRVANLKPRISFNFFVTAPKNVSDIIPRTEVEKAIRMSRSRINDAFRLNDNSLEFLGIQPTLGPPNQPPVS

SEQ ID NO: 770 - protein, 723 aa, synthetic construct
  REGION 1..723: note = ACE2 ECD (18-740) E402A
QSTIEEQAKTFLDKFNHEAEDLFYQSSLASWNYNTNITEENVQNMNNAGDKWSAFLKEQSTLAQMYPLQEIQNLTVKLQLQALQQNGSSVLSEDKSKRLNTILNTMSTIYSTGKVCNPDNPQECLLLEPGLNEIMANSLDYNERLWAWESWRSEVGKQLRPLYEEYVVLKNEMARANHYEDYGDYWRGDYEVNGVDGYDYSRGQLIEDVEHTFEEIKPLYEHLHAYVRAKLMNAYPSYISPIGCLPAHLLGDMWGRFWTNLYSLTVPFGQKPNIDVTDAMVDQAWDAQRIFKEAEKFFVSVGLPNMTQGFWENSMLTDPGNVQKAVCHPTAWDLGKGDFRILMCTKVTMDDFLTAHHEMGHIQYDMAYAAQPFLLRNGANEGFHAAVGEIMSLSAATPKHLKSIGLLSPDFQEDNETEINFLLKQALTIVGTLPFTYMLEKWRWMVFKGEIPKDQWMKKWWEMKREIVGVVEPVPHDETYCDPASLFHVSNDYSFIRYYTRTLYQFQFQEALCQAAKHEGPLHKCDISNSTEAGQKLFNMLRLGKSEPWTLALENVVGAKNMNVRPLLNYFEPLFTWLKDQNKNSFVGWSTDWSPYADQSIKVRISLKSALGDKAYEWNDNEMYLFRSSVAYAMRQYFLKVKNQMILFGEEDVRVANLKPRISFNFFVTAPKNVSDIIPRTEVEKAIRMSRSRINDAFRLNDNSLEFLGIQPTLGPPNQPPVS

SEQ ID NO: 771 - protein, 598 aa, synthetic construct
  REGION 1..598: note = ACE2 PD (18-615)
QSTIEEQAKTFLDKFNHEAEDLFYQSSLASWNYNTNITEENVQNMNNAGDKWSAFLKEQSTLAQMYPLQEIQNLTVKLQLQALQQNGSSVLSEDKSKRLNTILNTMSTIYSTGKVCNPDNPQECLLLEPGLNEIMANSLDYNERLWAWESWRSEVGKQLRPLYEEYVVLKNEMARANHYEDYGDYWRGDYEVNGVDGYDYSRGQLIEDVEHTFEEIKPLYEHLHAYVRAKLMNAYPSYISPIGCLPAHLLGDMWGRFWTNLYSLTVPFGQKPNIDVTDAMVDQAWDAQRIFKEAEKFFVSVGLPNMTQGFWENSMLTDPGNVQKAVCHPTAWDLGKGDFRILMCTKVTMDDFLTAHHEMGHIQYDMAYAAQPFLLRNGANEGFHEAVGEIMSLSAATPKHLKSIGLLSPDFQEDNETEINFLLKQALTIVGTLPFTYMLEKWRWMVFKGEIPKDQWMKKWWEMKREIVGVVEPVPHDETYCDPASLFHVSNDYSFIRYYTRTLYQFQFQEALCQAAKHEGPLHKCDISNSTEAGQKLFNMLRLGKSEPWTLALENVVGAKNMNVRPLLNYFEPLFTWLKDQNKNSFVGWSTDWSPYAD

SEQ ID NO: 772 - protein, 598 aa, synthetic construct
  REGION 1..598: note = ACE2 PD (18-615) R273Q
QSTIEEQAKTFLDKFNHEAEDLFYQSSLASWNYNTNITEENVQNMNNAGDKWSAFLKEQSTLAQMYPLQEIQNLTVKLQLQALQQNGSSVLSEDKSKRLNTILNTMSTIYSTGKVCNPDNPQECLLLEPGLNEIMANSLDYNERLWAWESWRSEVGKQLRPLYEEYVVLKNEMARANHYEDYGDYWRGDYEVNGVDGYDYSRGQLIEDVEHTFEEIKPLYEHLHAYVRAKLMNAYPSYISPIGCLPAHLLGDMWGQFWTNLYSLTVPFGQKPNIDVTDAMVDQAWDAQRIFKEAEKFFVSVGLPNMTQGFWENSMLTDPGNVQKAVCHPTAWDLGKGDFRILMCTKVTMDDFLTAHHEMGHIQYDMAYAAQPFLLRNGANEGFHEAVGEIMSLSAATPKHLKSIGLLSPDFQEDNETEINFLLKQALTIVGTLPFTYMLEKWRWMVFKGEIPKDQWMKKWWEMKREIVGVVEPVPHDETYCDPASLFHVSNDYSFIRYYTRTLYQFQFQEALCQAAKHEGPLHKCDISNSTEAGQKLFNMLRLGKSEPWTLALENVVGAKNMNVRPLLNYFEPLFTWLKDQNKNSFVGWSTDWSPYAD

SEQ ID NO: 773 - protein, 598 aa, synthetic construct
  REGION 1..598: note = ACE2 PD (18-615) R273A
QSTIEEQAKTFLDKFNHEAEDLFYQSSLASWNYNTNITEENVQNMNNAGDKWSAFLKEQSTLAQMYPLQEIQNLTVKLQLQALQQNGSSVLSEDKSKRLNTILNTMSTIYSTGKVCNPDNPQECLLLEPGLNEIMANSLDYNERLWAWESWRSEVGKQLRPLYEEYVVLKNEMARANHYEDYGDYWRGDYEVNGVDGYDYSRGQLIEDVEHTFEEIKPLYEHLHAYVRAKLMNAYPSYISPIGCLPAHLLGDMWGAFWTNLYSLTVPFGQKPNIDVTDAMVDQAWDAQRIFKEAEKFFVSVGLPNMTQGFWENSMLTDPGNVQKAVCHPTAWDLGKGDFRILMCTKVTMDDFLTAHHEMGHIQYDMAYAAQPFLLRNGANEGFHEAVGEIMSLSAATPKHLKSIGLLSPDFQEDNETEINFLLKQALTIVGTLPFTYMLEKWRWMVFKGEIPKDQWMKKWWEMKREIVGVVEPVPHDETYCDPASLFHVSNDYSFIRYYTRTLYQFQFQEALCQAAKHEGPLHKCDISNSTEAGQKLFNMLRLGKSEPWTLALENVVGAKNMNVRPLLNYFEPLFTWLKDQNKNSFVGWSTDWSPYAD

SEQ ID NO: 774 - protein, 598 aa, synthetic construct
  REGION 1..598: note = ACE2 PD (18-615) R273G
QSTIEEQAKTFLDKFNHEAEDLFYQSSLASWNYNTNITEENVQNMNNAGDKWSAFLKEQSTLAQMYPLQEIQNLTVKLQLQALQQNGSSVLSEDKSKRLNTILNTMSTIYSTGKVCNPDNPQECLLLEPGLNEIMANSLDYNERLWAWESWRSEVGKQLRPLYEEYVVLKNEMARANHYEDYGDYWRGDYEVNGVDGYDYSRGQLIEDVEHTFEEIKPLYEHLHAYVRAKLMNAYPSYISPIGCLPAHLLGDMWGGFWTNLYSLTVPFGQKPNIDVTDAMVDQAWDAQRIFKEAEKFFVSVGLPNMTQGFWENSMLTDPGNVQKAVCHPTAWDLGKGDFRILMCTKVTMDDFLTAHHEMGHIQYDMAYAAQPFLLRNGANEGFHEAVGEIMSLSAATPKHLKSIGLLSPDFQEDNETEINFLLKQALTIVGTLPFTYMLEKWRWMVFKGEIPKDQWMKKWWEMKREIVGVVEPVPHDETYCDPASLFHVSNDYSFIRYYTRTLYQFQFQEALCQAAKHEGPLHKCDISNSTEAGQKLFNMLRLGKSEPWTLALENVVGAKNMNVRPLLNYFEPLFTWLKDQNKNSFVGWSTDWSPYAD

SEQ ID NO: 775 - protein, 598 aa, synthetic construct
  REGION 1..598: note = ACE2 PD (18-615) R273V
QSTIEEQAKTFLDKFNHEAEDLFYQSSLASWNYNTNITEENVQNMNNAGDKWSAFLKEQSTLAQMYPLQEIQNLTVKLQLQALQQNGSSVLSEDKSKRLNTILNTMSTIYSTGKVCNPDNPQECLLLEPGLNEIMANSLDYNERLWAWESWRSEVGKQLRPLYEEYVVLKNEMARANHYEDYGDYWRGDYEVNGVDGYDYSRGQLIEDVEHTFEEIKPLYEHLHAYVRAKLMNAYPSYISPIGCLPAHLLGDMWGVFWTNLYSLTVPFGQKPNIDVTDAMVDQAWDAQRIFKEAEKFFVSVGLPNMTQGFWENSMLTDPGNVQKAVCHPTAWDLGKGDFRILMCTKVTMDDFLTAHHEMGHIQYDMAYAAQPFLLRNGANEGFHEAVGEIMSLSAATPKHLKSIGLLSPDFQEDNETEINFLLKQALTIVGTLPFTYMLEKWRWMVFKGEIPKDQWMKKWWEMKREIVGVVEPVPHDETYCDPASLFHVSNDYSFIRYYTRTLYQFQFQEALCQAAKHEGPLHKCDISNSTEAGQKLFNMLRLGKSEPWTLALENVVGAKNMNVRPLLNYFEPLFTWLKDQNKNSFVGWSTDWSPYAD

SEQ ID NO: 776 - protein, 598 aa, synthetic construct
  REGION 1..598: note = ACE2 PD (18-615) H378A
QSTIEEQAKTFLDKFNHEAEDLFYQSSLASWNYNTNITEENVQNMNNAGDKWSAFLKEQSTLAQMYPLQEIQNLTVKLQLQALQQNGSSVLSEDKSKRLNTILNTMSTIYSTGKVCNPDNPQECLLLEPGLNEIMANSLDYNERLWAWESWRSEVGKQLRPLYEEYVVLKNEMARANHYEDYGDYWRGDYEVNGVDGYDYSRGQLIEDVEHTFEEIKPLYEHLHAYVRAKLMNAYPSYISPIGCLPAHLLGDMWGRFWTNLYSLTVPFGQKPNIDVTDAMVDQAWDAQRIFKEAEKFFVSVGLPNMTQGFWENSMLTDPGNVQKAVCHPTAWDLGKGDFRILMCTKVTMDDFLTAHHEMGAIQYDMAYAAQPFLLRNGANEGFHEAVGEIMSLSAATPKHLKSIGLLSPDFQEDNETEINFLLKQALTIVGTLPFTYMLEKWRWMVFKGEIPKDQWMKKWWEMKREIVGVVEPVPHDETYCDPASLFHVSNDYSFIRYYTRTLYQFQFQEALCQAAKHEGPLHKCDISNSTEAGQKLFNMLRLGKSEPWTLALENVVGAKNMNVRPLLNYFEPLFTWLKDQNKNSFVGWSTDWSPYAD

SEQ ID NO: 777 - protein, 598 aa, synthetic construct
  REGION 1..598: note = ACE2 PD (18-615) E402A
QSTIEEQAKTFLDKFNHEAEDLFYQSSLASWNYNTNITEENVQNMNNAGDKWSAFLKEQSTLAQMYPLQEIQNLTVKLQLQALQQNGSSVLSEDKSKRLNTILNTMSTIYSTGKVCNPDNPQECLLLEPGLNEIMANSLDYNERLWAWESWRSEVGKQLRPLYEEYVVLKNEMARANHYEDYGDYWRGDYEVNGVDGYDYSRGQLIEDVEHTFEEIKPLYEHLHAYVRAKLMNAYPSYISPIGCLPAHLLGDMWGRFWTNLYSLTVPFGQKPNIDVTDAMVDQAWDAQRIFKEAEKFFVSVGLPNMTQGFWENSMLTDPGNVQKAVCHPTAWDLGKGDFRILMCTKVTMDDFLTAHHEMGHIQYDMAYAAQPFLLRNGANEGFHAAVGEIMSLSAATPKHLKSIGLLSPDFQEDNETEINFLLKQALTIVGTLPFTYMLEKWRWMVFKGEIPKDQWMKKWWEMKREIVGVVEPVPHDETYCDPASLFHVSNDYSFIRYYTRTLYQFQFQEALCQAAKHEGPLHKCDISNSTEAGQKLFNMLRLGKSEPWTLALENVVGAKNMNVRPLLNYFEPLFTWLKDQNKNSFVGWSTDWSPYAD

SEQ ID NO: 778 - protein, 594 aa, synthetic construct
  REGION 1..594: note = ACE2 PD (18-611)
QSTIEEQAKTFLDKFNHEAEDLFYQSSLASWNYNTNITEENVQNMNNAGDKWSAFLKEQSTLAQMYPLQEIQNLTVKLQLQALQQNGSSVLSEDKSKRLNTILNTMSTIYSTGKVCNPDNPQECLLLEPGLNEIMANSLDYNERLWAWESWRSEVGKQLRPLYEEYVVLKNEMARANHYEDYGDYWRGDYEVNGVDGYDYSRGQLIEDVEHTFEEIKPLYEHLHAYVRAKLMNAYPSYISPIGCLPAHLLGDMWGRFWTNLYSLTVPFGQKPNIDVTDAMVDQAWDAQRIFKEAEKFFVSVGLPNMTQGFWENSMLTDPGNVQKAVCHPTAWDLGKGDFRILMCTKVTMDDFLTAHHEMGHIQYDMAYAAQPFLLRNGANEGFHEAVGEIMSLSAATPKHLKSIGLLSPDFQEDNETEINFLLKQALTIVGTLPFTYMLEKWRWMVFKGEIPKDQWMKKWWEMKREIVGVVEPVPHDETYCDPASLFHVSNDYSFIRYYTRTLYQFQFQEALCQAAKHEGPLHKCDISNSTEAGQKLFNMLRLGKSEPWTLALENVVGAKNMNVRPLLNYFEPLFTWLKDQNKNSFVGWSTDWS

SEQ ID NO: 779 - protein, 590 aa, synthetic construct
  REGION 1..590: note = ACE2 PD (18-607)
QSTIEEQAKTFLDKFNHEAEDLFYQSSLASWNYNTNITEENVQNMNNAGDKWSAFLKEQSTLAQMYPLQEIQNLTVKLQLQALQQNGSSVLSEDKSKRLNTILNTMSTIYSTGKVCNPDNPQECLLLEPGLNEIMANSLDYNERLWAWESWRSEVGKQLRPLYEEYVVLKNEMARANHYEDYGDYWRGDYEVNGVDGYDYSRGQLIEDVEHTFEEIKPLYEHLHAYVRAKLMNAYPSYISPIGCLPAHLLGDMWGRFWTNLYSLTVPFGQKPNIDVTDAMVDQAWDAQRIFKEAEKFFVSVGLPNMTQGFWENSMLTDPGNVQKAVCHPTAWDLGKGDFRILMCTKVTMDDFLTAHHEMGHIQYDMAYAAQPFLLRNGANEGFHEAVGEIMSLSAATPKHLKSIGLLSPDFQEDNETEINFLLKQALTIVGTLPFTYMLEKWRWMVFKGEIPKDQWMKKWWEMKREIVGVVEPVPHDETYCDPASLFHVSNDYSFIRYYTRTLYQFQFQEALCQAAKHEGPLHKCDISNSTEAGQKLFNMLRLGKSEPWTLALENVVGAKNMNVRPLLNYFEPLFTWLKDQNKNSFVGWS

SEQ ID NO: 780 - protein, 8 aa, synthetic construct
  REGION 1..8: note = ACE2 (608-615)
TDWSPYAD

SEQ ID NO: 781 - protein, 4 aa, synthetic construct
  REGION 1..4: note = ACE2 (608-611)
TDWS

SEQ ID NO: 782 - protein, 125 aa, synthetic construct
  REGION 1..125: note = ACE2 CLD (616-740) Dimerizing Polypeptide
QSIKVRISLKSALGDKAYEWNDNEMYLFRSSVAYAMRQYFLKVKNQMILFGEEDVRVANLKPRISFNFFVTAPKNVSDIIPRTEVEKAIRMSRSRINDAFRLNDNSLEFLGIQPTLGPPNQPPVS

SEQ ID NO: 783 - protein, 127 aa, synthetic construct
  REGION 1..127: note = Collectrin (TMEM27) Dimerizing Polypeptide (15-141)
ELCQPGAENAFKVRLSIRTALGDKAYAWDTNEEYLFKAMVAFSMRKVPNREATEISHVLLCNVTQRVSFWFVVTDPSKNHTLPAVEVQSAIRMNKNRINNAFFLNDQTLEFLKIPSTLAPPMDPSVP

SEQ ID NO: 784 - protein, 119 aa, synthetic construct
  REGION 1..119: note = Collectrin (TMEM27) Dimerizing Polypeptide (23-141) C75A
NAFKVRLSIRTALGDKAYAWDTNEEYLFKAMVAFSMRKVPNREATEISHVLLANVTQRVSFWFVVTDPSKNHTLPAVEVQSAIRMNKNRINNAFFLNDQTLEFLKIPSTLAPPMDPSVP

SEQ ID NO: 785 - protein, 127 aa, synthetic construct
  REGION 1..127: note = ACE2 (608-615)/Collectrin (23-141) C75A Dimerizing Polypeptide
TDWSPYADNAFKVRLSIRTALGDKAYAWDTNEEYLFKAMVAFSMRKVPNREATEISHVLLANVTQRVSFWFVVTDPSKNHTLPAVEVQSAIRMNKNRINNAFFLNDQTLEFLKIPSTLAPPMDPSVP

SEQ ID NO: 786 - protein, 131 aa, synthetic construct
  REGION 1..131: note = ACE2 (608-611)/Collectrin (15-141) Dimerizing Polypeptide
TDWSELCQPGAENAFKVRLSIRTALGDKAYAWDTNEEYLFKAMVAFSMRKVPNREATEISHVLLCNVTQRVSFWFVVTDPSKNHTLPAVEVQSAIRMNKNRINNAFFLNDQTLEFLKIPSTLAPPMDPSVP

SEQ ID NO: 787 - protein, 171 aa, synthetic construct
  REGION 1..171: note = TNFSF1 (LTA) (35-205) Trimerizing Polypeptide
LPGVGLTPSAAQTARQHPKMHLAHSTLKPAAHLIGDPSKQNSLLWRANTDRAFLQDGFSLSNNSLLVPTSGIYFVYSQVVFSGKAYSPKATSSPLYLAHEVQLFSSQYPFHVPLLSSQKMVYPGLQEPWLHSMYHGAAFQLTQGDQLSTHTDGIPHLVLSPSTVFFGAFAL

SEQ ID NO: 788 - protein, 147 aa, synthetic construct
  REGION 1..147: note = TNFSF1 (LTA) (59-205) Trimerizing Polypeptide
STLKPAAHLIGDPSKQNSLLWRANTDRAFLQDGFSLSNNSLLVPTSGIYFVYSQVVFSGKAYSPKATSSPLYLAHEVQLFSSQYPFHVPLLSSQKMVYPGLQEPWLHSMYHGAAFQLTQGDQLSTHTDGIPHLVLSPSTVFFGAFAL

SEQ ID NO: 789 - protein, 146 aa, synthetic construct
  REGION 1..146: note = TNFSF1 (LTA) (60-205) Trimerizing Polypeptide
TLKPAAHLIGDPSKQNSLLWRANTDRAFLQDGFSLSNNSLLVPTSGIYFVYSQVVFSGKAYSPKATSSPLYLAHEVQLFSSQYPFHVPLLSSQKMVYPGLQEPWLHSMYHGAAFQLTQGDQLSTHTDGIPHLVLSPSTVFFGAFAL

SEQ ID NO: 790 - protein, 142 aa, synthetic construct
  REGION 1..142: note = TNFSF1 (LTA) (64-205) Trimerizing Polypeptide
AAHLIGDPSKQNSLLWRANTDRAFLQDGFSLSNNSLLVPTSGIYFVYSQVVFSGKAYSPKATSSPLYLAHEVQLFSSQYPFHVPLLSSQKMVYPGLQEPWLHSMYHGAAFQLTQGDQLSTHTDGIPHLVLSPSTVFFGAFAL

SEQ ID NO: 791 - protein, 177 aa, synthetic construct
  REGION 1..177: note = TNFSF2 (TNF) (57-233) Trimerizing Polypeptide
GPQREEFPRDLSLISPLAQAVRSSSRTPSDKPVAHVVANPQAEGQLQWLNRRANALLANGVELRDNQLVVPSEGLYLIYSQVLFKGQGCPSTHVLLTHTISRIAVSYQTKVNLLSAIKSPCQRETPEGAEAKPWYEPIYLGGVFQLEKGDRLSAEINRPDYLDFAESGQVYFGIIAL

SEQ ID NO: 792 - protein, 148 aa, synthetic construct
  REGION 1..148: note = TNFSF2 (TNF) (86-233) Trimerizing Polypeptide
DKPVAHVVANPQAEGQLQWLNRRANALLANGVELRDNQLVVPSEGLYLIYSQVLFKGQGCPSTHVLLTHTISRIAVSYQTKVNLLSAIKSPCQRETPEGAEAKPWYEPIYLGGVFQLEKGDRLSAEINRPDYLDFAESGQVYFGIIAL

SEQ ID NO: 793 - protein, 196 aa, synthetic construct
  REGION 1..196: note = TNFSF3 (LTB) (49-244) Trimerizing Polypeptide
QDQGGLVTETADPGAQAQQGLGFQKLPEEEPETDLSPGLPAAHLIGAPLKGQGLGWETTKEQAFLTSGTQFSDAEGLALPQDGLYYLYCLVGYRGRAPPGGGDPQGRSVTLRSSLYRAGGAYGPGTPELLLEGAETVTPVLDPARRQGYGPLWYTSVGFGGLVQLRRGERVYVNISHPDMVDFARGKTFFGAVMVG

SEQ ID NO: 794 - protein, 163 aa, synthetic construct
  REGION 1..163: note = TNFSF3 (LTB) (82-244) Trimerizing Polypeptide
DLSPGLPAAHLIGAPLKGQGLGWETTKEQAFLTSGTQFSDAEGLALPQDGLYYLYCLVGYRGRAPPGGGDPQGRSVTLRSSLYRAGGAYGPGTPELLLEGAETVTPVLDPARRQGYGPLWYTSVGFGGLVQLRRGERVYVNISHPDMVDFARGKTFFGAVMVG

SEQ ID NO: 795 - protein, 159 aa, synthetic construct
  REGION 1..159: note = TNFSF3 (LTB) (86-244) Trimerizing Polypeptide
GLPAAHLIGAPLKGQGLGWETTKEQAFLTSGTQFSDAEGLALPQDGLYYLYCLVGYRGRAPPGGGDPQGRSVTLRSSLYRAGGAYGPGTPELLLEGAETVTPVLDPARRQGYGPLWYTSVGFGGLVQLRRGERVYVNISHPDMVDFARGKTFFGAVMVG

SEQ ID NO: 796 - protein, 133 aa, synthetic construct
  REGION 1..133: note = TNFSF4 (OX40L) (51-183) Trimerizing Polypeptide
QVSHRYPRIQSIKVQFTEYKKEKGFILTSQKEDEIMKVQNNSVIINCDGFYLISLKGYFSQEVNISLHYQKDEEPLFQLKKVRSVNSLMVASLTYKDKVYLNVTTDNTSLDDFHVNGGELILIHQNPGEFCVL

SEQ ID NO: 797 - protein, 132 aa, synthetic construct
  REGION 1..132: note = TNFSF4 (OX40L) (52-183) Trimerizing Polypeptide
VSHRYPRIQSIKVQFTEYKKEKGFILTSQKEDEIMKVQNNSVIINCDGFYLISLKGYFSQEVNISLHYQKDEEPLFQLKKVRSVNSLMVASLTYKDKVYLNVTTDNTSLDDFHVNGGELILIHQNPGEFCVL

SEQ ID NO: 798 - protein, 129 aa, synthetic construct
  REGION 1..129: note = TNFSF4 (OX40L) (55-183) Trimerizing Polypeptide
RYPRIQSIKVQFTEYKKEKGFILTSQKEDEIMKVQNNSVIINCDGFYLISLKGYFSQEVNISLHYQKDEEPLFQLKKVRSVNSLMVASLTYKDKVYLNVTTDNTSLDDFHVNGGELILIHQNPGEFCVL

SEQ ID NO: 799 - protein, 215 aa, synthetic construct
  REGION 1..215: note = TNFSF5 (CD40L) (47-261) Trimerizing Polypeptide
HRRLDKIEDERNLHEDFVFMKTIQRCNTGERSLSLLNCEEIKSQFEGFVKDIMLNKEETKKENSFEMQKGDQNPQIAAHVISEASSKTTSVLQWAEKGYYTMSNNLVTLENGKQLTVKRQGLYYIYAQVTFCSNREASSQAPFIASLCLKSPGRFERILLRAANTHSSAKPCGQQSIHLGGVFELQPGASVFVNVTDPSQVSHGTGFTSFGLLKL

SEQ ID NO: 800 - protein, 150 aa, synthetic construct
  REGION 1..150: note = TNFSF5 (CD40L) (112-261) Trimerizing Polypeptide
EMQKGDQNPQIAAHVISEASSKTTSVLQWAEKGYYTMSNNLVTLENGKQLTVKRQGLYYIYAQVTFCSNREASSQAPFIASLCLKSPGRFERILLRAANTHSSAKPCGQQSIHLGGVFELQPGASVFVNVTDPSQVSHGTGFTSFGLLKL

SEQ ID NO: 801 - protein, 145 aa, synthetic construct
  REGION 1..145: note = TNFSF5 (CD40L) (117-261) Trimerizing Polypeptide
DQNPQIAAHVISEASSKTTSVLQWAEKGYYTMSNNLVTLENGKQLTVKRQGLYYIYAQVTFCSNREASSQAPFIASLCLKSPGRFERILLRAANTHSSAKPCGQQSIHLGGVFELQPGASVFVNVTDPSQVSHGTGFTSFGLLKL

SEQ ID NO: 802 - protein, 141 aa, synthetic construct
  REGION 1..141: note = TNFSF5 (CD40L) (121-261) Trimerizing Polypeptide
QIAAHVISEASSKTTSVLQWAEKGYYTMSNNLVTLENGKQLTVKRQGLYYIYAQVTFCSNREASSQAPFIASLCLKSPGRFERILLRAANTHSSAKPCGQQSIHLGGVFELQPGASVFVNVTDPSQVSHGTGFTSFGLLKL

SEQ ID NO: 803 - protein, 179 aa, synthetic construct
  REGION 1..179: note = TNFSF6 (FASL, CD95L) (103-281) Trimerizing Polypeptide
QLFHLQKELAELRESTSQMHTASSLEKQIGHPSPPPEKKELRKVAHLTGKSNSRSMPLEWEDTYGIVLLSGVKYKKGGLVINETGLYFVYSKVYFRGQSCNNLPLSHKVYMRNSKYPQDLVMMEGKMMSYCTTGQMWARSSYLGAVFNLTSADHLYVNVSELSLVNFEESQTFFGLYKL

SEQ ID NO: 804 - protein, 138 aa, synthetic construct
  REGION 1..138: note = TNFSF6 (FASL, CD95L) (144-281) Trimerizing Polypeptide
RKVAHLTGKSNSRSMPLEWEDTYGIVLLSGVKYKKGGLVINETGLYFVYSKVYFRGQSCNNLPLSHKVYMRNSKYPQDLVMMEGKMMSYCTTGQMWARSSYLGAVFNLTSADHLYVNVSELSLVNFEESQTFFGLYKL

SEQ ID NO: 805 - protein, 137 aa, synthetic construct
  REGION 1..137: note = TNFSF6 (FASL, CD95L) (145-281) Trimerizing Polypeptide
KVAHLTGKSNSRSMPLEWEDTYGIVLLSGVKYKKGGLVINETGLYFVYSKVYFRGQSCNNLPLSHKVYMRNSKYPQDLVMMEGKMMSYCTTGQMWARSSYLGAVFNLTSADHLYVNVSELSLVNFEESQTFFGLYKL

SEQ ID NO: 806 - protein, 136 aa, synthetic construct
  REGION 1..136: note = TNFSF6 (FASL, CD95L) (146-281) Trimerizing Polypeptide
VAHLTGKSNSRSMPLEWEDTYGIVLLSGVKYKKGGLVINETGLYFVYSKVYFRGQSCNNLPLSHKVYMRNSKYPQDLVMMEGKMMSYCTTGQMWARSSYLGAVFNLTSADHLYVNVSELSLVNFEESQTFFGLYKL

SEQ ID NO: 807 - protein, 155 aa, synthetic construct
  REGION 1..155: note = TNFSF7 (CD27L) (39-193) Trimerizing Polypeptide
QRFAQAQQQLPLESLGWDVAELQLNHTGPQQDPRLYWQGGPALGRSFLHGPELDKGQLRIHRDGIYMVHIQVTLAICSSTTASRHHPTTLAVGICSPASRSISLLRLSFHQGCTIASQRLTPLARGDTLCTNLTGTLLPSRNTDETFFGVQWVRP

SEQ ID NO: 808 - protein, 143 aa, synthetic construct
  REGION 1..143: note = TNFSF7 (CD27L) (51-193) Trimerizing Polypeptide
ESLGWDVAELQLNHTGPQQDPRLYWQGGPALGRSFLHGPELDKGQLRIHRDGIYMVHIQVTLAICSSTTASRHHPTTLAVGICSPASRSISLLRLSFHQGCTIASQRLTPLARGDTLCTNLTGTLLPSRNTDETFFGVQWVRP

SEQ ID NO: 809 - protein, 138 aa, synthetic construct
  REGION 1..138: note = TNFSF7 (CD27L) (56-193) Trimerizing Polypeptide
DVAELQLNHTGPQQDPRLYWQGGPALGRSFLHGPELDKGQLRIHRDGIYMVHIQVTLAICSSTTASRHHPTTLAVGICSPASRSISLLRLSFHQGCTIASQRLTPLARGDTLCTNLTGTLLPSRNTDETFFGVQWVRP

SEQ ID NO: 810 - protein, 172 aa, synthetic construct
  REGION 1..172: note = TNFSF8 (CD30L) (63-234) Trimerizing Polypeptide
QRTDSIPNSPDNVPLKGGNCSEDLLCILKRAPFKKSWAYLQVAKHLNKTKLSWNKDGILHGVRYQDGNLVIQFPGLYFIICQLQFLVQCPNNSVDLKLELLINKHIKKQALVTVCESGMQTKHVYQNLSQFLLDYLQVNTTISVNVDTFQYIDTSTFPLENVLSIFLYSNSD

SEQ ID NO: 811 - protein, 138 aa, synthetic construct
  REGION 1..138: note = TNFSF8 (CD30L) (97-234) Trimerizing Polypeptide
KSWAYLQVAKHLNKTKLSWNKDGILHGVRYQDGNLVIQFPGLYFIICQLQFLVQCPNNSVDLKLELLINKHIKKQALVTVCESGMQTKHVYQNLSQFLLDYLQVNTTISVNVDTFQYIDTSTFPLENVLSIFLYSNSD

SEQ ID NO: 812 - protein, 137 aa, synthetic construct
  REGION 1..137: note = TNFSF8 (CD30L) (98-234) Trimerizing Polypeptide
SWAYLQVAKHLNKTKLSWNKDGILHGVRYQDGNLVIQFPGLYFIICQLQFLVQCPNNSVDLKLELLINKHIKKQALVTVCESGMQTKHVYQNLSQFLLDYLQVNTTISVNVDTFQYIDTSTFPLENVLSIFLYSNSD

SEQ ID NO: 813 - protein, 133 aa, synthetic construct
  REGION 1..133: note = TNFSF8 (CD30L) (102-234) Trimerizing Polypeptide
LQVAKHLNKTKLSWNKDGILHGVRYQDGNLVIQFPGLYFIICQLQFLVQCPNNSVDLKLELLINKHIKKQALVTVCESGMQTKHVYQNLSQFLLDYLQVNTTISVNVDTFQYIDTSTFPLENVLSIFLYSNSD

SEQ ID NO: 814 - protein, 205 aa, synthetic construct
  REGION 1..205: note = TNFSF9 (4-1BBL) (50-254) Trimerizing Polypeptide
ACPWAVSGARASPGSAASPRLREGPELSPDDPAGLLDLRQGMFAQLVAQNVLLIDGPLSWYSDPGLAGVSLTGGLSYKEDTKELVVAKAGVYYVFFQLELRRVVAGEGSGSVSLALHLQPLRSAAGAAALALTVDLPPASSEARNSAFGFQGRLLHLSAGQRLGVHLHTEARARHAWQLTQGATVLGLFRVTPEIPAGLPSPRSE

SEQ ID NO: 815 - protein, 184 aa, synthetic construct
  REGION 1..184: note = TNFSF9 (4-1BBL) (71-254) Trimerizing Polypeptide
REGPELSPDDPAGLLDLRQGMFAQLVAQNVLLIDGPLSWYSDPGLAGVSLTGGLSYKEDTKELVVAKAGVYYVFFQLELRRVVAGEGSGSVSLALHLQPLRSAAGAAALALTVDLPPASSEARNSAFGFQGRLLHLSAGQRLGVHLHTEARARHAWQLTQGATVLGLFRVTPEIPAGLPSPRSE

SEQ ID NO: 816 - protein, 169 aa, synthetic construct
  REGION 1..169: note = TNFSF9 (4-1BBL) (86-254) Trimerizing Polypeptide
DLRQGMFAQLVAQNVLLIDGPLSWYSDPGLAGVSLTGGLSYKEDTKELVVAKAGVYYVFFQLELRRVVAGEGSGSVSLALHLQPLRSAAGAAALALTVDLPPASSEARNSAFGFQGRLLHLSAGQRLGVHLHTEARARHAWQLTQGATVLGLFRVTPEIPAGLPSPRSE

SEQ ID NO: 817 - protein, 243 aa, synthetic construct
  REGION 1..243: note = TNFSF10 (TRAIL) (39-281) Trimerizing Polypeptide
TNELKQMQDKYSKSGIACFLKEDDSYWDPNDEESMNSPCWQVKWQLRQLVRKMILRTSEETISTVQEKQQNISPLVRERGPQRVAAHITGTRGRSNTLSSPNSKNEKALGRKINSWESSRSGHSFLSNLHLRNGELVIHEKGFYYIYSQTYFRFQEEIKENTKNDKQMVQYIYKYTSYPDPILLMKSARNSCWSKDAEYGLYSIYQGGIFELKENDRIFVSVTNEHLIDMDHEASFFGAFLVG

SEQ ID NO: 818 - protein, 162 aa, synthetic construct
  REGION 1..162: note = TNFSF10 (TRAIL) (120-281) Trimerizing Polypeptide
QRVAAHITGTRGRSNTLSSPNSKNEKALGRKINSWESSRSGHSFLSNLHLRNGELVIHEKGFYYIYSQTYFRFQEEIKENTKNDKQMVQYIYKYTSYPDPILLMKSARNSCWSKDAEYGLYSIYQGGIFELKENDRIFVSVTNEHLIDMDHEASFFGAFLVG

SEQ ID NO: 819 - protein, 161 aa, synthetic construct
  REGION 1..161: note = TNFSF10 (TRAIL) (121-281) Trimerizing Polypeptide
RVAAHITGTRGRSNTLSSPNSKNEKALGRKINSWESSRSGHSFLSNLHLRNGELVIHEKGFYYIYSQTYFRFQEEIKENTKNDKQMVQYIYKYTSYPDPILLMKSARNSCWSKDAEYGLYSIYQGGIFELKENDRIFVSVTNEHLIDMDHEASFFGAFLVG

SEQ ID NO: 820 - protein, 160 aa, synthetic construct
  REGION 1..160: note = TNFSF10 (TRAIL) (122-281) Trimerizing Polypeptide
VAAHITGTRGRSNTLSSPNSKNEKALGRKINSWESSRSGHSFLSNLHLRNGELVIHEKGFYYIYSQTYFRFQEEIKENTKNDKQMVQYIYKYTSYPDPILLMKSARNSCWSKDAEYGLYSIYQGGIFELKENDRIFVSVTNEHLIDMDHEASFFGAFLVG

SEQ ID NO: 821 - protein, 249 aa, synthetic construct
  REGION 1..249: note = TNFSF11 (RANKL) (69-317) Trimerizing Polypeptide
YFRAQMDPNRISEDGTHCIYRILRLHENADFQDTTLESQDTKLIPDSCRRIKQAFQGAVQKELQHIVGSQHIRAEKAMVDGSWLDLAKRSKLEAQPFAHLTINATDIPSGSHKVSLSSWYHDRGWAKISNMTFSNGKLIVNQDGFYYLYANICFRHHETSGDLATEYLQLMVYVTKTSIKIPSSHTLMKGGSTKYWSGNSEFHFYSINVGGFFKLRSGEEISIEVSNPSLLDPDQDATYFGAFKVRDID

SEQ ID NO: 822 - protein, 157 aa, synthetic construct
  REGION 1..157: note = TNFSF11 (RANKL) (161-317) Trimerizing Polypeptide
EAQPFAHLTINATDIPSGSHKVSLSSWYHDRGWAKISNMTFSNGKLIVNQDGFYYLYANICFRHHETSGDLATEYLQLMVYVTKTSIKIPSSHTLMKGGSTKYWSGNSEFHFYSINVGGFFKLRSGEEISIEVSNPSLLDPDQDATYFGAFKVRDID

SEQ ID NO: 823 - protein, 207 aa, synthetic construct
  REGION 1..207: note = TNFSF12 (TWEAK) (43-249) Trimerizing Polypeptide
SLGSRASLSAQEPAQEELVAEEDQDPSELNPQTEESQDPAPFLNRLVRPRRSAPKGRKTRARRAIAAHYEVHPRPGQDGAQAGVDGTVSGWEEARINSSSPLRYNRQIGEFIVTRAGLYYLYCQVHFDEGKAVYLKLDLLVDGVLALRCLEEFSATAASSLGPQLRLCQVSGLLALRPGSSLRIRTLPWAHLKAAPFLTYFGLFQVH

SEQ ID NO: 824 - protein, 147 aa, synthetic construct
  REGION 1..147: note = TNFSF12 (TWEAK) (103-249) Trimerizing Polypeptide
ARRAIAAHYEVHPRPGQDGAQAGVDGTVSGWEEARINSSSPLRYNRQIGEFIVTRAGLYYLYCQVHFDEGKAVYLKLDLLVDGVLALRCLEEFSATAASSLGPQLRLCQVSGLLALRPGSSLRIRTLPWAHLKAAPFLTYFGLFQVH

SEQ ID NO: 825 - protein, 146 aa, synthetic construct
  REGION 1..146: note = TNFSF12 (TWEAK) (104-249) Trimerizing Polypeptide
RRAIAAHYEVHPRPGQDGAQAGVDGTVSGWEEARINSSSPLRYNRQIGEFIVTRAGLYYLYCQVHFDEGKAVYLKLDLLVDGVLALRCLEEFSATAASSLGPQLRLCQVSGLLALRPGSSLRIRTLPWAHLKAAPFLTYFGLFQVH

SEQ ID NO: 826 - protein, 145 aa, synthetic construct
  REGION 1..145: note = TNFSF12 (TWEAK) (105-249) Trimerizing Polypeptide
RAIAAHYEVHPRPGQDGAQAGVDGTVSGWEEARINSSSPLRYNRQIGEFIVTRAGLYYLYCQVHFDEGKAVYLKLDLLVDGVLALRCLEEFSATAASSLGPQLRLCQVSGLLALRPGSSLRIRTLPWAHLKAAPFLTYFGLFQVH

SEQ ID NO: 827 - protein, 144 aa, synthetic construct
  REGION 1..144: note = TNFSF12 (TWEAK) (106-249) Trimerizing Polypeptide
AIAAHYEVHPRPGQDGAQAGVDGTVSGWEEARINSSSPLRYNRQIGEFIVTRAGLYYLYCQVHFDEGKAVYLKLDLLVDGVLALRCLEEFSATAASSLGPQLRLCQVSGLLALRPGSSLRIRTLPWAHLKAAPFLTYFGLFQVH

SEQ ID NO: 828 - protein, 143 aa, synthetic construct
  REGION 1..143: note = TNFSF13 (APRIL1) (105-247) Trimerizing Polypeptide
AVLTQKQKKQHSVLHLVPINATSKDDSDVTEVMWQPALRRGRGLQAQGYGVRIQDAGVYLLYSQVLFQDVTFTMGQVVSREGQGRQETLFRCIRSMPSHPDRAYNSCYSAGVFHLHQGDILSVIIPRARAKLNLSPHGTFLGF

SEQ ID NO: 829 - protein, 136 aa, synthetic construct
  REGION 1..136: note = TNFSF13 (APRIL1) (112-247) Trimerizing Polypeptide
KKQHSVLHLVPINATSKDDSDVTEVMWQPALRRGRGLQAQGYGVRIQDAGVYLLYSQVLFQDVTFTMGQVVSREGQGRQETLFRCIRSMPSHPDRAYNSCYSAGVFHLHQGDILSVIIPRARAKLNLSPHGTFLGF

SEQ ID NO: 830 - protein, 146 aa, synthetic construct
  REGION 1..146: note = TNFSF13 (APRIL2) (105-250) Trimerizing Polypeptide
AVLTQKQKKQHSVLHLVPINATSKDDSDVTEVMWQPALRRGRGLQAQGYGVRIQDAGVYLLYSQVLFQDVTFTMGQVVSREGQGRQETLFRCIRSMPSHPDRAYNSCYSAGVFHLHQGDILSVIIPRARAKLNLSPHGTFLGFVKL

SEQ ID NO: 831 - protein, 139 aa, synthetic construct
  REGION 1..139: note = TNFSF13 (APRIL2) (112-250) Trimerizing Polypeptide
KKQHSVLHLVPINATSKDDSDVTEVMWQPALRRGRGLQAQGYGVRIQDAGVYLLYSQVLFQDVTFTMGQVVSREGQGRQETLFRCIRSMPSHPDRAYNSCYSAGVFHLHQGDILSVIIPRARAKLNLSPHGTFLGFVKL

SEQ ID NO: 832 - protein, 218 aa, synthetic construct
  REGION 1..218: note = TNFSF13B (BAFF) (68-285) Trimerizing Polypeptide
QVAALQGDLASLRAELQGHHAEKLPAGAGAPKAGLEEAPAVTAGLKIFEPPAPGEGNSSQNSRNKRAVQGPEETVTQDCLQLIADSETPTIQKGSYTFVPWLLSFKRGSALEEKENKILVKETGYFFIYGQVLYTDKTYAMGHLIQRKKVHVFGDELSLVTLFRCIQNMPETLPNNSCYSAGIAKLEEGDELQLAIPRENAQISLDGDVTFFGALKLL

SEQ ID NO: 833 - protein, 146 aa, synthetic construct
  REGION 1..146: note = TNFSF13B (BAFF) (140-285) Trimerizing Polypeptide
ETVTQDCLQLIADSETPTIQKGSYTFVPWLLSFKRGSALEEKENKILVKETGYFFIYGQVLYTDKTYAMGHLIQRKKVHVFGDELSLVTLFRCIQNMPETLPNNSCYSAGIAKLEEGDELQLAIPRENAQISLDGDVTFFGALKLL

SEQ ID NO: 834 - protein, 182 aa, synthetic construct
  REGION 1..182: note = TNFSF14 (LIGHT) (59-240) Trimerizing Polypeptide
LQLHWRLGEMVTRLPDGPAGSWEQLIQERRSHEVNPAAHLTGANSSLTGSGGPLLWETQLGLAFLRGLSYHDGALVVTKAGYYYIYSKVQLGGVGCPLGLASTITHGLYKRTPRYPEELELLVSQQSPCGRATSSSRVWWDSSFLGGVVHLEAGEKVVVRVLDERLVRLRDGTRSYFGAFMV

SEQ ID NO: 835 - protein, 148 aa, synthetic construct
  REGION 1..148: note = TNFSF14 (LIGHT) (93-240) Trimerizing Polypeptide
NPAAHLTGANSSLTGSGGPLLWETQLGLAFLRGLSYHDGALVVTKAGYYYIYSKVQLGGVGCPLGLASTITHGLYKRTPRYPEELELLVSQQSPCGRATSSSRVWWDSSFLGGVVHLEAGEKVVVRVLDERLVRLRDGTRSYFGAFMV

SEQ ID NO: 836 - protein, 147 aa, synthetic construct
  REGION 1..147: note = TNFSF14 (LIGHT) (94-240) Trimerizing Polypeptide
PAAHLTGANSSLTGSGGPLLWETQLGLAFLRGLSYHDGALVVTKAGYYYIYSKVQLGGVGCPLGLASTITHGLYKRTPRYPEELELLVSQQSPCGRATSSSRVWWDSSFLGGVVHLEAGEKVVVRVLDERLVRLRDGTRSYFGAFMV

SEQ ID NO: 837 - protein, 146 aa, synthetic construct
  REGION 1..146: note = TNFSF14 (LIGHT) (95-240) Trimerizing Polypeptide
AAHLTGANSSLTGSGGPLLWETQLGLAFLRGLSYHDGALVVTKAGYYYIYSKVQLGGVGCPLGLASTITHGLYKRTPRYPEELELLVSQQSPCGRATSSSRVWWDSSFLGGVVHLEAGEKVVVRVLDERLVRLRDGTRSYFGAFMV

SEQ ID NO: 838 - protein, 195 aa, synthetic construct
  REGION 1..195: note = TNFSF15 (TL1) (57-251) Trimerizing Polypeptide
SQLRAQGEACVQFQALKGQEFAPSHQQVYAPLRADGDKPRAHLTVVRQTPTQHFKNQFPALHWEHELGLAFTKNRMNYTNKFLLIPESGDYFIYSQVTFRGMTSECSEIRQAGRPNKPDSITVVITKVTDSYPEPTQLLMGTKSVCEVGSNWFQPIYLGAMFSLQEGDKLMVNVSDISLVDYTKEDKTFFGAFLL

SEQ ID NO: 839 - protein, 161 aa, synthetic construct
  REGION 1..161: note = TNFSF15 (TL1) (91-251) Trimerizing Polypeptide
DGDKPRAHLTVVRQTPTQHFKNQFPALHWEHELGLAFTKNRMNYTNKFLLIPESGDYFIYSQVTFRGMTSECSEIRQAGRPNKPDSITVVITKVTDSYPEPTQLLMGTKSVCEVGSNWFQPIYLGAMFSLQEGDKLMVNVSDISLVDYTKEDKTFFGAFLL

SEQ ID NO: 840 - protein, 159 aa, synthetic construct
  REGION 1..159: note = TNFSF15 (TL1) (93-251) Trimerizing Polypeptide
DKPRAHLTVVRQTPTQHFKNQFPALHWEHELGLAFTKNRMNYTNKFLLIPESGDYFIYSQVTFRGMTSECSEIRQAGRPNKPDSITVVITKVTDSYPEPTQLLMGTKSVCEVGSNWFQPIYLGAMFSLQEGDKLMVNVSDISLVDYTKEDKTFFGAFLL

SEQ ID NO: 841 - protein, 155 aa, synthetic construct
  REGION 1..155: note = TNFSF15 (TL1) (97-251) Trimerizing Polypeptide
AHLTVVRQTPTQHFKNQFPALHWEHELGLAFTKNRMNYTNKFLLIPESGDYFIYSQVTFRGMTSECSEIRQAGRPNKPDSITVVITKVTDSYPEPTQLLMGTKSVCEVGSNWFQPIYLGAMFSLQEGDKLMVNVSDISLVDYTKEDKTFFGAFLL

SEQ ID NO: 842 - protein, 128 aa, synthetic construct
  REGION 1..128: note = TNFSF18 (GITRL) (72-199) Trimerizing Polypeptide
QLETAKEPCMAKFGPLPSKWQMASSEPPCVNKVSDWKLEILQNGLYLIYGQVAPNANYNDVAPFEVRLYKNKDMIQTLTNKSKIQNVGGTYELHVGDTIDLIFNSEHQVLKNNTYWGIILLANPQFIS

SEQ ID NO: 843 - protein, 126 aa, synthetic construct
  REGION 1..126: note = TNFSF18 (GITRL) (74-199) Trimerizing Polypeptide
ETAKEPCMAKFGPLPSKWQMASSEPPCVNKVSDWKLEILQNGLYLIYGQVAPNANYNDVAPFEVRLYKNKDMIQTLTNKSKIQNVGGTYELHVGDTIDLIFNSEHQVLKNNTYWGIILLANPQFIS

SEQ ID NO: 844 - protein, 582 aa, synthetic construct
  REGION 1..582: note = sc4-1BBL
GGGGSGGGGSREGPELSPDDPAGLLDLRQGMFAQLVAQNVLLIDGPLSWYSDPGLAGVSLTGGLSYKEDTKELVVAKAGVYYVFFQLELRRVVAGEGSGSVSLALHLQPLRSAAGAAALALTVDLPPASSEARNSAFGFQGRLLHLSAGQRLGVHLHTEARARHAWQLTQGATVLGLFRVTPEIPAGLPSPRSEGGGGSGGGGSREGPELSPDDPAGLLDLRQGMFAQLVAQNVLLIDGPLSWYSDPGLAGVSLTGGLSYKEDTKELVVAKAGVYYVFFQLELRRVVAGEGSGSVSLALHLQPLRSAAGAAALALTVDLPPASSEARNSAFGFQGRLLHLSAGQRLGVHLHTEARARHAWQLTQGATVLGLFRVTPEIPAGLPSPRSEGGGGSGGGGSREGPELSPDDPAGLLDLRQGMFAQLVAQNVLLIDGPLSWYSDPGLAGVSLTGGLSYKEDTKELVVAKAGVYYVFFQLELRRVVAGEGSGSVSLALHLQPLRSAAGAAALALTVDLPPASSEARNSAFGFQGRLLHLSAGQRLGVHLHTEARARHAWQLTQGATVLGLFRVTPEIPAGLPSPRSE

SEQ ID NO: 845 - protein, 420 aa, synthetic construct
  REGION 1..420: note = scOX40L
GGGSGGGQVSHRYPRIQSIKVQFTEYKKEKGFILTSQKEDEIMKVQNNSVIINCDGFYLISLKGYFSQEVNISLHYQKDEEPLFQLKKVRSVNSLMVASLTYKDKVYLNVTTDNTSLDDFHVNGGELILIHQNPGEFCVLGGGSGGGQVSHRYPRIQSIKVQFTEYKKEKGFILTSQKEDEIMKVQNNSVIINCDGFYLISLKGYFSQEVNISLHYQKDEEPLFQLKKVRSVNSLMVASLTYKDKVYLNVTTDNTSLDDFHVNGGELILIHQNPGEFCVLGGGSGGGQVSHRYPRIQSIKVQFTEYKKEKGFILTSQKEDEIMKVQNNSVIINCDGFYLISLKGYFSQEVNISLHYQKDEEPLFQLKKVRSVNSLMVASLTYKDKVYLNVTTDNTSLDDFHVNGGELILIHQNPGEFCVL

SEQ ID NO: 846 - protein, 414 aa, synthetic construct
  REGION 1..414: note = scGITRL
GGSGGGGSGGQLETAKEPCMAKFGPLPSKWQMASSEPPCVNKVSDWKLEILQNGLYLIYGQVAPNANYNDVAPFEVRLYKNKDMIQTLTNKSKIQNVGGTYELHVGDTIDLIFNSEHQVLKNNTYWGIILLANPQFISGGSGGGGSGGQLETAKEPCMAKFGPLPSKWQMASSEPPCVNKVSDWKLEILQNGLYLIYGQVAPNANYNDVAPFEVRLYKNKDMIQTLTNKSKIQNVGGTYELHVGDTIDLIFNSEHQVLKNNTYWGIILLANPQFISGGSGGGGSGGQLETAKEPCMAKFGPLPSKWQMASSEPPCVNKVSDWKLEILQNGLYLIYGQVAPNANYNDVAPFEVRLYKNKDMIQTLTNKSKIQNVGGTYELHVGDTIDLIFNSEHQVLKNNTYWGIILLANPQFIS

SEQ ID NO: 847 - protein, 159 aa, synthetic construct
  REGION 1..159: note = IL1A (P01583) ECD
SAPFSFLSNVKYNFMRIIKYEFILNDALNQSIIRANDQYLTAAALHNLDEAVKFDMGAYKSSKDDAKITVILRISKTQLYVTAQDEDQPVLLKEMPEIPKTITGSETNLLFFWETHGTKNYFTSVAHPNLFIATKQDYWVCLAGGPPSITDFQILENQA

SEQ ID NO: 848 - protein, 153 aa, synthetic construct
  REGION 1..153: note = IL1B (P01584) ECD
APVRSLNCTLRDSQQKSLVMSGPYELKALHLQGQDMEQQVVFSMSFVQGEESNDKIPVALGLKEKNLYLSCVLKDDKPTLQLESVDPKNYPKKKMEKRFVFNKIEINNKLEFESAQFPNWYISTSQAENMPVFLGGTKGGQDITDFTMQFVSS

SEQ ID NO: 849 - protein, 133 aa, synthetic construct [sequence omitted]

SEQ ID NO: 850 - protein, 133 aa, synthetic construct
  REGION 1..133: note = IL3 (P08700) ECD
APMTQTTPLKTSWVNCSNMIDEIITHLKQPPLPLLDFNNLNGEDQDILMENNLRRPNLEAFNRAVKSLQNASAIESILKNLLPCLPLATAAPTRHPIHIKDGDWNEFRRKLTFYLKTLENAQAQQTTLSLAIF

SEQ ID NO: 851 - protein, 129 aa, synthetic construct [sequence omitted]

SEQ ID NO: 852 - protein, 115 aa, synthetic construct
  REGION 1..115: note = IL5 (P05113) ECD
IPTEIPTSALVKETLALLSTHRTLLIANETLRIPVPVHKNHQLCTEEIFQGIGTLESQTVQGGTVERLFKNLSLIKKYIDGQKKKCGEERRRVNQFLDYLQEFLGVMNTEWIIES

SEQ ID NO: 853 - protein, 183 aa, synthetic construct
  REGION 1..183: note = IL6 (P05231) ECD
VPPGEDSKDVAAPHRQPLTSSERIDKQIRYILDGISALRKETCNKSNMCESSKEALAENNLNLPKMAEKDGCFQSGFNEETCLVKIITGLLEFEVYLEYLQNRFESSEEQARAVQMSTKVLIQFLQKKAKNLDAITTPDPTTNASLLTKLQAQNQWLQDMTTHLILRSFKEFLQSSLRALRQM

SEQ ID NO: 854 - protein, 152 aa, synthetic construct
  REGION 1..152: note = IL7 (P13232) ECD
DCDIEGKDGKQYESVLMVSIDQLLDSMKEIGSNCLNNEFNFFKRHICDANKEGMFLFRAARKLRQFLKMNSTGDFDLHLLKVSEGTTILLNCTGQVKGRKPAALGEAQPTKSLEENKSLKEQKKLNDLCFLKRLLQEIKTCWNKILMGTKEH

SEQ ID NO: 855 - protein, 79 aa, synthetic construct
  REGION 1..79: note = IL8 (P10145) ECD
EGAVLPRSAKELRCQCIKTYSKPFHPKFIKELRVIESGPHCANTEIIVKLSDGRELCLDPKENWVQRVVEKFLKRAENS

SEQ ID NO: 856 - protein, 230 aa, synthetic construct
  REGION 1..230: note = IL9 (Q01113) ECD
SVTGEGQGPRSRTFTCLTNNILRIDCHWSAPELGQGSSPWLLFTSNQAPGGTHKCILRGSECTVVLPPEAVLVPSDNFTITFHHCMSGREQVSLVDPEYLPRRHVKLDPPSDLQSNISSGHCILTWSISPALEPMTTLLSYELAFKKQEEAWEQAQHRDHIVGVTWLILEAFELDPGFIHEARLRVQMATLEDDVVEEERYTGQWSEWSQPVCFQAPQRQGPLIPPWGWP

SEQ ID NO: 857 - protein, 160 aa, synthetic construct
  REGION 1..160: note = IL10 (P22301) ECD
SPGQGTQSENSCTHFPGNLPNMLRDLRDAFSRVKTFFQMKDQLDNLLLKESLLEDFKGYLGCQALSEMIQFYLEEVMPQAENQDPDIKAHVNSLGENLKTLRLRLRRCHRFLPCENKSKAVEQVKNAFNKLQEKGIYKAMSEFDIFINYIEAYMTMKIRN

SEQ ID NO: 858 - protein, 178 aa, synthetic construct
  REGION 1..178: note = IL11 (P20809) ECD
PGPPPGPPRVSPDPRAELDSTVLLTRSLLADTRQLAAQLRDKFPADGDHNLDSLPTLAMSAGALGALQLPGVLTRLRADLLSYLRHVQWLRRAGGSSLKTLEPELGTLQARLDRLLRRLQLLMSRLALPQPPPDPPAPPLAPPSSAWGGIRAAHAILGGLHLTLDWAVRGLLLLKTRL

SEQ ID NO: 859 - protein, 197 aa, synthetic construct
  REGION 1..197: note = IL12A (P29459) ECD
RNLPVATPDPGMFPCLHHSQNLLRAVSNMLQKARQTLEFYPCTSEEIDHEDITKDKTSTVEACLPLELTKNESCLNSRETSFITNGSCLASRKTSFMMALCLSSIYEDLKMYQVEFKTMNAKLLMDPKRQIFLDQNMLAVIDELMQALNFNSETVPQKSSLEEPDFYKTKIKLCILLHAFRIRAVTIDRVMSYLNAS

SEQ ID NO: 860 - protein, 306 aa, synthetic construct
  REGION 1..306: note = IL12B (P29460) ECD
IWELKKDVYVVELDWYPDAPGEMVVLTCDTPEEDGITWTLDQSSEVLGSGKTLTIQVKEFGDAGQYTCHKGGEVLSHSLLLLHKKEDGIWSTDILKDQKEPKNKTFLRCEAKNYSGRFTCWWLTTISTDLTFSVKSSRGSSDPQGVTCGAATLSAERVRGDNKEYEYSVECQEDSACPAAEESLPIEVMVDAVHKLKYENYTSSFFIRDIIKPDPPKNLQLKPLKNSRQVEVSWEYPDTWSTPHSYFSLTFCVQVQGKSKREKKDRVFTDKTSATVICRKNASISVRAQDRYYSSSWSEWASVPCS

SEQ ID NO: 861 - protein, 122 aa, synthetic construct
  REGION 1..122: note = IL13 (P35225) ECD
LTCLGGFASPGPVPPSTALRELIEELVNITQNQKAPLCNGSMVWSINLTAGMYCAALESLINVSGCSAIEKTQRMLSGFCPHKVSAGQFSSLHVRDTKIEVAQFVKDLLLHLKKLFREGRFN

SEQ ID NO: 862 - protein, 114 aa, synthetic construct
  REGION 1..114: note = IL15 (P40933) ECD
NWVNVISDLKKIEDLIQSMHIDATLYTESDVHPSCKVTAMKCFLLELQVISLESGDASIHDTVENLIILANNSLSSNGNVTESGCKECEELEEKNIKEFLQSFVHIVQMFINTS

SEQ ID NO: 863 - protein, 121 aa, synthetic construct
  REGION 1..121: note = IL16 (Q14005) ECD
SAASASAASDVSVESTAEATVCTVTLEKMSAGLGFSLEGGKGSLHGDKPLTINRIFKGAASEQSETVQPGDEILQLGGTAMQGLTRFEAWNIIKALPDGPVTIVIRRKSLQSKETTAAGDS

SEQ ID NO: 864 - protein, 132 aa, synthetic construct
  REGION 1..132: note = IL17A (Q16552) ECD
GITIPRNPGCPNSEDKNFPRTVMVNLNIHNRNTNTNPKRSSDYYNRSTSPWNLHRNEDPERYPSVIWEAKCRHLGCINADGNVDYHMNSVPIQQEILVLRREPPHCPNSFRLEKILVSVGCTCVTPIVHHVA

SEQ ID NO: 865 - protein, 160 aa, synthetic construct
  REGION 1..160: note = IL17B (Q9UHF5) ECD
QPRSPKSKRKGQGRPGPLAPGPHQVPLDLVSRMKPYARMEEYERNIEEMVAQLRNSSELAQRKCEVNLQLWMSNKRSLSPWGYSINHDPSRIPVDLPEARCLCLGCVNPFTMQEDRSMVSVPVFSQVPVRRRLCPPPPRTGPCRQRAVMETIAVGCTCIF

SEQ ID NO: 866 - protein, 179 aa, synthetic construct
  REGION 1..179: note = IL17C (Q9P0M4) ECD
HHDPSLRGHPHSHGTPHCYSAEELPLGQAPPHLLARGAKWGQALPVALVSSLEAASHRGRHERPSATTQCPVLRPEEVLEADTHQRSISPWRYRVDTDEDRYPQKLAFAECLCRGCIDARTGRETAALNSVRLLQSLLVLRRRPCSRDGSGLPTPGAFAFHTEFIHVPVGCTCVLPRSV

SEQ ID NO: 867 - protein, 187 aa, synthetic construct
  REGION 1..187: note = IL17D (Q8TAD2) ECD
AGAPRAGRRPARPRGCADRPEELLEQLYGRLAAGVLSAFHHTLQLGPREQARNASCPAGGRPADRRFRPPTNLRSVSPWAYRISYDPARYPRYLPEAYCLCRGCLTGLFGEEDVRFRSAPVYMPTVVLRRTPACAGGRSVYTEAYVTIPVGCTCVPEPEKDADSINSSIDKQGAKLLLGPNDAPAGP

SEQ ID NO: 868 - protein, 133 aa, synthetic construct [sequence omitted]

SEQ ID NO: 869 - protein, 157 aa, synthetic construct
  REGION 1..157: note = IL18 (Q14116) ECD
YFGKLESKLSVIRNLNDQVLFIDQGNRPLFEDMTDSDCRDNAPRTIFIISMYKDSQPRGMAVTISVKCEKISTLSCENKIISFKEMNPPDNIKDTKSDIIFFQRSVPGHDNKMQFESSSYEGYFLACEKERDLFKLILKKEDELGDRSIMFTVQNED

SEQ ID NO: 870 - protein, 153 aa, synthetic construct
  REGION 1..153: note = IL19 (Q9UHD0) ECD
LRRCLISTDMHHIEESFQEIKRAIQAKDTFPNVTILSTLETLQIIKPLDVCCVTKNLLAFYVDRVFKDHQEPNPKILRKISSIANSFLYMQKTLRQCQEQRQCHCRQEATNATRVIHDNYDQLEVHAAAIKSLGELDVFLAWINKNHEVMFSA

SEQ ID NO: 871 - protein, 152 aa, synthetic construct
  REGION 1..152: note = IL20 (Q9NYY1) ECD
LKTLNLGSCVIATNLQEIRNGFSEIRGSVQAKDGNIDIRILRRTESLQDTKPANRCCLLRHLLRLYLDRVFKNYQTPDHYTLRKISSLANSFLTIKKDLRLCHAHMTCHCGEEAMKKYSQILSHFEKLEPQAAVVKALGELDILLQWMEETE

SEQ ID NO: 872 - protein, 138 aa, synthetic construct
  REGION 1..138: note = IL21 (Q9HBE4) ECD
HKSSSQGQDRHMIRMRQLIDIVDQLKNYVNDLVPEFLPAPEDVETNCEWSAFSCFQKAQLKSANTGNNERIINVSIKKLKRKPPSTNAGRRQKHRLTCPSCDSYEKKPPKEFLERFKSLLQKMIHQHLSSRTHGSEDS

SEQ ID NO: 873 - protein, 146 aa, synthetic construct
  REGION 1..146: note = IL22 (Q9GZX6) ECD
APISSHCRLDKSNFQQPYITNRTFMLAKEASLADNNTDVRLIGEKLFHGVSMSERCYLMKQVLNFTLEEVLFPQSDRFQPYMQEVVPFLARLSNRLSTCHIEGDDLHIQRNVQKLKDTVKKLGESGEIKAIGELDLLFMSLRNACI

SEQ ID NO: 874 - protein, 332 aa, synthetic construct
  REGION 1..332: note = IL23R (Q5VWK5) ECD
GITNINCSGHIWVEPATIFKMGMNISIYCQAAIKNCQPRKLHFYKNGIKERFQITRINKTTARLWYKNFLEPHASMYCTAECPKHFQETLICGKDISSGYPPDIPDEVTCVIYEYSGNMTCTWNAGKLTYIDTKYVVHVKSLETEEEQQYLTSSYINISTDSLQGGKKYLVWVQAANALGMEESKQLQIHLDDIVIPSAAVISRAETINATVPKTIIYWDSQTTIEKVSCEMRYKATTNQTWNVKEFDTNFTYVQQSEFYLEPNIKYVFQVRCQETGKRYWQPWSSLFFHKTPETVPQVTSKAFQHDTWNSGLTVASISTGHLTSDNRGDIG

SEQ ID NO: 875 - protein, 170 aa, synthetic construct
  REGION 1..170: note = IL23A (Q9NPF7) ECD
RAVPGGSSPAWTQCQQLSQKLCTLAWSAHPLVGHMDLREEGDEETTNDVPHIQCGDGCDPQGLRDNSQFCLQRIHQGLIFYEKLLGSDIFTGEPSLLPDSPVGQLHASLLGLSQLLQPEGHHWETQQIPSLSPSQPWQRLLLRFKILRSLQAFVAVAARVFAHGAATLSP

SEQ ID NO: 876 - protein, 155 aa, synthetic construct
  REGION 1..155: note = IL24 (Q13007) ECD
QEFHFGPCQVKGVVPQKLWEAFWAVKDTMQAQDNITSARLLQQEVLQNVSDAESCYLVHTLLEFYLKTVFKNYHNRTVEVRTLKSFSTLANNFVLIVSQLQPSQENEMFSIRDSAHRRFLLFRRAFKQLDVEAALTKALGEVDILLTWMQKFYKL

SEQ ID NO: 877 - protein, 145 aa, synthetic construct
  REGION 1..145: note = IL25 (Q9H293) ECD
YSHWPSCCPSKGQDTSEELLRWSTVPVPPLEPARPNRHPESCRASEDGPLNSRAISPWRYELDRDLNRLPQDLYHARCLCPHCVSLQTGSHMDPRGNSELLYHNQTVFYRRPCHGEKGTHKGYCLERRLYRVSLACVCVRPRVMG

SEQ ID NO: 878 - protein, 150 aa, synthetic construct
  REGION 1..150: note = IL26 (Q9NPH9) ECD
KHKQSSFTKSCYPRGTLSQAVDALYIKAAWLKATIPEDRIKNIRLLKKKTKKQFMKNCQFQEQLLSFFMEDVFGQLQLQGCKKIRFVEDFHSLRQKLSHCISCASSAREMKSITRMKRIFYRIGNKGIYKAISELDILLSWIKKLLESSQ

SEQ ID NO: 879 - protein, 215 aa, synthetic construct
  REGION 1..215: note = IL27A (Q8NEV9) ECD
FPRPPGRPQLSLQELRREFTVSLHLARKLLSEVRGQAHRFAESHLPGVNLYLLPLGEQLPDVSLTFQAWRRLSDPERLCFISTTLQPFHALLGGLGTQGRWTNMERMQLWAMRLDLRDLQRHLRFQVLAAGFNLPEEEEEEEEEEEEERKGLLPGALGSALQGPAQVSWPQLLSTYRLLHSLELVLSRAVRELLLLSKAGHSVWPLGFPTLSPQP

SEQ ID NO: 880 - protein, 209 aa, synthetic construct
  REGION 1..209: note = IL27B (Q14213) ECD
RKGPPAALTLPRVQCRASRYPIAVDCSWTLPPAPNSTSPVSFIATYRLGMAARGHSWPCLQQTPTSTSCTITDVQLFSMAPYVLNVTAVHPWGSSSSFVPFITEHIIKPDPPEGVRLSPLAERQLQVQWEPPGSWPFPEIFSLKYWIRYKRQGAARFHRVGPIEATSFILRAVRPRARYYVQVAAQDLTDYGELSDWSLPATATMSLGK

SEQ ID NO: 881 - protein, 181 aa, synthetic construct
  REGION 1..181: note = IL29 (Q8IU54) ECD
GPVPTSKPTTTGKGCHIGRFKSLSPQELASFKKARDALEESLKLKNWSCSSPVFPGNWDLRLLQVRERPVALEAELALTLKVLEAAAGPALEDVLDQPLHTLHHILSQLQACIQPQPTAGPRPRGRLHHWLHRLQEAPKKESAGCLEASVTFNLFRLLTRDLKYVADGNLCLRTSTHPEST

SEQ ID NO: 882 - protein, 141 aa, synthetic construct [sequence omitted]

SEQ ID NO: 883 - protein, 204 aa, synthetic construct
  REGION 1..204: note = IL32 (P24001) ECD
AWVSACDTEDTVGHLGPWRDKDPALWCQLCLSSQHQAIERFYDKMQNAESGRGQVMSSLAELEDDFKEGYLETVAAYYEEQHPELTPLLEKERDGLRCRGNRSPVPDVEDPATEEPGESFCDKVMRWFQAMLQRLQTWWHGVLAWVKEKVVALVHAVQALWKQFQSFCCSLSELFMSSFQSYGAPRGDKEELTPQKCSEPQSSK

SEQ ID NO: 884 - protein, 176 aa, synthetic construct
  REGION 1..176: note = IL33 (O95760) ECD
AFGISGVQKYTRALHDSSITGISPITEYLASLSTYNDQSITFALEDESYEIYVEDLKKDEKKDKVLLSYYESQHPSNESGDGVDGKMLMVTLSPTKDFWLHANNKEHSVELHKCEKPLPDQAFFVLHNMHSNCVSFECKTDPGVFIGVKDNHLALIKVDSSENLCTENILFKLSET

SEQ ID NO: 885 - protein, 222 aa, synthetic construct
  REGION 1..222: note = IL34 (Q6ZMJ4) ECD
NEPLEMWPLTQNEECTVTGFLRDKLQYRSRLQYMKHYFPINYKISVPYEGVFRIANVTRLQRAQVSERELRYLWVLVSLSATESVQDVLLEGHPSWKYLQEVETLLLNVQQGLTDVEVSPKVESVLSLLNAPGPNLKLVRPKALLDNCFRVMELLYCSCCKQSSVLNWQDCEVPSPQSCSPEPSLQYAATQLYPPPPWSPSSPPHSTGSVRPVRAQGEGLLP

SEQ ID NO: 886 - protein, 153 aa, synthetic construct
  REGION 1..153: note = IL36A (Q9UHA7) ECD
KIDTPQQGSIQDINHRVWVLQDQTLIAVPRKDRMSPVTIALISCRHVETLEKDRGNPIYLGLNGLNLCLMCAKVGDQPTLQLKEKDIMDLYNQPEPVKSFLFYHSQSGRNSTFESVAFPGWFIAVSSEGGCPLILTQELGKANTTDFGLTMLF

SEQ ID NO: 887 - protein, 160 aa, synthetic construct
  REGION 1..160: note = IL36B (Q9NZH7 ) ECD
REAAPKSYAIRDSRQMVWVLSGNSLIAAPLSRSIKPVTLHLIACRDTEFSDKEKGNMVYLGIKGKDLCLFCAEIQGKPTLQLKLQGSQDNIGKDTCWKLVGIHTCINLDVRESCFMGTLDQWGIGVGRKKWKSSFQHHHLRKKDKDFSSMRTNIGMPGRM

SEQ ID NO: 888 - protein, 152 aa, synthetic construct
  REGION 1..152: note = IL36G (Q9NZH8 ) ECD
SMCKPITGTINDLNQQVWTLQGQNLVAVPRSDSVTPVTVAVITCKYPEALEQGRGDPIYLGIQNPEMCLYCEKVGEQPTLQLKEQKIMDLYGQPEPVKPFLFYRAKTGRTSTLESVAFPDWFIASSKRDQPIILTSELGKSYNTAFELNIND

SEQ ID NO: 889 - protein, 173 aa, synthetic construct
  REGION 1..173: note = IL37 (Q9NZH6 ) ECD
VHTSPKVKNLNPKKFSIHDQDHKVLVLDSGNLIAVPDKNYIRPEIFFALASSLSSASAEKGSPILLGVSKGEFCLYCDKDKGQSHPSLQLKKEKLMKLAAQKESARRPFIFYRAQVGSWNMLESAAHPGWFICTSCNCNEPVGVTDKFENRKHIEFSFQPVCKAEMSPSEVSD

SEQ ID NO: 890 - protein, 245 aa, synthetic construct
  REGION 1..245: note = IL40 (Q6UX52 ) ECD
REEEITPVVSIAYKVLEVFPKGRWVLITCCAPQPPPPITYSLCGTKNIKVAKKVVKTHEPASFNLNVTLKSSPDLLTYFCWASSTSGAHVDSARLQMHWELWSKPVSELRANFTLQDRGAGPRVEMICQASSGSPPITNSLIGKDGQVHLQQRPCHRQPANFSFLPSQTSDWFWCQAANNANVQHSALTVVPPGGDQKMEDWQGPLESPILALPLYRSTRRLSEEEFGGFRIGNGEVRGRKAAAM

SEQ ID NO: 891 - protein, 271 aa, synthetic construct
  REGION 1..271: note = IL1A (P01583) SP+PP+ECD
MAKVPDMFEDLKNCYSENEEDSSSIDHLSLNQKSFYHVSYGPLHEGCMDQSVSLSISETSKTSKLTFKESMVVVATNGKVLKKRRLSLSQSITDDDLEAIANDSEEEIIKPRSAPFSFLSNVKYNFMRIIKYEFILNDALNQSIIRANDQYLTAAALHNLDEAVKFDMGAYKSSKDDAKITVILRISKTQLYVTAQDEDQPVLLKEMPEIPKTITGSETNLLFFWETHGTKNYFTSVAHPNLFIATKQDYWVCLAGGPPSITDFQILENQA

SEQ ID NO: 892 - protein, 269 aa, synthetic construct
  REGION 1..269: note = IL1B (P01584) SP+PP+ECD
MAEVPELASEMMAYYSGNEDDLFFEADGPKQMKCSFQDLDLCPLDGGIQLRISDHHYSKGFRQAASVVVAMDKLRKMLVPCPQTFQENDLSTFFPFIFEEEPIFFDTWDNEAYVHDAPVRSLNCTLRDSQQKSLVMSGPYELKALHLQGQDMEQQVVFSMSFVQGEESNDKIPVALGLKEKNLYLSCVLKDDKPTLQLESVDPKNYPKKKMEKRFVFNKIEINNKLEFESAQFPNWYISTSQAENMPVFLGGTKGGQDITDFTMQFVSS

SEQ ID NO: 893 - protein, 153 aa, synthetic construct
  REGION 1..153: note = IL2 (P60568) SP+PP+ECD
MYRMQLLSCIALSLALVTNSAPTSSSTKKTQLQLEHLLLDLQMILNGINNYKNPKLTRMLTFKFYMPKKATELKHLQCLEEELKPLEEVLNLAQSKNFHLRPRDLISNINVIVLELKGSETTFMCEYADETATIVEFLNRWITFCQSIISTLT

SEQ ID NO: 894 - protein, 152 aa, synthetic construct
  REGION 1..152: note = IL3 (P08700) SP+PP+ECD
MSRLPVLLLLQLLVRPGLQAPMTQTTPLKTSWVNCSNMIDEIITHLKQPPLPLLDFNNLNGEDQDILMENNLRRPNLEAFNRAVKSLQNASAIESILKNLLPCLPLATAAPTRHPIHIKDGDWNEFRRKLTFYLKTLENAQAQQTTLSLAIF

SEQ ID NO: 895 - protein, 153 aa, synthetic construct [sequence omitted]

SEQ ID NO: 896 - protein, 134 aa, synthetic construct
  REGION 1..134: note = IL5 (P05113) SP+PP+ECD
MRMLLHLSLLALGAAYVYAIPTEIPTSALVKETLALLSTHRTLLIANETLRIPVPVHKNHQLCTEEIFQGIGTLESQTVQGGTVERLFKNLSLIKKYIDGQKKKCGEERRRVNQFLDYLQEFLGVMNTEWIIES

SEQ ID NO: 897 - protein, 212 aa, synthetic construct
  REGION 1..212: note = IL6 (P05231) SP+PP+ECD
MNSFSTSAFGPVAFSLGLLLVLPAAFPAPVPPGEDSKDVAAPHRQPLTSSERIDKQIRYILDGISALRKETCNKSNMCESSKEALAENNLNLPKMAEKDGCFQSGFNEETCLVKIITGLLEFEVYLEYLQNRFESSEEQARAVQMSTKVLIQFLQKKAKNLDAITTPDPTTNASLLTKLQAQNQWLQDMTTHLILRSFKEFLQSSLRALRQM

SEQ ID NO: 898 - protein, 177 aa, synthetic construct
  REGION 1..177: note = IL7 (P13232) SP+PP+ECD
MFHVSFRYIFGLPPLILVLLPVASSDCDIEGKDGKQYESVLMVSIDQLLDSMKEIGSNCLNNEFNFFKRHICDANKEGMFLFRAARKLRQFLKMNSTGDFDLHLLKVSEGTTILLNCTGQVKGRKPAALGEAQPTKSLEENKSLKEQKKLNDLCFLKRLLQEIKTCWNKILMGTKEH

SEQ ID NO: 899 - protein, 99 aa, synthetic construct
  REGION 1..99: note = IL8 (P10145) SP+PP+ECD
MTSKLAVALLAAFLISAALCEGAVLPRSAKELRCQCIKTYSKPFHPKFIKELRVIESGPHCANTEIIVKLSDGRELCLDPKENWVQRVVEKFLKRAENS

SEQ ID NO: 900 - protein, 270 aa, synthetic construct
  REGION 1..270: note = IL9 (Q01113) SP+PP+ECD
MGLGRCIWEGWTLESEALRRDMGTWLLACICICTCVCLGVSVTGEGQGPRSRTFTCLTNNILRIDCHWSAPELGQGSSPWLLFTSNQAPGGTHKCILRGSECTVVLPPEAVLVPSDNFTITFHHCMSGREQVSLVDPEYLPRRHVKLDPPSDLQSNISSGHCILTWSISPALEPMTTLLSYELAFKKQEEAWEQAQHRDHIVGVTWLILEAFELDPGFIHEARLRVQMATLEDDVVEEERYTGQWSEWSQPVCFQAPQRQGPLIPPWGWP

SEQ ID NO: 901 - protein, 178 aa, synthetic construct
  REGION 1..178: note = IL10 (P22301) SP+PP+ECD
MHSSALLCCLVLLTGVRASPGQGTQSENSCTHFPGNLPNMLRDLRDAFSRVKTFFQMKDQLDNLLLKESLLEDFKGYLGCQALSEMIQFYLEEVMPQAENQDPDIKAHVNSLGENLKTLRLRLRRCHRFLPCENKSKAVEQVKNAFNKLQEKGIYKAMSEFDIFINYIEAYMTMKIRN

SEQ ID NO: 902 - protein, 199 aa, synthetic construct
  REGION 1..199: note = IL11 (P20809) SP+PP+ECD
MNCVCRLVLVVLSLWPDTAVAPGPPPGPPRVSPDPRAELDSTVLLTRSLLADTRQLAAQLRDKFPADGDHNLDSLPTLAMSAGALGALQLPGVLTRLRADLLSYLRHVQWLRRAGGSSLKTLEPELGTLQARLDRLLRRLQLLMSRLALPQPPPDPPAPPLAPPSSAWGGIRAAHAILGGLHLTLDWAVRGLLLLKTRL

SEQ ID NO: 903 - protein, 219 aa, synthetic construct
  REGION 1..219: note = IL12A (P29459) SP+PP+ECD
MCPARSLLLVATLVLLDHLSLARNLPVATPDPGMFPCLHHSQNLLRAVSNMLQKARQTLEFYPCTSEEIDHEDITKDKTSTVEACLPLELTKNESCLNSRETSFITNGSCLASRKTSFMMALCLSSIYEDLKMYQVEFKTMNAKLLMDPKRQIFLDQNMLAVIDELMQALNFNSETVPQKSSLEEPDFYKTKIKLCILLHAFRIRAVTIDRVMSYLNAS

SEQ ID NO: 904 - protein, 328 aa, synthetic construct
  REGION 1..328: note = IL12B (P29460) SP+PP+ECD
MCHQQLVISWFSLVFLASPLVAIWELKKDVYVVELDWYPDAPGEMVVLTCDTPEEDGITWTLDQSSEVLGSGKTLTIQVKEFGDAGQYTCHKGGEVLSHSLLLLHKKEDGIWSTDILKDQKEPKNKTFLRCEAKNYSGRFTCWWLTTISTDLTFSVKSSRGSSDPQGVTCGAATLSAERVRGDNKEYEYSVECQEDSACPAAEESLPIEVMVDAVHKLKYENYTSSFFIRDIIKPDPPKNLQLKPLKNSRQVEVSWEYPDTWSTPHSYFSLTFCVQVQGKSKREKKDRVFTDKTSATVICRKNASISVRAQDRYYSSSWSEWASVPCS

SEQ ID NO: 905 - protein, 146 aa, synthetic construct [sequence omitted]

SEQ ID NO: 906 - protein, 162 aa, synthetic construct
  REGION 1..162: note = IL15 (P40933) SP+PP+ECD
MRISKPHLRSISIQCYLCLLLNSHFLTEAGIHVFILGCFSAGLPKTEANWVNVISDLKKIEDLIQSMHIDATLYTESDVHPSCKVTAMKCFLLELQVISLESGDASIHDTVENLIILANNSLSSNGNVTESGCKECEELEEKNIKEFLQSFVHIVQMFINTS

SEQ ID NO: 907 - protein, 1332 aa, synthetic construct
  REGION 1..1332: note = IL16 (Q14005) SP+PP+ECD
MESHSRAGKSRKSAKFRSISRSLMLCNAKTSDDGSSPDEKYPDPFEISLAQGKEGIFHSSVQLADTSEAGPSSVPDLALASEAAQLQAAGNDRGKTCRRIFFMKESSTASSREKPGKLEAQSSNFLFPKACHQRARSNSTSVNPYCTREIDFPMTKKSAAPTDRQPYSLCSNRKSLSQQLDCPAGKAAGTSRPTRSLSTAQLVQPSGGLQASVISNIVLMKGQAKGLGFSIVGGKDSIYGPIGIYVKTIFAGGAAAADGRLQEGDEILELNGESMAGLTHQDALQKFKQAKKGLLTLTVRTRLTAPPSLCSHLSPPLCRSLSSSTCITKDSSSFALESPSAPISTAKPNYRIMVEVSLQKEAGVGLGIGLCSVPYFQCISGIFVHTLSPGSVAHLDGRLRCGDEIVEISDSPVHCLTLNEVYTILSHCDPGPVPIIVSRHPDPQVSEQQLKEAVAQAVENTKFGKERHQWSLEGVKRLESSWHGRPTLEKEREKNSAPPHRRAQKVMIRSSSDSSYMSGSPGGSPGSGSAEKPSSDVDISTHSPSLPLAREPVVLSIASSRLPQESPPLPESRDSHPPLRLKKSFEILVRKPMSSKPKPPPRKYFKSDSDPQKSLEERENSSCSSGHTPPTCGQEARELLPLLLPQEDTAGRSPSASAGCPGPGIGPQTKSSTEGEPGWRRASPVTQTSPIKHPLLKRQARMDYSFDTTAEDPWVRISDCIKNLFSPIMSENHGHMPLQPNASLNEEEGTQGHPDGTPPKLDTANGTPKVYKSADSSTVKKGPPVAPKPAWFRQSLKGLRNRASDPRGLPDPALSTQPAPASREHLGSHIRASSSSSSIRQRISSFETFGSSQLPDKGAQRLSLQPSSGEAAKPLGKHEEGRFSGLLGRGAAPTLVPQQPEQVLSSGSPAASEARDPGVSESPPPGRQPNQKTLPPGPDPLLRLLSTQAEESQGPVLKMPSQRARSFPLTRSQSCETKLLDEKTSKLYSISSQVSSAVMKSLLCLPSSISCAQTPCIPKEGASPTSSSNEDSAANGSAETSALDTGFSLNLSELREYTEGLTEAKEDDDGDHSSLQSGQSVISLLSSEELKKLIEEVKVLDEATLKQLDGIHVTILHKEEGAGLGFSLAGGADLENKVITVHRVFPNGLASQEGTIQKGNEVLSINGKSLKGTTHHDALAILRQAREPRQAVIVTRKLTPEAMPDLNSSTDSAASASAASDVSVESTAEATVCTVTLEKMSAGLGFSLEGGKGSLHGDKPLTINRIFKGAASEQSETVQPGDEILQLGGTAMQGLTRFEAWNIIKALPDGPVTIVIRRKSLQSKETTAAGDS

SEQ ID NO: 908 - protein, 155 aa, synthetic construct
  REGION 1..155: note = IL17A (Q16552) SP+PP+ECD
MTPGKTSLVSLLLLLSLEAIVKAGITIPRNPGCPNSEDKNFPRTVMVNLNIHNRNTNTNPKRSSDYYNRSTSPWNLHRNEDPERYPSVIWEAKCRHLGCINADGNVDYHMNSVPIQQEILVLRREPPHCPNSFRLEKILVSVGCTCVTPIVHHVA

SEQ ID NO: 909 - protein, 180 aa, synthetic construct
  REGION 1..180: note = IL17B (Q9UHF5) SP+PP+ECD
MDWPHNLLFLLTISIFLGLGQPRSPKSKRKGQGRPGPLAPGPHQVPLDLVSRMKPYARMEEYERNIEEMVAQLRNSSELAQRKCEVNLQLWMSNKRSLSPWGYSINHDPSRIPVDLPEARCLCLGCVNPFTMQEDRSMVSVPVFSQVPVRRRLCPPPPRTGPCRQRAVMETIAVGCTCIF

SEQ ID NO: 910 - protein, 197 aa, synthetic construct
  REGION 1..197: note = IL17C (Q9P0M4) SP+PP+ECD
MTLLPGLLFLTWLHTCLAHHDPSLRGHPHSHGTPHCYSAEELPLGQAPPHLLARGAKWGQALPVALVSSLEAASHRGRHERPSATTQCPVLRPEEVLEADTHQRSISPWRYRVDTDEDRYPQKLAFAECLCRGCIDARTGRETAALNSVRLLQSLLVLRRRPCSRDGSGLPTPGAFAFHTEFIHVPVGCTCVLPRSV

SEQ ID NO: 911 - protein, 202 aa, synthetic construct
  REGION 1..202: note = IL17D (Q8TAD2) SP+PP+ECD
MLVAGFLLALPPSWAAGAPRAGRRPARPRGCADRPEELLEQLYGRLAAGVLSAFHHTLQLGPREQARNASCPAGGRPADRRFRPPTNLRSVSPWAYRISYDPARYPRYLPEAYCLCRGCLTGLFGEEDVRFRSAPVYMPTVVLRRTPACAGGRSVYTEAYVTIPVGCTCVPEPEKDADSINSSIDKQGAKLLLGPNDAPAGP

SEQ ID NO: 912 - protein, 163 aa, synthetic construct
  REGION 1..163: note = IL17F (Q96PD4) SP+PP+ECD
MTVKTLHGPAMVKYLLLSILGLAFLSEAAARKIPKVGHTFFQKPESCPPVPGGSMKLDIGIINENQRVSMSRNIESRSTSPWNYTVTWDPNRYPSEVVQAQCRNLGCINAQGKEDISMNSVPIQQETLVVRRKHQGCSVSFQLEKVLVTVGCTCVTPVIHHVQ

SEQ ID NO: 913 - protein, 193 aa, synthetic construct
  REGION 1..193: note = IL18 (Q14116) SP+PP+ECD
MAAEPVEDNCINFVAMKFIDNTLYFIAEDDENLESDYFGKLESKLSVIRNLNDQVLFIDQGNRPLFEDMTDSDCRDNAPRTIFIISMYKDSQPRGMAVTISVKCEKISTLSCENKIISFKEMNPPDNIKDTKSDIIFFQRSVPGHDNKMQFESSSYEGYFLACEKERDLFKLILKKEDELGDRSIMFTVQNED

SEQ ID NO: 914 - protein, 177 aa, synthetic construct
  REGION 1..177: note = IL19 (Q9UHD0) SP+PP+ECD
MKLQCVSLWLLGTILILCSVDNHGLRRCLISTDMHHIEESFQEIKRAIQAKDTFPNVTILSTLETLQIIKPLDVCCVTKNLLAFYVDRVFKDHQEPNPKILRKISSIANSFLYMQKTLRQCQEQRQCHCRQEATNATRVIHDNYDQLEVHAAAIKSLGELDVFLAWINKNHEVMFSA

SEQ ID NO: 915 - protein, 176 aa, synthetic construct
  REGION 1..176: note = IL20 (Q9NYY1) SP+PP+ECD
MKASSLAFSLLSAAFYLLWTPSTGLKTLNLGSCVIATNLQEIRNGFSEIRGSVQAKDGNIDIRILRRTESLQDTKPANRCCLLRHLLRLYLDRVFKNYQTPDHYTLRKISSLANSFLTIKKDLRLCHAHMTCHCGEEAMKKYSQILSHFEKLEPQAAVVKALGELDILLQWMEETE

SEQ ID NO: 916 - protein, 162 aa, synthetic construct
  REGION 1..162: note = IL21 (Q9HBE4) SP+PP+ECD
MRSSPGNMERIVICLMVIFLGTLVHKSSSQGQDRHMIRMRQLIDIVDQLKNYVNDLVPEFLPAPEDVETNCEWSAFSCFQKAQLKSANTGNNERIINVSIKKLKRKPPSTNAGRRQKHRLTCPSCDSYEKKPPKEFLERFKSLLQKMIHQHLSSRTHGSEDS

SEQ ID NO: 917 - protein, 179 aa, synthetic construct
  REGION 1..179: note = IL22 (Q9GZX6) SP+PP+ECD
MAALQKSVSSFLMGTLATSCLLLLALLVQGGAAAPISSHCRLDKSNFQQPYITNRTFMLAKEASLADNNTDVRLIGEKLFHGVSMSERCYLMKQVLNFTLEEVLFPQSDRFQPYMQEVVPFLARLSNRLSTCHIEGDDLHIQRNVQKLKDTVKKLGESGEIKAIGELDLLFMSLRNACI

SEQ ID NO: 918 - protein, 629 aa, synthetic construct
  REGION 1..629: note = IL23R (Q5VWK5) SP+PP+ECD
MNQVTIQWDAVIALYILFSWCHGGITNINCSGHIWVEPATIFKMGMNISIYCQAAIKNCQPRKLHFYKNGIKERFQITRINKTTARLWYKNFLEPHASMYCTAECPKHFQETLICGKDISSGYPPDIPDEVTCVIYEYSGNMTCTWNAGKLTYIDTKYVVHVKSLETEEEQQYLTSSYINISTDSLQGGKKYLVWVQAANALGMEESKQLQIHLDDIVIPSAAVISRAETINATVPKTIIYWDSQTTIEKVSCEMRYKATTNQTWNVKEFDTNFTYVQQSEFYLEPNIKYVFQVRCQETGKRYWQPWSSLFFHKTPETVPQVTSKAFQHDTWNSGLTVASISTGHLTSDNRGDIGLLLGMIVFAVMLSILSLIGIFNRSFRTGIKRRILLLIPKWLYEDIPNMKNSNVVKMLQENSELMNNNSSEQVLYVDPMITEIKEIFIPEHKPTDYKKENTGPLETRDYPQNSLFDNTTVVYIPDLNTGYKPQISNFLPEGSHLSNNNEITSLTLKPPVDSLDSGNNPRLQKHPNFAFSVSSVNSLSNTIFLGELSLILNQGECSSPDIQNSVEEETTMLLENDSPSETIPEQTLLPDEFVSCLGIVNEELPSINTYFPQNILESHFNRISLLEK

SEQ ID NO: 919 - protein, 189 aa, synthetic construct
  REGION 1..189: note = IL23A (Q9NPF7) SP+PP+ECD
MLGSRAVMLLLLLPWTAQGRAVPGGSSPAWTQCQQLSQKLCTLAWSAHPLVGHMDLREEGDEETTNDVPHIQCGDGCDPQGLRDNSQFCLQRIHQGLIFYEKLLGSDIFTGEPSLLPDSPVGQLHASLLGLSQLLQPEGHHWETQQIPSLSPSQPWQRLLLRFKILRSLQAFVAVAARVFAHGAATLSP

SEQ ID NO: 920 - protein, 206 aa, synthetic construct
  REGION 1..206: note = IL24 (Q13007) SP+PP+ECD
MNFQQRLQSLWTLARPFCPPLLATASQMQMVVLPCLGFTLLLWSQVSGAQGQEFHFGPCQVKGVVPQKLWEAFWAVKDTMQAQDNITSARLLQQEVLQNVSDAESCYLVHTLLEFYLKTVFKNYHNRTVEVRTLKSFSTLANNFVLIVSQLQPSQENEMFSIRDSAHRRFLLFRRAFKQLDVEAALTKALGEVDILLTWMQKFYKL

SEQ ID NO: 921 - protein, 177 aa, synthetic construct
  REGION 1..177: note = IL25 (Q9H293) SP+PP+ECD
MRERPRLGEDSSLISLFLQVVAFLAMVMGTHTYSHWPSCCPSKGQDTSEELLRWSTVPVPPLEPARPNRHPESCRASEDGPLNSRAISPWRYELDRDLNRLPQDLYHARCLCPHCVSLQTGSHMDPRGNSELLYHNQTVFYRRPCHGEKGTHKGYCLERRLYRVSLACVCVRPRVMG

SEQ ID NO: 922 - protein, 171 aa, synthetic construct
  REGION 1..171: note = IL26 (Q9NPH9) SP+PP+ECD
MLVNFILRCGLLLVTLSLAIAKHKQSSFTKSCYPRGTLSQAVDALYIKAAWLKATIPEDRIKNIRLLKKKTKKQFMKNCQFQEQLLSFFMEDVFGQLQLQGCKKIRFVEDFHSLRQKLSHCISCASSAREMKSITRMKRIFYRIGNKGIYKAISELDILLSWIKKLLESSQ

SEQ ID NO: 923 - protein, 243 aa, synthetic construct
  REGION 1..243: note = IL27A (Q8NEV9) SP+PP+ECD
MGQTAGDLGWRLSLLLLPLLLVQAGVWGFPRPPGRPQLSLQELRREFTVSLHLARKLLSEVRGQAHRFAESHLPGVNLYLLPLGEQLPDVSLTFQAWRRLSDPERLCFISTTLQPFHALLGGLGTQGRWTNMERMQLWAMRLDLRDLQRHLRFQVLAAGFNLPEEEEEEEEEEEEERKGLLPGALGSALQGPAQVSWPQLLSTYRLLHSLELVLSRAVRELLLLSKAGHSVWPLGFPTLSPQP

SEQ ID NO: 924 - protein, 229 aa, synthetic construct
  REGION 1..229: note = IL27B (Q14213) SP+PP+ECD
MTPQLLLALVLWASCPPCSGRKGPPAALTLPRVQCRASRYPIAVDCSWTLPPAPNSTSPVSFIATYRLGMAARGHSWPCLQQTPTSTSCTITDVQLFSMAPYVLNVTAVHPWGSSSSFVPFITEHIIKPDPPEGVRLSPLAERQLQVQWEPPGSWPFPEIFSLKYWIRYKRQGAARFHRVGPIEATSFILRAVRPRARYYVQVAAQDLTDYGELSDWSLPATATMSLGK

SEQ ID NO: 925 - protein, 200 aa, synthetic construct
  REGION 1..200: note = IL29 (Q8IU54) SP+PP+ECD
MAAAWTVVLVTLVLGLAVAGPVPTSKPTTTGKGCHIGRFKSLSPQELASFKKARDALEESLKLKNWSCSSPVFPGNWDLRLLQVRERPVALEAELALTLKVLEAAAGPALEDVLDQPLHTLHHILSQLQACIQPQPTAGPRPRGRLHHWLHRLQEAPKKESAGCLEASVTFNLFRLLTRDLKYVADGNLCLRTSTHPEST

SEQ ID NO: 926 - protein, 164 aa, synthetic construct
  REGION 1..164: note = IL31 (Q6EBC2) SP+PP+ECD
MASHSGPSTSVLFLFCCLGGWLASHTLPVRLLRPSDDVQKIVEELQSLSKMLLKDVEEEKGVLVSQNYTLPCLSPDAQPPNNIHSPAIRAYLKTIRQLDNKSVIDEIIEHLDKLIFQDAPETNISVPTDTHECKRFILTISQQFSECMDLALKSLTSGAQQATT

SEQ ID NO: 927 - protein, 234 aa, synthetic construct
  REGION 1..234: note = IL32 (P24001) SP+PP+ECD
MCFPKVLSDDMKKLKARMVMLLPTSAQGLGAWVSACDTEDTVGHLGPWRDKDPALWCQLCLSSQHQAIERFYDKMQNAESGRGQVMSSLAELEDDFKEGYLETVAAYYEEQHPELTPLLEKERDGLRCRGNRSPVPDVEDPATEEPGESFCDKVMRWFQAMLQRLQTWWHGVLAWVKEKVVALVHAVQALWKQFQSFCCSLSELFMSSFQSYGAPRGDKEELTPQKCSEPQSSK

SEQ ID NO: 928 - protein, 270 aa, synthetic construct
  REGION 1..270: note = IL33 (O95760) SP+PP+ECD
MKPKMKYSTNKISTAKWKNTASKALCFKLGKSQQKAKEVCPMYFMKLRSGLMIKKEACYFRRETTKRPSLKTGRKHKRHLVLAACQQQSTVECFAFGISGVQKYTRALHDSSITGISPITEYLASLSTYNDQSITFALEDESYEIYVEDLKKDEKKDKVLLSYYESQHPSNESGDGVDGKMLMVTLSPTKDFWLHANNKEHSVELHKCEKPLPDQAFFVLHNMHSNCVSFECKTDPGVFIGVKDNHLALIKVDSSENLCTENILFKLSET

SEQ ID NO: 929 - protein, 242 aa, synthetic construct
  REGION 1..242: note = IL34 (Q6ZMJ4) SP+PP+ECD
MPRGFTWLRYLGIFLGVALGNEPLEMWPLTQNEECTVTGFLRDKLQYRSRLQYMKHYFPINYKISVPYEGVFRIANVTRLQRAQVSERELRYLWVLVSLSATESVQDVLLEGHPSWKYLQEVETLLLNVQQGLTDVEVSPKVESVLSLLNAPGPNLKLVRPKALLDNCFRVMELLYCSCCKQSSVLNWQDCEVPSPQSCSPEPSLQYAATQLYPPPPWSPSSPPHSTGSVRPVRAQGEGLLP

SEQ ID NO: 930 - protein, 158 aa, synthetic construct
  REGION 1..158: note = IL36A (Q9UHA7) SP+PP+ECD
MEKALKIDTPQQGSIQDINHRVWVLQDQTLIAVPRKDRMSPVTIALISCRHVETLEKDRGNPIYLGLNGLNLCLMCAKVGDQPTLQLKEKDIMDLYNQPEPVKSFLFYHSQSGRNSTFESVAFPGWFIAVSSEGGCPLILTQELGKANTTDFGLTMLF

SEQ ID NO: 931 - protein, 164 aa, synthetic construct
  REGION 1..164: note = IL36B (Q9NZH7 ) SP+PP+ECD
MNPQREAAPKSYAIRDSRQMVWVLSGNSLIAAPLSRSIKPVTLHLIACRDTEFSDKEKGNMVYLGIKGKDLCLFCAEIQGKPTLQLKLQGSQDNIGKDTCWKLVGIHTCINLDVRESCFMGTLDQWGIGVGRKKWKSSFQHHHLRKKDKDFSSMRTNIGMPGRM

SEQ ID NO: 932 - protein, 169 aa, synthetic construct
  REGION 1..169: note = IL36G (Q9NZH8 ) SP+PP+ECD
MRGTPGDADGGGRAVYQSMCKPITGTINDLNQQVWTLQGQNLVAVPRSDSVTPVTVAVITCKYPEALEQGRGDPIYLGIQNPEMCLYCEKVGEQPTLQLKEQKIMDLYGQPEPVKPFLFYRAKTGRTSTLESVAFPDWFIASSKRDQPIILTSELGKSYNTAFELNIND

SEQ ID NO: 933 - protein, 218 aa, synthetic construct
  REGION 1..218: note = IL37 (Q9NZH6 ) SP+PP+ECD
MSFVGENSGVKMGSEDWEKDEPQCCLEDPAGSPLEPGPSLPTMNFVHTSPKVKNLNPKKFSIHDQDHKVLVLDSGNLIAVPDKNYIRPEIFFALASSLSSASAEKGSPILLGVSKGEFCLYCDKDKGQSHPSLQLKKEKLMKLAAQKESARRPFIFYRAQVGSWNMLESAAHPGWFICTSCNCNEPVGVTDKFENRKHIEFSFQPVCKAEMSPSEVSD

SEQ ID NO: 934 - protein, 265 aa, synthetic construct
  REGION 1..265: note = IL40 (Q6UX52 ) SP+PP+ECD
MGLPGLFCLAVLAASSFSKAREEEITPVVSIAYKVLEVFPKGRWVLITCCAPQPPPPITYSLCGTKNIKVAKKVVKTHEPASFNLNVTLKSSPDLLTYFCWASSTSGAHVDSARLQMHWELWSKPVSELRANFTLQDRGAGPRVEMICQASSGSPPITNSLIGKDGQVHLQQRPCHRQPANFSFLPSQTSDWFWCQAANNANVQHSALTVVPPGGDQKMEDWQGPLESPILALPLYRSTRRLSEEEFGGFRIGNGEVRGRKAAAM

SEQ ID NO: 935 - protein, 1227 aa, synthetic construct
  REGION 1..1227: note = ACE (P12821) ECD
LDPGLQPGNFSADEAGAQLFAQSYNSSAEQVLFQSVAASWAHDTNITAENARRQEEAALLSQEFAEAWGQKAKELYEPIWQNFTDPQLRRIIGAVRTLGSANLPLAKRQQYNALLSNMSRIYSTAKVCLPNKTATCWSLDPDLTNILASSRSYAMLLFAWEGWHNAAGIPLKPLYEDFTALSNEAYKQDGFTDTGAYWRSWYNSPTFEDDLEHLYQQLEPLYLNLHAFVRRALHRRYGDRYINLRGPIPAHLLGDMWAQSWENIYDMVVPFPDKPNLDVTSTMLQQGWNATHMFRVAEEFFTSLELSPMPPEFWEGSMLEKPADGREVVCHASAWDFYNRKDFRIKQCTRVTMDQLSTVHHEMGHIQYYLQYKDLPVSLRRGANPGFHEAIGDVLALSVSTPEHLHKIGLLDRVTNDTESDINYLLKMALEKIAFLPFGYLVDQWRWGVFSGRTPPSRYNFDWWYLRTKYQGICPPVTRNETHFDAGAKFHVPNVTPYIRYFVSFVLQFQFHEALCKEAGYEGPLHQCDIYRSTKAGAKLRKVLQAGSSRPWQEVLKDMVGLDALDAQPLLKYFQPVTQWLQEQNQQNGEVLGWPEYQWHPPLPDNYPEGIDLVTDEAEASKFVEEYDRTSQVVWNEYAEANWNYNTNITTETSKILLQKNMQIANHTLKYGTQARKFDVNQLQNTTIKRIIKKVQDLERAALPAQELEEYNKILLDMETTYSVATVCHPNGSCLQLEPDLTNVMATSRKYEDLLWAWEGWRDKAGRAILQFYPKYVELINQAARLNGYVDAGDSWRSMYETPSLEQDLERLFQELQPLYLNLHAYVRRALHRHYGAQHINLEGPIPAHLLGNMWAQTWSNIYDLVVPFPSAPSMDTTEAMLKQGWTPRRMFKEADDFFTSLGLLPVPPEFWNKSMLEKPTDGREVVCHASAWDFYNGKDFRIKQCTTVNLEDLVVAHHEMGHIQYFMQYKDLPVALREGANPGFHEAIGDVLALSVSTPKHLHSLNLLSSEGGSDEHDINFLMKMALDKIAFIPFSYLVDQWRWRVFDGSITKENYNQEWWSLRLKYQGLCPPVPRTQGDFDPGAKFHIPSSVPYIRYFVSFIIQFQFHEALCQAAGHTGPLHKCDIYQSKEAGQRLATAMKLGFSRPWPEAMQLITGQPNMSASAMLSYFKPLLDWLRTENELHGEKLGWPQYNWTPNSARSEGPLPDSGRVSFLGLDLDAQQAR

SEQ ID NO: 936 - protein, 723 aa, synthetic construct; identical to SEQ ID NO: 764
  REGION 1..723: note = ACE2 (Q9BYF1) ECD

SEQ ID NO: 937 - protein, 350 aa, synthetic construct
  REGION 1..350: note = ACP2 (P11117) ECD
RSLRFVTLLYRHGDRSPVKTYPKDPYQEEEWPQGFGQLTKEGMLQHWELGQALRQRYHGFLNTSYHRQEVYVRSTDFDRTLMSAEANLAGLFPPNGMQRFNPNISWQPIPVHTVPITEDRLLKFPLGPCPRYEQLQNETRQTPEYQNESSRNAQFLDMVANETGLTDLTLETVWNVYDTLFCEQTHGLRLPPWASPQTMQRLSRLKDFSFRFLFGIYQQAEKARLQGGVLLAQIRKNLTLMATTSQLPKLLVYSAHDTTLVALQMALDVYNGEQAPYASCHIFELYQEDSGNFSVEMYFRNESDKAPWPLSLPGCPHRCPLQDFLRLTEPVVPKDWQQECQLASGPADTE

SEQ ID NO: 938 - protein, 367 aa, synthetic construct
  REGION 1..367: note = ACPT (Q9BZG2) ECD
LPEGPLVFVALVFRHGDRAPLASYPMDPHKEVASTLWPRGLGQLTTEGVRQQLELGRFLRSRYEAFLSPEYRREEVYIRSTDFDRTLESAQANLAGLFPEAAPGSPEARWRPIPVHTVPVAEDKLLRFPMRSCPRYHELLREATEAAEYQEALEGWTGFLSRLENFTGLSLVGEPLRRAWKVLDTLMCQQAHGLPLPAWASPDVLRTLAQISALDIGAHVGPPRAAEKAQLTGGILLNAILANFSRVQRLGLPLKMVMYSAHDSTLLALQGALGLYDGHTPPYAACLGFEFRKHLGNPAKDGGNVTVSLFYRNDSAHLPLPLSLPGCPAPCPLGRFYQLTAPARPPAHGVSCHGPYEAAIPPAPVVP

SEQ ID NO: 939 - protein, 103 aa, synthetic construct
  REGION 1..103: note = ACVR1 (Q04771) ECD
MEDEKPKVNPKLYMCVCEGLSCGNEDHCEGQQCFSSLSINDGFHVYQKGCFQVYEQGKMTCKTPPSPGQAVECCQGDWCNRNITAQLPTKGKSFPGTQNFHLE

SEQ ID NO: 940 - protein, 103 aa, synthetic construct
  REGION 1..103: note = ACVR1B (P36896) ECD
SGPRGVQALLCACTSCLQANYTCETDGACMVSIFNLDGMEHHVRTCIPKVELVPAGKPFYCLSSEDLRNTHCCYTDYCNRIDLRVPSGHLKEPEHPSMWGPVE

SEQ ID NO: 941 - protein, 92 aa, synthetic construct
  REGION 1..92: note = ACVR1C (Q8NER5) ECD
LSPGLKCVCLLCDSSNFTCQTEGACWASVMLTNGKEQVIKSCVSLPELNAQVFCHSSNNVTKTECCFTDFCNNITLHLPTASPNAPKLGPME

SEQ ID NO: 942 - protein, 116 aa, synthetic construct
  REGION 1..116: note = ACVR2A (P27037) ECD
AILGRSETQECLFFNANWEKDRTNQTGVEPCYGDKDKRRHCFATWKNISGSIEIVKQGCWLDDINCYDRTDCVEKKDSPEVYFCCCEGNMCNEKFSYFPEMEVTQPTSNPVTPKPP

SEQ ID NO: 943 - protein, 119 aa, synthetic construct
  REGION 1..119: note = ACVR2B (Q13705) ECD
SGRGEAETRECIYYNANWELERTNQSGLERCEGEQDKRLHCYASWRNSSGTIELVKKGCWLDDFNCYDRQECVATEENPQVYFCCCEGNFCNERFTHLPEAGGPEVTYEPPPTAPTLLT

SEQ ID NO: 944 - protein, 97 aa, synthetic construct
  REGION 1..97: note = ACVRL1 (P37023) ECD
DPVKPSRGPLVTCTCESPHCKGPTCRGAWCTVVLVREEGRHPQEHRGCGNLHRELCRGRPTEFVNHYCCDSHLCNHNVSLVLEATQPPSEQPGTDGQ

SEQ ID NO: 945 - protein, 653 aa, synthetic construct
  REGION 1..653: note = ADAM10 (O14672) ECD
QYGNPLNKYIRHYEGLSYNVDSLHQKHQRAKRAVSHEDQFLRLDFHAHGRHFNLRMKRDTSLFSDEFKVETSNKVLDYDTSHIYTGHIYGEEGSFSHGSVIDGRFEGFIQTRGGTFYVEPAERYIKDRTLPFHSVIYHEDDINYPHKYGPQGGCADHSVFERMRKYQMTGVEEVTQIPQEEHAANGPELLRKKRTTSAEKNTCQLYIQTDHLFFKYYGTREAVIAQISSHVKAIDTIYQTTDFSGIRNISFMVKRIRINTTADEKDPTNPFRFPNIGVEKFLELNSEQNHDDYCLAYVFTDRDFDDGVLGLAWVGAPSGSSGGICEKSKLYSDGKKKSLNTGIITVQNYGSHVPPKVSHITFAHEVGHNFGSPHDSGTECTPGESKNLGQKENGNYIMYARATSGDKLNNNKFSLCSIRNISQVLEKKRNNCFVESGQPICGNGMVEQGEECDCGYSDQCKDECCFDANQPEGRKCKLKPGKQCSPSQGPCCTAQCAFKSKSEKCRDDSDCAREGICNGFTALCPASDPKPNFTDCNRHTQVCINGQCAGSICEKYGLEECTCASSDGKDDKELCHVCCMKKMDPSTCASTGSVQWSRHFSGRTITLQPGSPCNDFRGYCDVFMRCRLVDADGPLARLKKAIFSPELYENIAE

SEQ ID NO: 946 - protein, 509 aa, synthetic construct
  REGION 1..509: note = ADAM11 (O75078) ECD
QVRRGHPTVHSETKYVELIVINDHQLFEQMRQSVVLTSNFAKSVVNLADVIYKEQLNTRIVLVAMETWADGDKIQVQDDLLETLARLMVYRREGLPEPSDATHLFSGRTFQSTSSGAAYVGGICSLSHGGGVNEYGNMGAMAVTLAQTLGQNLGMMWNKHRSSAGDCKCPDIWLGCIMEDTGFYLPRKFSRCSIDEYNQFLQEGGGSCLFNKPLKLLDPPECGNGFVEAGEECDCGSVQECSRAGGNCCKKCTLTHDAMCSDGLCCRRCKYEPRGVSCREAVNECDIAETCTGDSSQCPPNLHKLDGYYCDHEQGRCYGGRCKTRDRQCQVLWGHAAADRFCYEKLNVEGTERGSCGRKGSGWVQCSKQDVLCGFLLCVNISGAPRLGDLVGDISSVTFYHQGKELDCRGGHVQLADGSDLSYVEDGTACGPNMLCLDHRCLPASAFNFSTCPGSGERRICSHHGVCSNEGKCICQPDWTGKDCSIHNPLPTSPPTGETERYKGPSGTN

SEQ ID NO: 947 - protein, 501 aa, synthetic construct
  REGION 1..501: note = ADAM12 (O43184) ECD
ETLKATKYVELVIVADNREFQRQGKDLEKVKQRLIEIANHVDKFYRPLNIRIVLVGVEVWNDMDKCSVSQDPFTSLHEFLDWRKMKLLPRKSHDNAQLVSGVYFQGTTIGMAPIMSMCTADQSGGIVMDHSDNPLGAAVTLAHELGHNFGMNHDTLDRGCSCQMAVEKGGCIMNASTGYPFPMVFSSCSRKDLETSLEKGMGVCLFNLPEVRESFGGQKCGNRFVEEGEECDCGEPEECMNRCCNATTCTLKPDAVCAHGLCCEDCQLKPAGTACRDSSNSCDLPEFCTGASPHCPANVYLHDGHSCQDVDGYCYNGICQTHEQQCVTLWGPGAKPAPGICFERVNSAGDPYGNCGKVSKSSFAKCEMRDAKCGKIQCQGGASRPVIGTNAVSIETNIPLQQGGRILCRGTHVYLGDDMPDPGLVLAGTKCADGKICLNRQCQNISVFGVHECAMQCHGRGVCNNRKNCHCEAHWAPPFCDKFGFGGSTDSGPIRQADNQG

SEQ ID NO: 948 - protein, 490 aa, synthetic construct
  REGION 1..490: note = ADAM15 (Q13444) ECD
DVVTETKTVELVIVADHSEAQKYRDFQHLLNRTLEVALLLDTFFRPLNVRVALVGLEAWTQRDLVEISPNPAVTLENFLHWRRAHLLPRLPHDSAQLVTGTSFSGPTVGMAIQNSICSPDFSGGVNMDHSTSILGVASSIAHELGHSLGLDHDLPGNSCPCPGPAPAKTCIMEASTDFLPGLNFSNCSRRALEKALLDGMGSCLFERLPSLPPMAAFCGNMFVEPGEQCDCGFLDDCVDPCCDSLTCQLRPGAQCASDGPCCQNCQLRPSGWQCRPTRGDCDLPEFCPGDSSQCPPDVSLGDGEPCAGGQAVCMHGRCASYAQQCQSLWGPGAQPAAPLCLQTANTRGNAFGSCGRNPSGSYVSCTPRDAICGQLQCQTGRTQPLLGSIRDLLWETIDVNGTELNCSWVHLDLGSDVAQPLLTLPGTACGPGLVCIDHRCQRVDLLGAQECRSKCHGHGVCDSNRHCYCEEGWAPPDCTTQLKATSSLTT

SEQ ID NO: 949 - protein, 457 aa, synthetic construct
  REGION 1..457: note = ADAM17 (P78536) ECD
RADPDPMKNTCKLLVVADHRFYRYMGRGEESTTTNYLIELIDRVDDIYRNTSWDNAGFKGYGIQIEQIRILKSPQEVKPGEKHYNMAKSYPNEEKDAWDVKMLLEQFSFDIAEEASKVCLAHLFTYQDFDMGTLGLAYVGSPRANSHGGVCPKAYYSPVGKKNIYLNSGLTSTKNYGKTILTKEADLVTTHELGHNFGAEHDPDGLAECAPNEDQGGKYVMYPIAVSGDHENNKMFSNCSKQSIYKTIESKAQECFQERSNKVCGNSRVDEGEECDPGIMYLNNDTCCNSDCTLKEGVQCSDRNSPCCKNCQFETAQKKCQEAINATCKGVSYCTGNSSECPPPGNAEDDTVCLDLGKCKDGKCIPFCEREQQLESCACNETDNSCKVCCRDLSGRCVPYVDAEQKNLFLRKGKPCTVGFCDMNGKCEKRVQDVIERFWDFIDQLSINTFGKFLADN

SEQ ID NO: 950 - protein, 511 aa, synthetic construct
  REGION 1..511: note = ADAM18 (Q9Y3Q7) ECD
NLSKLLPQYLEIYIIVEKALYDYMGSEMMAVTQKIVQVIGLVNTMFTQFKLTVILSSLELWSNENQISTSGDADDILQRFLAWKRDYLILRPHDIAYLLVYRKHPKYVGATFPGTVCNKSYDAGIAMYPDAIGLEGFSVIIAQLLGLNVGLTYDDITQCFCLRATCIMNHEAVSASGRKIFSNCSMHDYRYFVSKFETKCLQKLSNLQPLHQNQPVCGNGILESNEECDCGNKNECQFKKCCDYNTCKLKGSVKCGSGPCCTSKCELSIAGTPCRKSIDPECDFTEYCNGTSSNCVPDTYALNGRLCKLGTAYCYNGQCQTTDNQCAKIFGKGAQGAPFACFKEVNSLHERSENCGFKNSQPLPCERKDVLCGKLACVQPHKNANKSDAQSTVYSYIQDHVCVSIATGSSMRSDGTDNAYVADGTMCGPEMYCVNKTCRKVHLMGYNCNATTKCKGKGICNNFGNCQCFPGHRPPDCKFQFGSPGGSIDDGNFQKSGDFYTEKGYNTHWNN

SEQ ID NO: 951 - protein, 497 aa, synthetic construct
  REGION 1..497: note = ADAM19 (Q9H013) ECD
REDLNSMKYVELYLVADYLEFQKNRRDQDATKHKLIEIANYVDKFYRSLNIRIALVGLEVWTHGNMCEVSENPYSTLWSFLSWRRKLLAQKYHDNAQLITGMSFHGTTIGLAPLMAMCSVYQSGGVNMDHSENAIGVAATMAHEMGHNFGMTHDSADCCSASAADGGCIMAAATGHPFPKVFNGCNRRELDRYLQSGGGMCLSNMPDTRMLYGGRRCGNGYLEDGEECDCGEEEECNNPCCNASNCTLRPGAECAHGSCCHQCKLLAPGTLCREQARQCDLPEFCTGKSPHCPTNFYQMDGTPCEGGQAYCYNGMCLTYQEQCQQLWGPGARPAPDLCFEKVNVAGDTFGNCGKDMNGEHRKCNMRDAKCGKIQCQSSEARPLESNAVPIDTTIIMNGRQIQCRGTHVYRGPEEEGDMLDPGLVMTGTKCGYNHICFEGQCRNTSFFETEGCGKKCNGHGVCNNNQNCHCLPGWAPPFCNTPGHGGSIDSGPMPPES

SEQ ID NO: 952 - protein, 512 aa, synthetic construct
  REGION 1..512: note = ADAM2 (Q99965) ECD
DFAKYIEMHVIVEKQLYNHMGSDTTVVAQKVFQLIGLTNAIFVSFNITIILSSLELWIDENKIATTGEANELLHTFLRWKTSYLVLRPHDVAFLLVYREKSNYVGATFQGKMCDANYAGGVVLHPRTISLESLAVILAQLLSLSMGITYDDINKCQCSGAVCIMNPEAIHFSGVKIFSNCSFEDFAHFISKQKSQCLHNQPRLDPFFKQQAVCGNAKLEAGEECDCGTEQDCALIGETCCDIATCRFKAGSNCAEGPCCENCLFMSKERMCRPSFEECDLPEYCNGSSASCPENHYVQTGHPCGLNQWICIDGVCMSGDKQCTDTFGKEVEFGPSECYSHLNSKTDVSGNCGISDSGYTQCEADNLQCGKLICKYVGKFLLQIPRATIIYANISGHLCIAVEFASDHADSQKMWIKDGTSCGSNKVCRNQRCVSSSYLGYDCTTDKCNDRGVCNNKKHCHCSASYLPPDCSVQSDLWPGGSIDSGNFPPVAIPARLPERRYIENIYHSKPMR

SEQ ID NO: 953 - protein, 487 aa, synthetic construct
  REGION 1..487: note = ADAM20 (O43506) ECD
RFVELVVVVDNIRYLFSQSNATTVQHEVFNVVNIVDSFYHPLEVDVILTGIDIWTASNPLPTSGDLDNVLEDFSIWKNYNLNNRLQHDVAHLFIKDTQGMKLGVAYVKGICQNPFNTGVDVFEDNRLVVFAITLGHELGHNLGMQHDTQWCVCELQWCIMHAYRKVTTKFSNCSYAQYWDSTISSGLCIQPPPYPGNIFRLKYCGNLVVEEGEECDCGTIRQCAKDPCCLLNCTLHPGAACAFGICCKDCKFLPSGTLCRQQVGECDLPEWCNGTSHQCPDDVYVQDGISCNVNAFCYEKTCNNHDIQCKEIFGQDARSASQSCYQEINTQGNRFGHCGIVGTTYVKCWTPDIMCGRVQCENVGVIPNLIEHSTVQQFHLNDTTCWGTDYHLGMAIPDIGEVKDGTVCGPEKICIRKKCASMVHLSQACQPKTCNMRGICNNKQHCHCNHEWAPPYCKDKGYGGSADSGPPPKNNMEGLNVMGKLRY

SEQ ID NO: 954 - protein, 485 aa, synthetic construct
  REGION 1..485: note = ADAM21 (Q9UKJ8) ECD
PKSAGDWWTHAWFLELVVVVNHDFFIYSQSNISKVQEDVFLVVNIVDSMYKQLGTYIILIGIEIWNQGNVFPMTSIEQVLNDFSQWKQISLSQLQHDAAHMFIKNSLISILGLAYVAGICRPPIDCGVDNFQGDTWSLFANTVAHELGHTLGMQHDEEFCFCGERGCIMNTFRVPAEKFTNCSYADFMKTTLNQGSCLHNPPRLGEIFMLKRCGNGVVEREEQCDCGSVQQCEQDACCLLNCTLRPGAACAFGLCCKDCKFMPSGELCRQEVNECDLPEWCNGTSHQCPEDRYVQDGIPCSDSAYCYQKRCNNHDQHCREIFGKDAKSASQNCYKEINSQGNRFGHCGINGTTYLKCHISDVFCGRVQCENVRDIPLLQDHFTLQHTHINGVTCWGIDYHLRMNISDIGEVKDGTVCGPGKICIHKKCVSLSVLSHVCLPETCNMKGICNNKHHCHCGYGWSPPYCQHRGYGGSIDSGPASAKRG

SEQ ID NO: 955 - protein, 514 aa, synthetic construct
  REGION 1..514: note = ADAM22 (Q9P0K1) ECD
SKRQLRRYPRNVEEETKYIELMIVNDHLMFKKHRLSVVHTNTYAKSVVNMADLIYKDQLKTRIVLVAMETWATDNKFAISENPLITLREFMKYRRDFIKEKSDAVHLFSGSQFESSRSGAAYIGGICSLLKGGGVNEFGKTDLMAVTLAQSLAHNIGIISDKRKLASGECKCEDTWSGCIMGDTGYYLPKKFTQCNIEEYHDFLNSGGGACLFNKPSKLLDPPECGNGFIETGEECDCGTPAECVLEGAECCKKCTLTQDSQCSDGLCCKKCKFQPMGTVCREAVNDCDIRETCSGNSSQCAPNIHKMDGYSCDGVQGICFGGRCKTRDRQCKYIWGQKVTASDKYCYEKLNIEGTEKGNCGKDKDTWIQCNKRDVLCGYLLCTNIGNIPRLGELDGEITSTLVVQQGRTLNCSGGHVKLEEDVDLGYVEDGTPCGPQMMCLEHRCLPVASFNFSTCLSSKEGTICSGNGVCSNELKCVCNRHWIGSDCNTYFPHNDDAKTGITLSGNGVAGTN

SEQ ID NO: 956 - protein, 506 aa, synthetic construct
  REGION 1..506: note = ADAM23 (O75077) ECD
AVNPSRGIFEEMKYLELMIVNDHKTYKKHRSSHAHTNNFAKSVVNLVDSIYKEQLNTRVVLVAVETWTEKDQIDITTNPVQMLHEFSKYRQRIKQHADAVHLISRVTFHYKRSSLSYFGGVCSRTRGVGVNEYGLPMAVAQVLSQSLAQNLGIQWEPSSRKPKCDCTESWGGCIMEETGVSHSRKFSKCSILEYRDFLQRGGGACLFNRPTKLFEPTECGNGYVEAGEECDCGFHVECYGLCCKKCSLSNGAHCSDGPCCNNTSCLFQPRGYECRDAVNECDITEYCTGDSGQCPPNLHKQDGYACNQNQGRCYNGECKTRDNQCQYIWGTKAAGSDKFCYEKLNTEGTEKGNCGKDGDRWIQCSKHDVFCGFLLCTNLTRAPRIGQLQGEIIPTSFYHQGRVIDCSGAHVVLDDDTDVGYVEDGTPCGPSMMCLDRKCLQIQALNMSSCPLDSKGKVCSGHGVCSNEATCICDFTWAGTDCSIRDPVRNLHPPKDEGPKGPSATN

SEQ ID NO: 957 - protein, 467 aa, synthetic construct
  REGION 1..467: note = ADAM28 (Q9UKQ2) ECD
VQEHEKYIEYYLVLDNGEFKRYNENQDEIRKRVFEMANYVNMLYKKLNTHVALVGMEIWTDKDKIKITPNASFTLENFSKWRGSVLSRRKRHDIAQLITATELAGTTVGLAFMSTMCSPYSVGVVQDHSDNLLRVAGTMAHEMGHNFGMFHDDYSCKCPSTICVMDKALSFYIPTDFSSCSRLSYDKFFEDKLSNCLFNAPLPTDIISTPICGNQLVEMGEDCDCGTSEECTNICCDAKTCKIKATFQCALGECCEKCQFKKAGMVCRPAKDECDLPEMCNGKSGNCPDDRFQVNGFPCHHGKGHCLMGTCPTLQEQCTELWGPGTEVADKSCYNRNEGGSKYGYCRRVDDTLIPCKANDTMCGKLFCQGGSDNLPWKGRIVTFLTCKTFDPEDTSQEIGMVANGTKCGDNKVCINAECVDIEKAYKSTNCSSKCKGHAVCDHELQCQCEEGWIPPDCDDSSVVFHF

SEQ ID NO: 958 - protein, 481 aa, synthetic construct
  REGION 1..481: note = ADAM29 (Q9UKF5) ECD
WIHFRIVEIVVVIDNYLYIRYERNDSKLLEDLYVIVNIVDSILDVIGVKVLLFGLEIWTNKNLIVVDDVRKSVHLYCKWKSENITPRMQHDTSHLFTTLGLRGLSGIGAFRGMCTPHRSCAIVTFMNKTLGTFSIAVAHHLGHNLGMNHDEDTCRCSQPRCIMHEGNPPITKFSNCSYGDFWEYTVERTKCLLETVHTKDIFNVKRCGNGVVEEGEECDCGPLKHCAKDPCCLSNCTLTDGSTCAFGLCCKDCKFLPSGKVCRKEVNECDLPEWCNGTSHKCPDDFYVEDGIPCKERGYCYEKSCHDRNEQCRRIFGAGANTASETCYKELNTLGDRVGHCGIKNATYIKCNISDVQCGRIQCENVTEIPNMSDHTTVHWARFNDIMCWSTDYHLGMKGPDIGEVKDGTECGIDHICIHRHCVHITILNSNCSPAFCNKRGICNNKHHCHCNYLWDPPNCLIKGYGGSVDSGPPPKRKKKK

SEQ ID NO: 959 - protein, 489 aa, synthetic construct
  REGION 1..489: note = ADAM30 (Q9UKF2) ECD
YKHPKYLELILLFDQSRYRFVNNNLSQVIHDAILLTGIMDTYFQDVRMRIHLKALEVWTDFNKIRVGYPELAEVLGRFVIYKKSVLNARLSSDWAHLYLQRKYNDALAWSFGKVCSLEYAGSVSTLLDTNILAPATWSAHELGHAVGMSHDEQYCQCRGRLNCIMGSGRTGFSNCSYISFFKHISSGATCLNNIPGLGYVLKRCGNKIVEDNEECDCGSTEECQKDRCCQSNCKLQPGANCSIGLCCHDCRFRPSGYVCRQEGNECDLAEYCDGNSSSCPNDVYKQDGTPCKYEGRCFRKGCRSRYMQCQSIFGPDAMEAPSECYDAVNLIGDQFGNCEITGIRNFKKCESANSICGRLQCINVETIPDLPEHTTIISTHLQAENLMCWGTGYHLSMKPMGIPDLGMINDGTSCGEGRVCFKKNCVNSSVLQFDCLPEKCNTRGVCNNRKNCHCMYGWAPPFCEEVGYGGSIDSGPPGLLRGAIPSSIW

SEQ ID NO: 960 - protein, 508 aa, synthetic construct
  REGION 1..508: note = ADAM32 (Q8TC27) ECD
KSEPAVPDLFPLYLEMHIVVDKTLYDYWGSDSMIVTNKVIEIVGLANSMFTQFKVTIVLSSLELWSDENKISTVGEADELLQKFLEWKQSYLNLRPHDIAYLLIYMDYPRYLGAVFPGTMCITRYSAGVALYPKEITLEAFAVIVTQMLALSLGISYDDPKKCQCSESTCIMNPEVVQSNGVKTFSSCSLRSFQNFISNVGVKCLQNKPQMQKKSPKPVCGNGRLEGNEICDCGTEAQCGPASCCDFRTCVLKDGAKCYKGLCCKDCQILQSGVECRPKAHPECDIAENCNGTSPECGPDITLINGLSCKNNKFICYDGDCHDLDARCESVFGKGSRNAPFACYEEIQSQSDRFGNCGRDRNNKYVFCGWRNLICGRLVCTYPTRKPFHQENGDVIYAFVRDSVCITVDYKLPRTVPDPLAVKNGSQCDIGRVCVNRECVESRIIKASAHVCSQQCSGHGVCDSRNKCHCSPGYKPPNCQIRSKGFSIFPEEDMGSIMERASGKTENT

SEQ ID NO: 961 - protein, 672 aa, synthetic construct
  REGION 1..672: note = ADAM33 (Q9BZ11) ECD
VLQGHIPGQPVTPHWVLDGQPWRTVSLEEPVSKPDMGLVALEAEGQELLLELEKNHRLLAPGYIETHYGPDGQPVVLAPNHTDHCHYQGRVRGFPDSWVVLCTCSGMSGLITLSRNASYYLRPWPPRGSKDFSTHEIFRMEQLLTWKGTCGHRDPGNKAGMTSLPGGPQSRGRREARRTRKYLELYIVADHTLFLTRHRNLNHTKQRLLEVANYVDQLLRTLDIQVALTGLEVWTERDRSRVTQDANATLWAFLQWRRGLWAQRPHDSAQLLTGRAFQGATVGLAPVEGMCRAESSGGVSTDHSELPIGAAATMAHEIGHSLGLSHDPDGCCVEAAAESGGCVMAAATGHPFPRVFSACSRRQLRAFFRKGGGACLSNAPDPGLPVPPALCGNGFVEAGEECDCGPGQECRDLCCFAHNCSLRPGAQCAHGDCCVRCLLKPAGALCRQAMGDCDLPEFCTGTSSHCPPDVYLLDGSPCARGSGYCWDGACPTLEQQCQQLWGPGSHPAPEACFQVVNSAGDAHGNCGQDSEGHFLPCAGRDALCGKLQCQGGKPSLLAPHMVPVDSTVHLDGQEVTCRGALALPSAQLDLLGLGLVEPGTQCGPRMVCQSRRCRKNAFQELQRCLTACHSHGVCNSNHNCHCAPGWAPPFCDKPGFGGSMDSGPVQAENHDT

SEQ ID NO: 962 - protein, 650 aa, synthetic construct
  REGION 1..650: note = ADAM7 (Q9H2U9) ECD
KFILGVEGQQLVRPKKLPLIQKRDTGHTHDDDILKTYEEELLYEIKLNRKTLVLHLLRSREFLGSNYSETFYSMKGEAFTRHPQIMDHCFYQGSIVHEYDSAASISTCNGLRGFFRINDQRYLIEPVKYSDEGEHLVFKYNLRVPYGANYSCTELNFTRKTVPGDNESEEDSKIKGIHDEKYVELFIVADDTVYRRNGHPHNKLRNRIWGMVNFVNMIYKTLNIHVTLVGIEIWTHEDKIELYSNIETTLLRFSFWQEKILKTRKDFDHVVLLSGKWLYSHVQGISYPGGMCLPYYSTSIIKDLLPDTNIIANRMAHQLGHNLGMQHDEFPCTCPSGKCVMDSDGSIPALKFSKCSQNQYHQYLKDYKPTCMLNIPFPYNFHDFQFCGNKKLDEGEECDCGPAQECTNPCCDAHTCVLKPGFTCAEGECCESCQIKKAGSICRPAKDECDFPEMCTGHSPACPKDQFRVNGFPCKNSEGYCFMGKCPTREDQCSELFDDEAIESHDICYKMNTKGNKFGYCKNKENRFLPCEEKDVRCGKIYCTGGELSSLLGEDKTYHLKDPQKNATVKCKTIFLYHDSTDIGLVASGTKCGEGMVCNNGECLNMEKVYISTNCPSQCNENPVDGHGLQCHCEEGQAPVACEETLHVTN

SEQ ID NO: 963 - protein, 639 aa, synthetic construct
  REGION 1..639: note = ADAM8 (P78325) ECD
IAPSRPWALMEQYEVVLPWRLPGPRVRRALPSHLGLHPERVSYVLGATGHNFTLHLRKNRDLLGSGYTETYTAANGSEVTEQPRGQDHCFYQGHVEGYPDSAASLSTCAGLRGFFQVGSDLHLIEPLDEGGEGGRHAVYQAEHLLQTAGTCGVSDDSLGSLLGPRTAAVFRPRPGDSLPSRETRYVELYVVVDNAEFQMLGSEAAVRHRVLEVVNHVDKLYQKLNFRVVLVGLEIWNSQDRFHVSPDPSVTLENLLTWQARQRTRRHLHDNVQLITGVDFTGTTVGFARVSAMCSHSSGAVNQDHSKNPVGVACTMAHEMGHNLGMDHDENVQGCRCQERFEAGRCIMAGSIGSSFPRMFSDCSQAYLESFLERPQSVCLANAPDLSHLVGGPVCGNLFVERGEQCDCGPPEDCRNRCCNSTTCQLAEGAQCAHGTCCQECKVKPAGELCRPKKDMCDLEEFCDGRHPECPEDAFQENGTPCSGGYCYNGACPTLAQQCQAFWGPGGQAAEESCFSYDILPGCKASRYRADMCGVLQCKGGQQPLGRAICIVDVCHALTTEDGTAYEPVPEGTRCGPEKVCWKGRCQDLHVYRSSNCSAQCHNHGVCNHKQECHCHAGWAPPHCAKLLTEVHAASGSLP

SEQ ID NO: 964 - protein, 669 aa, synthetic construct
  REGION 1..669: note = ADAM9 (Q13443) ECD
AARPGFQQTSHLSSYEIITPWRLTRERREAPRPYSKQVSYVIQAEGKEHIIHLERNKDLLPEDFVVYTYNKEGTLITDHPNIQNHCHYRGYVEGVHNSSIALSDCFGLRGLLHLENASYGIEPLQNSSHFEHIIYRMDDVYKEPLKCGVSNKDIEKETAKDEEEEPPSMTQLLRRRRAVLPQTRYVELFIVVDKERYDMMGRNQTAVREEMILLANYLDSMYIMLNIRIVLVGLEIWTNGNLINIVGGAGDVLGNFVQWREKFLITRRRHDSAQLVLKKGFGGTAGMAFVGTVCSRSHAGGINVFGQITVETFASIVAHELGHNLGMNHDDGRDCSCGAKSCIMNSGASGSRNFSSCSAEDFEKLTLNKGGNCLLNIPKPDEAYSAPSCGNKLVDAGEECDCGTPKECELDPCCEGSTCKLKSFAECAYGDCCKDCRFLPGGTLCRGKTSECDVPEYCNGSSQFCQPDVFIQNGYPCQNNKAYCYNGMCQYYDAQCQVIFGSKAKAAPKDCFIEVNSKGDRFGNCGFSGNEYKKCATGNALCGKLQCENVQEIPVFGIVPAIIQTPSRGTKCWGVDFQLGSDVPDPGMVNEGTKCGAGKICRNFQCVDASVLNYDCDVQKKCHGHGVCNSNKNCHCENGWAPPNCETKGYGGSVDSGPTYNEMNTALRD

SEQ ID NO: 965 - protein, 320 aa, synthetic construct
  REGION 1..320: note = AGER (Q15109) ECD
AQNITARIGEPLVLKCKGAPKKPPQRLEWKLNTGRTEAWKVLSPQGGGPWDSVARVLPNGSLFLPAVGIQDEGIFRCQAMNRNGKETKSNYRVRVYQIPGKPEIVDSASELTAGVPNKVGTCVSEGSYPAGTLSWHLDGKPLVPNEKGVSVKEQTRRHPETGLFTLQSELMVTPARGGDPRPTFSCSFSPGLPRHRALRTAPIQPRVWEPVPLEEVQLVVEPEGGAVAPGGTVTLTCEVPAQPSPQIHWMKDGVPLPLPPSPVLILPEIGPQDQGTYSCVATHSSHGPQESRAVSISIIEPGEEGPTAGSVGGSGLGTLA

SEQ ID NO: 966 - protein, 500 aa, synthetic construct
  REGION 1..500: note = ALCAM (Q13740) ECD
WYTVNSAYGDTIIIPCRLDVPQNLMFGKWKYEKPDGSPVFIAFRSSTKKSVQYDDVPEYKDRLNLSENYTLSISNARISDEKRFVCMLVTEDNVFEAPTIVKVFKQPSKPEIVSKALFLETEQLKKLGDCISEDSYPDGNITWYRNGKVLHPLEGAVVIIFKKEMDPVTQLYTMTSTLEYKTTKADIQMPFTCSVTYYGPSGQKTIHSEQAVFDIYYPTEQVTIQVLPPKNAIKEGDNITLKCLGNGNPPPEEFLFYLPGQPEGIRSSNTYTLTDVRRNATGDYKCSLIDKKSMIASTAITVHYLDLSLNPSGEVTRQIGDALPVSCTISASRNATVVWMKDNIRLRSSPSFSSLHYQDAGNYVCETALQEVEGLKKRESLTLIVEGKPQIKMTKKTDPSGLSKTIICHVEGFPKPAIQWTITGSGSVINQTEESPYINGRYYSKIIISPEENVTLTCTAENQLERTVNSLNVSAISIPEHDEADEISDENREKVNDQAK

SEQ ID NO: 967 - protein, 1020 aa, synthetic construct
  REGION 1..1020: note = ALK (Q9UM73) ECD
VGSGMGTGQRAGSPAAGPPLQPREPLSYSRLQRKSLAVDFVVPSLFRVYARDLLLPPSSSELKAGRPEARGSLALDCAPLLRLLGPAPGVSWTAGSPAPAEARTLSRVLKGGSVRKLRRAKQLVLELGEEAILEGCVGPPGEAAVGLLQFNLSELFSWWIRQGEGRLRIRLMPEKKASEVGREGRLSAAIRASQPRLLFQIFGTGHSSLESPTNMPSPSPDYFTWNLTWIMKDSFPFLSHRSRYGLECSFDFPCELEYSPPLHDLRNQSWSWRRIPSEEASQMDLLDGPGAERSKEMPRGSFLLLNTSADSKHTILSPWMRSSSEHCTLAVSVHRHLQPSGRYIAQLLPHNEAAREILLMPTPGKHGWTVLQGRIGRPDNPFRVALEYISSGNRSLSAVDFFALKNCSEGTSPGSKMALQSSFTCWNGTVLQLGQACDFHQDCAQGEDESQMCRKLPVGFYCNFEDGFCGWTQGTLSPHTPQWQVRTLKDARFQDHQDHALLLSTTDVPASESATVTSATFPAPIKSSPCELRMSWLIRGVLRGNVSLVLVENKTGKEQGRMVWHVAAYEGLSLWQWMVLPLLDVSDRFWLQMVAWWGQGSRAIVAFDNISISLDCYLTISGEDKILQNTAPKSRNLFERNPNKELKPGENSPRQTPIFDPTVHWLFTTCGASGPHGPTQAQCNNAYQNSNLSVEVGSEGPLKGIQIWKVPATDTYSISGYGAAGGKGGKNTMMRSHGVSVLGIFNLEKDDMLYILVGQQGEDACPSTNQLIQKVCIGENNVIEEEIRVNRSVHEWAGGGGGGGGATYVFKMKDGVPVPLIIAAGGGGRAYGAKTDTFHPERLENNSSVLGLNGNSGAAGGGGGWNDNTSLLWAGKSLQEGATGGHSCPQAMKKWGWETRGGFGGGGGGCSSGGGGGGYIGGNAASNNDPEMDGEDGVSFISPLGILYTPALKVMEGHGEVNIKHYLNCSHCEVDECHMDPESHKVICFCDHGTVLAEDGVSCIVSPTPEPHLPLSLILS

SEQ ID NO: 968 - protein, 132 aa, synthetic construct [sequence omitted]

SEQ ID NO: 969 - protein, 256 aa, synthetic construct
  REGION 1..256: note = AMICA1 (Q86YT9) ECD
LNDLNVSPPELTVHVGDSALMGCVFQSTEDKCIFKIDWTLSPGEHAKDEYVLYYYSNLSVPIGRFQNRVHLMGDILCNDGSLLLQDVQEADQGTYICEIRLKGESQVFKKAVVLHVLPEEPKELMVHVGGLIQMGCVFQSTEVKHVTKVEWIFSGRRAKEEIVFRYYHKLRMSVEYSQSWGHFQNRVNLVGDIFRNDGSIMLQGVRESDGGNYTCSIHLGNLVFKKTIVLHVSPEEPRTLVTPAALRPLVLGGNQL

SEQ ID NO: 970 - protein, 345 aa, synthetic construct
  REGION 1..345: note = AMIGO1 (Q86WK6) ECD
GRAVVSCPAACLCASNILSCSKQQLPNVPHSLPSYTALLDLSHNNLSRLRAEWTPTRLTQLHSLLLSHNHLNFISSEAFSPVPNLRYLDLSSNQLRTLDEFLFSDLQVLEVLLLYNNHIMAVDRCAFDDMAQLQKLYLSQNQISRFPLELVKEGAKLPKLTLLDLSSNKLKNLPLPDLQKLPAWIKNGLYLHNNPLNCDCELYQLFSHWQYRQLSSVMDFQEDLYCMNSKKLHNVFNLSFLNCGEYKERAWEAHLGDTLIIKCDTKQQGMTKVWVTPSNERVLDEVTNGTVSVSKDGSLLFQQVQVEDGGVYTCYAMGETFNETLSVELKVHNFTLHGHHDTLNT

SEQ ID NO: 971 - protein, 359 aa, synthetic construct
  REGION 1..359: note = AMIGO2 (Q86SJ2) ECD
VCPTACICATDIVSCTNKNLSKVPGNLFRLIKRLDLSYNRIGLLDSEWIPVSFAKLNTLILRHNNITSISTGSFSTTPNLKCLDLSSNKLKTVKNAVFQELKVLEVLLLYNNHISYLDPSAFGGLSQLQKLYLSGNFLTQFPMDLYVGRFKLAELMFLDVSYNRIPSMPMHHINLVPGKQLRGIYLHGNPFVCDCSLYSLLVFWYRRHFSSVMDFKNDYTCRLWSDSRHSRQVLLLQDSFMNCSDSIINGSFRALGFIHEAQVGERLMVHCDSKTGNANTDFIWVGPDNRLLEPDKEMENFYVFHNGSLVIESPRFEDAGVYSCIAMNKQRLLNETVDVTINVSNFTVSRSHAHEAFNT

SEQ ID NO: 972 - protein, 364 aa, synthetic construct
  REGION 1..364: note = AMIGO3 (Q86WK7) ECD
TPDSEGFPPRALHNCPYKCICAADLLSCTGLGLQDVPAELPAATADLDLSHNALQRLRPGWLAPLFQLRALHLDHNELDALGRGVFVNASGLRLLDLSSNTLRALGRHDLDGLGALEKLLLFNNRLVHLDEHAFHGLRALSHLYLGCNELASFSFDHLHGLSATHLLTLDLSSNRLGHISVPELAALPAFLKNGLYLHNNPLPCDCRLYHLLQRWHQRGLSAVRDFAREYVCLAFKVPASRVRFFQHSRVFENCSSAPALGLERPEEHLYALVGRSLRLYCNTSVPAMRIAWVSPQQELLRAPGSRDGSIAVLADGSLAIGNVQEQHAGLFVCLATGPRLHHNQTHEYNVSVHFPRPEPEAFNT

SEQ ID NO: 973 - protein, 338 aa, synthetic construct
  REGION 1..338: note = AMN (Q9BXJ7) ECD
VSKLWVPNTDFDVAANWSQNRTPCAGGAVEFPADKMVSVLVQEGHAVSDMLLPLDGELVLASGAGFGVSDVGSHLDCGAGEPAVFRDSDRFSWHDPHLWRSGDEAPGLFFVDAERVPCRHDDVFFPPSASFRVGLGPGASPVRVRSISALGRTFTRDEDLAVFLASRAGRLRFHGPGALSVGPEDCADPSGCVCGNAEAQPWICAALLQPLGGRCPQAACHSALRPQGQCCDLCGAVVLLTHGPAFDLERYRARILDTFLGLPQYHGLQVAVSKVPRSSRLREADTEIQVVLVENGPETGGAGRLARALLADVAENGEALGVLEATMRESGAHVWGSS

SEQ ID NO: 974 - protein, 289 aa, synthetic construct [sequence omitted]

SEQ ID NO: 975 - protein, 285 aa, synthetic construct
  REGION 1..285: note = ANTXR2 (P58335) ECD
QEQPSCRRAFDLYFVLDKSGSVANNWIEIYNFVQQLAERFVSPEMRLSFIVFSSQATIILPLTGDRGKISKGLEDLKRVSPVGETYIHEGLKLANEQIQKAGGLKTSSIIIALTDGKLDGLVPSYAEKEAKISRSLGASVYCVGVLDFEQAQLERIADSKEQVFPVKGGFQALKGIINSILAQSCTEILELQPSSVCVGEEFQIVLSGRGFMLGSRNGSVLCTYTVNETYTTSVKPVSVQLNSMLCPAPILNKAGETLDVSVSFNGGKSVISGSLIVTATECSNG

SEQ ID NO: 976 - protein, 326 aa, synthetic construct
  REGION 1..326: note = ANTXRL (A6NF34) ECD
GSLRYHGPDWRIFHRLALGSRRAHHHHGPGWRQHWRQGQAGHRCQGSFDLYFILDKSGSVNNNWIDLYMWVEETVARFQSPNIRMCFITYSTDGQTVLPLTSDKNRIKNGLDQLQKIVPDGHTFMQAGFRKAIQQIESFNSGNKVPSMIIAMTDGELVAHAFQDTLREAQKARKLGANVYTLGVADYNLDQITAIADSPGHVFAVENGFKALRSTIDALTSKVCLDVTSVEPSSECVGEPYHVVIHGNGFQNLKKRDEVICRFIFNESTIIDEKPTSIDNNSMNCPGPKLEKPGEEYSIEVSLNKGKTFFKSNVSITSTTCGIFRN

SEQ ID NO: 977 - protein, 466 aa, synthetic construct
  REGION 1..466: note = APCDD1 (Q8J025) ECD
LLHPDSRSHPRSLEKSAWRAFKESQCHHMLKHLHNGARITVQMPPTIEGHWVSTGCEVRSGPEFITRSYRFYHNNTFKAYQFYYGSNRCTNPTYTLIIRGKIRLRQASWIIRGGTEADYQLHNVQVICHTEAVAEKLGQQVNRTCPGFLADGGPWVQDVAYDLWREENGCECTKAVNFAMHELQLIRVEKQYLHHNLDHLVEELFLGDIHTDATQRMFYRPSSYQPPLQNAKNHDHACIACRIIYRSDEHHPPILPPKADLTIGLHGEWVSQRCEVRPEVLFLTRHFIFHDNNNTWEGHYYHYSDPVCKHPTFSIYARGRYSRGVLSSRVMGGTEFVFKVNHMKVTPMDAATASLLNVFNGNECGAEGSWQVGIQQDVTHTNGCVALGIKLPHTEYEIFKMEQDARGRYLLFNGQRPSDGSSPDRPEKRATSYQMPLVQCASSSPRAEDLAEDSGSSLYGRAPGRH

SEQ ID NO: 978 - protein, 542 aa, synthetic construct
  REGION 1..542: note = APLP1 (P51693) ECD
SLAGGSPGAAEAPGSAQVAGLCGRLTLHRDLRTGRWEPDPQRSRRCLRDPQRVLEYCRQMYPELQIARVEQATQAIPMERWCGGSRSGSCAHPHHQVVPFRCLPGEFVSEALLVPEGCRFLHQERMDQCESSTRRHQEAQEACSSQGLILHGSGMLLPCGSDRFRGVEYVCCPPPGTPDPSGTAVGDPSTRSWPPGSRVEGAEDEEEEESFPQPVDDYFVEPPQAEEEEETVPPPSSHTLAVVGKVTPTPRPTDGVDIYFGMPGEISEHEGFLRAKMDLEERRMRQINEVMREWAMADNQSKNLPKADRQALNEHFQSILQTLEEQVSGERQRLVETHATRVIALINDQRRAALEGFLAALQADPPQAERVLLALRRYLRAEQKEQRHTLRHYQHVAAVDPEKAQQMRFQVHTHLQVIEERVNQSLGLLDQNPHLAQELRPQIQELLHSEHLGPSELEAPAPGGSSEDKGGLQPPDSKDDTPMTLPKGSTEQDAASPEKEKMNPLEQYERKVNASVPRGFPFHSSEIQRDELAPAGTGVSRE

SEQ ID NO: 979 - protein, 661 aa, synthetic construct
  REGION 1..661: note = APLP2 (Q06481) ECD
GYIEALAANAGTGFAVAEPQIAMFCGKLNMHVNIQTGKWEPDPTGTKSCFETKEEVLQYCQEMYPELQITNVMEANQRVSIDNWCRRDKKQCKSRFVTPFKCLVGEFVSDVLLVPEKCQFFHKERMEVCENHQHWHTVVKEACLTQGMTLYSYGMLLPCGVDQFHGTEYVCCPQTKIIGSVSKEEEEEDEEEEEEEDEEEDYDVYKSEFPTEADLEDFTEAAVDEDDEDEEEGEEVVEDRDYYYDTFKGDDYNEENPTEPGSDGTMSDKEITHDVKAVCSQEAMTGPCRAVMPRWYFDLSKGKCVRFIYGGCGGNRNNFESEDYCMAVCKAMIPPTPLPTNDVDVYFETSADDNEHARFQKAKEQLEIRHRNRMDRVKKEWEEAELQAKNLPKAERQTLIQHFQAMVKALEKEAASEKQQLVETHLARVEAMLNDRRRMALENYLAALQSDPPRPHRILQALRRYVRAENKDRLHTIRHYQHVLAVDPEKAAQMKSQVMTHLHVIEERRNQSLSLLYKVPYVAQEIQEEIDELLQEQRADMDQFTASISETPVDVRVSSEESEEIPPFHPFHPFPALPENEDTQPELYHPMKKGSGVGEQDGGLIGAEEKVINSKNKVDENMVIDETLDVKEMIFNAERVGGLEEERESVGPLREDFSLSS

SEQ ID NO: 980 - protein, 684 aa, synthetic construct
  REGION 1..684: note = APP (P05067) ECD
LEVPTDGNAGLLAEPQIAMFCGRLNMHMNVQNGKWDSDPSGTKTCIDTKEGILQYCQEVYPELQITNVVEANQPVTIQNWCKRGRKQCKTHPHFVIPYRCLVGEFVSDALLVPDKCKFLHQERMDVCETHLHWHTVAKETCSEKSTNLHDYGMLLPCGIDKFRGVEFVCCPLAEESDNVDSADAEEDDSDVWWGGADTDYADGSEDKVVEVAEEEEVAEVEEEEADDDEDDEDGDEVEEEAEEPYEEATERTTSIATTTTTTTESVEEVVREVCSEQAETGPCRAMISRWYFDVTEGKCAPFFYGGCGGNRNNFDTEEYCMAVCGSAMSQSLLKTTQEPLARDPVKLPTTAASTPDAVDKYLETPGDENEHAHFQKAKERLEAKHRERMSQVMREWEEAERQAKNLPKADKKAVIQHFQEKVESLEQEAANERQQLVETHMARVEAMLNDRRRLALENYITALQAVPPRPRHVFNMLKKYVRAEQKDRQHTLKHFEHVRMVDPKKAAQIRSQVMTHLRVIYERMNQSLSLLYNVPAVAEEIQDEVDELLQKEQNYSDDVLANMISEPRISYGNDALMPSLTETKTTVELLPVNGEFSLDDLQPWHSFGADSVPANTENEVEPVDARPAADRGLTTRPGSGLTNIKTEEISEVKMDAEFRHDSGYEVHHQKLVFFAEDVGSNKGA

SEQ ID NO: 981 - protein, 179 aa, synthetic construct
  REGION 1..179: note = AREG (P15514) ECD
SGHYAAGLDLNDTYSGKREPFSGDHSADGFEVTSRSEMSSGSEISPVSEMPSSSEPSSGADYDYSEEYDNEPQIPGYIVDDSVRVEQVVKPPQNKTESENTSDKPKRKKKGGKNGKNRRNRKKKNPCNAEFQNFCIHGECKYIEHLEAVTCKCQQEYFGERCGEKSMKTHSMIDSSLSK

SEQ ID NO: 982 - protein, 169 aa, synthetic construct
  REGION 1..169: note = ATRAID (Q6UW56) ECD
LPEICTQCPGSVQNLSKVAFYCKTTRELMLHARCCLNQKGTILGLDLQNCSLEDPGPNFHQAHTTVIIDLQANPLKGDLANTFRGFTQLQTLILPQHVNCPGGINAWNTITSYIDNQICQGQKNLCNNTGDPEMCPENGSCVPDGPGLLQCVCADGFHGYKCMRQGSFS

SEQ ID NO: 983 - protein, 1196 aa, synthetic construct
  REGION 1..1196: note = ATRN (O75882) ECD
AAAAAAVSGSAAAEAKECDRPCVNGGRCNPGTGQCVCPAGWVGEQCQHCGGRFRLTGSSGFVTDGPGNYKYKTKCTWLIEGQPNRIMRLRFNHFATECSWDHLYVYDGDSIYAPLVAAFSGLIVPERDGNETVPEVVATSGYALLHFFSDAAYNLTGFNITYSFDMCPNNCSGRGECKISNSSDTVECECSENWKGEACDIPHCTDNCGFPHRGICNSSDVRGCSCFSDWQGPGCSVPVPANQSFWTREEYSNLKLPRASHKAVVNGNIMWVVGGYMFNHSDYNMVLAYDLASREWLPLNRSVNNVVVRYGHSLALYKDKIYMYGGKIDSTGNVTNELRVFHIHNESWVLLTPKAKEQYAVVGHSAHIVTLKNGRVVMLVIFGHCPLYGYISNVQEYDLDKNTWSILHTQGALVQGGYGHSSVYDHRTRALYVHGGYKAFSANKYRLADDLYRYDVDTQMWTILKDSRFFRYLHTAVIVSGTMLVFGGNTHNDTSMSHGAKCFSSDFMAYDIACDRWSVLPRPDLHHDVNRFGHSAVLHNSTMYVFGGFNSLLLSDILVFTSEQCDAHRSEAACLAAGPGIRCVWNTGSSQCISWALATDEQEEKLKSECFSKRTLDHDRCDQHTDCYSCTANTNDCHWCNDHCVPRNHSCSEGQISIFRYENCPKDNPMYYCNKKTSCRSCALDQNCQWEPRNQECIALPENICGIGWHLVGNSCLKITTAKENYDNAKLFCRNHNALLASLTTQKKVEFVLKQLRIMQSSQSMSKLTLTPWVGLRKINVSYWCWEDMSPFTNSLLQWMPSEPSDAGFCGILSEPSTRGLKAATCINPLNGSVCERPANHSAKQCRTPCALRTACGDCTSGSSECMWCSNMKQCVDSNAYVASFPFGQCMEWYTMSTCPPENCSGYCTCSHCLEQPGCGWCTDPSNTGKGKCIEGSYKGPVKMPSQAPTGNFYPQPLLNSSMCLEDSRYNWSFIHCPACQCNGHSKCINQSICEKCENLTTGKHCETCISGFYGDPTNGGKCQPCKCNGHASLCNTNTGKCFCTTKGVKGDECQLCEVENRYQGNPLRGTCYYTLLIDYQFTFSLSQEDDRYYTAINFVATPDEQNRDLDMFINASKNFNLNITWAASFSAGTQAGEEMPVVSKTNIKEYKDSFSNEKFDFRNHPNITFFVYVSNFTWPIKIQIAFSQHSNFMDL

SEQ ID NO: 984 - protein, 1178 aa, synthetic construct
  REGION 1..1178: note = ATRNL1 (Q5VV63) ECD
LYAQVSQSKPCERTGSCFSGRCVNSTCLCDPGWVGDQCQHCQGRFKLTEPSGYLTDGPINYKYKTKCTWLIEGYPNAVLRLRFNHFATECSWDHMYVYDGDSIYAPLIAVLSGLIVPEIRGNETVPEVVTTSGYALLHFFSDAAYNLTGFNIFYSINSCPNNCSGHGKCTTSVSVPSQVYCECDKYWKGEACDIPYCKANCGSPDHGYCDLTGEKLCVCNDSWQGPDCSLNVPSTESYWILPNVKPFSPSVGRASHKAVLHGKFMWVIGGYTFNYSSFQMVLNYNLESSIWNVGTPSRGPLQRYGHSLALYQENIFMYGGRIETNDGNVTDELWVFNIHSQSWSTKTPTVLGHGQQYAVEGHSAHIMELDSRDVVMIIIFGYSAIYGYTSSIQEYHISSNTWLVPETKGAIVQGGYGHTSVYDEITKSIYVHGGYKALPGNKYGLVDDLYKYEVNTKTWTILKESGFARYLHSAVLINGAMLIFGGNTHNDTSLSNGAKCFSADFLAYDIACDEWKILPKPNLHRDVNRFGHSAVVINGSMYIFGGFSSVLLNDILVYKPPNCKAFRDEELCKNAGPGIKCVWNKNHCESWESGNTNNILRAKCPPKTAASDDRCYRYADCASCTANTNGCQWCDDKKCISANSNCSMSVKNYTKCHVRNEQICNKLTSCKSCSLNLNCQWDQRQQECQALPAHLCGEGWSHIGDACLRVNSSRENYDNAKLYCYNLSGNLASLTTSKEVEFVLDEIQKYTQQKVSPWVGLRKINISYWGWEDMSPFTNTTLQWLPGEPNDSGFCAYLERAAVAGLKANPCTSMANGLVCEKPVVSPNQNARPCKKPCSLRTSCSNCTSNGMECMWCSSTKRCVDSNAYIISFPYGQCLEWQTATCSPQNCSGLRTCGQCLEQPGCGWCNDPSNTGRGHCIEGSSRGPMKLIGMHHSEMVLDTNLCPKEKNYEWSFIQCPACQCNGHSTCINNNVCEQCKNLTTGKQCQDCMPGYYGDPTNGGQCTACTCSGHANICHLHTGKCFCTTKGIKGDQCQLCDSENRYVGNPLRGTCYYSLLIDYQFTFSLLQEDDRHHTAINFIANPEQSNKNLDISINASNNFNLNITWSVGSTAGTISGEETSIVSKNNIKEYRDSFSYEKFNFRSNPNITFYVYVSNFSWPIKIQIAFSQHNTIMDL

SEQ ID NO: 985 - protein, 426 aa, synthetic construct
  REGION 1..426: note = AXL (P30530) ECD
APRGTQAEESPFVGNPGNITGARGLTGTLRCQLQVQGEPPEVHWLRDGQILELADSTQTQVPLGEDEQDDWIVVSQLRITSLQLSDTGQYQCLVFLGHQTFVSQPGYVGLEGLPYFLEEPEDRTVAANTPFNLSCQAQGPPEPVDLLWLQDAVPLATAPGHGPQRSLHVPGLNKTSSFSCEAHNAKGVTTSRTATITVLPQQPRNLHLVSRQPTELEVAWTPGLSGIYPLTHCTLQAVLSDDGMGIQAGEPDPPEEPLTSQASVPPHQLRLGSLHPHTPYHIRVACTSSQGPSSWTHWLPVETPEGVPLGPPENISATRNGSQAFVHWQEPRAPLQGTLLGYRLAYQGQDTPEVLMDIGLRQEVTLELQGDGSVSNLTVCVAAYTAAGDGPWSLPVPLEAWRPGQAQPVHQLVKEPSTPAFSWPWW

SEQ ID NO: 986 - protein, 436 aa, synthetic construct
  REGION 1..436: note = BACE1 (P56817) ECD
TQHGIRLPLRSGLGGAPLGLRLPRETDEEPEEPGRRGSFVEMVDNLRGKSGQGYYVEMTVGSPPQTLNILVDTGSSNFAVGAAPHPFLHRYYQRQLSSTYRDLRKGVYVPYTQGKWEGELGTDLVSIPHGPNVTVRANIAAITESDKFFINGSNWEGILGLAYAEIARPDDSLEPFFDSLVKQTHVPNLFSLQLCGAGFPLNQSEVLASVGGSMIIGGIDHSLYTGSLWYTPIRREWYYEVIIVRVEINGQDLKMDCKEYNYDKSIVDSGTTNLRLPKKVFEAAVKSIKAASSTEKFPDGFWLGEQLVCWQAGTTPWNIFPVISLYLMGEVTNQSFRITILPQQYLRPVEDVATSQDDCYKFAISQSSTGTVMGAVIMEGFYVVFDRARKRIGFAVSACHVHDEFRTAAVEGPFVTLDMEDCGYNIPQTDESTLMT

SEQ ID NO: 987 - protein, 453 aa, synthetic construct
  REGION 1..453: note = BACE2 (Q9Y5Z0) ECD
APELAPAPFTLPLRVAAATNRVVAPTPGPGTPAERHADGLALALEPALASPAGAANFLAMVDNLQGDSGRGYYLEMLIGTPPQKLQILVDTGSSNFAVAGTPHSYIDTYFDTERSSTYRSKGFDVTVKYTQGSWTGFVGEDLVTIPKGFNTSFLVNIATIFESENFFLPGIKWNGILGLAYATLAKPSSSLETFFDSLVTQANIPNVFSMQMCGAGLPVAGSGTNGGSLVLGGIEPSLYKGDIWYTPIKEEWYYQIEILKLEIGGQSLNLDCREYNADKAIVDSGTTLLRLPQKVFDAVVEAVARASLIPEFSDGFWTGSQLACWTNSETPWSYFPKISIYLRDENSSRSFRITILPQLYIQPMMGAGLNYECYRFGISPSTNALVIGATVMEGFYVIFDRAQKRVGFAASPCAEIAGAAVSEISGPFSTEDVASNCVPAQSLSEPILWIVSY

SEQ ID NO: 988 - protein, 132 aa, synthetic construct
  REGION 1..132: note = BAMBI (Q13145) ECD
VLLTKGEIRCYCDAAHCVATGYMCKSELSACFSRLLDPQNSNSPLTHGCLDSLASTTDICQAKQARNHSGTTIPTLECCHEDMCNYRGLHDVLSPPRGEASGQGNRYQHDGSRNLITKVQELTSSKELWFRA

SEQ ID NO: 989 - protein, 516 aa, synthetic construct
  REGION 1..516: note = BCAM (P50895) ECD
EVRLSVPPLVEVMRGKSVILDCTPTGTHDHYMLEWFLTDRSGARPRLASAEMQGSELQVTMHDTRGRSPPYQLDSQGRLVLAEAQVGDERDYVCVVRAGAAGTAEATARLNVFAKPEATEVSPNKGTLSVMEDSAQEIATCNSRNGNPAPKITWYRNGQRLEVPVEMNPEGYMTSRTVREASGLLSLTSTLYLRLRKDDRDASFHCAAHYSLPEGRHGRLDSPTFHLTLHYPTEHVQFWVGSPSTPAGWVREGDTVQLLCRGDGSPSPEYTLFRLQDEQEEVLNVNLEGNLTLEGVTRGQSGTYGCRVEDYDAADDVQLSKTLELRVAYLDPLELSEGKVLSLPLNSSAVVNCSVHGLPTPALRWTKDSTPLGDGPMLSLSSITFDSNGTYVCEASLPTVPVLSRTQNFTLLVQGSPELKTAEIEPKADGSWREGDEVTLICSARGHPDPKLSWSQLGGSPAEPIPGRQGWVSSSLTLKVTSALSRDGISCEASNPHGNKRHVFHFGTVSPQTSQA

SEQ ID NO: 990 - protein, 129 aa, synthetic construct
  REGION 1..129: note = BMPR1A (P36894) ECD
QNLDSMLHGTGMKSDSDQKKSENGVTLAPEDTLPFLKCYCSGHCPDDAINNTCITNGHCFAIIEEDDQGETTLASGCMKYEGSDFQCKDSPKAQLRRTIECCRTNLCNQYLQPTLPPVVIGPFFDGSIR

SEQ ID NO: 991 - protein, 124 aa, synthetic construct [sequence omitted]

SEQ ID NO: 992 - protein, 825 aa, synthetic construct
  REGION 1..825: note = BOC (Q9BWV1) ECD
DLNEVPQVTVQPASTVQKPGGTVILGCVVEPPRMNVTWRLNGKELNGSDDALGVLITHGTLVITALNNHTVGRYQCVARMPAGAVASVPATVTLANLQDFKLDVQHVIEVDEGNTAVIACHLPESHPKAQVRYSVKQEWLEASRGNYLIMPSGNLQIVNASQEDEGMYKCAAYNPVTQEVKTSGSSDRLRVRRSTAEAARIIYPPEAQTIIVTKGQSLILECVASGIPPPRVTWAKDGSSVTGYNKTRFLLSNLLIDTTSEEDSGTYRCMADNGVGQPGAAVILYNVQVFEPPEVTMELSQLVIPWGQSAKLTCEVRGNPPPSVLWLRNAVPLISSQRLRLSRRALRVLSMGPEDEGVYQCMAENEVGSAHAVVQLRTSRPSITPRLWQDAELATGTPPVSPSKLGNPEQMLRGQPALPRPPTSVGPASPQCPGEKGQGAPAEAPIILSSPRTSKTDSYELVWRPRHEGSGRAPILYYVVKHRKVTNSSDDWTISGIPANQHRLTLTRLDPGSLYEVEMAAYNCAGEGQTAMVTFRTGRRPKPEIMASKEQQIQRDDPGASPQSSSQPDHGRLSPPEAPDRPTISTASETSVYVTWIPRGNGGFPIQSFRVEYKKLKKVGDWILATSAIPPSRLSVEITGLEKGTSYKFRVRALNMLGESEPSAPSRPYVVSGYSGRVYERPVAGPYITFTDAVNETTIMLKWMYIPASNNNTPIHGFYIYYRPTDSDNDSDYKKDMVEGDKYWHSISHLQPETSYDIKMQCFNEGGESEFSNVMICETKARKSSGQPGRLPPPTLAPPQPPLPETIERPVGTGAMVARSSDLPY

SEQ ID NO: 993 - protein, 186 aa, synthetic construct
  REGION 1..186: note = BSG (P35613) ECD
EPGTVFTTVEDLGSKILLTCSLNDSATEVTGHRWLKGGVVLKEDALPGQKTEFKVDSDDQWGEYSCVFLPEPMGTANIQLHGPPRVKAVKSSEHINEGETAMLVCKSESVPPVTDWAWYKITDSEDKALMNGSESRFFVSSSQGRSELHIENLNMEADPGQYRCNGTSSKGSDQAIITLRVRSHLA

SEQ ID NO: 994 - protein, 87 aa, synthetic construct
  REGION 1..87: note = BTC (P35070) ECD
DGNSTRSPETNGLLCGDPEENCAATTTQSKRKGHFSRCPKQYKHYCIKGRCRFVVAEQTPSCVCDEGYIGARCERVDLFYLRGDRGQ

SEQ ID NO: 995 - protein, 127 aa, synthetic construct
  REGION 1..127: note = BTLA (Q7Z6A9) ECD
KESCDVQLYIKRQSEHSILAGDPFELECPVKYCANRPHVTWCKLNGTTCVKLEDRQTSWKEEKNISFFILHFEPVLPNDNGSYRCSANFQSNLIESHSTTLYVTDVKSASERPSKDEMASRPWLLYR

SEQ ID NO: 996 - protein, 216 aa, synthetic construct
  REGION 1..216: note = BTN1A1 (Q13410) ECD
APFDVIGPPEPILAVVGEDAELPCRLSPNASAEHLELRWFRKKVSPAVLVHRDGREQEAEQMPEYRGRATLVQDGIAKGRVALRIRGVRVSDDGEYTCFFREDGSYEEALVHLKVAALGSDPHISMQVQENGEICLECTSVGWYPEPQVQWRTSKGEKFPSTSESRNPDEEGLFTVAASVIIRDTSAKNVSCYIQNLLLGQEKKVEISIPASSLPR

SEQ ID NO: 997 - protein, 220 aa, synthetic construct
  REGION 1..220: note = BTN2A1 (Q7KYR7) ECD
QFIVVGPTDPILATVGENTTLRCHLSPEKNAEDMEVRWFRSQFSPAVFVYKGGRERTEEQMEEYRGRTTFVSKDISRGSVALVIHNITAQENGTYRCYFQEGRSYDEAILHLVVAGLGSKPLISMRGHEDGGIRLECISRGWYPKPLTVWRDPYGGVAPALKEVSMPDADGLFMVTTAVIIRDKSVRNMSCSINNTLLGQKKESVIFIPESFMPSVSPCA

SEQ ID NO: 998 - protein, 233 aa, synthetic construct
  REGION 1..233: note = BTN2A2 (Q8WVV5) ECD
QFTVVGPANPILAMVGENTTLRCHLSPEKNAEDMEVRWFRSQFSPAVFVYKGGRERTEEQMEEYRGRITFVSKDINRGSVALVIHNVTAQENGIYRCYFQEGRSYDEAILRLVVAGLGSKPLIEIKAQEDGSIWLECISGGWYPEPLTVWRDPYGEVVPALKEVSIADADGLFMVTTAVIIRDKYVRNVSCSVNNTLLGQEKETVIFIPESFMPSASPWMVALAVILTASPWM

SEQ ID NO: 999 - protein, 219 aa, synthetic construct
  REGION 1..219: note = BTN2A3P (Q96KV6) ECD
QVTVVGPTDPILAMVGENTTLRCCLSPEENAEDMEVRWFQSQFSPAVFVYKGGRERTEEQKEEYRGRTTFVSKDSRGSVALIIHNVTAEDNGIYQCYFQEGRSCNEAILHLVVAGLDSEPVIEMRDHEDGGIQLECISGGWYPKPLTVWRDPYGEVVPALKEVSTPDADSLFMVTTAVIIRDKSVRNVSCSINDTLLGQKKESVIFIPESFMPSRSPCV

SEQ ID NO: 1000 - protein, 225 aa, synthetic construct
  REGION 1..225: note = BTN3A1 (O00481) ECD
QFSVLGPSGPILAMVGEDADLPCHLFPTMSAETMELKWVSSSLRQVVNVYADGKEVEDRQSAPYRGRTSILRDGITAGKAALRIHNVTASDSGKYLCYFQDGDFYEKALVELKVAALGSDLHVDVKGYKDGGIHLECRSTGWYPQPQIQWSNNKGENIPTVEAPVVADGVGLYAVAASVIMRGSSGEGVSCTIRSSLLGLEKTASISIADPFFRSAQRWIAALAG

SEQ ID NO: 1001 - protein, 219 aa, synthetic construct
  REGION 1..219: note = BTN3A2 (P78410) ECD
QFSVLGPSGPILAMVGEDADLPCHLFPTMSAETMELKWVSSSLRQVVNVYADGKEVEDRQSAPYRGRTSILRDGITAGKAALRIHNVTASDSGKYLCYFQDGDFYEKALVELKVAALGSNLHVEVKGYEDGGIHLECRSTGWYPQPQIQWSNAKGENIPAVEAPVVADGVGLYEVAASVIMRGGSGEGVSCIIRNSLLGLEKTASISIADPFFRSAQPW

SEQ ID NO: 1002 - protein, 219 aa, synthetic construct
  REGION 1..219: note = BTN3A3 (O00478) ECD
QFSVLGPSGPILAMVGEDADLPCHLFPTMSAETMELRWVSSSLRQVVNVYADGKEVEDRQSAPYRGRTSILRDGITAGKAALRIHNVTASDSGKYLCYFQDGDFYEKALVELKVAALGSDLHIEVKGYEDGGIHLECRSTGWYPQPQIKWSDTKGENIPAVEAPVVADGVGLYAVAASVIMRGSSGGGVSCIIRNSLLGLEKTASISIADPFFRSAQPW

SEQ ID NO: 1003 - protein, 228 aa, synthetic construct
  REGION 1..228: note = BTNL10 (A8MVZ5) ECD
SIWKADFDVTGPHAPILAMAGGHVELQCQLFPNISAEDMELRWYRCQPSLAVHMHERGMDMDGEQKWQYRGRTTFMSDHVARGKAMVRSHRVTTFDNRTYCCRFKDGVKFGEATVQVQVAGLGREPRIQVTDQQDGVRAECTSAGCFPKSWVERRDFRGQARPAVTNLSASATTRLWAVASSLTLWDRAVEGLSCSISSPLLPERRKVAESHLPATFSRSSQFTAWKA

SEQ ID NO: 1004 - protein, 220 aa, synthetic construct
  REGION 1..220: note = BTNL3 (Q6UXE8) ECD
QWQVTGPGKFVQALVGEDAVFSCSLFPETSAEAMEVRFFRNQFHAVVHLYRDGEDWESKQMPQYRGRTEFVKDSIAGGRVSLRLKNITPSDIGLYGCWFSSQIYDEEATWELRVAALGSLPLISIVGYVDGGIQLLCLSSGWFPQPTAKWKGPQGQDLSSDSRANADGYSLYDVEISIIVQENAGSILCSIHLAEQSHEVESKVLIGETFFQPSPWRLAS

SEQ ID NO: 1005 - protein, 222 aa, synthetic construct
  REGION 1..222: note = BTNL9 (Q6UXG8) ECD
SSEVKVLGPEYPILALVGEEVEFPCHLWPQLDAQQMEIRWFRSQTFNVVHLYQEQQELPGRQMPAFRNRTKLVKDDIAYGSVVLQLHSIIPSDKGTYGCRFHSDNFSGEALWELEVAGLGSDPHLSLEGFKEGGIQLRLRSSGWYPKPKVQWRDHQGQCLPPEFEAIVWDAQDLFSLETSVVVRAGALSNVSVSIQNLLLSQKKELVVQIADVFVPGASAWK

SEQ ID NO: 1006 - protein, 162 aa, synthetic construct
  REGION 1..162: note = C10orf54 (Q9H7M9) ECD
FKVATPYSLYVCPEGQNVTLTCRLLGPVDKGHDVTFYKTWYRSSRGEVQTCSERRPIRNLTFQDLHLHHGGHQAANTSHDLAQRHGLESASDHHGNFSITMRNLTLLDSGLYCCLVVEIRHHHSEHRVHGAMELQVQTGKDAPSNCVVYPSSSQDSENITAA

SEQ ID NO: 1007 - protein, 380 aa, synthetic construct
  REGION 1..380: note = C11orf24 (Q96F05) ECD
ASNDPRNFVPNKMWKGLVKRNASVETVDNKTSEDVTMAAASPVTLTKGTSAAHLNSMEVTTEDTSRTDVSEPATSGGAADGVTSIAPTAVASSTTAASITTAASSMTVASSAPTTAASSTTVASIAPTTAASSMTAASSTPMTLALPAPTSTSTGRTPSTTATGHPSLSTALAQVPKSSALPRTATLATLATRAQTVATTANTSSPMSTRPSPSKHMPSDTAASPVPPMRPQAQGPISQVSVDQPVVNTTNKSTPMPSNTTPEPAPTPTVVTTTKAQAREPTASPVPVPHTSPIPEMEAMSPTTQPSPMPYTQRAAGPGTSQAPEQVETEATPGTDSTGPTPRSSGGTKMPATDSCQPSTQGQYMVVTTEPLTQAVVDKT

SEQ ID NO: 1008 - protein, 38 aa, synthetic construct
  REGION 1..38: note = C11orf87 (Q6NUJ2) ECD
SPNASGSGNTGARGPGAVGSGTCITQVGQQLFQSFSST

SEQ ID NO: 1009 - protein, 57 aa, synthetic construct
  REGION 1..57: note = C14orf132 (Q9NPU4) ECD
MDLSFMAAQLPMMGGAFMDSPNEDFSTEYSLFNSSANVHAAANGQGQPEDPPRSSND

SEQ ID NO: 1010 - protein, 687 aa, synthetic construct
  REGION 1..687: note = C14orf37 (Q86TY3) ECD
FPKIERRREIAHVHAEKGQSDKMNTDDLENSSVTSKQTPQLVVSEDPMMMSAVPSATSLNKAFSINKETQPGQAGLMQTERPGVSTPTESGVPSAEEVFGSSQPERISPESGLAKAMLTIAITATPSLTVDEKEELLTSTNFQPIVEEITETTKGFLKYMDNQSFATESQEGVGLGHSPSSYVNTKEMLTTNPKTEKFEADTDHRTTSFPGAESTAGSEPGSLTPDKEKPSQMTADNTQAAATKQPLETSEYTLSVEPETDSLLGAPEVTVSVSTAVPAASALSDEWDDTKLESVSRIRTPKLGDNEETQVRTEMSQTAQVSHEGMEGGQPWTEAAQVALGLPEGETHTGTALLIAHGNERSPAFTDQSSFTPTSLMEDMKVSIVNLLQSTGDFTESTKENDALFFLETTVSVSVYESEADQLLGNTMKDIITQEMTTAVQEPDATLSMVTQEQVATLELIRDSGKTEEEKEDPSPVSDVPGVTQLSRRWEPLATTISTTVVPLSFEVTPTVEEQMDTVTGPNEEFTPVLGSPVTPPGIMVGEPSISPALPALEASSERRTVVPSITRVNTAASYGLDQLESEEGQEDEDEEDEEDEDEEEEDEEEDEEDKDADSLDEGLDGDTELPGFTLPGITSQEPGLEEGNMDLLEGATYQVPDALEWEQQNQGLVRSWMEKLKDKAGYMSGM

SEQ ID NO: 1011 - protein, 71 aa, synthetic construct
  REGION 1..71: note = C19orf18 (Q8NEA5) ECD
LHPTGNITGLPGSKRSQPPRNITKEPKVFFHKTQLPGIQGAASRSTAASPTNPMKFLRNKAIIRHRPALVK

SEQ ID NO: 1012 - protein, 884 aa, synthetic construct
  REGION 1..884: note = C1orf101 (Q5SY80) ECD
LWRYSTNSPNYRIFSTRSTIKLEYEGTLFTEWSVPETCFVLNKSSPTTELRCSSPGVHAIKPIVTGPDEEERYLFVESSHTCFLWYYRVRHFFNNFTQLITVWAYDPESADPDELLGNAEEPSINSIVLSTQMATLGQKPVIHTVLKRKVYSSNEKMRRGTWRIVVPMTKDDALKEIRGNQVTFQDCFIADFLILLTFPLLTIPEIPGYLPISSPRGSQLMASWDACVVASAVLVTDMETFHTTDSFKSWTRIRVPPDILSDDERRSVAHVILSRDGIVFLINGVLYIKSFRGFIRLGGIVNLPDGGITGISSRKWCWVNYLLKAKGRRSTFAVWTENEIYLGSILLKFARLVTTTELKNILSLSVTATLTIDRVEYTGHPLEIAVFLNYCTVCNVTKKIFLVIYNEDTKQWVSQDFTLDAPIDSVTMPHFTFSALPGLLLWNKHSIYYCYHNFTFTGILQTPAGHGNLSMLSNDSIIHEVFIDYYGDILVKMENNVIFYSKINTRDAVKLHLWTNYTTRAFIFLSTSGQTYFLYALDDGTIQIQDYPLHLEAQSIAFTTKDKCPYMAFHNNVAHVFYFLDKGEALTVWTQIVYPENTGLYVIVESYGPKILQESHEISFEAAFGYCTKTLTLTFYQNVDYERISDYFETQDKHTGLVLVQFRPSEYSKACPIAQKVFQIAVGCDDKKFIAIKGFSKKGCHHHDFSYVIEKSYLRHQPSKNLRVRYIWGEYGCPLRLDFTEKFQPVVQLFDDNGYVKDVEANFIVWEIHGRDDYSFNNTMAQSGCLHEAQTWKSMIELNKHLPLEEVWGPENYKHCFSYAIGKPGDLNQPYEIINSSNGNHIFWPMGHSGMYVFRVKILDPNYSFCNLTAMFAIETFGLIPSPS

SEQ ID NO: 1013 - protein, 129 aa, synthetic construct
  REGION 1..129: note = C1orf159 (Q96HA4) ECD
KSMENTVTRNSTAVINTQAEGTLSPPGLSSLPVVREWALTHTAQLPECCVDVVGVNASCPGASLCGPGCYRRWNADGSASCVRCGNGTLPAYNGSECRSFAGPGAPFPMNRSSGTPGRPHPGAPRVAAS

SEQ ID NO: 1014 - protein, 162 aa, synthetic construct
  REGION 1..162: note = C1orf233 (F2Z333) ECD
AAPTPPGWEPTPDAPWCPYKVLPEGPEAGGGRLCFRSPARGFRCQAPGCVLHAPAGRSLRASVLRNRSVLLQWRLAPAAARRVRAFALNCSWRGAYTRFPCERVLLGASCRDYLLPDVHDSVLYRLCLQPLPLRAGPAAAAPETPEPAECVEFTAEPAGMQD

SEQ ID NO: 1015 - protein, 337 aa, synthetic construct
  REGION 1..337: note = C1orf85 (Q8WWB7) ECD
EKTRQVSLEVIPNWLGPLQNLLHIRAVGTNSTLHYVWSSLGPLAVVMVATNTPHSTLSVNWSLLLSPEPDGGLMVLPKDSIQFSSALVFTRLLEFDSTNVSDTAAKPLGRPYPPYSLADFSWNNITDSLDPATLSATFQGHPMNDPTRTFANGSLAFRVQAFSRSSRPAQPPRLLHTADTCQLEVALIGASPRGNRSLFGLEVATLGQGPDCPSMQEQHSIDDEYAPAVFQLDQLLWGSLPSGFAQWRPVAYSQKPGGRESALPCQASPLHPALAYSLPQSPIVRAFFGSQNNFCAFNLTFGASTGPGYWDQHYLSWSMLLGVGFPPVDGLSPLVLG

SEQ ID NO: 1016 - protein, 46 aa, synthetic construct
  REGION 1..46: note = C3orf80 (F5H4A9) ECD
RGGGGCAELACGERERCCDATNATAVRCCKLPLHAFLDNVGWFVRK

SEQ ID NO: 1017 - protein, 277 aa, synthetic construct
  REGION 1..277: note = CA12 (O43570) ECD
APVNGSKWTYFGPDGENSWSKKYPSCGGLLQSPIDLHSDILQYDASLTPLEFQGYNLSANKQFLLTNNGHSVKLNLPSDMHIQGLQSRYSATQLHLHWGNPNDPHGSEHTVSGQHFAAELHIVHYNSDLYPDASTASNKSEGLAVLAVLIEMGSFNPSYDKIFSHLQHVKYKGQEAFVPGFNIEELLPERTAEYYRYRGSLTTPPCNPTVLWTVFRNPVQISQEQLLALETALYCTHMDDPSPREMINNFRQVQKFDERLVYTSFSQVQVCTAAGLS

SEQ ID NO: 1018 - protein, 275 aa, synthetic construct
  REGION 1..275: note = CA14 (Q9ULX7) ECD
ADGGQHWTYEGPHGQDHWPASYPECGNNAQSPIDIQTDSVTFDPDLPALQPHGYDQPGTEPLDLHNNGHTVQLSLPSTLYLGGLPRKYVAAQLHLHWGQKGSPGGSEHQINSEATFAELHIVHYDSDSYDSLSEAAERPQGLAVLGILIEVGETKNIAYEHILSHLHEVRHKDQKTSVPPFNLRELLPKQLGQYFRYNGSLTTPPCYQSVLWTVFYRRSQISMEQLEKLQGTLFSTEEEPSKLLVQNYRALQPLNQRMVFASFIQAGSSYTTGEM

SEQ ID NO: 1019 - protein, 1060 aa, synthetic construct
  REGION 1..1060: note = CACHD1 (Q5VU97) ECD
EADFSILDEAQVLASQMRRLAAEELGVVTMQRIFNSFVYTEKISNGESEVQQLAKKIREKFNRYLDVVNRNKQVVEASYTAHLTSPLTAIQDCCTIPPSMMEFDGNFNTNVSRTISCDRLSTTVNSRAFNPGRDLNSVLADNLKSNPGIKWQYFSSEEGIFTVFPAHKFRCKGSYEHRSRPIYVSTVRPQSKHIVVILDHGASVTDTQLQIAKDAAQVILSAIDEHDKISVLTVADTVRTCSLDQCYKTFLSPATSETKRKMSTFVSSVKSSDSPTQHAVGFQKAFQLIRSTNNNTKFQANTDMVIIYLSAGITSKDSSEEDKKATLQVINEENSFLNNSVMILTYALMNDGVTGLKELAFLRDLAEQNSGKYGVPDRMALPVIKGSMMVLNQLSNLETTVGRFYTNLPNRMIDEAVFSLPFSDEMGDGLIMTVSKPCYFGNLLLGIVGVDVNLAYILEDVTYYQDSLASYTFLIDDKGYTLMHPSLTRPYLLSEPPLHTDIIHYENIPKFELVRQNILSLPLGSQIIAVPVNSSLSWHINKLRETGKEAYNVSYAWKMVQDTSFILCIVVIQPEIPVKQLKNLNTVPSSKLLYHRLDLLGQPSACLHFKQLATLESPTIMLSAGSFSSPYEHLSQPETKRMVEHYTAYLSDNTRLIANPGLKFSVRNEVMATSHVTDEWMTQMEMSSLNTYIVRRYIATPNGVLRIYPGSLMDKAFDPTRRQWYLHAVANPGLISLTGPYLDVGGAGYVVTISHTIHSSSTQLSSGHTVAVMGIDFTLRYFYKVLMDLLPVCNQDGGNKIRCFIMEDRGYLVAHPTLIDPKGHAPVEQQHITHKEPLVANDILNHPNFVKKNLCNSFSDRTVQRFYKFNTSLAGDLTNLVHGSHCSKYRLARIPGTNAFVGIVNETCDSLAFCACSMVDRLCLNCHRMEQNECECPCECPLEVNECTGNLTNAENRNPSCEVHQEPVTYTAIDPGLQDALHQCVNSRCSQRLESGDCFGVLDCEWCMVDSDGKTHLDKPYCAPQKECFGGIVGAKSPYVDDMGAIGDEVITLNMIKSAP

SEQ ID NO: 1020 - protein, 330 aa, synthetic construct
  REGION 1..330: note = CADM1 (Q9BY67) ECD
QNLFTKDVTVIEGEVATISCQVNKSDDSVIQLLNPNRQTIYFRDFRPLKDSRFQLLNFSSSELKVSLTNVSISDEGRYFCQLYTDPPQESYTTITVLVPPRNLMIDIQKDTAVEGEEIEVNCTAMASKPATTIRWFKGNTELKGKSEVEEWSDMYTVTSQLMLKVHKEDDGVPVICQVEHPAVTGNLQTQRYLEVQYKPQVHIQMTYPLQGLTREGDALELTCEAIGKPQPVMVTWVRVDDEMPQHAVLSGPNLFINNLNKTDNGTYRCEASNIVGKAHSDYMLYVYDPPTTIPPPTTTTTTTTTTTTTILTIITDSRAGEEGSIRAVDH

SEQ ID NO: 1021 - protein, 343 aa, synthetic construct
  REGION 1..343: note = CADM2 (Q8N3J6) ECD
QFPLTQNVTVVEGGTAILTCRVDQNDNTSLQWSNPAQQTLYFDDKKALRDNRIELVRASWHELSISVSDVSLSDEGQYTCSLFTMPVKTSKAYLTVLGVPEKPQISGFSSPVMEGDLMQLTCKTSGSKPAADIRWFKNDKEIKDVKYLKEEDANRKTFTVSSTLDFRVDRSDDGVAVICRVDHESLNATPQVAMQVLEIHYTPSVKIIPSTPFPQEGQPLILTCESKGKPLPEPVLWTKDGGELPDPDRMVVSGRELNILFLNKTDNGTYRCEATNTIGQSSAEYVLIVHDVPNTLLPTTIIPSLTTATVTTTVAITTSPTTSATTSSIRDPNALAGQNGPDH

SEQ ID NO: 1022 - protein, 306 aa, synthetic construct
  REGION 1..306: note = CADM3 (Q8N126) ECD
NLSQDDSQPWTSDETVVAGGTVVLKCQVKDHEDSSLQWSNPAQQTLYFGEKRALRDNRIQLVTSTPHELSISISNVALADEGEYTCSIFTMPVRTAKSLVTVLGIPQKPIITGYKSSLREKDTATLNCQSSGSKPAARLTWRKGDQELHGEPTRIQEDPNGKTFTVSSSVTFQVTREDDGASIVCSVNHESLKGADRSTSQRIEVLYTPTAMIRPDPPHPREGQKLLLHCEGRGNPVPQQYLWEKEGSVPPLKMTQESALIFPFLNKSDSGTYGCTATSNMGSYKAYYTLNVNDPSPVPSSSSTYH

SEQ ID NO: 1023 - protein, 304 aa, synthetic construct
  REGION 1..304: note = CADM4 (Q8NFZ8) ECD
PGAGQEVQTENVTVAEGGVAEITCRLHQYDGSIVVIQNPARQTLFFNGTRALKDERFQLEEFSPRRVRIRLSDARLEDEGGYFCQLYTEDTHHQIATLTVLVAPENPVVEVREQAVEGGEVELSCLVPRSRPAATLRWYRDRKELKGVSSSQENGKVWSVASTVRFRVDRKDDGGIIICEAQNQALPSGHSKQTQYVLDVQYSPTARIHASQAVVREGDTLVLTCAVTGNPRPNQIRWNRGNESLPERAEAVGETLTLPGLVSADNGTYTCEASNKHGHARALYVLVVYDPGAVVEAQTSVPYA

SEQ ID NO: 1024 - protein, 698 aa, synthetic construct
  REGION 1..698: note = CATSPERD (Q86XM0) ECD
QLCRSRTVRTGKVFNLIQDVQGDRLYFHPTTTRLIKHPCEKNIALYLGKQVFFTMDNFETSLLPFTIPTSMQVGVPEVTSAHFAGSLLLLVVDQKVYIYDYENNSWSMSLGIKHPVTHVSGDNCCYTGSLFCVHVSNLVFAYFRGDQISQTYIYYSNTGGFSFWKYHYDRQAEIIGSLGGIFHFFSLSQVAMLVVNQGKGMFKYSDHPLNRSFGLSFDYNGTLDILIAPGQRGILLLWFENSLLFSHNAGQLVDTVRVKKGDQTLFSSIFEAKITIHNIAVTENELAVITREDNLYYGNLGIVPSSIIKFADQYIWSEDVALMFRSPGTLEILTPLRDTAFPAFDFQKCLVNIQALLMDPELHVGKCKIEFLTGEFIYRMYTIDMHSQLELTASLIPQPGTSLIPLVMVSNPHSLGFQATFYENGYTSDGNTKYKLDIFLKQQQHWGRTDSNFTSSLKKATMSTLTVDIANKEISCVDIKPLSTLISVGCDLDKKIVIQNKVSACSMGILDPLTLQDNYSFIIEKEFYDPGFQGQQSSEDLHVFYSYQQLGCPLLVYYDTLWKPVVELWRKDSFQEVIDAEYVLLEVNGQFSYSYSLTAQSAMCTSQPQNWTTMIKEFGGPFFWNRENYVSCHDPNNNAPLRWPDVQYQILGGRTANQIIFGHNGFYVFYISIVDPYYSYCQLETIFSIYVYGAFPVQ

SEQ ID NO: 1025 - protein, 1031 aa, synthetic construct
  REGION 1..1031: note = CATSPERG (Q6ZRH7) ECD
WAIKDFQECTWQVVLNEFKRVGESGVSDSFFEQEPVDTVSSLFHMLVDSPIDPSEKYLGFPYYLKINYSCEEKPSEDLVRMGHLTGLKPLVLVTFQSPVNFYRWKIEQLQIQMEAAPFRSKEPCMAEEVCSMSWYTPMPIKKGSVVMRVDISSNGLGTFIPDKRFQMNINGFLKRDRDNNIQFTVGEELFNLMPQYFVGVSSRPLWHTVDQSPVLILGGIPNEKYVLMTDTSFKDFSLVELSIDSCWVGSFYCPHSGFTATIYDTIATESTLFIRQNQLVYYFTGTYTTLYERNRGSGSWIRVLASECIKKLCPVYFHSNGSEYIMALTTGKHEGYVHFGTIRDGQVSFEMLPRQWSVCEQIGVTTCSIIWSEYIAGEYTLLLLVESGYGNASKRFQVVSYNTASDDLELLYHIPEFIPEARGLEFLMILGTESYTSTAMAPKGIFCNPYNNLIFIWGNFLLQSSNKENFIYLADFPKELSIKYMARSFRGAVAIVTETEEIWYLLEGSYRVYQLFPSKGWQVHISLKLMQQSSLYASNETMLTLFYEDSKLYQLVYLMNNQKGQLVKRLVPVEQLLMYQQHTSHYDLERKGGYLMLSFIDFCPFSVMRLRSLPSPQRYTRQERYRARPPRVLERSGFHNENSLAIYQGLVYYLLWLHSVYDKPYADPVHDPTWRWWANNKQDQDYYFFLASNWRSAGGVSIEMDSYEKIYNLESAYELPERIFLDKGTEYSFAIFLSAQGHSFRTQSELGTAFQLHSQVDVGVVLADPGCIEASVKQEVLINRNSVLFSITLKDKKLCYDQGISGHHLMETSMTVNVVGSSGLCFQETHLGPHMQGNLMVPVFIGCPPGKRLAFDITYTLEYSRLKNKHYFDCVNVNPEMPCFLFRDIFYPFFLIQDLVTGDSGSFQGSYVLLVVGGGPTLDSLKDYSEDEIYRFNSPLDKTNSLIWTTRTTRTTKDSAFHIMSHESPGIEWLCLENAPCYDNVPQGIFAPEFFFKVLVSNRGVDTSTYCNYQLTFLLHIHGLPLSPKRA

SEQ ID NO: 1026 - protein, 934 aa, synthetic construct
  REGION 1..934: note = CD101 (Q93033) ECD
QREVTVQKGPLFRAEGYPVSIGCNVTGHQGPSEQHFQWSVYLPTNPTQEVQIISTKDAAFSYAVYTQRVRSGDVYVERVQGNSVLLHISKLQMKDAGEYECHTPNTDEKYYGSYSAKTNLIVIPDTLSATMSSQTLGKEEGEPLALTCEASKATAQHTHLSVTWYLTQDGGGSQATEIISLSKDFILVPGPLYTERFAASDVQLNKLGPTTFRLSIERLQSSDQGQLFCEATEWIQDPDETWMFITKKQTDQTTLRIQPAVKDFQVNITADSLFAEGKPLELVCLVVSSGRDPQLQGIWFFNGTEIAHIDAGGVLGLKNDYKERASQGELQVSKLGPKAFSLKIFSLGPEDEGAYRCVVAEVMKTRTGSWQVLQRKQSPDSHVHLRKPAARSVVMSTKNKQQVVWEGETLAFLCKAGGAESPLSVSWWHIPRDQTQPEFVAGMGQDGIVQLGASYGVPSYHGNTRLEKMDWATFQLEITFTAITDSGTYECRVSEKSRNQARDLSWTQKISVTVKSLESSLQVSLMSRQPQVMLTNTFDLSCVVRAGYSDLKVPLTVTWQFQPASSHIFHQLIRITHNGTIEWGNFLSRFQKKTKVSQSLFRSQLLVHDATEEETGVYQCEVEVYDRNSLYNNRPPRASAISHPLRIAVTLPESKLKVNSRSQVQELSINSNTDIECSILSRSNGNLQLAIIWYFSPVSTNASWLKILEMDQTNVIKTGDEFHTPQRKQKFHTEKVSQDLFQLHILNVEDSDRGKYHCAVEEWLLSTNGTWHKLGEKKSGLTELKLKPTGSKVRVSKVYWTENVTEHREVAIRCSLESVGSSATLYSVMWYWNRENSGSKLLVHLQHDGLLEYGEEGLRRHLHCYRSSSTDFVLKLHQVEMEDAGMYWCRVAEWQLHGHPSKWINQASDESQRMVLTVLPSEPTLPSRICSSAP

SEQ ID NO: 1027 - protein, 1009 aa, synthetic construct
  REGION 1..1009: note = CD163 (Q86VB7) ECD
SSLGGTDKELRLVDGENKCSGRVEVKVQEEWGTVCNNGWSMEAVSVICNQLGCPTAIKAPGWANSSAGSGRIWMDHVSCRGNESALWDCKHDGWGKHSNCTHQQDAGVTCSDGSNLEMRLTRGGNMCSGRIEIKFQGRWGTVCDDNFNIDHASVICRQLECGSAVSFSGSSNFGEGSGPIWFDDLICNGNESALWNCKHQGWGKHNCDHAEDAGVICSKGADLSLRLVDGVTECSGRLEVRFQGEWGTICDDGWDSYDAAVACKQLGCPTAVTAIGRVNASKGFGHIWLDSVSCQGHEPAIWQCKHHEWGKHYCNHNEDAGVTCSDGSDLELRLRGGGSRCAGTVEVEIQRLLGKVCDRGWGLKEADVVCRQLGCGSALKTSYQVYSKIQATNTWLFLSSCNGNETSLWDCKNWQWGGLTCDHYEEAKITCSAHREPRLVGGDIPCSGRVEVKHGDTWGSICDSDFSLEAASVLCRELQCGTVVSILGGAHFGEGNGQIWAEEFQCEGHESHLSLCPVAPRPEGTCSHSRDVGVVCSRYTEIRLVNGKTPCEGRVELKTLGAWGSLCNSHWDIEDAHVLCQQLKCGVALSTPGGARFGKGNGQIWRHMFHCTGTEQHMGDCPVTALGASLCPSEQVASVICSGNQSQTLSSCNSSSLGPTRPTIPEESAVACIESGQLRLVNGGGRCAGRVEIYHEGSWGTICDDSWDLSDAHVVCRQLGCGEAINATGSAHFGEGTGPIWLDEMKCNGKESRIWQCHSHGWGQQNCRHKEDAGVICSEFMSLRLTSEASREACAGRLEVFYNGAWGTVGKSSMSETTVGVVCRQLGCADKGKINPASLDKAMSIPMWVDNVQCPKGPDTLWQCPSSPWEKRLASPSEETWITCDNKIRLQEGPTSCSGRVEIWHGGSWGTVCDDSWDLDDAQVVCQQLGCGPALKAFKEAEFGQGTGPIWLNEVKCKGNESSLWDCPARRWGHSECGHKEDAAVNCTDISVQKTPQKATTGRSSRQSS

SEQ ID NO: 1028 - protein, 1319 aa, synthetic construct
  REGION 1..1319: note = CD163L1 (Q9NR16) ECD
FNGTDLELRLVNGDGPCSGTVEVKFQGQWGTVCDDGWNTTASTVVCKQLGCPFSFAMFRFGQAVTRHGKIWLDDVSCYGNESALWECQHREWGSHNCYHGEDVGVNCYGEANLGLRLVDGNNSCSGRVEVKFQERWGTICDDGWNLNTAAVVCRQLGCPSSFISSGVVNSPAVLRPIWLDDILCQGNELALWNCRHRGWGNHDCSHNEDVTLTCYDSSDLELRLVGGTNRCMGRVELKIQGRWGTVCHHKWNNAAADVVCKQLGCGTALHFAGLPHLQSGSDVVWLDGVSCSGNESFLWDCRHSGTVNFDCLHQNDVSVICSDGADLELRLADGSNNCSGRVEVRIHEQWWTICDQNWKNEQALVVCKQLGCPFSVFGSRRAKPSNEARDIWINSISCTGNESALWDCTYDGKAKRTCFRRSDAGVICSDKADLDLRLVGAHSPCYGRLEVKYQGEWGTVCHDRWSTRNAAVVCKQLGCGKPLHVFGMTYFKEASGPIWLDDVSCIGNESNIWDCEHSGWGKHNCVHREDVIVTCSGDATWGLRLVGGSNRCSGRLEVYFQGRWGTVCDDGWNSKAAAVVCSQLDCPSSIIGMGLGNASTGYGKIWLDDVSCDGDESDLWSCRNSGWGNNDCSHSEDVGVICSDASDMELRLVGGSSRCAGKVEVNVQGAVGILCANGWGMNIAEVVCRQLECGSAIRVSREPHFTERTLHILMSNSGCTGGEASLWDCIRWEWKQTACHLNMEASLICSAHRQPRLVGADMPCSGRVEVKHADTWRSVCDSDFSLHAANVLCRELNCGDAISLSVGDHFGKGNGLTWAEKFQCEGSETHLALCPIVQHPEDTCIHSREVGVVCSRYTDVRLVNGKSQCDGQVEINVLGHWGSLCDTHWDPEDARVLCRQLSCGTALSTTGGKYIGERSVRVWGHRFHCLGNESLLDNCQMTVLGAPPCIHGNTVSVICTGSLTQPLFPCLANVSDPYLSAVPEGSALICLEDKRLRLVDGDSRCAGRVEIYHDGFWGTICDDGWDLSDAHVVCQKLGCGVAFNATVSAHFGEGSGPIWLDDLNCTGMESHLWQCPSRGWGQHDCRHKEDAGVICSEFTALRLYSETETESCAGRLEVFYNGTWGSVGRRNITTAIAGIVCRQLGCGENGVVSLAPLSKTGSGFMWVDDIQCPKTHISIWQCLSAPWERRISSPAEETWITCEDRIRVRGGDTECSGRVEIWHAGSWGTVCDDSWDLAEAEVVCQQLGCGSALAALRDASFGQGTGTIWLDDMRCKGNESFLWDCHAKPWGQSDCGHKEDAGVRCSGQSLKSLNASSGH

SEQ ID NO: 1029 - protein, 139 aa, synthetic construct
  REGION 1..139: note = CD164 (Q04900) ECD
DKNTTQHPNVTTLAPISNVTSAPVTSLPLVTTPAPETCEGRNSCVSCFNVSVVNTTCFWIECKDESYCSHNSTVSDCQVGNTTDFCSVSTATPVPTANSTAKPTVQPSPSTTSKTVTTSGTTNNTVTPTSQPVRKSTFD

SEQ ID NO: 1030 - protein, 112 aa, synthetic construct
  REGION 1..112: note = CD164L2 (Q6UWJ8) ECD
GKGARGFGRGALIRLNIWPAVQGACKQLEVCEHCVEGDGARNLSSCVWEQCRPEEPGHCVAQSEVVKEGCSIYNRSEACPAAHHHPTYEPKTVTTGSPPVPEAHSPGFDGAS

SEQ ID NO: 1031 - protein, 603 aa, synthetic construct [sequence omitted]

SEQ ID NO: 1032 - protein, 272 aa, synthetic construct
  REGION 1..272: note = CD19 (P15391) ECD
PEEPLVVKVEEGDNAVLQCLKGTSDGPTQQLTWSRESPLKPFLKLSLGLPGLGIHMRPLAIWLFIFNVSQQMGGFYLCQPGPPSEKAWQPGWTVNVEGSGELFRWNVSDLGGLGCGLKNRSSEGPSSPSGKLMSPKLYVWAKDRPEIWEGEPPCLPPRDSLNQSLSQDLTMAPGSTLWLSCGVPPDSVSRGPLSWTHVHPKGPKSLLSLELKDDRPARDMWVMETGLLLPRATAQDAGKYYCHRGNLTMSFHLEITARPVLWHWLLRTGGWK

SEQ ID NO: 1033 - protein, 284 aa, synthetic construct
  REGION 1..284: note = CD1A (P06126) ECD
NADGLKEPLSFHVTWIASFYNHSWKQNLVSGWLSDLQTHTWDSNSSTIVFLCPWSRGNFSNEEWKELETLFRIRTIRSFEGIRRYAHELQFEYPFEIQVTGGCELHSGKVSGSFLQLAYQGSDFVSFQNNSWLPYPVAGNMAKHFCKVLNQNQHENDITHNLLSDTCPRFILGLLDAGKAHLQRQVKPEAWLSHGPSPGPGHLQLVCHVSGFYPKPVWVMWMRGEQEQQGTQRGDILPSADGTWYLRATLEVAAGEAADLSCRVKHSSLEGQDIVLYWEHHSSV

SEQ ID NO: 1034 - protein, 286 aa, synthetic construct
  REGION 1..286: note = CD1B (P29016) ECD
SEHAFQGPTSFHVIQTSSFTNSTWAQTQGSGWLDDLQIHGWDSDSGTAIFLKPWSKGNFSDKEVAELEEIFRVYIFGFAREVQDFAGDFQMKYPFEIQGIAGCELHSGGAIVSFLRGALGGLDFLSVKNASCVPSPEGGSRAQKFCALIIQYQGIMETVRILLYETCPRYLLGVLNAGKADLQRQVKPEAWLSSGPSPGPGRLQLVCHVSGFYPKPVWVMWMRGEQEQQGTQLGDILPNANWTWYLRATLDVADGEAAGLSCRVKHSSLEGQDIILYWRNPTSIGS

SEQ ID NO: 1035 - protein, 285 aa, synthetic construct
  REGION 1..285: note = CD1C (P29017) ECD
NADASQEHVSFHVIQIFSFVNQSWARGQGSGWLDELQTHGWDSESGTIIFLHNWSKGNFSNEELSDLELLFRFYLFGLTREIQDHASQDYSKYPFEVQVKAGCELHSGKSPEGFFQVAFNGLDLLSFQNTTWVPSPGCGSLAQSVCHLLNHQYEGVTETVYNLIRSTCPRFLLGLLDAGKMYVHRQVRPEAWLSSRPSLGSGQLLLVCHASGFYPKPVWVTWMRNEQEQLGTKHGDILPNADGTWYLQVILEVASEEPAGLSCRVRHSSLGGQDIILYWGHHFSM

SEQ ID NO: 1036 - protein, 282 aa, synthetic construct
  REGION 1..282: note = CD1D (P15813) ECD
EVPQRLFPLRCLQISSFANSSWTRTDGLAWLGELQTHSWSNDSDTVRSLKPWSQGTFSDQQWETLQHIFRVYRSSFTRDVKEFAKMLRLSYPLELQVSAGCEVHPGNASNNFFHVAFQGKDILSFQGTSWEPTQEAPLWVNLAIQVLNQDKWTRETVQWLLNGTCPQFVSGLLESGKSELKKQVKPKAWLSRGPSPGPGRLLLVCHVSGFYPKPVWVKWMRGEQEQQGTQPGDILPNADETWYLRATLDVVAGEAAGLSCRVKHSSLEGQDIVLYWGGSYTS

SEQ ID NO: 1037 - protein, 285 aa, synthetic construct
  REGION 1..285: note = CD1E (P15812) ECD
APQALQSYHLAAEEQLSFRMLQTSSFANHSWAHSEGSGWLGDLQTHGWDTVLGTIRFLKPWSHGNFSKQELKNLQSLFQLYFHSFIQIVQASAGQFQLEYPFEIQILAGCRMNAPQIFLNMAYQGSDFLSFQGISWEPSPGAGIRAQNICKVLNRYLDIKEILQSLLGHTCPRFLAGLMEAGESELKRKVKPEAWLSCGPSPGPGRLQLVCHVSGFYPKPVWVMWMRGEQEQRGTQRGDVLPNADETWYLRATLDVAAGEAAGLSCRVKHSSLGGHDLIIHWGGY

SEQ ID NO: 1038 - protein, 185 aa, synthetic construct
  REGION 1..185: note = CD2 (P06729) ECD
KEITNALETWGALGQDINLDIPSFQMSDDIDDIKWEKTSDKKKIAQFRKEKETFKEKDTYKLFKNGTLKIKHLKTDDQDIYKVSIYDTKGKNVLEKIFDLKIQERVSKPKISWTCINTTLTCEVMNGTDPELNLYQDGKHLKLSQRVITHKWTTSLSAKFKCTAGNKVSKESSVEPVSCPEKGLD

SEQ ID NO: 1039 - protein, 202 aa, synthetic construct
  REGION 1..202: note = CD200 (P41217) ECD
QVQVVTQDEREQLYTPASLKCSLQNAQEALIVTWQKKKAVSPENMVTFSENHGVVIQPAYKDKINITQLGLQNSTITFWNITLEDEGCYMCLFNTFGFGKISGTACLTVYVQPIVSLHYKFSEDHLNITCSATARPAPMVFWKVPRSGIENSTVTLSHPNGTTSVTSILHIKDPKNQVGKEVICQVLHLGTVTDFKQTVNKG

SEQ ID NO: 1040 - protein, 215 aa, synthetic construct
  REGION 1..215: note = CD200R1 (Q8TD46) ECD
MDEKQITQNYSKVLAEVNTSWPVKMATNAVLCCPPIALRNLIIITWEIILRGQPSCTKAYRKETNETKETNCTDERITWVSRPDQNSDLQIRPVAITHDGYYRCIMVTPDGNFHRGYHLQVLVTPEVTLFQNRNRTAVCKAVAGKPAAQISWIPEGDCATKQEYWSNGTVTVKSTCHWEVHNVSTVTCHVSHLTGNKSLYIELLPVPGAKKSAKL

SEQ ID NO: 1041 - protein, 216 aa, synthetic construct
  REGION 1..216: note = CD200R1L (Q6Q8B3) ECD
GKQMTQNYSTIFAEGNISQPVLMDINAVLCCPPIALRNLIIITWEIILRGQPSCTKAYKKETNETKETNCTVERITWVSRPDQNSDLQIRPVDTTHDGYYRGIVVTPDGNFHRGYHLQVLVTPEVNLFQSRNITAVCKAVTGKPAAQISWIPEGSILATKQEYWGNGTVTVKSTCPWEGHKSTVTCHVSHLTGNKSLSVKLNSGLRTSGSPALSLL

SEQ ID NO: 1042 - protein, 668 aa, synthetic construct
  REGION 1..668: note = CD22 (P20273) ECD
DSSKWVFEHPETLYAWEGACVWIPCTYRALDGDLESFILFHNPEYNKNTSKFDGTRLYESTKDGKVPSEQKRVQFLGDKNKNCTLSIHPVHLNDSGQLGLRMESKTEKWMERIHLNVSERPFPPHIQLPPEIQESQEVTLTCLLNFSCYGYPIQLQWLLEGVPMRQAAVTSTSLTIKSVFTRSELKFSPQWSHHGKIVTCQLQDADGKFLSNDTVQLNVKHTPKLEIKVTPSDAIVREGDSVTMTCEVSSSNPEYTTVSWLKDGTSLKKQNTFTLNLREVTKDQSGKYCCQVSNDVGPGRSEEVFLQVQYAPEPSTVQILHSPAVEGSQVEFLCMSLANPLPTNYTWYHNGKEMQGRTEEKVHIPKILPWHAGTYSCVAENILGTGQRGPGAELDVQYPPKKVTTVIQNPMPIREGDTVTLSCNYNSSNPSVTRYEWKPHGAWEEPSLGVLKIQNVGWDNTTIACAACNSWCSWASPVALNVQYAPRDVRVRKIKPLSEIHSGNSVSLQCDFSSSHPKEVQFFWEKNGRLLGKESQLNFDSISPEDAGSYSCWVNNSIGQTASKAWTLEVLYAPRRLRVSMSPGDQVMEGKSATLTCESDANPPVSHYTWFDWNNQSLPYHSQKLRLEPVKVQHSGAYWCQGTNSVGKGRSPLSTLTVYYSPETIGRR

SEQ ID NO: 1043 - protein, 236 aa, synthetic construct [sequence omitted]

SEQ ID NO: 1044 - protein, 208 aa, synthetic construct
  REGION 1..208: note = CD244 (Q9BZW8) ECD
CQGSADHVVSISGVPLQLQPNSIQTKVDSIAWKKLLPSQNGFHHILKWENGSLPSNTSNDRFSFIVKNLSLLIKAAQQQDSGLYCLEVTSISGKVQTATFQVFVFESLLPDKVEKPRLQGQGKILDRGRCQVALSCLVSRDGNVSYAWYRGSKLIQTAGNLTYLDEEVDINGTHTYTCNVSNPVSWESHTLNLTQDCQNAHQEFRFWP

SEQ ID NO: 1045 - protein, 670 aa, synthetic construct
  REGION 1..670: note = CD248 (Q9HCU0) ECD
QDPWAAEPRAACGPSSCYALFPRRRTFLEAWRACRELGGDLATPRTPEEAQRVDSLVGAGPASRLLWIGLQRQARQCQLQRPLRGFTWTTGDQDTAFTNWAQPASGGPCPAQRCVALEASGEHRWLEGSCTLAVDGYLCQFGFEGACPALQDEAGQAGPAVYTTPFHLVSTEFEWLPFGSVAAVQCQAGRGASLLCVKQPEGGVGWSRAGPLCLGTGCSPDNGGCEHECVEEVDGHVSCRCTEGFRLAADGRSCEDPCAQAPCEQQCEPGGPQGYSCHCRLGFRPAEDDPHRCVDTDECQIAGVCQQMCVNYVGGFECYCSEGHELEADGISCSPAGAMGAQASQDLGDELLDDGEDEEDEDEAWKAFNGGWTEMPGILWMEPTQPPDFALAYRPSFPEDREPQIPYPEPTWPPPLSAPRVPYHSSVLSVTRPVVVSATHPTLPSAHQPPVIPATHPALSRDHQIPVIAANYPDLPSAYQPGILSVSHSAQPPAHQPPMISTKYPELFPAHQSPMFPDTRVAGTQTTTHLPGIPPNHAPLVTTLGAQLPPQAPDALVLRTQATQLPIIPTAQPSLTTTSRSPVSPAHQISVPAATQPAALPTLLPSQSPTNQTSPISPTHPHSKAPQIPREDGPSPKLALWLPSPAPTAAPTALGEAGLAEHSQRDDRWL

SEQ ID NO: 1046 - protein, 172 aa, synthetic construct
  REGION 1..172: note = CD27 (P26842) ECD
ATPAPKSCPERHYWAQGKLCCQMCEPGTFLVKDCDQHRKAAQCDPCIPGVSFSPDHHTRPHCESCRHCNSGLLVRNCTITANAECACRNGWQCRDKECTECDPLPNPSLTARSSQALSPHPQPTHLPYVSEMLEARTAGHMQTLADFRQLPARTLSTHWPPQRSLCSSDFIR

SEQ ID NO: 1047 - protein, 220 aa, synthetic construct
  REGION 1..220: note = CD274 (Q9NZQ7) ECD
FTVTVPKDLYVVEYGSNMTIECKFPVEKQLDLAALIVYWEMEDKNIIQFVHGEEDLKVQHSSYRQRARLLKDQLSLGNAALQITDVKLQDAGVYRCMISYGGADYKRITVKVNAPYNKINQRILVVDPVTSEHELTCQAEGYPKAEVIWTSSDHQVLSGKTTTTNSKREEKLFNVTSTLRINTTTNEIFYCTFRRLDPEENHTAELVIPELPLAHPPNER

SEQ ID NO: 1048 - protein, 438 aa, synthetic construct
  REGION 1..438: note = CD276 (Q5ZPR3) ECD
LEVQVPEDPVVALVGTDATLCCSFSPEPGFSLAQLNLIWQLTDTKQLVHSFAEGQDQGSAYANRTALFPDLLAQGNASLRLQRVRVADEGSFTCFVSIRDFGSAAVSLQVAAPYSKPSMTLEPNKDLRPGDTVTITCSSYQGYPEAEVFWQDGQGVPLTGNVTTSQMANEQGLFDVHSILRVVLGANGTYSCLVRNPVLQQDAHSSVTITPQRSPTGAVEVQVPEDPVVALVGTDATLRCSFSPEPGFSLAQLNLIWQLTDTKQLVHSFTEGRDQGSAYANRTALFPDLLAQGNASLRLQRVRVADEGSFTCFVSIRDFGSAAVSLQVAAPYSKPSMTLEPNKDLRPGDTVTITCSSYRGYPEAEVFWQDGQGVPLTGNVTTSQMANEQGLFDVHSVLRVVLGANGTYSCLVRNPVLQQDAHGSVTITGQPMTFPPEA

SEQ ID NO: 1049 - protein, 134 aa, synthetic construct
  REGION 1..134: note = CD28 (P10747) ECD
NKILVKQSPMLVAYDNAVNLSCKYSYNLFSREFRASLHKGLDSAVEVCVVYGNYSQQLQVYSKTGFNCDGKLGNESVTFYLQNLYVNQTDIYFCKIEVMYPPPYLDNEKSNGTIIHVKGKHLCPSPLFPGPSKP

SEQ ID NO: 1050 - protein, 163 aa, synthetic construct [sequence omitted]

SEQ ID NO: 1051 - protein, 163 aa, synthetic construct
  REGION 1..163: note = CD300C (Q08708) ECD
GYFPLSHPMTVAGPVGGSLSVQCRYEKEHRTLNKFWCRPPQILRCDKIVETKGSAGKRNGRVSIRDSPANLSFTVTLENLTEEDAGTYWCGVDTPWLRDFHDPIVEVEVSVFPAGTTTASSPQSSMGTSGPPTKLPVHTWPSVTRKDSPEPSPHPGSLFSNVR

SEQ ID NO: 1052 - protein, 156 aa, synthetic construct
  REGION 1..156: note = CD300E (Q496F6) ECD
LKGPGSVTGTAGDSLTVWCQYESMYKGYNKYWCRGQYDTSCESIVETKGEEKVERNGRVSIRDHPEALAFTVTMQNLNEDDAGSYWCKIQTVWVLDSWSRDPSDLVRVYVSPAITTPRRTTHPATPPIFLVVNPGRNLSTGEVLTQNSGFRLSSPH

SEQ ID NO: 1053 - protein, 147 aa, synthetic construct
  REGION 1..147: note = CD300LD (Q6UXZ3) ECD
AKITGPTTVNGSEQGSLTVQCAYGSGWETYLKWRCQGADWNYCNILVKTNGSEQEVKKNRVSIRDNQKNHVFTVTMENLKRDDADSYWCGTERPGIDLGVKVQVTINPGTQTAVSEWTTTTASLAFTAAATQKTSSPLTRSPLKSTH

SEQ ID NO: 1054 - protein, 137 aa, synthetic construct
  REGION 1..137: note = CD300LF (Q8TDQ1) ECD
TQITGPTTVNGLERGSLTVQCVYRSGWETYLKWWCRGAIWRDCKILVKTSGSEQEVKRDRVSIKDNQKNRTFTVTMEDLMKTDADTYWCGIEKTGNDLGVTVQVTIDPAPVTQEETSSSPTLTGHHLDNRHKLLKLS

SEQ ID NO: 1055 - protein, 229 aa, synthetic construct
  REGION 1..229: note = CD300LG (Q6UXG3) ECD
LEGPEEISGFEGDTVSLQCTYREELRDHRKYWCRKGGILFSRCSGTIYAEEEGQETMKGRVSIRDSRQELSLIVTLWNLTLQDAGEYWCGVEKRGPDESLLISLFVFPGPCCPPSPSPTFQPLATTRLQPKAKAQQTQPPGLTSPGLYPAATTAKQGKTGAEAPPLPGTSQYGHERTSQYTGTSPHPATSPPAGSSRPPMQLDSTSAEDTSPALSSGSSKPRVSIPMVR

SEQ ID NO: 1056 - protein, 146 aa, synthetic construct
  REGION 1..146: note = CD302 (Q8IX05) ECD
DCPSSTWIQFQDSCYIFLQEAIKVESIEDVRNQCTDHGADMISIHNEEENAFILDTLKKQWKGPDDILLGMFYDTDDASFKWFDNSNMTFDKWTDQDDDEDLVDTCAFLHIKTGEWKKGNCEVSSVEGTLCKTAIPYKRKYLSDNH

SEQ ID NO: 1057 - protein, 194 aa, synthetic construct
  REGION 1..194: note = CD320 (Q9NPF0) ECD
SPLSTPTSAQAAGPSSGSCPPTKFQCRTSGLCVPLTWRCDRDLDCSDGSDEEECRIEPCTQKGQCPPPPGLPCPCTGVSDCSGGTDKKLRNCSRLACLAGELRCTLSDDCIPLTWRCDGHPDCPDSSDELGCGTNEILPEGDATTMGPPVTLESVTSLRNATTMGPPVTLESVPSVGNATSSSAGDQSGSPTAY

SEQ ID NO: 1058 - protein, 242 aa, synthetic construct
  REGION 1..242: note = CD33 (P20138) ECD
DPNFWLQVQESVTVQEGLCVLVPCTFFHPIPYYDKNSPVHGYWFREGAIISRDSPVATNKLDQEVQEETQGRFRLLGDPSRNNCSLSIVDARRRDNGSYFFRMERGSTKYSYKSPQLSVHVTDLTHRPKILIPGTLEPGHSKNLTCSVSWACEQGTPPIFSWLSAAPTSLGPRTTHSSVLIITPRPQDHGTNLTCQVKFAGAGVTTERTIQLNVTYVPQNPTTGIFPGDGSGKQETRAGVVH

SEQ ID NO: 1059 - protein, 259 aa, synthetic construct
  REGION 1..259: note = CD34 (P28906) ECD
SLDNNGTATPELPTQGTFSNVSTNVSYQETTTPSTLGSTSLHPVSQHGNEATTNITETTVKFTSTSVITSVYGNTNSSVQSQTSVISTVFTTPANVSTPETTLKPSLSPGNVSDLSTTSTSLATSPTKPYTSSSPILSDIKAEIKCSGIREVKLTQGICLEQNKTSSCAEFKKDRGEGLARVLCGEEQADADAGAQVCSLLLAQSEVRPQCLLLVLANRTEISSKLQLMKKHQSDLKKLGILDFTEQDVASHQSYSQKT

SEQ ID NO: 1060 - protein, 84 aa, synthetic construct [sequence omitted]

SEQ ID NO: 1061 - protein, 94 aa, synthetic construct
  REGION 1..94: note = CD3G (P09693) ECD
QSIKGNHLVKVYDYQEDGSVLLTCDAEAKNITWFKDGKMIGFLTEDKKKWNLGSNAKDPRGMYQCKGSQNKSKPLQVYYRMCQNCIELNAATIS

SEQ ID NO: 1062 - protein, 371 aa, synthetic construct
  REGION 1..371: note = CD4 (P01730) ECD
KKVVLGKKGDTVELTCTASQKKSIQFHWKNSNQIKILGNQGSFLTKGPSKLNDRADSRRSLWDQGNFPLIIKNLKIEDSDTYICEVEDQKEEVQLLVFGLTANSDTHLLQGQSLTLTLESPPGSSPSVQCRSPRGKNIQGGKTLSVSQLELQDSGTWTCTVLQNQKKVEFKIDIVVLAFQKASSIVYKKEGEQVEFSFPLAFTVEKLTGSGELWWQAERASSSKSWITFDLKNKEVSVKRVTQDPKLQMGKKLPLHLTLPQALPQYAGSGNLTLALEAKTGKLHQEVNLVVMRATQLQKNLTCEVWGPTSPKLMLSLKLENKEAKVSKREKAVWVLNPEAGMWQCLLSDSGQVLLESNIKVLPTWSTPVQP

SEQ ID NO: 1063 - protein, 173 aa, synthetic construct
  REGION 1..173: note = CD40 (P25942) ECD
EPPTACREKQYLINSQCCSLCQPGQKLVSDCTEFTETECLPCGESEFLDTWNRETHCHQHKYCDPNLGLRVQQKGTSETDTICTCEEGWHCTSEACESCVLHRSCSPGFGVKQIATGVSDTICEPCPVGFFSNVSSAFEKCHPWTSCETKDLVVQQAGTNKTDVVCGPQDRLR

SEQ ID NO: 1064 - protein, 629 aa, synthetic construct
  REGION 1..629: note = CD44 (P16070) ECD
QIDLNITCRFAGVFHVEKNGRYSISRTEAADLCKAFNSTLPTMAQMEKALSIGFETCRYGFIEGHVVIPRIHPNSICAANNTGVYILTSNTSQYDTYCFNASAPPEEDCTSVTDLPNAFDGPITITIVNRDGTRYVQKGEYRTNPEDIYPSNPTDDDVSSGSSSERSSTSGGYIFYTFSTVHPIPDEDSPWITDSTDRIPATTLMSTSATATETATKRQETWDWFSWLFLPSESKNHLHTTTQMAGTSSNTISAGWEPNEENEDERDRHLSFSGSGIDDDEDFISSTISTTPRAFDHTKQNQDWTQWNPSHSNPEVLLQTTTRMTDVDRNGTTAYEGNWNPEAHPPLIHHEHHEEEETPHSTSTIQATPSSTTEETATQKEQWFGNRWHEGYRQTPKEDSHSTTGTAAASAHTSHPMQGRTTPSPEDSSWTDFFNPISHPMGRGHQAGRRMDMDSSHSITLQPTANPNTGLVEDLDRTGPLSMTTQQSNSQSFSTSHEGLEEDKDHPTTSTLTSSNRNDVTGGRRDPNHSEGSTTLLEGYTSHYPHTKESRTFIPVTSAKTGSFGVTAVTVGDSNSNVNRSLSGDQDTFHPSGGSHTTHGSESDGHSHGSQEGGANTTSGPIRTPQIPE

SEQ ID NO: 1065 - protein, 309 aa, synthetic construct
  REGION 1..309: note = CD46 (P15529) ECD
CEEPPTFEAMELIGKPKPYYEIGERVDYKCKKGYFYIPPLATHTICDRNHTWLPVSDDACYRETCPYIRDPLNGQAVPANGTYEFGYQMHFICNEGYYLIGEEILYCELKGSVAIWSGKPPICEKVLCTPPPKIKNGKHTFSEVEVFEYLDAVTYSCDPAPGPDPFSLIGESTIYCGDNSVWSRAAPECKVVKCRFPVVENGKQISGFGKKFYYKATVMFECDKGFYLDGSDTIVCDSNSTWDPPVPKCLKVLPPSSTKPPALSHSVSTSSTTKSPASSASGPRPTYKPPVSNYPGYPKPEEGILDSLD

SEQ ID NO: 1066 - protein, 348 aa, synthetic construct
  REGION 1..348: note = CD5 (P06127) ECD
RLSWYDPDFQARLTRSNSKCQGQLEVYLKDGWHMVCSQSWGRSSKQWEDPSQASKVCQRLNCGVPLSLGPFLVTYTPQSSIICYGQLGSFSNCSHSRNDMCHSLGLTCLEPQKTTPPTTRPPPTTTPEPTAPPRLQLVAQSGGQHCAGVVEFYSGSLGGTISYEAQDKTQDLENFLCNNLQCGSFLKHLPETEAGRAQDPGEPREHQPLPIQWKIQNSSCTSLEHCFRKIKPQKSGRVLALLCSGFQPKVQSRLVGGSSICEGTVEVRQGAQWAALCDSSSARSSLRWEEVCREQQCGSVNSYRVLDAGDPTSRGLFCPHQKLSQCHELWERNSYCKKVFVTCQDPNP

SEQ ID NO: 1067 - protein, 187 aa, synthetic construct
  REGION 1..187: note = CD58 (P19256) ECD
FSQQIYGVVYGNVTFHVPSNVPLKEVLWKKQKDKVAELENSEFRAFSSFKNRVYLDTVSGSLTIYNLTSSDEDEYEMESPNITDTMKFFLYVLESLPSPTLTCALTNGSIEVQCMIPEHYNSHRGLIMYSWDCPMEQCKRNSTSIYFKMENDLPQKIQCTLSNPLFNTTSSIILTTCIPSSGHSRHR

SEQ ID NO: 1068 - protein, 385 aa, synthetic construct
  REGION 1..385: note = CD6 (P30203) ECD
HPSPAPPDQLNTSSAESELWEPGERLPVRLTNGSSSCSGTVEVRLEASWEPACGALWDSRAAEAVCRALGCGGAEAASQLAPPTPELPPPPAAGNTSVAANATLAGAPALLCSGAEWRLCEVVEHACRSDGRRARVTCAENRALRLVDGGGACAGRVEMLEHGEWGSVCDDTWDLEDAHVVCRQLGCGWAVQALPGLHFTPGRGPIHRDQVNCSGAEAYLWDCPGLPGQHYCGHKEDAGAVCSEHQSWRLTGGADRCEGQVEVHFRGVWNTVCDSEWYPSEAKVLCQSLGCGTAVERPKGLPHSLSGRMYYSCNGEELTLSNCSWRFNNSNLCSQSLAARVLCSASRSLHNLSTPEVPASVQTVTIESSVTVKIENKESRELMLL

SEQ ID NO: 1069 - protein, 298 aa, synthetic construct
  REGION 1..298: note = CD68 (P34810) ECD
NDCPHKKSATLLPSFTVTPTVTESTGTTSHRTTKSHKTTTHRTTTTGTTSHGPTTATHNPTTTSHGNVTVHPTSNSTATSQGPSTATHSPATTSHGNATVHPTSNSTATSPGFTSSAHPEPPPPSPSPSPTSKETIGDYTWTNGSQPCVHLQAQIQIRVMYTTQGGGEAWGISVLNPNKTKVQGSCEGAHPHLLLSFPYGHLSFGFMQDLQQKVVYLSYMAVEYNVSFPHAAQWTFSAQNASLRDLQAPLGQSFSCSNSSIILSPAVHLDLLSLRLQAAQLPHTGVFGQSFSCPSDRS

SEQ ID NO: 1070 - protein, 155 aa, synthetic construct
  REGION 1..155: note = CD7 (P09564) ECD
AQEVQQSPHCTTVPVGASVNITCSTSGGLRGIYLRQLGPQPQDIIYYEDGVVPTTDRRFRGRIDFSGSQDNLTITMHRLQLSDTGTYTCQAITEVNVYGSGTLVLVTEEQSQGWHRCSDAPPRASALPAPPTGSALPDPQTASALPDPPAASALP

SEQ ID NO: 1071 - protein, 111 aa, synthetic construct
  REGION 1..111: note = CD79A (P11912) ECD
LWMHKVPASLMVSLGEDAHFQCPHNSSNNANVTWWRVLHGNYTWPPEFLGPGEDPNGTLIIQNVNKSHGGIYVCRVQEGNESYQQSCGTYLRVRQPPPRPFLDMGEGTKNR

SEQ ID NO: 1072 - protein, 131 aa, synthetic construct
  REGION 1..131: note = CD79B (P40259) ECD
ARSEDRYRNPKGSACSRIWQSPRFIARKRGFTVKMHCYMNSASGNVSWLWKQEMDENPQQLKLEKGRMEESQNESLATLTIQGIRFEDNGIYFCQQKCNNTSEVYQGCGTELRVMGFSTLAQLKQRNTLKD

SEQ ID NO: 1073 - protein, 208 aa, synthetic construct [sequence omitted]

SEQ ID NO: 1074 - protein, 125 aa, synthetic construct
  REGION 1..125: note = CD83 (Q01151) ECD
TPEVKVACSEDVDLPCTAPWDPQVPYTVSWVKLLEGGEERMETPQEDHLRGQHYHQKGQNGSFDAPNERPYSLKIRNTTSCNSGTYRCTLQDPDGQRNLSGKVILRVTGCPAQRKEETFKKYRAE

SEQ ID NO: 1075 - protein, 204 aa, synthetic construct
  REGION 1..204: note = CD84 (Q9UIB8) ECD
KDSEIFTVNGILGESVTFPVNIQEPRQVKIIAWTSKTSVAYVTPGDSETAPVVTVTHRNYYERIHALGPNYNLVISDLRMEDAGDYKADINTQADPYTTTKRYNLQIYRRLGKPKITQSLMASVNSTCNVTLTCSVEKEEKNVTYNWSPLGEEGNVLQIFQTPEDQELTYTCTAQNPVSNNSDSISARQLCADIAMGFRTHHTG

SEQ ID NO: 1076 - protein, 224 aa, synthetic construct
  REGION 1..224: note = CD86 (P42081) ECD
APLKIQAYFNETADLPCQFANSQNQSLSELVVFWQDQENLVLNEVYLGKEKFDSVHSKYMGRTSFDSDSWTLRLHNLQIKDKGLYQCIIHHKKPTGMIRIHQMNSELSVLANFSQPEIVPISNITENVYINLTCSSIHGYPEPKKMSVLLRTKNSTIEYDGVMQKSQDNVTELYDVSISLSVSFPDVTSNMTIFCILETDKTRLLSSPFSIELEDPQPPPDHIP

SEQ ID NO: 1077 - protein, 161 aa, synthetic construct
  REGION 1..161: note = CD8A (P01732) ECD
SQFRVSPLDRTWNLGETVELKCQVLLSNPTSGCSWLFQPRGAAASPTFLLYLSQNKPKAAEGLDTQRFSGKRLGDTFVLTLSDFRRENEGYYFCSALSNSIMYFSHFVPVFLPAKPTTTPAPRPPTPAPTIASQPLSLRPEACRPAAGGAVHTRGLDFACD

SEQ ID NO: 1078 - protein, 149 aa, synthetic construct
  REGION 1..149: note = CD8B (P10966) ECD
LQQTPAYIKVQTNKMVMLSCEAKISLSNMRIYWLRQRQAPSSDSHHEFLALWDSAKGTIHGEEVEQEKIAVFRDASRFILNLTSVKPEDSGIYFCMIVGSPELTFGKGTQLSVVDFLPTTAQPTKKSTLKKRVCRLPRPETQKGPLCSP

SEQ ID NO: 1079 - protein, 152 aa, synthetic construct
  REGION 1..152: note = CD8BP (A6NJW9) ECD
NSVLQQTPAYIKVQTNKMVMLSCEAKISLSNMCIYWLRQRQAPSSDSHHEFLTLWDSAKGTIHGEEVEQEKIAVFRDASRFILNLTSVKPEDSGIYFCMIVGSPELTFGKGTQLSVVDFLPTTAQPTKKSTLKKRVCRLPRPETQKGPLCSP

SEQ ID NO: 1080 - protein, 557 aa, synthetic construct
  REGION 1..557: note = CD93 (Q9NPY3) ECD
ADTEAVVCVGTACYTAHSGKLSAAEAQNHCNQNGGNLATVKSKEEAQHVQRVLAQLLRREAALTARMSKFWIGLQREKGKCLDPSLPLKGFSWVGGGEDTPYSNWHKELRNSCISKRCVSLLLDLSQPLLPSRLPKWSEGPCGSPGSPGSNIEGFVCKFSFKGMCRPLALGGPGQVTYTTPFQTTSSSLEAVPFASAANVACGEGDKDETQSHYFLCKEKAPDVFDWGSSGPLCVSPKYGCNFNNGGCHQDCFEGGDGSFLCGCRPGFRLLDDLVTCASRNPCSSSPCRGGATCVLGPHGKNYTCRCPQGYQLDSSQLDCVDVDECQDSPCAQECVNTPGGFRCECWVGYEPGGPGEGACQDVDECALGRSPCAQGCTNTDGSFHCSCEEGYVLAGEDGTQCQDVDECVGPGGPLCDSLCFNTQGSFHCGCLPGWVLAPNGVSCTMGPVSLGPPSGPPDEEDKGEKEGSTVPRAATASPTRGPEGTPKATPTTSRPSLSSDAPITSAPLKMLAPSGSPGVWREPSIHHATAASGPQEPAGGDSSVATQNNDGTDGQK

SEQ ID NO: 1081 - protein, 498 aa, synthetic construct
  REGION 1..498: note = CD96 (P40200) ECD
VWEKTVNTEENVYATLGSDVNLTCQTQTVGFFVQMQWSKVTNKIDLIAVYHPQYGFYCAYGRPCESLVTFTETPENGSKWTLHLRNMSCSVSGRYECMLVLYPEGIQTKIYNLLIQTHVTADEWNSNHTIEIEINQTLEIPCFQNSSSKISSEFTYAWSVENSSTDSWVLLSKGIKEDNGTQETLISQNHLISNSTLLKDRVKLGTDYRLHLSPVQIFDDGRKFSCHIRVGPNKILRSSTTVKVFAKPEIPVIVENNSTDVLVERRFTCLLKNVFPKANITWFIDGSFLHDEKEGIYITNEERKGKDGFLELKSVLTRVHSNKPAQSDNLTIWCMALSPVPGNKVWNISSEKITFLLGSEISSTDPPLSVTESTLDTQPSPASSVSPARYPATSSVTLVDVSALRPNTTPQPSNSSMTTRGFNYPWTSSGTDTKKSVSRIPSETYSSSPSGAGSTLHDNVFTSTARAFSEVPTTANGSTKTNHVHITGIVVNKPKDGM

SEQ ID NO: 1082 - protein, 638 aa, synthetic construct
  REGION 1..638: note = CDCP1 (Q9H5V8) ECD
FEIALPRESNITVLIKLGTPTLLAKPCYIVISKRHITMLSIKSGERIVFTFSCQSPENHFVIEIQKNIDCMSGPCPFGEVQLQPSTSLLPTLNRTFIWDVKAHKSIGLELQFSIPRLRQIGPGESCPDGVTHSISGRIDATVVRIGTFCSNGTVSRIKMQEGVKMALHLPWFHPRNVSGFSIANRSSIKRLCIIESVFEGEGSATLMSANYPEGFPEDELMTWQFVVPAHLRASVSFLNFNLSNCERKEERVEYYIPGSTTNPEVFKLEDKQPGNMAGNFNLSLQGCDQDAQSPGILRLQFQVLVQHPQNESNKIYVVDLSNERAMSLTIEPRPVKQSRKFVPGCFVCLESRTCSSNLTLTSGSKHKISFLCDDLTRLWMNVEKTISCTDHRYCQRKSYSLQVPSDILHLPVELHDFSWKLLVPKDRLSLVLVPAQKLQQHTHEKPCNTSFSYLVASAIPSQDLYFGSFCPGGSIKQIQVKQNISVTLRTFAPSFQQEASRQGLTVSFIPYFKEEGVFTVTPDTKSKVYLRTPNWDRGLPSLTSVSWNISVPRDQVACLTFFKERSGVVCQTGRAFMIIQEQRTRAEEIFSLDEDVLPKPSFHHHSFWVNISNCSPTSGKQLDLLFSVTLTPRTVDLT

SEQ ID NO: 1083 - protein, 555 aa, synthetic construct
  REGION 1..555: note = CDH1 (P12830) ECD
DWVIPPISCPENEKGPFPKNLVQIKSNKDKEGKVFYSITGQGADTPPVGVFIIERETGWLKVTEPLDRERIATYTLFSHAVSSNGNAVEDPMEILITVTDQNDNKPEFTQEVFKGSVMEGALPGTSVMEVTATDADDDVNTYNAAIAYTILSQDPELPDKNMFTINRNTGVISVVTTGLDRESFPTYTLVVQAADLQGEGLSTTATAVITVTDTNDNPPIFNPTTYKGQVPENEANVVITTLKVTDADAPNTPAWEAVYTILNDDGGQFVVTTNPVNNDGILKTAKGLDFEAKQQYILHVAVTNVVPFEVSLTTSTATVTVDVLDVNEAPIFVPPEKRVEVSEDFGVGQEITSYTAQEPDTFMEQKITYRIWRDTANWLEINPDTGAISTRAELDREDFEHVKNSTYTALIIATDNGSPVATGTGTLLLILSDVNDNAPIPEPRTIFFCERNPKPQVINIIDADLPPNTSPFTAELTHGASANWTIQYNDPTQESIILKPKMALEVGDYKINLKLMDNQNKDQVTTLEVSVCDCEGAAGVCRKAQPVEAGLQIPA

SEQ ID NO: 1084 - protein, 559 aa, synthetic construct
  REGION 1..559: note = CDH10 (Q9Y6N8) ECD
GWMWNQFFLLEEYTGSDYQYVGKLHSDQDKGDGSLKYILSGDGAGTLFIIDEKTGDIHATRRIDREEKAFYTLRAQAINRRTLRPVEPESEFVIKIHDINDNEPTFPEEIYTASVPEMSVVGTSVVQVTATDADDPSYGNSARVIYSILQGQPYFSVEPETGIIRTALPNMNRENREQYQVVIQAKDMGGQMGGLSGTTTVNITLTDVNDNPPRFPQNTIHLRVLESSPVGTAIGSVKATDADTGKNAEVEYRIIDGDGTDMFDIVTEKDTQEGIITVKKPLDYESRRLYTLKVEAENTHVDPRFYYLGPFKDTTIVKISIEDVDEPPVFSRSSYLFEVHEDIEVGTIIGTVMARDPDSISSPIRFSLDRHTDLDRIFNIHSGNGSLYTSKPLDRELSQWHNLTVIAAEINNPKETTRVAVFVRILDVNDNAPQFAVFYDTFVCENARPGQLIQTISAVDKDDPLGGQKFFFSLAAVNPNFTVQDNEDNTARILTRKNGFNRHEISTYLLPVVISDNDYPIQSSTGTLTIRVCACDSQGNMQSCSAEALLLPAGLSTGA

SEQ ID NO: 1085 - protein, 564 aa, synthetic construct
  REGION 1..564: note = CDH11 (P55287) ECD
GWVWNQFFVIEEYTGPDPVLVGRLHSDIDSGDGNIKYILSGEGAGTIFVIDDKSGNIHATKTLDREERAQYTLMAQAVDRDTNRPLEPPSEFIVKVQDINDNPPEFLHETYHANVPERSNVGTSVIQVTASDADDPTYGNSAKLVYSILEGQPYFSVEAQTGIIRTALPNMDREAKEEYHVVIQAKDMGGHMGGLSGTTKVTITLTDVNDNPPKFPQSVYQMSVSEAAVPGEEVGRVKAKDPDIGENGLVTYNIVDGDGMESFEITTDYETQEGVIKLKKPVDFETKRAYSLKVEAANVHIDPKFISNGPFKDTVTVKISVEDADEPPMFLAPSYIHEVQENAAAGTVVGRVHAKDPDAANSPIRYSIDRHTDLDRFFTINPEDGFIKTTKPLDREETAWLNITVFAAEIHNRHQEAKVPVAIRVLDVNDNAPKFAAPYEGFICESDQTKPLSNQPIVTISADDKDDTANGPRFIFSLPPEIIHNPNFTVRDNRDNTAGVYARRGGFSRQKQDLYLLPIVISDGGIPPMSSTNTLTIKVCGCDVNGALLSCNAEAYILNAGLST

SEQ ID NO: 1086 - protein, 555 aa, synthetic construct
  REGION 1..555: note = CDH12 (P55289) ECD
GWVWNQFFVLEEYVGSEPQYVGKLHSDLDKGEGTVKYTLSGDGAGTVFTIDETTGDIHAIRSLDREEKPFYTLRAQAVDIETRKPLEPESEFIIKVQDINDNEPKFLDGPYVATVPEMSPVGAYVLQVKATDADDPTYGNSARVVYSILQGQPYFSIDPKTGVIRTALPNMDREVKEQYQVLIQAKDMGGQLGGLAGTTIVNITLTDVNDNPPRFPKSIFHLKVPESSPIGSAIGRIRAVDPDFGQNAEIEYNIVPGDGGNLFDIVTDEDTQEGVIKLKKPLDFETKKAYTFKVEASNLHLDHRFHSAGPFKDTATVKISVLDVDEPPVFSKPLYTMEVYEDTPVGTIIGAVTAQDLDVGSSAVRYFIDWKSDGDSYFTIDGNEGTIATNELLDRESTAQYNFSIIASKVSNPLLTSKVNILINVLDVNEFPPEISVPYETAVCENAKPGQIIQIVSAADRDLSPAGQQFSFRLSPEAAIKPNFTVRDFRNNTAGIETRRNGYSRRQQELYFLPVVIEDSSYPVQSSTNTMTIRVCRCDSDGTILSCNVEAIFLP

SEQ ID NO: 1087 - protein, 546 aa, synthetic construct
  REGION 1..546: note = CDH15 (P55291) ECD
LPYPLVQIKSDKQQLGSVIYSIQGPGVDEEPRGVFSIDKFTGKVFLNAMLDREKTDRFRLRAFALDLGGSTLEDPTDLEIVVVDQNDNRPAFLQEAFTGRVLEGAVPGTYVTRAEATDADDPETDNAALRFSILQQGSPELFSIDELTGEIRTVQVGLDREVVAVYNLTLQVADMSGDGLTATASAIITLDDINDNAPEFTRDEFFMEAIEAVSGVDVGRLEVEDRDLPGSPNWVARFTILEGDPDGQFTIRTDPKTNEGVLSIVKALDYESCEHYELKVSVQNEAPLQAAALRAERGQAKVRVHVQDTNEPPVFQENPLRTSLAEGAPPGTLVATFSARDPDTEQLQRLSYSKDYDPEDWLQVDAATGRIQTQHVLSPASPFLKGGWYRAIVLAQDDASQPRTATGTLSIEILEVNDHAPVLAPPPPGSLCSEPHQGPGLLLGATDEDLPPHGAPFHFQLSPRLPELGRNWSLSQVNVSHARLRPRHQVPEGLHRLSLLLRDSGQPPQQREQPLNVTVCRCGKDGVCLPGAAALLAGGTGLSLGA

SEQ ID NO: 1088 - protein, 768 aa, synthetic construct
  REGION 1..768: note = CDH16 (O75309) ECD
KAQPAELSVEVPENYGGNFPLYLTKLPLPREGAEGQIVLSGDSGKATEGPFAMDPDSGFLLVTRALDREEQAEYQLQVTLEMQDGHVLWGPQPVLVHVKDENDQVPHFSQAIYRARLSRGTRPGIPFLFLEASDRDEPGTANSDLRFHILSQAPAQPSPDMFQLEPRLGALALSPKGSTSLDHALERTYQLLVQVKDMGDQASGHQATATVEVSIIESTWVSLEPIHLAENLKVLYPHHMAQVHWSGGDVHYHLESHPPGPFEVNAEGNLYVTRELDREAQAEYLLQVRAQNSHGEDYAAPLELHVLVMDENDNVPICPPRDPTVSIPELSPPGTEVTRLSAEDADAPGSPNSHVVYQLLSPEPEDGVEGRAFQVDPTSGSVTLGVLPLRAGQNILLLVLAMDLAGAEGGFSSTCEVEVAVTDINDHAPEFITSQIGPISLPEDVEPGTLVAMLTAIDADLEPAFRLMDFAIERGDTEGTFGLDWEPDSGHVRLRLCKNLSYEAAPSHEVVVVVQSVAKLVGPGPGPGATATVTVLVERVMPPPKLDQESYEASVPISAPAGSFLLTIQPSDPISRTLRFSLVNDSEGWLCIEKFSGEVHTAQSLQGAQPGDTYTVLVEAQDTDEPRLSASAPLVIHFLKAPPAPALTLAPVPSQYLCTPRQDHGLIVSGPSKDPDLASGHGPYSFTLGPNPTVQRDWRLQTLNGSHAYLTLALHWVEPREHIIPVVVSHNAQMWQLLVRVIVCRCNVEGQCMRKVGRMKGMPTKLSA

SEQ ID NO: 1089 - protein, 765 aa, synthetic construct
  REGION 1..765: note = CDH17 (Q12864) ECD
QEGKFSGPLKPMTFSIYEGQEPSQIIFQFKANPPAVTFELTGETDNIFVIEREGLLYYNRALDRETRSTHNLQVAALDANGIIVEGPVPITIKVKDINDNRPTFLQSKYEGSVRQNSRPGKPFLYVNATDLDDPATPNGQLYYQIVIQLPMINNVMYFQINNKTGAISLTREGSQELNPAKNPSYNLVISVKDMGGQSENSFSDTTSVDIIVTENIWKAPKPVEMVENSTDPHPIKITQVRWNDPGAQYSLVDKEKLPRFPFSIDQEGDIYVTQPLDREEKDAYVFYAVAKDEYGKPLSYPLEIHVKVKDINDNPPTCPSPVTVFEVQENERLGNSIGTLTAHDRDEENTANSFLNYRIVEQTPKLPMDGLFLIQTYAGMLQLAKQSLKKQDTPQYNLTIEVSDKDFKTLCFVQINVIDINDQIPIFEKSDYGNLTLAEDTNIGSTILTIQATDADEPFTGSSKILYHIIKGDSEGRLGVDTDPHTNTGYVIIKKPLDFETAAVSNIVFKAENPEPLVFGVKYNASSFAKFTLIVTDVNEAPQFSQHVFQAKVSEDVAIGTKVGNVTAKDPEGLDISYSLRGDTRGWLKIDHVTGEIFSVAPLDREAGSPYRVQVVATEVGGSSLSSVSEFHLILMDVNDNPPRLAKDYTGLFFCHPLSAPGSLIFEATDDDQHLFRGPHFTFSLGSGSLQNDWEVSKINGTHARLSTRHTEFEEREYVVLIRINDGGRPPLEGIVSLPVTFCSCVEGSCFRPAGHQTGIPTVGM

SEQ ID NO: 1090 - protein, 555 aa, synthetic construct
  REGION 1..555: note = CDH18 (Q13634) ECD
GWVWNQFFVLEEHMGPDPQYVGKLHSNSDKGDGSVKYILTGEGAGTIFIIDDTTGDIHSTKSLDREQKTHYVLHAQAIDRRTNKPLEPESEFIIKVQDINDNAPKFTDGPYIVTVPEMSDMGTSVLQVTATDADDPTYGNSARVVYSILQGQPYFSVDPKTGVIRTALHNMDREAREHYSVVIQAKDMAGQVGGLSGSTTVNITLTDVNDNPPRFPQKHYQLYVPESAQVGSAVGKIKANDADTGSNADMTYSIINGDGMGIFSISTDKETREGILSLKKPLNYEKKKSYTLNIEGANTHLDFRFSHLGPFKDATMLKIIVGDVDEPPLFSMPSYLMEVYENAKIGTVVGTVLAQDPDSTNSLVRYFINYNVEDDRFFNIDANTGTIRTTKVLDREETPWYNITVTASEIDNPDLLSHVTVGIRVLDVNDNPPELAREYDIIVCENSKPGQVIHTISATDKDDFANGPRFNFFLDERLPVNPNFTLKDNEDNTASILTRRRRFSRTVQDVYYLPIMISDGGIPSLSSSSTLTIRVCACERDGRVRTCHAEAFLSS

SEQ ID NO: 1091 - protein, 553 aa, synthetic construct
  REGION 1..553: note = CDH19 (Q9H159) ECD
GWVWNQFFVPEEMNTTSHHIGQLRSDLDNGNNSFQYKLLGAGAGSTFIIDERTGDIYAIQKLDREERSLYILRAQVIDIATGRAVEPESEFVIKVSDINDNEPKFLDEPYEAIVPEMSPEGTLVIQVTASDADDPSSGNNARLLYSLLQGQPYFSVEPTTGVIRISSKMDRELQDEYWVIIQAKDMIGQPGALSGTTSVLIKLSDVNDNKPIFKESLYRLTVSESAPTGTSIGTIMAYDNDIGENAEMDYSIEEDDSQTFDIITNHETQEGIVILKKKVDFEHQNHYGIRAKVKNHHVPEQLMKYHTEASTTFIKIQVEDVDEPPLFLLPYYVFEVFEETPQGSFVGVVSATDPDNRKSPIRYSITRSKVFNINDNGTITTSNSLDREISAWYNLSITATEKYNIEQISSIPLYVQVLNINDHAPEFSQYYETYVCENAGSGQVIQTISAVDRDESIEEHHFYFNLSVEDTNNSSFTIIDNQDNTAVILTNRTGFNLQEEPVFYISILIADNGIPSLTSTNTLTIHVCDCGDSGSTQTCQYQELVLSMGFKTE

SEQ ID NO: 1092 - protein, 565 aa, synthetic construct
  REGION 1..565: note = CDH2 (P19022) ECD
DWVIPPINLPENSRGPFPQELVRIRSDRDKNLSLRYSVTGPGADQPPTGIFIINPISGQLSVTKPLDREQIARFHLRAHAVDINGNQVENPIDIVINVIDMNDNRPEFLHQVWNGTVPEGSKPGTYVMTVTAIDADDPNALNGMLRYRIVSQAPSTPSPNMFTINNETGDIITVAAGLDREKVQQYTLIIQATDMEGNPTYGLSNTATAVITVTDVNDNPPEFTAMTFYGEVPENRVDIIVANLTVTDKDQPHTPAWNAVYRISGGDPTGRFAIQTDPNSNDGLVTVVKPIDFETNRMFVLTVAAENQVPLAKGIQHPPQSTATVSVTVIDVNENPYFAPNPKIIRQEEGLHAGTMLTTFTAQDPDRYMQQNIRYTKLSDPANWLKIDPVNGQITTIAVLDRESPNVKNNIYNATFLASDNGIPPMSGTGTLQIYLLDINDNAPQVLPQEAETCETPDPNSINITALDYDIDPNAGPFAFDLPLSPVTIKRNWTITRLNGDFAQLNLKIKFLEAGIYEVPIIITDSGNPPKSNISILRVKVCQCDSNGDCTDVDRIVGAGLGTGA

SEQ ID NO: 1093 - protein, 560 aa, synthetic construct
  REGION 1..560: note = CDH20 (Q9HBT6) ECD
SWVWNQFFVLEEYTGTDPLYVGKLHSDMDRGDGSIKYILSGEGAGIVFTIDDTTGDIHAIQRLDREERAQYTLRAQALDRRTGRPMEPESEFIIKIQDINDNEPKFLDGPYVATVPEMSPVGTSVIQVTATDADDPTYGNSARVVYSILQGQPYFSVDSKTGVIRTALMNMDREAKEYYEVIIQAKDMGGQLGGLAGTTTVNITLSDVNDNPPRFPQKHYQMSVLESAPISSTVGRVFAKDLDEGINAEMKYTIVDGDGADAFDISTDPNFQVGIITVKKPLSFESKKSYTLKVEGANPHLEMRFLNLGPFQDTTTVHISVEDVDEPPVFEPGFYFVEVPEDVAIGTTIQIISAKDPDVTNNSIRYSIDRSSDPGRFFYVDITTGALMTARPLDREEFSWHNITVLAMEMNNPSQVGSVPVTIKVLDVNDNAPEFPRFYEAFVCENAKAGQLIQTVSAVDQDDPRNGQHFYYSLAPEAANNPNFTIRDNQDNTARILTRRSGFRQQEQSVFHLPILIADSGQPVLSSTGTLTIQVCSCDDDGHVMSCSPEAYMLPVSLSR

SEQ ID NO: 1094 - protein, 589 aa, synthetic construct
  REGION 1..589: note = CDH22 (Q9UJ99) ECD
LWAAGTPSPSAPGARQDGALGAGRVKRGWVWNQFFVVEEYTGTEPLYVGKIHSDSDEGDGAIKYTISGEGAGTIFLIDELTGDIHAMERLDREQKTFYTLRAQARDRATNRLLEPESEFIIKVQDINDSEPRFLHGPYIGSVAELSPTGTSVMQVMASDADDPTYGSSARLVYSVLDGEHHFTVDPKTGVIRTAVPDLDRESQERYEVVIQATDMAGQLGGLSGSTTVTIVVTDVNDNPPRFPQKMYQFSIQESAPIGTAVGRVKAEDSDVGENTDMTYHLKDESSSGGDVFKVTTDSDTQEAIIVVQKRLDFESQPVHTVILEALNKFVDPRFADLGTFRDQAIVRVAVTDVDEPPEFRPPSGLLEVQEDAQVGSLVGVVTARDPDAANRPVRYAIDRESDLDQIFDIDADTGAIVTGKGLDRETAGWHNITVLAMEADNHAQLSRASLRIRILDVNDNPPELATPYEAAVCEDAKPGQLIQTISVVDRDEPQGGHRFYFRLVPEAPSNPHFSLLDIQDNTAAVHTQHVGFNRQEQDVFFLPILVVDSGPPTLSSTGTLTIRICGCDSSGTIQSCNTTAFVMAASLSP

SEQ ID NO: 1095 - protein, 3041 aa, synthetic construct
  REGION 1..3041: note = CDH23 (Q9H251) ECD
QVNRLPFFTNHFFDTYLLISEDTPVGSSVTQLLAQDMDNDPLVFGVSGEEASRFFAVEPDTGVVWLRQPLDRETKSEFTVEFSVSDHQGVITRKVNIQVGDVNDNAPTFHNQPYSVRIPENTPVGTPIFIVNATDPDLGAGGSVLYSFQPPSQFFAIDSARGIVTVIRELDYETTQAYQLTVNATDQDKTRPLSTLANLAIIITDVQDMDPIFINLPYSTNIYEHSPPGTTVRIITAIDQDKGRPRGIGYTIVSGNTNSIFALDYISGVLTLNGLLDRENPLYSHGFILTVKGTELNDDRTPSDATVTTTFNILVIDINDNAPEFNSSEYSVAITELAQVGFALPLFIQVVDKDENLGLNSMFEVYLVGNNSHHFIISPTSVQGKADIRIRVAIPLDYETVDRYDFDLFANESVPDHVGYAKVKITLINENDNRPIFSQPLYNISLYENVTVGTSVLTVLATDNDAGTFGEVSYFFSDDPDRFSLDKDTGLIMLIARLDYELIQRFTLTIIARDGGGEETTGRVRINVLDVNDNVPTFQKDAYVGALRENEPSVTQLVRLRATDEDSPPNNQITYSIVSASAFGSYFDISLYEGYGVISVSRPLDYEQISNGLIYLTVMAMDAGNPPLNSTVPVTIEVFDENDNPPTFSKPAYFVSVVENIMAGATVLFLNATDLDRSREYGQESIIYSLEGSTQFRINARSGEITTTSLLDRETKSEYILIVRAVDGGVGHNQKTGIATVNITLLDINDNHPTWKDAPYYINLVEMTPPDSDVTTVVAVDPDLGENGTLVYSIQPPNKFYSLNSTTGKIRTTHAMLDRENPDPHEAELMRKIVVSVTDCGRPPLKATSSATVFVNLLDLNDNDPTFQNLPFVAEVLEGIPAGVSIYQVVAIDLDEGLNGLVSYRMPVGMPRMDFLINSSSGVVVTTTELDRERIAEYQLRVVASDAGTPTKSSTSTLTIHVLDVNDETPTFFPAVYNVSVSEDVPREFRVVWLNCTDNDVGLNAELSYFITGGNVDGKFSVGYRDAVVRTVVGLDRETTAAYMLILEAIDNGPVGKRHTGTATVFVTVLDVNDNRPIFLQSSYEASVPEDIPEGHSILQLKATDADEGEFGRVWYRILHGNHGNNFRIHVSNGLLMRGPRPLDRERNSSHVLIVEAYNHDLGPMRSSVRVIVYVEDINDEAPVFTQQQYSRLGLRETAGIGTSVIVVQATDRDSGDGGLVNYRILSGAEGKFEIDESTGLIITVNYLDYETKTSYMMNVSATDQAPPFNQGFCSVYITLLNELDEAVQFSNASYEAAILENLALGTEIVRVQAYSIDNLNQITYRFNAYTSTQAKALFKIDAITGVITVQGLVDREKGDFYTLTVVADDGGPKVDSTVKVYITVLDENDNSPRFDFTSDSAVSIPEDCPVGQRVATVKAWDPDAGSNGQVVFSLASGNIAGAFEIVTTNDSIGEVFVARPLDREELDHYILQVVASDRGTPPRKKDHILQVTILDINDNPPVIESPFGYNVSVNENVGGGTAVVQVRATDRDIGINSVLSYYITEGNKDMAFRMDRISGEIATRPAPPDRERQSFYHLVATVEDEGTPTLSATTHVYVTIVDENDNAPMFQQPHYEVLLDEGPDTLNTSLITIQALDLDEGPNGTVTYAIVAGNIVNTFRIDRHMGVITAAKELDYEISHGRYTLIVTATDQCPILSHRLTSTTTVLVNVNDINDNVPTFPRDYEGPFEVTEGQPGPRVWTFLAHDRDSGPNGQVEYSIMDGDPLGEFVISPVEGVLRVRKDVELDRETIAFYNLTICARDRGMPPLSSTMLVGIRVLDINDNDPVLLNLPMNITISENSPVSSFVAHVLASDADSGCNARLTFNITAGNRERAFFINATTGIVTVNRPLDRERIPEYKLTISVKDNPENPRIARRDYDLLLIFLSDENDNHPLFTKSTYQAEVMENSPAGTPLTVLNGPILALDADQDIYAVVTYQLLGAQSGLFDINSSTGVVTVRSGVIIDREAFSPPILELLLLAEDIGLLNSTAHLLITILDDNDNRPTFSPATLTVHLLENCPPGFSVLQVTATDEDSGLNGELVYRIEAGAQDRFLIHLVTGVIRVGNATIDREEQESYRLTVVATDRGTVPLSGTAIVTILIDDINDSRPEFLNPIQTVSVLESAEPGTVIANITAIDHDLNPKLEYHIVGIVAKDDTDRLVPNQEDAFAVNINTGSVMVKSPMNRELVATYEVTLSVIDNASDLPERSVSVPNAKLTVNVLDVNDNTPQFKPFGITYYMERILEGATPGTTLIAVAAVDPDKGLNGLVTYTLLDLVPPGYVQLEDSSAGKVIANRTVDYEEVHWLNFTVRASDNGSPPRAAEIPVYLEIVDINDNNPIFDQPSYQEAVFEDVPVGTIILTVTATDADSGNFALIEYSLGDGESKFAINPTTGDIYVLSSLDREKKDHYILTALAKDNPGDVASNRRENSVQVVIQVLDVNDCRPQFSKPQFSTSVYENEPAGTSVITMMATDQDEGPNGELTYSLEGPGVEAFHVDMDSGLVTTQRPLQSYEKFSLTVVATDGGEPPLWGTTMLLVEVIDVNDNRPVFVRPPNGTILHIREEIPLRSNVYEVYATDKDEGLNGAVRYSFLKTAGNRDWEFFIIDPISGLIQTAQRLDRESQAVYSLILVASDLGQPVPYETMQPLQVALEDIDDNEPLFVRPPKGSPQYQLLTVPEHSPRGTLVGNVTGAVDADEGPNAIVYYFIAAGNEEKNFHLQPDGCLLVLRDLDREREAIFSFIVKASSNRSWTPPRGPSPTLDLVADLTLQEVRVVLEDINDQPPRFTKAEYTAGVATDAKVGSELIQVLALDADIGNNSLVFYSILAIHYFRALANDSEDVGQVFTMGSMDGILRTFDLFMAYSPGYFVVDIVARDLAGHNDTAIIGIYILRDDQRVKIVINEIPDRVRGFEEEFIHLLSNITGAIVNTDNVQFHVDKKGRVNFAQTELLIHVVNRDTNRILDVDRVIQMIDENKEQLRNLFRNYNVLDVQPAISVRLPDDMSA

SEQ ID NO: 1096 - protein, 597 aa, synthetic construct
  REGION 1..597: note = CDH24 (Q86UP0) ECD
SWVWNQFFVIEEYAGPEPVLIGKLHSDVDRGEGRTKYLLTGEGAGTVFVIDEATGNIHVTKSLDREEKAQYVLLAQAVDRASNRPLEPPSEFIIKVQDINDNPPIFPLGPYHATVPEMSNVGTSVIQVTAHDADDPSYGNSAKLVYTVLDGLPFFSVDPQTGVVRTAIPNMDRETQEEFLVVIQAKDMGGHMGGLSGSTTVTVTLSDVNDNPPKFPQSLYQFSVVETAGPGTLVGRLRAQDPDLGDNALMAYSILDGEGSEAFSISTDLQGRDGLLTVRKPLDFESQRSYSFRVEATNTLIDPAYLRRGPFKDVASVRVAVQDAPEPPAFTQAAYHLTVPENKAPGTLVGQISAADLDSPASPIRYSILPHSDPERCFSIQPEEGTIHTAAPLDREARAWHNLTVLATELGWSWGPERGWVPLLVAEWSAPAAPPQRSPVGSAVGIPQDSSAQASRVQVAIQTLDENDNAPQLAEPYDTFVCDSAAPGQLIQVIRALDRDEVGNSSHVSFQGPLGPDANFTVQDNRDGSASLLLPSRPAPPRHAPYLVPIELWDWGQPALSSTATVTVSVCRCQPDGSVASCWPEAHLSAAGLSTGA

SEQ ID NO: 1097 - protein, 587 aa, synthetic construct
  REGION 1..587: note = CDH26 (Q8IXH8) ECD
DSVQQETDDLTKQTKEKIYQPLRRSKRRWVITTLELEEEDPGPFPKLIGELFNNMSYNMSLMYLISGPGVDEYPEIGLFSLEDHENGRIYVHRPVDREMTPSFTVYFDVVERSTGKIVDTSLIFNIRISDVNDHAPQFPEKEFNITVQENQSAGQPIFQMLAVDLDEENTPNSQVLYFLISQTPLLKESGFRVDRLSGEIRLSGCLDYETAPQFTLLIRARDCGEPSLSSTTTVHVDVQEGNNHRPAFTQENYKVQIPEGRASQGVLRLLVQDRDSPFTSAWRAKFNILHGNEEGHFDISTDPETNEGILNVIKPLDYETRPAQSLIIVVENEERLVFCERGKLQPPRKAAASATVSVQVTDANDPPAFHPQSFIVNKEEGARPGTLLGTFNAMDPDSQIRYELVHDPANWVSVDKNSGVVITVEPIDRESPHVNNSFYVIIIHAVDDGFPPQTATGTLMLFLSDINDNVPTLRPRSRYMEVCESAVHEPLHIEAEDPDLEPFSDPFTFELDNTWGNAEDTWKLGRNWGQSVELLTLRSLPRGNYLVPLFIGDKQGLSQKQTVHVRICPCASGLTCVELADAEVGLH

SEQ ID NO: 1098 - protein, 547 aa, synthetic construct
  REGION 1..547: note = CDH3 (P22223) ECD
DWVVAPISVPENGKGPFPQRLNQLKSNKDRDTKIFYSITGPGADSPPEGVFAVEKETGWLLLNKPLDREEIAKYELFGHAVSENGASVEDPMNISIIVTDQNDHKPKFTQDTFRGSVLEGVLPGTSVMQVTATDEDDAIYTYNGVVAYSIHSQEPKDPHDLMFTIHRSTGTISVISSGLDREKVPEYTLTIQATDMDGDGSTTTAVAVVEILDANDNAPMFDPQKYEAHVPENAVGHEVQRLTVTDLDAPNSPAWRATYLIMGGDDGDHFTITTHPESNQGILTTRKGLDFEAKNQHTLYVEVTNEAPFVLKLPTSTATIVVHVEDVNEAPVFVPPSKVVEVQEGIPTGEPVCVYTAEDPDKENQKISYRILRDPAGWLAMDPDSGQVTAVGTLDREDEQFVRNNIYEVMVLAMDNGSPPTTGTGTLLLTLIDVNDHGPVPEPRQITICNQSPVRQVLNITDKDLSPHTSPFQAQLTDDSDIYWTAEVNEEGDTVVLSLKKFLKQDTYDVHLSLSDHGNKEQLTVIRATVCDCHGHVETCPGPWKGG

SEQ ID NO: 1099 - protein, 565 aa, synthetic construct
  REGION 1..565: note = CDH4 (P55283) ECD
DWVIPPINVPENSRGPFPQQLVRIRSDKDNDIPIRYSITGVGADQPPMEVFSIDSMSGRMYVTRPMDREEHASYHLRAHAVDMNGNKVENPIDLYIYVIDMNDNRPEFINQVYNGSVDEGSKPGTYVMTVTANDADDSTTANGMVRYRIVTQTPQSPSQNMFTINSETGDIVTVAAGLDREKVQQYTVIVQATDMEGNLNYGLSNTATAIITVTDVNDNPPEFTASTFAGEVPENRVETVVANLTVMDRDQPHSPNWNAVYRIISGDPSGHFSVRTDPVTNEGMVTVVKAVDYELNRAFMLTVMVSNQAPLASGIQMSFQSTAGVTISIMDINEAPYFPSNHKLIRLEEGVPPGTVLTTFSAVDPDRFMQQAVRYSKLSDPASWLHINATNGQITTAAVLDRESLYTKNNVYEATFLAADNGIPPASGTGTLQIYLIDINDNAPELLPKEAQICEKPNLNAINITAADADVDPNIGPYVFELPFVPAAVRKNWTITRLNGDYAQLSLRILYLEAGMYDVPIIVTDSGNPPLSNTSIIKVKVCPCDDNGDCTTIGAVAAAGLGTGA

SEQ ID NO: 1100 - protein, 552 aa, synthetic construct
  REGION 1..552: note = CDH5 (P33151) ECD
DWIWNQMHIDEEKNTSLPHHVGKIKSSVSRKNAKYLLKGEYVGKVFRVDAETGDVFAIERLDRENISEYHLTAVIVDKDTGENLETPSSFTIKVHDVNDNWPVFTHRLFNASVPESSAVGTSVISVTAVDADDPTVGDHASVMYQILKGKEYFAIDNSGRIITITKSLDREKQARYEIVVEARDAQGLRGDSGTATVLVTLQDINDNFPFFTQTKYTFVVPEDTRVGTSVGSLFVEDPDEPQNRMTKYSILRGDYQDAFTIETNPAHNEGIIKPMKPLDYEYIQQYSFIVEATDPTIDLRYMSPPAGNRAQVIINITDVDEPPIFQQPFYHFQLKENQKKPLIGTVLAMDPDAARHSIGYSIRRTSDKGQFFRVTKKGDIYNEKELDREVYPWYNLTVEAKELDSTGTPTGKESIVQVHIEVLDENDNAPEFAKPYQPKVCENAVHGQLVLQISAIDKDITPRNVKFKFILNTENNFTLTDNHDNTANITVKYGQFDREHTKVHFLPVVISDNGMPSRTGTSTLTVAVCKCNEQGEFTFCEDMAAQVGVSIQ

SEQ ID NO: 1101 - protein, 562 aa, synthetic construct
  REGION 1..562: note = CDH6 (P55285) ECD
SWMWNQFFLLEEYTGSDYQYVGKLHSDQDRGDGSLKYILSGDGAGDLFIINENTGDIQATKRLDREEKPVYILRAQAINRRTGRPVEPESEFIIKIHDINDNEPIFTKEVYTATVPEMSDVGTFVVQVTATDADDPTYGNSAKVVYSILQGQPYFSVESETGIIKTALLNMDRENREQYQVVIQAKDMGGQMGGLSGTTTVNITLTDVNDNPPRFPQSTYQFKTPESSPPGTPIGRIKASDADVGENAEIEYSITDGEGLDMFDVITDQETQEGIITVKKLLDFEKKKVYTLKVEASNPYVEPRFLYLGPFKDSATVRIVVEDVDEPPVFSKLAYILQIREDAQINTTIGSVTAQDPDAARNPVKYSVDRHTDMDRIFNIDSGNGSIFTSKLLDRETLLWHNITVIATEINNPKQSSRVPLYIKVLDVNDNAPEFAEFYETFVCEKAKADQLIQTLHAVDKDDPYSGHQFSFSLAPEAASGSNFTIQDNKDNTAGILTRKNGYNRHEMSTYLLPVVISDNDYPVQSSTGTVTVRVCACDHHGNMQSCHAEALIHPTGLSTGA

SEQ ID NO: 1102 - protein, 580 aa, synthetic construct
  REGION 1..580: note = CDH7 (Q9ULB5) ECD
ELSRSRSKPYFQSGRSRTKRSWVWNQFFVLEEYMGSDPLYVGKLHSDVDKGDGSIKYILSGEGASSIFIIDENTGDIHATKRLDREEQAYYTLRAQALDRLTNKPVEPESEFVIKIQDINDNEPKFLDGPYTAGVPEMSPVGTSVVQVTATDADDPTYGNSARVVYSILQGQPYFSVEPKTGVIKTALPNMDREAKDQYLLVIQAKDMVGQNGGLSGTTSVTVTLTDVNDNPPRFPRRSYQYNVPESLPVASVVARIKAADADIGANAEMEYKIVDGDGLGIFKISVDKETQEGIITIQKELDFEAKTSYTLRIEAANKDADPRFLSLGPFSDTTTVKIIVEDVDEPPVFSSPLYPMEVSEATQVGNIIGTVAAHDPDSSNSPVRYSIDRNTDLERYFNIDANSGVITTAKSLDRETNAIHNITVLAMESQNPSQVGRGYVAITILDINDNAPEFAMDYETTVCENAQPGQVIQKISAVDKDEPSNGHQFYFSLTTDATNNHNFSLKDNKDNTASILTRRNGFRRQEQSVYYLPIFIVDSGSPSLSSTNTLTIRVCDCDADGVAQTCNAEAYVLPAGLST

SEQ ID NO: 1103 - protein, 560 aa, synthetic construct
  REGION 1..560: note = CDH8 (P55286) ECD
GWVWNQMFVLEEFSGPEPILVGRLHTDLDPGSKKIKYILSGDGAGTIFQINDVTGDIHAIKRLDREEKAEYTLTAQAVDWETSKPLEPPSEFIIKVQDINDNAPEFLNGPYHATVPEMSILGTSVTNVTATDADDPVYGNSAKLVYSILEGQPYFSIEPETAIIKTALPNMDREAKEEYLVVIQAKDMGGHSGGLSGTTTLTVTLTDVNDNPPKFAQSLYHFSVPEDVVLGTAIGRVKANDQDIGENAQSSYDIIDGDGTALFEITSDAQAQDGIIRLRKPLDFETKKSYTLKVEAANVHIDPRFSGRGPFKDTATVKIVVEDADEPPVFSSPTYLLEVHENAALNSVIGQVTARDPDITSSPIRFSIDRHTDLERQFNINADDGKITLATPLDRELSVWHNITIIATEIRNHSQISRVPVAIKVLDVNDNAPEFASEYEAFLCENGKPGQVIQTVSAMDKDDPKNGHYFLYSLLPEMVNNPNFTIKKNEDNSLSILAKHNGFNRQKQEVYLLPIIISDSGNPPLSSTSTLTIRVCGCSNDGVVQSCNVEAYVLPIGLSM

SEQ ID NO: 1104 - protein, 562 aa, synthetic construct
  REGION 1..562: note = CDH9 (Q9ULB4) ECD
GWMWNQFFLLEEYTGTDTQYVGKLHTDQDKGDGNLKYILTGDGAGSLFVIDENTGDIHAAKKLDREEKSLYILRAKAIDRKTGRQVEPESEFIIKIHDINDNEPKFTKDLYTASVPEMSGVGTSVIQVTATDADDANYGNSAKVVYSILQGQPYFSVDPESGIIKTALPDMSRENREQYQVVIQAKDMGGQMGGLSGTTTVNITLTDVNNNPPRFPQSTYQFNSPESVPLGTHLGRIKANDPDVGENAEMEYSIAEGDGADMFDVITDKDTQEGIITVKQNLDFENQMLYTLRVDASNTHPDPRFLHLGPFKDTAVVKISVEDIDEPPVFTKVSYLIEVDEDVKEGSIIGQVTAYDPDARNNLIKYSVDRHTDMDRIFGIHSENGSIFTLKALDRESSPWHNITVTATEINNPKQSSHIPVFIRILDINDHAPEFAMYYETFVCENAKPGQLIQTVSVMDKDDPPRGHKFFFEPVPEFTLNPNFTIVDNKDNTAGIMTRKDGYSRNKMSTYLLPILIFDNDYPIQSSTGTLTIRVCACDNQGNMQSCTAEALILSAGLSTGA

SEQ ID NO: 1105 - protein, 681 aa, synthetic construct
  REGION 1..681: note = CDHR1 (Q96JP9) ECD
QANFAPHFFDNGVGSTNGNMALFSLPEDTPVGSHVYTLNGTDPEGDPISYHISFDPSTRSVFSVDPTFGNITLVEELDREREDEIEAIISISDGLNLVAEKVVILVTDANDEAPRFIQEPYVALVPEDIPAGSIIFKVHAVDRDTGSGGSVTYFLQNLHSPFAVDRHSGVLRLQAGATLDYERSRTHYITVVAKDGGGRLHGADVVFSATTTVTVNVEDVQDMAPVFVGTPYYGYVYEDTLPGSEVLKVVAMDGDRGKPNRILYSLVNGNDGAFEINETSGAISITQSPAQLQREVYELHVQVTEMSPAGSPAAQATVPVTIRIVDLNNHPPTFYGESGPQNRFELSMNEHPPQGEILRGLKITVNDSDQGANAKFNLQLVGPRGIFRVVPQTVLNEAQVTIIVENSAAIDFEKSKVLTFKLLAVEVNTPEKFSSTADVVIQLLDTNDNVPKFDSLYYVARIPENAPGGSSVVAVTAVDPDTGPWGEVKYSTYGTGADLFLIHPSTGLIYTQPWASLDAEATARYNFYVKAEDMEGKYSVAEVFITLLDVNDHPPQFGKSVQKKTMVLGTPVKIEAIDEDAEEPNNLVDYSITHAEPANVFDINSHTGEIWLKNSIRSLDALHNITPGRDCLWSLEVQAKDRGSPSFSTTALLKIDITDAETLSRSPMAAFLIQTKDNPMK

SEQ ID NO: 1106 - protein, 1134 aa, synthetic construct
  REGION 1..1134: note = CDHR2 (Q9BYE9) ECD
NVAPKFLANMTSVILPEDLPVGAQAFWLVAEDQDNDPLTYGMSGPNAYFFAVTPKTGEVKLASALDYETLYTFKVTISVSDPYIQVQREMLVIVEDRNDNAPVFQNTAFSTSINETLPVGSVVFSVLAVDKDMGSAGMVVYSIEKVIPSTGDSEHLFRILANGSIVLNGSLSYNNKSAFYQLELKACDLGGMYHNTFTIQCSLPVFLSISVVDQPDLDPQFVREFYSASVAEDAAKGTSVLTVEAVDGDKGINDPVIYSISYSTRPGWFDIGADGVIRVNGSLDREQLLEADEEVQLQVTATETHLNIYGQEAKVSIWVTVRVMDVNDHKPEFYNCSLPACTFTPEEAQVNFTGYVDEHASPRIPIDDLTMVVYDPDKGSNGTFLLSLGGPDAEAFSVSPERAVGSASVQVLVRVSALVDYERQTAMAVQVVATDSVSQNFSVAMVTIHLRDINDHRPTFPQSLYVLTVPEHSATGSVVTDSIHATDPDTGAWGQITYSLLPGNGADLFQVDPVSGTVTVRNGELLDRESQAVYYLTLQATDGGNLSSSTTLQIHLLDINDNAPVVSGSYNIFVQEEEGNVSVTIQAHDNDEPGTNNSRLLFNLLPGPYSHNFSLDPDTGLLRNLGPLDREAIDPALEGRIVLTVLVSDCGEPVLGTKVNVTITVEDINDNLPIFNQSSYNFTVKEEDPGVLVGVVKAWDADQTEANNRISFSLSGSGANYFMIRGLVLGAGWAEGYLRLPPDVSLDYETQPVFNLTVSAENPDPQGGETIVDVCVNVKDVNDNPPTLDVASLRGIRVAENGSQHGQVAVVVASDVDTSAQLEIQLVNILCTKAGVDVGSLCWGWFSVAANGSVYINQSKAIDYEACDLVTLVVRACDLATDPGFQAYSNNGSLLITIEDVNDNAPYFLPENKTFVIIPELVLPNREVASVRARDDDSGNNGVILFSILRVDFISKDGATIPFQGVFSIFTSSEADVFAGSIQPVTSLDSTLQGTYQVTVQARDRPSLGPFLEATTTLNLFTVDQSYRSRLQFSTPKEEVGANRQAINAALTQATRTTVYIVDIQDIDSAARARPHSYLDAYFVFPNGSALTLDELSVMIRNDQDSLTQLLQLGLVVLGSQESQESDLSKQLIS

SEQ ID NO: 1107 - protein, 694 aa, synthetic construct
  REGION 1..694: note = CDHR3 (Q6ZTQ4) ECD
LHLILLPATGNVAENSPPGTSVHKFSVKLSASLSPVIPGFPQIVNSNPLTEAFRVNWLSGTYFEVVTTGMEQLDFETGPNIFDLQIYVKDEVGVTDLQVLTVQVTDVNEPPQFQGNLAEGLHLYIVERANPGFIYQVEAFDPEDTSRNIPLSYFLISPPKSFRMSANGTLFSTTELDFEAGHRSFHLIVEVRDSGGLKASTELQVNIVNLNDEVPRFTSPTRVYTVLEELSPGTIVANITAEDPDDEGFPSHLLYSITTVSKYFMINQLTGTIQVAQRIDRDAGELRQNPTISLEVLVKDRPYGGQENRIQITFIVEDVNDNPATCQKFTFSIMVPERTAKGTLLLDLNKFCFDDDSEAPNNRFNFTMPSGVGSGSRFLQDPAGSGKIVLIGDLDYENPSNLAAGNKYTVIIQVQDVAPPYYKNNVYVYILTSPENEFPLIFDRPSYVFDVSERRPARTRVGQVRATDKDLPQSSLLYSISTGGASLQYPNVFWINPKTGELQLVTKVDCETTPIYILRIQATNNEDTSSVTVTVNILEENDEKPICTPNSYFLALPVDLKVGTNIQNFKLTCTDLDSSPRSFRYSIGPGNVNNHFTFSPNAGSNVTRLLLTSRFDYAGGFDKIWDYKLLVYVTDDNLMSDRKKAEALVETGTVTLSIKVIPHPTTIITTTPRPRVTYQVLRKNVYSPSAWYVP

SEQ ID NO: 1108 - protein, 670 aa, synthetic construct
  REGION 1..670: note = CDHR4 (A6H8M9) ECD
DLCSLPCFINVSESQGPGTVLQFLSFNCSSYTPTPTLELLNVQPPTTFFNPPSLARWQGTYVGKLTLSSSAQLDALMVNHYKVQLKFTCGNHVMEGSLSVDVQRDLSHIQCAGQFASPAGEMIQVPETVTPGARLYTLLLPGLELHGAQMSIISAQDLPHFPGPFSINEQGWLQAPSQGLLGQAQKVFQLQISVSFGQRQSCQGMVIVKVLPVPSSQVSFLEQAQNITIPENLAPGSEVVQVQARGVDLRYEILSPVPSPLFSIGRADGVVRTTTPLELARTSGTAVSRLQVKAFEQGQLWASAKLNLTMNVQLVNLWPPRCLPALLVSQIPETAPVGTVLNTLTCEDPDSVGATLDYKLWFRSSSNPASLCLYDRVLEVNATLDCDTPGACFQHAASILVLDGGQPQMTTEVPVLVMVTPINEFSPACAPRTFRVQEDAAPHTLLGSVVGTDMDYPHDNIEYYTSGGPTTFAVDRLSGEVHLLGPLDYEQQRLYRLTVLVIDHGQDQNPNHHLSGSCTITIEVEDVNDHAPECEPPFQELTIYAPLGRSVEVTKMSCQIPQEPQRLIYSYSIVGGNSQNRFILQGAILVHSDLVLGPFWPEQPRTYELLICVADAGPSTPHLSTTATIIVHLVPRRASTVATSTHRTTVPSTMTPMLVTDTEAFWQPQP

SEQ ID NO: 1109 - protein, 644 aa, synthetic construct
  REGION 1..644: note = CDHR5 (Q9HBB8) ECD
QAQYCSVNKDIFEVEENTNVTEPLVDIHVPEGQEVTLGALSTPFAFRIQGNQLFLNVTPDYEEKSLLEAQLLCQSGGTLVTQLRVFVSVLDVNDNAPEFPFKTKEIRVEEDTKVNSTVIPETQLQAEDRDKDDILFYTLQEMTAGASDYFSLVSVNRPALRLDRPLDFYERPNMTFWLLVRDTPGENVEPSHTATATLVLNVVPADLRPPWFLPCTFSDGYVCIQAQYHGAVPTGHILPSPLVLRPGPIYAEDGDRGINQPIIYSIFRGNVNGTFIIHPDSGNLTVARSVPSPMTFLLLVKGQQADLARYSVTQVTVEAVAAAGSPPRFPQRLYRGTVARGAGAGVVVKDAAAPSQPLRIQAQDPEFSDLNSAITYRITNHSHFRMEGEVVLTTTTLAQAGAFYAEVEAHNTVTSGTATTVIEIQVSEQEPPSTDVPPSPEAGGTTGPWTSTTSEVPRPPEPSQGPSTTSSGGGTGPHPPSGTTLRPPTSSTPGGPPGAENSTSHQPATPGGDTAQTPKPGTSQPMPPGVGTSTSHQPATPSGGTAQTPEPGTSQPMPPSMGTSTSHQPATPGGGTAQTPEAGTSQPMPPGMGTSTSHQPTTPGGGTAQTPEPGTSQPMPLSKSTPSSGGGPSEDKRFSVVDMA

SEQ ID NO: 1110 - protein, 938 aa, synthetic construct
  REGION 1..938: note = CDON (Q4KMG0) ECD
DLAPYFTSEPLSAVQKLGGPVVLHCSAQPVTTRISWLHNGKTLDGNLEHVKIHQGTLTILSLNSSLLGYYQCLANNSIGAIVSGPATVSVAVLGDFGSSTKHVITAEEKSAGFIGCRVPESNPKAEVRYKIRGKWLEHSTENYLILPSGNLQILNVSLEDKGSYKCAAYNPVTHQLKVEPIGRKLLVSRPSSDDVHILHPTHSQALAVLSRSPVTLECVVSGVPAPQVYWLKDGQDIAPGSNWRRLYSHLATDSVDPADSGNYSCMAGNKSGDVKYVTYMVNVLEHASISKGLQDQIVSLGATVHFTCDVHGNPAPNCTWFHNAQPIHPSARHLTAGNGLKISGVTVEDVGMYQCVADNGIGFMHSTGRLEIENDGGFKPVIITAPVSAKVADGDFVTLSCNASGLPVPVIRWYDSHGLITSHPSQVLRSKSRKSQLSRPEGLNLEPVYFVLSQAGASSLHIQAVTQEHAGKYICEAANEHGTTQAEASLMVVPFETNTKAETVTLPDAAQNDDRSKRDGSETGLLSSFPVKVHPSAVESAPEKNASGISVPDAPIILSPPQTHTPDTYNLVWRAGKDGGLPINAYFVKYRKLDDGVGMLGSWHTVRVPGSENELHLAELEPSSLYEVLMVARSAAGEGQPAMLTFRTSKEKTASSKNTQASSPPVGIPKYPVVSEAANNNFGVVLTDSSRHSGVPEAPDRPTISTASETSVYVTWIPRANGGSPITAFKVEYKRMRTSNWLVAAEDIPPSKLSVEVRSLEPGSTYKFRVIAINHYGESFRSSASRPYQVVGFPNRFSSRPITGPHIAYTEAVSDTQIMLKWTYIPSSNNNTPIQGFYIYYRPTDSDNDSDYKRDVVEGSKQWHMIGHLQPETSYDIKMQCFNEGGESEFSNVMICETKVKRVPGASEYPVKDLSTPPNSLGSGGNVGPATSPARSSD

SEQ ID NO: 1111 - protein, 394 aa, synthetic construct
  REGION 1..394: note = CEACAM1 (P13688) ECD
QLTTESMPFNVAEGKEVLLLVHNLPQQLFGYSWYKGERVDGNRQIVGYAIGTQQATPGPANSGRETIYPNASLLIQNVTQNDTGFYTLQVIKSDLVNEEATGQFHVYPELPKPSISSNNSNPVEDKDAVAFTCEPETQDTTYLWWINNQSLPVSPRLQLSNGNRTLTLLSVTRNDTGPYECEIQNPVSANRSDPVTLNVTYGPDTPTISPSDTYYRPGANLSLSCYAASNPPAQYSWLINGTFQQSTQELFIPNITVNNSGSYTCHANNSVTGCNRTTVKTIIVTELSPVVAKPQIKASKTTVTGDKDSVNLTCSTNDTGISIRWFFKNQSLPSSERMKLSQGNTTLSINPVKREDAGTYWCEVFNPISKNQSDPIMLNVNYNALPQENGLSPG

SEQ ID NO: 1112 - protein, 125 aa, synthetic construct
  REGION 1..125: note = CEACAM19 (Q7Z692) ECD
ALYIQKIPEQPQKNQDLLLSVQGVPDTFQDFNWYLGEETYGGTRLFTYIPGIQRPQRDGSAMGQRDIVGFPNGSMLLRRAQPTDSGTYQVAITINSEWTMKAKTEVQVAEKNKELPSTHLPTNAG

SEQ ID NO: 1113 - protein, 420 aa, synthetic construct
  REGION 1..420: note = CEACAM20 (Q6UY09) ECD
QLTLNANPLDATQSEDVVLPVFGTPRTPQIHGRSRELAKPSIAVSPGTAIEQKDMVTFYCTTKDVNITIHWVSNNLSIVFHERMQLSKDGKILTILIVQREDSGTYQCEARDALLSQRSDPIFLDVKYGPDPVEIKLESGVASGEVVEVMEGSSMTFLAETKSHPPCAYTWFLLDSILSHTTRTFTIHAVSREHEGLYRCLVSNSATHLSSLGTLKVRVLETLTMPQVVPSSLNLVENARSVDLTCQTVNQSVNVQWFLSGQPLLPSEHLQLSADNRTLIIHGLQRNDTGPYACEVWNWGSRARSEPLELTINYGPDQVHITRESASEMISTIEAELNSSLTLQCWAESKPGAEYRWTLEHSTGEHLGEQLIIRALTWEHDGIYNCTASNSLTGLARSTSVLVKVVGPQSSSLSSGAIAG

SEQ ID NO: 1114 - protein, 206 aa, synthetic construct
  REGION 1..206: note = CEACAM21 (Q3KPI0) ECD
WLFIASAPFEVAEGENVHLSVVYLPENLYSYGWYKGKTVEPNQLIAAYVIDTHVRTPGPAYSGRETISPSGDLHFQNVTLEDTGYYTLQVTYRNSQIEQASHHLRVYESVAQPSIQASSTTVTEKGSVVLTCHTNNTGTSFQWIFNNQRLQVTKRMKLSWFNHMLTIDPIRQEDAGEYQCEVSNPVSSNRSDPLKLTVKSDDNTLG

SEQ ID NO: 1115 - protein, 121 aa, synthetic construct
  REGION 1..121: note = CEACAM3 (P40198) ECD
KLTIESMPLSVAEGKEVLLLVHNLPQHLFGYSWYKGERVDGNSLIVGYVIGTQQATPGAAYSGRETIYTNASLLIQNVTQNDIGFYTLQVIKSDLVNEEATGQFHVYQENAPGLPVGAVAG

SEQ ID NO: 1116 - protein, 120 aa, synthetic construct
  REGION 1..120: note = CEACAM4 (O75871) ECD
FTIEALPSSAAEGKDVLLLACNISETIQAYYWHKGKTAEGSPLIAGYITDIQANIPGAAYSGRETVYPNGSLLFQNITLEDAGSYTLRTINASYDSDQATGQLHVHQNNVPGLPVGAVAG

SEQ ID NO: 1117 - protein, 1058 aa, synthetic construct
  REGION 1..1058: note = CHL1 (O00533) ECD
IEIPSSVQQVPTIIKQSKVQVAFPFDEYFQIECEAKGNPEPTFSWTKDGNPFYFTDHRIIPSNNSGTFRIPNEGHISHFQGKYRCFASNKLGIAMSEEIEFIVPSVPKFPKEKIDPLEVEEGDPIVLPCNPPKGLPPLHIYWMNIELEHIEQDERVYMSQKGDLYFANVEEKDSRNDYCCFAAFPRLRTIVQKMPMKLTVNSSNSIKQRKPKLLLPPTESGSESSITILKGEILLLECFAEGLPTPQVDWNKIGGDLPKGRETKENYGKTLKIENVSYQDKGNYRCTASNFLGTATHDFHVIVEEPPRWTKKPQSAVYSTGSNGILLCEAEGEPQPTIKWRVNGSPVDNHPFAGDVVFPREISFTNLQPNHTAVYQCEASNVHGTILANANIDVVDVRPLIQTKDGENYATVVGYSAFLHCEFFASPEAVVSWQKVEEVKPLEGRRYHIYENGTLQINRTTEEDAGSYSCWVENAIGKTAVTANLDIRNATKLRVSPKNPRIPKLHMLELHCESKCDSHLKHSLKLSWSKDGEAFEINGTEDGRIIIDGANLTISNVTLEDQGIYCCSAHTALDSAADITQVTVLDVPDPPENLHLSERQNRSVRLTWEAGADHNSNISEYIVEFEGNKEEPGRWEELTRVQGKKTTVILPLAPFVRYQFRVIAVNEVGRSQPSQPSDHHETPPAAPDRNPQNIRVQASQPKEMIIKWEPLKSMEQNGPGLEYRVTWKPQGAPVEWEEETVTNHTLRVMTPAVYAPYDVKVQAINQLGSGPDPQSVTLYSGEDYPDTAPVIHGVDVINSTLVKVTWSTVPKDRVHGRLKGYQINWWKTKSLLDGRTHPKEVNILRFSGQRNSGMVPSLDAFSEFHLTVLAYNSKGAGPESEPYIFQTPEGVPEQPTFLKVIKVDKDTATLSWGLPKKLNGNLTGYLLQYQIINDTYEIGELNDINITTPSKPSWHLSNLNATTKYKFYLRACTSQGCGKPITEESSTLGEGSKGIGKISGVNLTQKTHPIEVFEPGAEHIVRLMTKNWGDNDSIFQDVIETRGREYAGLYDDISTQGW

SEQ ID NO: 1118 - protein, 195 aa, synthetic construct
  REGION 1..195: note = CHODL (Q9H9P2) ECD
RRVVSGQKVCFADFKHPCYKMAYFHELSSRVSFQEARLACESEGGVLLSLENEAEQKLIESMLQNLTKPGTGISDGDFWIGLWRNGDGQTSGACPDLYQWSDGSNSQYRNWYTDEPSCGSEKCVVMYHQPTANPGLGGPYLYQWNDDRCNMKHNYICKYEPEINPTAPVEKPYLTNQPGDTHQNVVVTEAGIIPN

SEQ ID NO: 1119 - protein, 870 aa, synthetic construct
  REGION 1..870: note = CLCA2 (Q9UQC9) ECD
GVQLQDNGYNGLLIAINPQVPENQNLISNIKEMITEASFYLFNATKRRVFFRNIKILIPATWKANNNSKIKQESYEKANVIVTDWYGAHGDDPYTLQYRGCGKEGKYIHFTPNFLLNDNLTAGYGSRGRVFVHEWAHLRWGVFDEYNNDKPFYINGQNQIKVTRCSSDITGIFVCEKGPCPQENCIISKLFKEGCTFIYNSTQNATASIMFMQSLSSVVEFCNASTHNQEAPNLQNQMCSLRSAWDVITDSADFHHSFPMNGTELPPPPTFSLVQAGDKVVCLVLDVSSKMAEADRLLQLQQAAEFYLMQIVEIHTFVGIASFDSKGEIRAQLHQINSNDDRKLLVSYLPTTVSAKTDISICSGLKKGFEVVEKLNGKAYGSVMILVTSGDDKLLGNCLPTVLSSGSTIHSIALGSSAAPNLEELSRLTGGLKFFVPDISNSNSMIDAFSRISSGTGDIFQQHIQLESTGENVKPHHQLKNTVTVDNTVGNDTMFLVTWQASGPPEIILFDPDGRKYYTNNFITNLTFRTASLWIPGTAKPGHWTYTLNNTHHSLQALKVTVTSRASNSAVPPATVEAFVERDSLHFPHPVMIYANVKQGFYPILNATVTATVEPETGDPVTLRLLDDGAGADVIKNDGIYSRYFFSFAANGRYSLKVHVNHSPSISTPAHSIPGSHAMYVPGYTANGNIQMNAPRKSVGRNEEERKWGFSRVSSGGSFSVLGVPAGPHPDVFPPCKIIDLEAVKVEEELTLSWTAPGEDFDQGQATSYEIRMSKSLQNIQDDFNNAILVNTSKRNPQQAGIREIFTFSPQISTNGPEHQPNGETHESHRIYVAIRAMDRNSLQSAVSNIAQAPLFIPPNSDPVPARDYL

SEQ ID NO: 1120 - protein, 873 aa, synthetic construct
  REGION 1..873: note = CLCA4 (Q14CN2) ECD
SFIKLNNNGFEDIVIVIDPSVPEDEKIIEQIEDMVTTASTYLFEATEKRFFFKNVSILIPENWKENPQYKRPKHENHKHADVIVAPPTLPGRDEPYTKQFTECGEKGEYIHFTPDLLLGKKQNEYGPPGKLFVHEWAHLRWGVFDEYNEDQPFYRAKSKKIEATRCSAGISGRNRVYKCQGGSCLSRACRIDSTTKLYGKDCQFFPDKVQTEKASIMFMQSIDSVVEFCNEKTHNQEAPSLQNIKCNFRSTWEVISNSEDFKNTIPMVTPPPPPVFSLLKISQRIVCLVLDKSGSMGGKDRLNRMNQAAKHFLLQTVENGSWVGMVHFDSTATIVNKLIQIKSSDERNTLMAGLPTYPLGGTSICSGIKYAFQVIGELHSQLDGSEVLLLTDGEDNTASSCIDEVKQSGAIVHFIALGRAADEAVIEMSKITGGSHFYVSDEAQNNGLIDAFGALTSGNTDLSQKSLQLESKGLTLNSNAWMNDTVIIDSTVGKDTFFLITWNSLPPSISLWDPSGTIMENFTVDATSKMAYLSIPGTAKVGTWAYNLQAKANPETLTITVTSRAANSSVPPITVNAKMNKDVNSFPSPMIVYAEILQGYVPVLGANVTAFIESQNGHTEVLELLDNGAGADSFKNDGVYSRYFTAYTENGRYSLKVRAHGGANTARLKLRPPLNRAAYIPGWVVNGEIEANPPRPEIDEDTQTTLEDFSRTASGGAFVVSQVPSLPLPDQYPPSQITDLDATVHEDKIILTWTAPGDNFDVGKVQRYIIRISASILDLRDSFDDALQVNTTDLSPKEANSKESFAFKPENISEENATHIFIAIKSIDKSNLTSKVSNIAQVTLFIPQANPDDIDPTPTPTPTPTPDKSHNSG

SEQ ID NO: 1121 - protein, 376 aa, synthetic construct
  REGION 1..376: note = CLEC14A (Q86T13) ECD
EHPTADRAGCSASGACYSLHHATMKRQAAEEACILRGGALSTVRAGAELRAVLALLRAGPGPGGGSKDLLFWVALERRRSHCTLENEPLRGFSWLSSDPGGLESDTLQWVEEPQRSCTARRCAVLQATGGVEPAGWKEMRCHLRANGYLCKYQFEVLCPAPRPGAASNLSYRAPFQLHSAALDFSPPGTEVSALCRGQLPISVTCIADEIGARWDKLSGDVLCPCPGRYLRAGKCAELPNCLDDLGGFACECATGFELGKDGRSCVTSGEGQPTLGGTGVPTRRPPATATSPVPQRTWPIRVDEKLGETPLVPEQDNSVTSIPEIPRWGSQSTMSTLQMSLQAESKATITPSGSVISKFNSTTSSATPQAFDSSSA

SEQ ID NO: 1122 - protein, 217 aa, synthetic construct
  REGION 1..217: note = CLMP (Q9H6B4) ECD
THTEIKRVAEEKVTLPCHHQLGLPEKDTLDIEWLLTDNEGNQKVVITYSSRHVYNNLTEEQKGRVAFASNFLAGDASLQIEPLKPSDEGRYTCKVKNSGRYVWSHVILKVLVRPSKPKCELEGELTEGSDLTLQCESSSGTEPIVYYWQRIREKEGEDERLPPKSRIDYNHPGRVLLQNLTMSYSGLYQCTAGNEAGKESCVVRVTVQYVQSIGMVA

SEQ ID NO: 1123 - protein, 831 aa, synthetic construct
  REGION 1..831: note = CLSTN1 (O94985) ECD
ARVNKHKPWLEPTYHGIVTENDNTVLLDPPLIALDKDAPLRFAESFEVTVTKEGEICGFKIHGQNVPFDAVVVDKSTGEGVIRSKEKLDCELQKDYSFTIQAYDCGKGPDGTNVKKSHKATVHIQVNDVNEYAPVFKEKSYKATVIEGKQYDSILRVEAVDADCSPQFSQICSYEIITPDVPFTVDKDGYIKNTEKLNYGKEHQYKLTVTAYDCGKKRATEDVLVKISIKPTCTPGWQGWNNRIEYEPGTGALAVFPNIHLETCDEPVASVQATVELETSHIGKGCDRDTYSEKSLHRLCGAAAGTAELLPSPSGSLNWTMGLPTDNGHDSDQVFEFNGTQAVRIPDGVVSVSPKEPFTISVWMRHGPFGRKKETILCSSDKTDMNRHHYSLYVHGCRLIFLFRQDPSEEKKYRPAEFHWKLNQVCDEEWHHYVLNVEFPSVTLYVDGTSHEPFSVTEDYPLHPSKIETQLVVGACWQEFSGVENDNETEPVTVASAGGDLHMTQFFRGNLAGLTLRSGKLADKKVIDCLYTCKEGLDLQVLEDSGRGVQIQAHPSQLVLTLEGEDLGELDKAMQHISYLNSRQFPTPGIRRLKITSTIKCFNEATCISVPPVDGYVMVLQPEEPKISLSGVHHFARAASEFESSEGVFLFPELRIISTITREVEPEGDGAEDPTVQESLVSEEIVHDLDTCEVTVEGEELNHEQESLEVDMARLQQKGIEVSSSELGMTFTGVDTMASYEEVLHLLRYRNWHARSLLDRKFKLICSELNGRYISNEFKVEVNVIHTANPMEHANHMAAQPQFVHPEHRSFVDLSGHNLANPHPFAVVPST

SEQ ID NO: 1124 - protein, 811 aa, synthetic construct
  REGION 1..811: note = CLSTN2 (Q9H4D0) ECD
SGGGGDSRQRRLLAAKVNKHKPWIETSYHGVITENNDTVILDPPLVALDKDAPVPFAGEICAFKIHGQELPFEAVVLNKTSGEGRLRAKSPIDCELQKEYTFIIQAYDCGAGPHETAWKKSHKAVVHIQVKDVNEFAPTFKEPAYKAVVTEGKIYDSILQVEAIDEDCSPQYSQICNYEIVTTDVPFAIDRNGNIRNTEKLSYDKQHQYEILVTAYDCGQKPAAQDTLVQVDVKPVCKPGWQDWTKRIEYQPGSGSMPLFPSIHLETCDGAVSSLQIVTELQTNYIGKGCDRETYSEKSLQKLCGASSGIIDLLPSPSAATNWTAGLLVDSSEMIFKFDGRQGAKVPDGIVPKNLTDQFTITMWMKHGPSPGVRAEKETILCNSDKTEMNRHHYALYVHNCRLVFLLRKDFDQADTFRPAEFHWKLDQICDKEWHYYVINVEFPVVTLYMDGATYEPYLVTNDWPIHPSHIAMQLTVGACWQGGEVTKPQFAQFFHGSLASLTIRPGKMESQKVISCLQACKEGLDINSLESLGQGIKYHFNPSQSILVMEGDDIGNINRALQKVSYINSRQFPTAGVRRLKVSSKVQCFGEDVCISIPEVDAYVMVLQAIEPRITLRGTDHFWRPAAQFESARGVTLFPDIKIVSTFAKTEAPGDVKTTDPKSEVLEEMLHNLDFCDILVIGGDLDPRQECLELNHSELHQRHLDATNSTAGYSIYGVGSMSRYEQVLHHIRYRNWRPASLEARRFRIKCSELNGRYTSNEFNLEVSILHEDQVSDKEHVNHLIVQPPFLQSVHHPESRSSIQHSSVVPS

SEQ ID NO: 1125 - protein, 828 aa, synthetic construct
  REGION 1..828: note = CLSTN3 (Q9BQT9) ECD
NKANKHKPWIEAEYQGIVMENDNTVLLNPPLFALDKDAPLRYAGEICGFRLHGSGVPFEAVILDKATGEGLIRAKEPVDCEAQKEHTFTIQAYDCGEGPDGANTKKSHKATVHVRVNDVNEFAPVFVERLYRAAVTEGKLYDRILRVEAIDGDCSPQYSQICYYEILTPNTPFLIDNDGNIENTEKLQYSGERLYKFTVTAYDCGKKRAADDAEVEIQVKPTCKPSWQGWNKRIEYAPGAGSLALFPGIRLETCDEPLWNIQATIELQTSHVAKGCDRDNYSERALRKLCGAATGEVDLLPMPGPNANWTAGLSVHYSQDSSLIYWFNGTQAVQVPLGGPSGLGSGPQDSLSDHFTLSFWMKHGVTPNKGKKEEETIVCNTVQNEDGFSHYSLTVHGCRIAFLYWPLLESARPVKFLWKLEQVCDDEWHHYALNLEFPTVTLYTDGISFDPALIHDNGLIHPPRREPALMIGACWTEEKNKEKEKGDNSTDTTQGDPLSIHHYFHGYLAGFSVRSGRLESREVIECLYACREGLDYRDFESLGKGMKVHVNPSQSLLTLEGDDVETFNHALQHVAYMNTLRFATPGVRPLRLTTAVKCFSEESCVSIPEVEGYVVVLQPDAPQILLSGTAHFARPAVDFEGTNGVPLFPDLQITCSISHQVEAKKDESWQGTVTDTRMSDEIVHNLDGCEISLVGDDLDPERESLLLDTTSLQQRGLELTNTSAYLTIAGVESITVYEEILRQARYRLRHGAALYTRKFRLSCSEMNGRYSSNEFIVEVNVLHSMNRVAHPSHVLSSQQFLHRGHQPPPEMAGHSLASSHRNSMIPSA

SEQ ID NO: 1126 - protein, 1264 aa, synthetic construct
  REGION 1..1264: note = CNTNAP1 (P78357) ECD
WGYYGCDEELVGPLYARSLGASSYYSLLTAPRFARLHGISGWSPRIGDPNPWLQIDLMKKHRIRAVATQGSFNSWDWVTRYMLLYGDRVDSWTPFYQRGHNSTFFGNVNESAVVRHDLHFHFTARYIRIVPLAWNPRGKIGLRLGLYGCPYKADILYFDGDDAISYRFPRGVSRSLWDVFAFSFKTEEKDGLLLHAEGAQGDYVTLELEGAHLLLHMSLGSSPIQPRPGHTTVSAGGVLNDQHWHYVRVDRFGRDVNFTLDGYVQRFILNGDFERLNLDTEMFIGGLVGAARKNLAYRHNFRGCIENVIFNRVNIADLAVRRHSRITFEGKVAFRCLDPVPHPINFGGPHNFVQVPGFPRRGRLAVSFRFRTWDLTGLLLFSRLGDGLGHVELTLSEGQVNVSIAQSGRKKLQFAAGYRLNDGFWHEVNFVAQENHAVISIDDVEGAEVRVSYPLLIRTGTSYFFGGCPKPASRWDCHSNQTAFHGCMELLKVDGQLVNLTLVEGRRLGFYAEVLFDTCGITDRCSPNMCEHDGRCYQSWDDFICYCELTGYKGETCHTPLYKESCEAYRLSGKTSGNFTIDPDGSGPLKPFVVYCDIRENRAWTVVRHDRLWTTRVTGSSMERPFLGAIQYWNASWEEVSALANASQHCEQWIEFSCYNSRLLNTAGGYPYSFWIGRNEEQHFYWGGSQPGIQRCACGLDRSCVDPALYCNCDADQPQWRTDKGLLTFVDHLPVTQVVIGDTNRSTSEAQFFLRPLRCYGDRNSWNTISFHTGAALRFPPIRANHSLDVSFYFRTSAPSGVFLENMGGPYCQWRRPYVRVELNTSRDVVFAFDVGNGDENLTVHSDDFEFNDDEWHLVRAEINVKQARLRVDHRPWVLRPMPLQTYIWMEYDQPLYVGSAELKRRPFVGCLRAMRLNGVTLNLEGRANASEGTSPNCTGHCAHPRLPCFHGGRCVERYSYYTCDCDLTAFDGPYCNHDIGGFFEPGTWMRYNLQSALRSAAREFSHMLSRPVPGYEPGYIPGYDTPGYVPGYHGPGYRLPDYPRPGRPVPGYRGPVYNVTGEEVSFSFSTSSAPAVLLYVSSFVRDYMAVLIKDDGTLQLRYQLGTSPYVYQLTTRPVTDGQPHSINITRVYRNLFIQVDYFPLTEQKFSLLVDSQLDSPKALYLGRVMETGVIDPEIQRYNTPGFSGCLSGVRFNNVAPLKTHFRTPRPMTAELAEALRVQGELSESNCGAMPRLVSEVPPELDPWYLPPDFPYYHDEGWVA

SEQ ID NO: 1127 - protein, 1235 aa, synthetic construct
  REGION 1..1235: note = CNTNAP2 (Q9UHC6) ECD
APSTSQKCDEPLVSGLPHVAFSSSSSISGSYSPGYAKINKRGGAGGWSPSDSDHYQWLQVDFGNRKQISAIATQGRYSSSDWVTQYRMLYSDTGRNWKPYHQDGNIWAFPGNINSDGVVRHELQHPIIARYVRIVPLDWNGEGRIGLRIEVYGCSYWADVINFDGHVVLPYRFRNKKMKTLKDVIALNFKTSESEGVILHGEGQQGDYITLELKKAKLVLSLNLGSNQLGPIYGHTSVMTGSLLDDHHWHSVVIERQGRSINLTLDRSMQHFRTNGEFDYLDLDYEITFGGIPFSGKPSSSSRKNFKGCMESINYNGVNITDLARRKKLEPSNVGNLSFSCVEPYTVPVFFNATSYLEVPGRLNQDLFSVSFQFRTWNPNGLLVFSHFADNLGNVEIDLTESKVGVHINITQTKMSQIDISSGSGLNDGQWHEVRFLAKENFAILTIDGDEASAVRTNSPLQVKTGEKYFFGGFLNQMNNSSHSVLQPSFQGCMQLIQVDDQLVNLYEVAQRKPGSFANVSIDMCAIIDRCVPNHCEHGGKCSQTWDSFKCTCDETGYSGATCHNSIYEPSCEAYKHLGQTSNYYWIDPDGSGPLGPLKVYCNMTEDKVWTIVSHDLQMQTPVVGYNPEKYSVTQLVYSASMDQISAITDSAEYCEQYVSYFCKMSRLLNTPDGSPYTWWVGKANEKHYYWGGSGPGIQKCACGIERNCTDPKYYCNCDADYKQWRKDAGFLSYKDHLPVSQVVVGDTDRQGSEAKLSVGPLRCQGDRNYWNAASFPNPSSYLHFSTFQGETSADISFYFKTLTPWGVFLENMGKEDFIKLELKSATEVSFSFDVGNGPVEIVVRSPTPLNDDQWHRVTAERNVKQASLQVDRLPQQIRKAPTEGHTRLELYSQLFVGGAGGQQGFLGCIRSLRMNGVTLDLEERAKVTSGFISGCSGHCTSYGTNCENGGKCLERYHGYSCDCSNTAYDGTFCNKDVGAFFEEGMWLRYNFQAPATNARDSSSRVDNAPDQQNSHPDLAQEEIRFSFSTTKAPCILLYISSFTTDFLAVLVKPTGSLQIRYNLGGTREPYNIDVDHRNMANGQPHSVNITRHEKTIFLKLDHYPSVSYHLPSSSDTLFNSPKSLFLGKVIETGKIDQEIHKYNTPGFTGCLSRVQFNQIAPLKAALRQTNASAHVHIQGELVESNCGASPLTLSPMSSATDPWHLDHLDSASADFPYNPGQGQAIRNGVNRNSA

SEQ ID NO: 1128 - protein, 1220 aa, synthetic construct
  REGION 1..1220: note = CNTNAP3 (Q9BZ76) ECD
GNPPDCDAPLASALPRSSFSSSSELSSSHGPGFSRLNRRDGAGGWTPLVSNKYQWLQIDLGERMEVTAVATQGGYGSSDWVTSYLLMFSDGGRNWKQYRREESIWGFPGNTNADSVVHYRLQPPFEARFLRFLPLAWNPRGRIGMRIEVYGCAYKSEVVYFDGQSALLYRLDKKPLKPIRDVISLKFKAMQSNGILLHREGQHGNHITLELIKGKLVFFLNSGNAKLPSTIAPVTLTLGSLLDDQHWHSVLIELLDTQVNFTVDKHTHHFQAKGDSSYLDLNFEISFGGIPTPGRSRAFRRKSFHGCLENLYYNGVDVTELAKKHKPQILMMGNVSFSCPQPQTVPVTFLSSRSYLALPGNSGEDKVSVTFQFRTWNRAGHLLFGELRRGSGSFVLFLKDGKLKLSLFQPGQSPRNVTAGAGLNDGQWHSVSFSAKWSHMNVVVDDDTAVQPLVAVLIDSGDTYYFGGCLDNSSGSGCKSPLGGFQGCLRLITIGDKAVDPILVQQGALGSFRDLQIDSCGITDRCLPSYCEHGGECSQSWDTFSCDCLGTGYTGETCHSSLYEQSCEAHKHRGNPSGLYYIDADGSGPLGPFLVYCNMTADAAWTVVQHGGPDAVTLRGAPSGHPRSAVSFAYAAGAGQLRSAVNLAERCEQRLALRCGTARRPDSRDGTPLSWWVGRTNETHTSWGGSLPDAQKCTCGLEGNCIDSQYYCNCDAGRNEWTSDTIVLSQKEHLPVTQIVMTDAGRPHSEAAYTLGPLLCRGDQSFWNSASFNTETSYLHFPAFHGELTADVCFFFKTTVSSGVFMENLGITDFIRIELRAPTEVTFSFDVGNGPCEVTVQSPTPFNDNQWHHVRAERNVKGASLQVDQLPQKMQPAPADGHVRLQLNSQLFIGGTATRQRGFLGCIRSLQLNGVALDLEERATVTPGVEPGCAGHCSTYGHLCRNGGRCREKRRGVTCDCAFSAYDGPFCSNEISAYFATGSSMTYHFQEHYTLSENSSSLVSSLHRDVTLTREMITLSFRTTRTPSLLLYVSSFYEEYLSVILANNGSLQIRYKLDRHQNPDAFTFDFKNMADGQLHQVKINREEAVVMVEVNQSTKKQVILSSGTEFNAVKSLILGKVLEAAGADPDTRRAATSGFTGCLSAVRFGRAAPLKAALRPSGPSRVTVRGHVAPMARCAAGAASGSPARELAPRLAGGAGRSGPADEGEPLVNADRRDSA

SEQ ID NO: 1129 - protein, 1220 aa, synthetic construct
  REGION 1..1220: note = CNTNAP3B (Q96NU0) ECD
GNPPDCDSPLASALPRSSFSSSSELSSSHGPGFSRLNRRDGAGGWTPLVSNKYQWLQIDLGERMEVTAVATQGGYGSSDWVTSYLLMFSDGGRNWKQYRREESIWGFPGNTNADSVVHYRLQPPFEARFLRFLPLAWNPRGRIGMRIEVYGCAYKSEVVYFDGQSALLYTLDKKPLKPIRDVISLKFKAMQSNGILLHREGQHGNHITLELIKGKLVFFLNSGNAKLPSTIAPVTLTLGSLLDDQHWHSVLIELLDTQVNFTVDKHTHHFQAKGDSSNLDLNFEISFGGILSPGRSRAFTRKSFHGCLENLYYNGVDVTELAKKHKPQILMMGNVSFSCPQPQTVPVTFLSSRSYLALPGNSGEDKVSVTFQFRTWNRAGHLLFGELQRGSGSFVLFLKDGKLKLSLFQAGQSPRNVTAGAGLNDGQWHSVSFSAKWSHMNVVVDDDTAVQPLVAVLIDSGDTYYFGGCLGNSSGSGCKSPLGGFQGCLRLITIGDKAVDPILVQQGALGSFRDLQIDSCGITDRCLPSYCEHGGECSQSWDTFSCDCLGTGYTGETCHSSLYEQSCEAHKHRGNPSGLYYIDADGSGPLGPFLVYCNMTADSAWTVVRHGGPDAVTLRGAPSGHPLSAVSFAYAAGAGQLRAAVNLAERCEQRLALRCGTARRPDSRDGTPLSWWVGRTNETHTSWGGSLPDAQKCTCGLEGNCIDSQYYCNCDAGQNEWTSDTIVLSQKEHLPVTQIVMTDTGQPHSEADYTLGPLLCRGDKSFWNSASFNTETSYLHFPAFHGELTADVCFFFKTTVSSGVFMENLGITDFIRIELRAPTEVTFSFDVGNGPCEVTVQSPTPFNDNQWHHVRAERNVKGASLQVDQLPQKMQPAPADGHVRLQLNSQLFIGGTATRQRGFLGCIRSLQLNGVALDLEERATVTPGVEPGCAGHCSTYGHLCRNGGRCREKRRGVTCDCAFSAYDGPFCSNEISAYFATGSSMTYHFQEHYTLSENSSSLVSSLHRDVTLTREMITLSFRTTRTPSLLLYVSSFYEEYLSVILANNGSLQIRYKLDRHQNPDAFTFDFKNMADGQLHQVKINREEAVVMVEVNQSAKKQVILSSGTEFNAVKSLILGKVLEAAGADPDTRRAATSGFTGCLSAVRFGCAAPLKAALRPSGPSRVTVRGHVAPMARCAAGAASGSPARELAPRLAGGAGRSGPVDEGEPLVNADRRDSA

SEQ ID NO: 1130 - protein, 1216 aa, synthetic construct
  REGION 1..1216: note = CNTNAP4 (Q9C0A0) ECD
GNSYDCDDPLVSALPQASFSSSSELSSSHGPGFARLNRRDGAGGWSPLVSNKYQWLQIDLGERMEVTAVATQGGYGSSNWVTSYLLMFSDSGWNWKQYRQEDSIWGFSGNANADSVVYYRLQPSIKARFLRFIPLEWNPKGRIGMRIEVFGCAYRSEVVDLDGKSSLLYRFDQKSLSPIKDIISLKFKTMQSDGILLHREGPNGDHITLQLRRARLFLLINSGEAKLPSTSTLVNLTLGSLLDDQHWHSVLIQRLGKQVNFTVDEHRHHFHARGEFNLMNLDYEISFGGIPAPGKSVSFPHRNFHGCLENLYYNGVDIIDLAKQQKPQIIAMGNVSFSCSQPQSMPVTFLSSRSYLALPDFSGEEEVSATFQFRTWNKAGLLLFSELQLISGGILLFLSDGKLKSNLYQPGKLPSDITAGVELNDGQWHSVSLSAKKNHLSVAVDGQMASAAPLLGPEQIYSGGTYYFGGCPDKSFGSKCKSPLGGFQGCMRLISISGKVVDLISVQQGSLGNFSDLQIDSCGISDRCLPNYCEHGGECSQSWSTFHCNCTNTGYRGATCHNSIYEQSCEAYKHRGNTSGFYYIDSDGSGPLEPFLLYCNMTETAWTIIQHNGSDLTRVRNTNPENPYAGFFEYVASMEQLQATINRAEHCEQEFTYYCKKSRLVNKQDGTPLSWWVGRTNETQTYWGGSSPDLQKCTCGLEGNCIDSQYYCNCDADRNEWTNDTGLLAYKEHLPVTKIVITDTGRLHSEAAYKLGPLLCQGDRSFWNSASFDTEASYLHFPTFHGELSADVSFFFKTTASSGVFLENLGIADFIRIELRSPTVVTFSFDVGNGPFEISVQSPTHFNDNQWHHVRVERNMKEASLQVDQLTPKTQPAPADGHVLLQLNSQLFVGGTATRQRGFLGCIRSLQLNGMTLDLEERAQVTPEVQPGCRGHCSSYGKLCRNGGKCRERPIGFFCDCTFSAYTGPFCSNEISAYFGSGSSVIYNFQENYLLSKNSSSHAASFHGDMKLSREMIKFSFRTTRTPSLLLFVSSFYKEYLSVIIAKNGSLQIRYKLNKYQEPDVVNFDFKNMADGQLHHIMINREEGVVFIEIDDNRRRQVHLSSGTEFSAVKSLVLGRILEHSDVDQDTALAGAQGFTGCLSAVQLSHVAPLKAALHPSHPDPVTVTGHVTESSCMAQPGTDATSRERTHSFADHSGTIDDREPLANAIKSDSA

SEQ ID NO: 1131 - protein, 1213 aa, synthetic construct
  REGION 1..1213: note = CNTNAP5 (Q8WYK1) ECD
ATNYNCDDPLASLLSPMAFSSSSDLTGTHSPAQLNWRVGTGGWSPADSNAQQWLQMDLGNRVEITAVATQGRYGSSDWVTSYSLMFSDTGRNWKQYKQEDSIWTFAGNMNADSVVHHKLLHSVRARFVRFVPLEWNPSGKIGMRVEVYGCSYKSDVADFDGRSSLLYRFNQKLMSTLKDVISLKFKSMQGDGVLFHGEGQRGDHITLELQKGRLALHLNLGDSKARLSSSLPSATLGSLLDDQHWHSVLIERVGKQVNFTVDKHTQHFRTKGETDALDIDYELSFGGIPVPGKPGTFLKKNFHGCIENLYYNGVNIIDLAKRRKHQIYTGNVTFSCSEPQIVPITFVNSSGSYLLLPGTPQIDGLSVSFQFRTWNKDGLLLSTELSEGSGTLLLSLEGGILRLVIQKMTERVAEILTGSNLNDGLWHSVSINARRNRITLTLDDEAAPPAPDSTWVQIYSGNSYYFGGCPDNLTDSQCLNPIKAFQGCMRLIFIDNQPKDLISVQQGSLGNFSDLHIDLCSIKDRCLPNYCEHGGSCSQSWTTFYCNCSDTSYTGATCHNSIYEQSCEVYRHQGNTAGFFYIDSDGSGPLGPLQVYCNITEDKIWTSVQHNNTELTRVRGANPEKPYAMALDYGGSMEQLEAVIDGSEHCEQEVAYHCRRSRLLNTPDGTPFTWWIGRSNERHPYWGGSPPGVQQCECGLDESCLDIQHFCNCDADKDEWTNDTGFLSFKDHLPVTQIVITDTDRSNSEAAWRIGPLRCYGDRRFWNAVSFYTEASYLHFPTFHAEFSADISFFFKTTALSGVFLENLGIKDFIRLEISSPSEITFAIDVGNGPVELVVQSPSLLNDNQWHYVRAERNLKETSLQVDNLPRSTRETSEEGHFRLQLNSQLFVGGTSSRQKGFLGCIRSLHLNGQKMDLEERAKVTSGVRPGCPGHCSSYGSICHNGGKCVEKHNGYLCDCTNSPYEGPFCKKEVSAVFEAGTSVTYMFQEPYPVTKNISLSSSAIYTDSAPSKENIALSFVTTQAPSLLLFINSSSQDFVVVLLCKNGSLQVRYHLNKEETHVFTIDADNFANRRMHHLKINREGRELTIQMDQQLRLSYNFSPEVEFRVIRSLTLGKVTENLGLDSEVAKANAMGFAGCMSSVQYNHIAPLKAALRHATVAPVTVHGTLTESSCGFMVDSDVNAVTTVHSSSDPFGKTDEREPLTNAVRSDS

SEQ ID NO: 1132 - protein, 1268 aa, synthetic construct
  REGION 1..1268: note = CPD (O75976) ECD
AHIKKAEATTTTTSAGAEAAEGQFDRYYHEEELESALREAAAAGLPGLARLFSIGRSVEGRPLWVLRLTAGLGSLIPEGDAGPDAAGPDAAGPLLPGRPQVKLVGNMHGDETVSRQVLIYLARELAAGYRRGDPRLVRLLNTTDVYLLPSLNPDGFERAREGDCGFGDGGPSGASGRDNSRGRDLNRSFPDQFSTGEPPALDEVPEVRALIEWIRRNKFVLSGNLHGGSVVASYPFDDSPEHKATGIYSKTSDDEVFKYLAKAYASNHPIMKTGEPHCPGDEDETFKDGITNGAHWYDVEGGMQDYNYVWANCFEITLELSCCKYPPASQLRQEWENNRESLITLIEKVHIGVKGFVKDSITGSGLENATISVAGINHNITTGRFGDFYRLLVPGTYNLTVVLTGYMPLTVTNVVVKEGPATEVDFSLRPTVTSVIPDTTEAVSTASTVAIPNILSGTSSSYQPIQPKDFHHHHFPDMEIFLRRFANEYPNITRLYSLGKSVESRELYVMEISDNPGVHEPGEPEFKYIGNMHGNEVVGRELLLNLIEYLCKNFGTDPEVTDLVHNTRIHLMPSMNPDGYEKSQEGDSISVIGRNNSNNFDLNRNFPDQFVQITDPTQPETIAVMSWMKSYPFVLSANLHGGSLVVNYPFDDDEQGLATYSKSPDDAVFQQIALSYSKENSQMFQGRPCKNMYPNEYFPHGITNGASWYNVPGGMQDWNYLQTNCFEVTIELGCVKYPLEKELPNFWEQNRRSLIQFMKQVHQGVRGFVLDATDGRGILNATISVAEINHPVTTYKTGDYWRLLVPGTYKITASARGYNPVTKNVTVKSEGAIQVNFTLVRSSTDSNNESKKGKGASSSTNDASDPTTKEFETLIKDLSAENGLESLMLRSSSNLALALYRYHSYKDLSEFLRGLVMNYPHITNLTNLGQSTEYRHIWSLEISNKPNVSEPEEPKIRFVAGIHGNAPVGTELLLALAEFLCLNYKKNPAVTQLVDRTRIVIVPSLNPDGRERAQEKDCTSKIGQTNARGKDLDTDFTNNASQPETKAIIENLIQKQDFSLSVALDGGSMLVTYPYDKPVQTVENKETLKHLASLYANNHPSMHMGQPSCPNKSDENIPGGVMRGAEWHSHLGSMKDYSVTYGHCPEITVYTSCCYFPSAARLPSLWADNKRSLLSMLVEVHKGVHGFVKDKTGKPISKAVIVLNEGIKVQTKEGGYFHVLLAPGVHNIIAIADGYQQQHSQVFVHHDAASSVVIVFDTDNRIFGLPRE

SEQ ID NO: 1133 - protein, 1930 aa, synthetic construct
  REGION 1..1930: note = CR1 (P17927) ECD
QCNAPEWLPFARPTNLTDEFEFPIGTYLNYECRPGYSGRPFSIICLKNSVWTGAKDRCRRKSCRNPPDPVNGMVHVIKGIQFGSQIKYSCTKGYRLIGSSSATCIISGDTVIWDNETPICDRIPCGLPPTITNGDFISTNRENFHYGSVVTYRCNPGSGGRKVFELVGEPSIYCTSNDDQVGIWSGPAPQCIIPNKCTPPNVENGILVSDNRSLFSLNEVVEFRCQPGFVMKGPRRVKCQALNKWEPELPSCSRVCQPPPDVLHAERTQRDKDNFSPGQEVFYSCEPGYDLRGAASMRCTPQGDWSPAAPTCEVKSCDDFMGQLLNGRVLFPVNLQLGAKVDFVCDEGFQLKGSSASYCVLAGMESLWNSSVPVCEQIFCPSPPVIPNGRHTGKPLEVFPFGKTVNYTCDPHPDRGTSFDLIGESTIRCTSDPQGNGVWSSPAPRCGILGHCQAPDHFLFAKLKTQTNASDFPIGTSLKYECRPEYYGRPFSITCLDNLVWSSPKDVCKRKSCKTPPDPVNGMVHVITDIQVGSRINYSCTTGHRLIGHSSAECILSGNAAHWSTKPPICQRIPCGLPPTIANGDFISTNRENFHYGSVVTYRCNPGSGGRKVFELVGEPSIYCTSNDDQVGIWSGPAPQCIIPNKCTPPNVENGILVSDNRSLFSLNEVVEFRCQPGFVMKGPRRVKCQALNKWEPELPSCSRVCQPPPDVLHAERTQRDKDNFSPGQEVFYSCEPGYDLRGAASMRCTPQGDWSPAAPTCEVKSCDDFMGQLLNGRVLFPVNLQLGAKVDFVCDEGFQLKGSSASYCVLAGMESLWNSSVPVCEQIFCPSPPVIPNGRHTGKPLEVFPFGKAVNYTCDPHPDRGTSFDLIGESTIRCTSDPQGNGVWSSPAPRCGILGHCQAPDHFLFAKLKTQTNASDFPIGTSLKYECRPEYYGRPFSITCLDNLVWSSPKDVCKRKSCKTPPDPVNGMVHVITDIQVGSRINYSCTTGHRLIGHSSAECILSGNTAHWSTKPPICQRIPCGLPPTIANGDFISTNRENFHYGSVVTYRCNLGSRGRKVFELVGEPSIYCTSNDDQVGIWSGPAPQCIIPNKCTPPNVENGILVSDNRSLFSLNEVVEFRCQPGFVMKGPRRVKCQALNKWEPELPSCSRVCQPPPEILHGEHTPSHQDNFSPGQEVFYSCEPGYDLRGAASLHCTPQGDWSPEAPRCAVKSCDDFLGQLPHGRVLFPLNLQLGAKVSFVCDEGFRLKGSSVSHCVLVGMRSLWNNSVPVCEHIFCPNPPAILNGRHTGTPSGDIPYGKEISYTCDPHPDRGMTFNLIGESTIRCTSDPHGNGVWSSPAPRCELSVRAGHCKTPEQFPFASPTIPINDFEFPVGTSLNYECRPGYFGKMFSISCLENLVWSSVEDNCRRKSCGPPPEPFNGMVHINTDTQFGSTVNYSCNEGFRLIGSPSTTCLVSGNNVTWDKKAPICEIISCEPPPTISNGDFYSNNRTSFHNGTVVTYQCHTGPDGEQLFELVGERSIYCTSKDDQVGVWSSPPPRCISTNKCTAPEVENAIRVPGNRSFFSLTEIIRFRCQPGFVMVGSHTVQCQTNGRWGPKLPHCSRVCQPPPEILHGEHTLSHQDNFSPGQEVFYSCEPSYDLRGAASLHCTPQGDWSPEAPRCTVKSCDDFLGQLPHGRVLLPLNLQLGAKVSFVCDEGFRLKGRSASHCVLAGMKALWNSSVPVCEQIFCPNPPAILNGRHTGTPFGDIPYGKEISYACDTHPDRGMTFNLIGESSIRCTSDPQGNGVWSSPAPRCELSVPAACPHPPKIQNGHYIGGHVSLYLPGMTISYICDPGYLLVGKGFIFCTDQGIWSQLDHYCKEVNCSFPLFMNGISKELEMKKVYHYGDYVTLKCEDGYTLEGSPWSQCQADDRWDPPLAKCTSRTHD

SEQ ID NO: 1134 - protein, 951 aa, synthetic construct
  REGION 1..951: note = CR2 (P20023) ECD
ISCGSPPPILNGRISYYSTPIAVGTVIRYSCSGTFRLIGEKSLLCITKDKVDGTWDKPAPKCEYFNKYSSCPEPIVPGGYKIRGSTPYRHGDSVTFACKTNFSMNGNKSVWCQANNMWGPTRLPTCVSVFPLECPALPMIHNGHHTSENVGSIAPGLSVTYSCESGYLLVGEKIINCLSSGKWSAVPPTCEEARCKSLGRFPNGKVKEPPILRVGVTANFFCDEGYRLQGPPSSRCVIAGQGVAWTKMPVCEEIFCPSPPPILNGRHIGNSLANVSYGSIVTYTCDPDPEEGVNFILIGESTLRCTVDSQKTGTWSGPAPRCELSTSAVQCPHPQILRGRMVSGQKDRYTYNDTVIFACMFGFTLKGSKQIRCNAQGTWEPSAPVCEKECQAPPNILNGQKEDRHMVRFDPGTSIKYSCNPGYVLVGEESIQCTSEGVWTPPVPQCKVAACEATGRQLLTKPQHQFVRPDVNSSCGEGYKLSGSVYQECQGTIPWFMEIRLCKEITCPPPPVIYNGAHTGSSLEDFPYGTTVTYTCNPGPERGVEFSLIGESTIRCTSNDQERGTWSGPAPLCKLSLLAVQCSHVHIANGYKISGKEAPYFYNDTVTFKCYSGFTLKGSSQIRCKADNTWDPEIPVCEKETCQHVRQSLQELPAGSRVELVNTSCQDGYQLTGHAYQMCQDAENGIWFKKIPLCKVIHCHPPPVIVNGKHTGMMAENFLYGNEVSYECDQGFYLLGEKKLQCRSDSKGHGSWSGPSPQCLRSPPVTRCPNPEVKHGYKLNKTHSAYSHNDIVYVDCNPGFIMNGSRVIRCHTDNTWVPGVPTCIKKAFIGCPPPPKTPNGNHTGGNIARFSPGMSILYSCDQGYLLVGEALLLCTHEGTWSQPAPHCKEVNCSSPADMDGIQKGLEPRKMYQYGAVVTLECEDGYMLEGSPQSQCQSDHQWNPPLAVCRSR

SEQ ID NO: 1135 - protein, 1322 aa, synthetic construct
  REGION 1..1322: note = CRB1 (P82279) ECD
FCNKNNTRCLSNSCQNNSTCKDFSKDNDCSCSDTANNLDKDCDNMKDPCFSNPCQGSATCVNTPGERSFLCKCPPGYSGTICETTIGSCGKNSCQHGGICHQDPIYPVCICPAGYAGRFCEIDHDECASSPCQNGAVCQDGIDGYSCFCVPGYQGRHCDLEVDECASDPCKNEATCLNEIGRYTCICPHNYSGVNCELEIDECWSQPCLNGATCQDALGAYFCDCAPGFLGDHCELNTDECASQPCLHGGLCVDGENRYSCNCTGSGFTGTHCETLMPLCWSKPCHNNATCEDSVDNYTCHCWPGYTGAQCEIDLNECNSNPCQSNGECVELSSEKQYGRITGLPSSFSYHEASGYVCICQPGFTGIHCEEDVNECSSNPCQNGGTCENLPGNYTCHCPFDNLSRTFYGGRDCSDILLGCTHQQCLNNGTCIPHFQDGQHGFSCLCPSGYTGSLCEIATTLSFEGDGFLWVKSGSVTTKGSVCNIALRFQTVQPMALLLFRSNRDVFVKLELLSGYIHLSIQVNNQSKVLLFISHNTSDGEWHFVEVIFAEAVTLTLIDDSCKEKCIAKAPTPLESDQSICAFQNSFLGGLPVGMTSNGVALLNFYNMPSTPSFVGCLQDIKIDWNHITLENISSGSSLNVKAGCVRKDWCESQPCQSRGRCINLWLSYQCDCHRPYEGPNCLREYVAGRFGQDDSTGYVIFTLDESYGDTISLSMFVRTLQPSGLLLALENSTYQYIRVWLERGRLAMLTPNSPKLVVKFVLNDGNVHLISLKIKPYKIELYQSSQNLGFISASTWKIEKGDVIYIGGLPDKQETELNGGFFKGCIQDVRLNNQNLEFFPNPTNNASLNPVLVNVTQGCAGDNSCKSNPCHNGGVCHSRWDDFSCSCPALTSGKACEEVQWCGFSPCPHGAQCQPVLQGFECIANAVFNGQSGQILFRSNGNITRELTNITFGFRTRDANVIILHAEKEPEFLNISIQDSRLFFQLQSGNSFYMLSLTSLQSVNDGTWHEVTLSMTDPLSQTSRWQMEVDNETPFVTSTIATGSLNFLKDNTDIYVGDRAIDNIKGLQGCLSTIEIGGIYLSYFENVHGFINKPQEEQFLKISTNSVVTGCLQLNVCNSNPCLHGGNCEDIYSSYHCSCPLGWSGKHCELNIDECFSNPCIHGNCSDRVAAYHCTCEPGYTGVNCEVDIDNCQSHQCANGATCISHTNGYSCLCFGNFTGKFCRQSRLPSTVCGNEKTNLTCYNGGNCTEFQTELKCMCRPGFTGEWCEKDIDECASDPCVNGGLCQDLLNKFQCLCDVAFAGERCEVDLADDLISDIFTT

SEQ ID NO: 1136 - protein, 1196 aa, synthetic construct
  REGION 1..1196: note = CRB2 (Q5IJ48) ECD
LLAGTVPSEPPSACASDPCAPGTECQATESGGYTCGPMEPRGCATQPCHHGALCVPQGPDPTGFRCYCVPGFQGPRCELDIDECASRPCHHGATCRNLADRYECHCPLGYAGVTCEMEVDECASAPCLHGGSCLDGVGSFRCVCAPGYGGTRCQLDLDECQSQPCAHGGTCHDLVNGFRCDCAGTGYEGTHCEREVLECASAPCEHNASCLEGLGSFRCLCWPGYSGELCEVDEDECASSPCQHGGRCLQRSDPALYGGVQAAFPGAFSFRHAAGFLCHCPPGFEGADCGVEVDECASRPCLNGGHCQDLPNGFQCHCPDGYAGPTCEEDVDECLSDPCLHGGTCSDTVAGYICRCPETWGGRDCSVQLTGCQGHTCPLAATCIPIFESGVHSYVCHCPPGTHGPFCGQNTTFSVMAGSPIQASVPAGGPLGLALRFRTTLPAGTLATRNDTKESLELALVAATLQATLWSYSTTVLVLRLPDLALNDGHWHQVEVVLHLATLELRLWHEGCPARLCVASGPVALASTASATPLPAGISSAQLGDATFAGCLQDVRVDGHLLLPEDLGENVLLGCERREQCRPLPCVHGGSCVDLWTHFRCDCARPHRGPTCADEIPAATFGLGGAPSSASFLLQELPGPNLTVSFLLRTRESAGLLLQFANDSAAGLTVFLSEGRIRAEVPGSPAVVLPGRWDDGLRHLVMLSFGPDQLQDLGQHVHVGGRLLAADSQPWGGPFRGCLQDLRLDGCHLPFFPLPLDNSSQPSELGGRQSWNLTAGCVSEDMCSPDPCFNGGTCLVTWNDFHCTCPANFTGPTCAQQLWCPGQPCLPPATCEEVPDGFVCVAEATFREGPPAAFSGHNASSGRLLGGLSLAFRTRDSEAWLLRAAAGALEGVWLAVRNGSLAGGVRGGHGLPGAVLPIPGPRVADGAWHRVRLAMERPAATTSRWLLWLDGAATPVALRGLASDLGFLQGPGAVRILLAENFTGCLGRVALGGLPLPLARPRPGAAPGAREHFASWPGTPAPILGCRGAPVCAPSPCLHDGACRDLFDAFACACGPGWEGPRCEAHVDPCHSAPCARGRCHTHPDGRFECRCPPGFGGPRCRLPVPSKECSLNVTCLDGSPCEGGSPAANCSCLEGLAGQRCQVPTLPCEANPCLNGGTCRAAGGVSECICNARFSGQFCEVAKGLPLPLPFPLLE

SEQ ID NO: 1137 - protein, 33 aa, synthetic construct
  REGION 1..33: note = CRB3 (Q9BUF7) ECD
QIQTTSANENSTVLPSSTSSSSDGNLRPEAITA

SEQ ID NO: 1138 - protein, 905 aa, synthetic construct
  REGION 1..905: note = CRIM1 (Q9NZV1) ECD
LVCLPCDESKCEEPRNCPGSIVQGVCGCCYTCASQRNESCGGTFGIYGTCDRGLRCVIRPPLNGDSLTEYEAGVCEDENWTDDQLLGFKPCNENLIAGCNIINGKCECNTIRTCSNPFEFPSQDMCLSALKRIEEEKPDCSKARCEVQFSPRCPEDSVLIEGYAPPGECCPLPSRCVCNPAGCLRKVCQPGNLNILVSKASGKPGECCDLYECKPVFGVDCRTVECPPVQQTACPPDSYETQVRLTADGCCTLPTRCECLSGLCGFPVCEVGSTPRIVSRGDGTPGKCCDVFECVNDTKPACVFNNVEYYDGDMFRMDNCRFCRCQGGVAICFTAQCGEINCERYYVPEGECCPVCEDPVYPFNNPAGCYANGLILAHGDRWREDDCTFCQCVNGERHCVATVCGQTCTNPVKVPGECCPVCEEPTIITVDPPACGELSNCTLTGKDCINGFKRDHNGCRTCQCINTEELCSERKQGCTLNCPFGFLTDAQNCEICECRPRPKKCRPIICDKYCPLGLLKNKHGCDICRCKKCPELSCSKICPLGFQQDSHGCLICKCREASASAGPPILSGTCLTVDGHHHKNEESWHDGCRECYCLNGREMCALITCPVPACGNPTIHPGQCCPSCADDFVVQKPELSTPSICHAPGGEYFVEGETWNIDSCTQCTCHSGRVLCETEVCPPLLCQNPSRTQDSCCPQCTDQPFRPSLSRNNSVPNYCKNDEGDIFLAAESWKPDVCTSCICIDSVISCFSESCPSVSCERPVLRKGQCCPYCIEDTIPKKVVCHFSGKAYADEERWDLDSCTHCYCLQGQTLCSTVSCPPLPCVEPINVEGSCCPMCPEMYVPEPTNIPIEKTNHRGEVDLEVPLWPTPSENDIVHLPRDMGHLQVDYRDNRLHPSEDSSLDS

SEQ ID NO: 1139 - protein, 209 aa, synthetic construct
  REGION 1..209: note = CRLF2 (Q9HC73) ECD
QGGAAEGVQIQIIYFNLETVQVTWNASKYSRTNLTFHYRFNGDEAYDQCTNYLLQEGHTSGCLLDAEQRDDILYFSIRNGTHPVFTASRWMVYYLKPSSPKHVRFSWHQDAVTVTCSDLSYGDLLYEVQYRSPFDTEWQSKQENTCNVTIEGLDAEKCYSFWVRVKAMEDVYGPDTYPSDWSEVTCWQRGEIRDACAETPTPPKPKLSK

SEQ ID NO: 1140 - protein, 270 aa, synthetic construct
  REGION 1..270: note = CRTAM (O95727) ECD
SLTNHTETITVEEGQTLTLKCVTSLRKNSSLQWLTPSGFTIFLNEYPALKNSKYQLLHHSANQLSITVPNVTLQDEGVYKCLHYSDSVSTKEVKVIVLATPFKPILEASVIRKQNGEEHVVLMCSTMRSKPPPQITWLLGNSMEVSGGTLHEFETDGKKCNTTSTLIIHTYGKNSTVDCIIRHRGLQGRKLVAPFRFEDLVTDEETASDALERNSLSSQDPQQPTSTVSVTEDSSTSEIDKEEKEQTTQDPDLTTEANPQYLGLARKKSG

SEQ ID NO: 1141 - protein, 464 aa, synthetic construct
  REGION 1..464: note = CSF1 (P09603) ECD
EEVSEYCSHMIGSGHLQSLQRLIDSQMETSCQITFEFVDQEQLKDPVCYLKKAFLLVQDIMEDTMRFRDNTPNAIAIVQLQELSLRLKSCFTKDYEEHDKACVRTFYETPLQLLEKVKNVFNETKNLLDKDWNIFSKNCNNSFAECSSQDVVTKPDCNCLYPKAIPSSDPASVSPHQPLAPSMAPVAGLTWEDSEGTEGSSLLPGEQPLHTVDPGSAKQRPPRSTCQSFEPPETPVVKDSTIGGSPQPRPSVGAFNPGMEDILDSAMGTNWVPEEASGEASEIPVPQGTELSPSRPGGGSMQTEPARPSNFLSASSPLPASAKGQQPADVTGTALPRVGPVRPTGQDWNHTPQKTDHPSALLRDPPEPGSPRISSLRPQGLSNPSTLSAQPQLSRSHSSGSVLPLGELEGRRSTRDRRSPAEPEGGPASEGAARPLPRFNSVPLTDTGHERQSEGSFSPQLQES

SEQ ID NO: 1142 - protein, 498 aa, synthetic construct
  REGION 1..498: note = CSF1R (P07333) ECD
IPVIEPSVPELVVKPGATVTLRCVGNGSVEWDGPPSPHWTLYSDGSSSILSTNNATFQNTGTYRCTEPGDPLGGSAAIHLYVKDPARPWNVLAQEVVVFEDQDALLPCLLTDPVLEAGVSLVRVRGRPLMRHTNYSFSPWHGFTIHRAKFIQSQDYQCSALMGGRKVMSISIRLKVQKVIPGPPALTLVPAELVRIRGEAAQIVCSASSVDVNFDVFLQHNNTKLAIPQQSDFHNNRYQKVLTLNLDQVDFQHAGNYSCVASNVQGKHSTSMFFRVVESAYLNLSSEQNLIQEVTVGEGLNLKVMVEAYPGLQGFNWTYLGPFSDHQPEPKLANATTKDTYRHTFTLSLPRLKPSEAGRYSFLARNPGGWRALTFELTLRYPPEVSVIWTFINGSGTLLCAASGYPQPNVTWLQCSGHTDRCDEAQVLQVWDDPYPEVLSQEPFHKVTVQSLLTVETLEHNQTYECRAHNSVGSGSWAFIPISAGAHTHPPDEFLFTP

SEQ ID NO: 1143 - protein, 298 aa, synthetic construct
  REGION 1..298: note = CSF2RA (P15509) ECD
EKSDLRTVAPASSLNVRFDSRTMNLSWDCQENTTFSKCFLTDKKNRVVEPRLSNNECSCTFREICLHEGVTFEVHVNTSQRGFQQKLLYPNSGREGTAAQNFSCFIYNADLMNCTWARGPTAPRDVQYFLYIRNSKRRREIRCPYYIQDSGTHVGCHLDNLSGLTSRNYFLVNGTSREIGIQFFDSLLDTKKIERFNPPSNVTVRCNTTHCLVRWKQPRTYQKLSYLDFQYQLDVHRKNTQPGTENLLINVSGDLENRYNFPSSEPRAKHSVKIRAADVRILNWSSWSEAIEFGSDDG

SEQ ID NO: 1144 - protein, 427 aa, synthetic construct
  REGION 1..427: note = CSF2RB (P32927) ECD
WERSLAGAEETIPLQTLRCYNDYTSHITCRWADTQDAQRLVNVTLIRRVNEDLLEPVSCDLSDDMPWSACPHPRCVPRRCVIPCQSFVVTDVDYFSFQPDRPLGTRLTVTLTQHVQPPEPRDLQISTDQDHFLLTWSVALGSPQSHWLSPGDLEFEVVYKRLQDSWEDAAILLSNTSQATLGPEHLMPSSTYVARVRTRLAPGSRLSGRPSKWSPEVCWDSQPGDEAQPQNLECFFDGAAVLSCSWEVRKEVASSVSFGLFYKPSPDAGEEECSPVLREGLGSLHTRHHCQIPVPDPATHGQYIVSVQPRRAEKHIKSSVNIQMAPPSLNVTKDGDSYSLRWETMKMRYEHIDHTFEIQYRKDTATWKDSKTETLQNAHSMALPALEPSTRYWARVRVRTSRTGYNGIWSEWSEARSWDTESVLPMW

SEQ ID NO: 1145 - protein, 603 aa, synthetic construct
  REGION 1..603: note = CSF3R (Q99062) ECD
ECGHISVSAPIVHLGDPITASCIIKQNCSHLDPEPQILWRLGAELQPGGRQQRLSDGTQESIITLPHLNHTQAFLSCCLNWGNSLQILDQVELRAGYPPAIPHNLSCLMNLTTSSLICQWEPGPETHLPTSFTLKSFKSRGNCQTQGDSILDCVPKDGQSHCCIPRKHLLLYQNMGIWVQAENALGTSMSPQLCLDPMDVVKLEPPMLRTMDPSPEAAPPQAGCLQLCWEPWQPGLHINQKCELRHKPQRGEASWALVGPLPLEALQYELCGLLPATAYTLQIRCIRWPLPGHWSDWSPSLELRTTERAPTVRLDTWWRQRQLDPRTVQLFWKPVPLEEDSGRIQGYVVSWRPSGQAGAILPLCNTTELSCTFHLPSEAQEVALVAYNSAGTSRPTPVVFSESRGPALTRLHAMARDPHSLWVGWEPPNPWPQGYVIEWGLGPPSASNSNKTWRMEQNGRATGFLLKENIRPFQLYEIIVTPLYQDTMGPSQHVYAYSQEMAPSHAPELHLKHIGKTWAQLEWVPEPPELGKSPLTHYTIFWTNAQNQSFSAILNASSRGFVLHGLEPASLYHIHLMAASQAGATNSTVLTLMTLTPEGSELH

SEQ ID NO: 1146 - protein, 3461 aa, synthetic construct
  REGION 1..3461: note = CSMD1 (Q96PZ7) ECD
AKGQNCGGLVQGPNGTIESPGFPHGYPNYANCTWIIITGERNRIQLSFHTFALEEDFDILSVYDGQPQQGNLKVRLSGFQLPSSIVSTGSILTLWFTTDFAVSAQGFKALYEVLPSHTCGNPGEILKGVLHGTRFNIGDKIRYSCLPGYILEGHAILTCIVSPGNGASWDFPAPFCRAEGACGGTLRGTSSSISSPHFPSEYENNADCTWTILAEPGDTIALVFTDFQLEEGYDFLEISGTEAPSIWLTGMNLPSPVISSKNWLRLHFTSDSNHRRKGFNAQFQVKKAIELKSRGVKMLPSKDGSHKNSVLSQGGVALVSDMCPDPGIPENGRRAGSDFRVGANVQFSCEDNYVLQGSKSITCQRVTETLAAWSDHRPICRARTCGSNLRGPSGVITSPNYPVQYEDNAHCVWVITTTDPDKVIKLAFEEFELERGYDTLTVGDAGKVGDTRSVLYVLTGSSVPDLIVSMSNQMWLHLQSDDSIGSPGFKAVYQEIEKGGCGDPGIPAYGKRTGSSFLHGDTLTFECPAAFELVGERVITCQQNNQWSGNKPSCVFSCFFNFTASSGIILSPNYPEEYGNNMNCVWLIISEPGSRIHLIFNDFDVEPQFDFLAVKDDGISDITVLGTFSGNEVPSQLASSGHIVRLEFQSDHSTTGRGFNITYTTFGQNECHDPGIPINGRRFGDRFLLGSSVSFHCDDGFVKTQGSESITCILQDGNVVWSSTVPRCEAPCGGHLTASSGVILPPGWPGYYKDSLHCEWIIEAKPGHSIKITFDRFQTEVNYDTLEVRDGPASSSPLIGEYHGTQAPQFLISTGNFMYLLFTTDNSRSSIGFLIHYESVTLESDSCLDPGIPVNGHRHGGDFGIRSTVTFSCDPGYTLSDDEPLVCERNHQWNHALPSCDALCGGYIQGKSGTVLSPGFPDFYPNSLNCTWTIEVSHGKGVQMIFHTFHLESSHDYLLITEDGSFSEPVARLTGSVLPHTIKAGLFGNFTAQLRFISDFSISYEGFNITFSEYDLEPCDDPGVPAFSRRIGFHFGVGDSLTFSCFLGYRLEGATKLTCLGGGRRVWSAPLPRCVAECGASVKGNEGTLLSPNFPSNYDNNHECIYKIETEAGKGIHLRTRSFQLFEGDTLKVYDGKDSSSRPLGTFTKNELLGLILNSTSNHLWLEFNTNGSDTDQGFQLTYTSFDLVKCEDPGIPNYGYRIRDEGHFTDTVVLYSCNPGYAMHGSNTLTCLSGDRRVWDKPLPSCIAECGGQIHAATSGRILSPGYPAPYDNNLHCTWIIEADPGKTISLHFIVFDTEMAHDILKVWDGPVDSDILLKEWSGSALPEDIHSTFNSLTLQFDSDFFISKSGFSIQFSTSIAATCNDPGMPQNGTRYGDSREAGDTVTFQCDPGYQLQGQAKITCVQLNNRFFWQPDPPTCIAACGGNLTGPAGVILSPNYPQPYPPGKECDWRVKVNPDFVIALIFKSFNMEPSYDFLHIYEGEDSNSPLIGSYQGSQAPERIESSGNSLFLAFRSDASVGLSGFAIEFKEKPREACFDPGNIMNGTRVGTDFKLGSTITYQCDSGYKILDPSSITCVIGADGKPSWDQVLPSCNAPCGGQYTGSEGVVLSPNYPHNYTAGQICLYSITVPKEFVVFGQFAYFQTALNDLAELFDGTHAQARLLSSLSGSHSGETLPLATSNQILLRFSAKSGASARGFHFVYQAVPRTSDTQCSSVPEPRYGRRIGSEFSAGSIVRFECNPGYLLQGSTALHCQSVPNALAQWNDTIPSCVVPCSGNFTQRRGTILSPGYPEPYGNNLNCIWKIIVTEGSGIQIQVISFATEQNWDSLEIHDGGDVTAPRLGSFSGTTVPALLNSTSNQLYLHFQSDISVAAAGFHLEYKTVGLAACQEPALPSNSIKIGDRYMVNDVLSFQCEPGYTLQGRSHISCMPGTVRRWNYPSPLCIATCGGTLSTLGGVILSPGFPGSYPNNLDCTWRISLPIGYGAHIQFLNFSTEANHDFLEIQNGPYHTSPMIGQFSGTDLPAALLSTTHETLIHFYSDHSQNRQGFKLAYQAYELQNCPDPPPFQNGYMINSDYSVGQSVSFECYPGYILIGHPVLTCQHGINRNWNYPFPRCDAPCGYNVTSQNGTIYSPGFPDEYPILKDCIWLITVPPGHGVYINFTLLQTEAVNDYIAVWDGPDQNSPQLGVFSGNTALETAYSSTNQVLLKFHSDFSNGGFFVLNFHAFQLKKCQPPPAVPQAEMLTEDDDFEIGDFVKYQCHPGYTLVGTDILTCKLSSQLQFEGSLPTCEAQCPANEVRTGSSGVILSPGYPGNYFNSQTCSWSIKVEPNYNITIFVDTFQSEKQFDALEVFDGSSGQSPLLVVLSGNHTEQSNFTSRSNQLYLRWSTDHATSKKGFKIRYAAPYCSLTHPLKNGGILNRTAGAVGSKVHYFCKPGYRMVGHSNATCRRNPLGMYQWDSLTPLCQAVSCGIPESPGNGSFTGNEFTLDSKVVYECHEGFKLESSQQATAVCQEDGLWSNKGKPPTCKPVACPSIEAQLSEHVIWRLVSGSLNEYGAQVLLSCSPGYYLEGWRLLRCQANGTWNIGDERPSCRVISCGSLSFPPNGNKIGTLTVYGATAIFTCNTGYTLVGSHVRECLANGLWSGSETRCLAGHCGSPDPIVNGHISGDGFSYRDTVVYQCNPGFRLVGTSVRICLQDHKWSGQTPVCVPITCGHPGNPAHGFTNGSEFNLNDVVNFTCNTGYLLQGVSRAQCRSNGQWSSPLPTCRVVNCSDPGFVENAIRHGQQNFPESFEYGMSILYHCKKGFYLLGSSALTCMANGLWDRSLPKCLAISCGHPGVPANAVLTGELFTYGAVVHYSCRGSESLIGNDTRVCQEDSHWSGALPHCTGNNPGFCGDPGTPAHGSRLGDDFKTKSLLRFSCEMGHQLRGSPERTCLLNGSWSGLQPVCEAVSCGNPGTPTNGMIVSSDGILFSSSVIYACWEGYKTSGLMTRHCTANGTWTGTAPDCTIISCGDPGTLANGIQFGTDFTFNKTVSYQCNPGYVMEAVTSATIRCTKDGRWNPSKPVCKAVLCPQPPPVQNGTVEGSDFRWGSSISYSCMDGYQLSHSAILSCEGRGVWKGEIPQCLPVFCGDPGIPAEGRLSGKSFTYKSEVFFQCKSPFILVGSSRRVCQADGTWSGIQPTCIDPAHNTCPDPGTPHFGIQNSSRGYEVGSTVFFRCRKGYHIQGSTTRTCLANLTWSGIQTECIPHACRQPETPAHADVRAIDLPTFGYTLVYTCHPGFFLAGGSEHRTCKADMKWTGKSPVCKSKGVREVNETVTKTPVPSDVFFVNSLWKGYYEYLGKRQPATLTVDWFNATSSKVNATFSEASPVELKLTGIYKKEEAHLLLKAFQIKGQADIFVSKFENDNWGLDGYVSSGLERGGFTFQGDIHGKDFGKFKLERQDPLNPDQDSSSHYHGTSSGS

SEQ ID NO: 1147 - protein, 2195 aa, synthetic construct
  REGION 1..2195: note = CSPG4 (Q6UVK1) ECD
ASFFGENHLEVPVATALTDIDLQLQFSTSQPEALLLLAAGPADHLLLQLYSGRLQVRLVLGQEELRLQTPAETLLSDSIPHTVVLTVVEGWATLSVDGFLNASSAVPGAPLEVPYGLFVGGTGTLGLPYLRGTSRPLRGCLHAATLNGRSLLRPLTPDVHEGCAEEFSASDDVALGFSGPHSLAAFPAWGTQDEGTLEFTLTTQSRQAPLAFQAGGRRGDFIYVDIFEGHLRAVVEKGQGTVLLHNSVPVADGQPHEVSVHINAHRLEISVDQYPTHTSNRGVLSYLEPRGSLLLGGLDAEASRHLQEHRLGLTPEATNASLLGCMEDLSVNGQRRGLREALLTRNMAAGCRLEEEEYEDDAYGHYEAFSTLAPEAWPAMELPEPCVPEPGLPPVFANFTQLLTISPLVVAEGGTAWLEWRHVQPTLDLMEAELRKSQVLFSVTRGARHGELELDIPGAQARKMFTLLDVVNRKARFIHDGSEDTSDQLVLEVSVTARVPMPSCLRRGQTYLLPIQVNPVNDPPHIIFPHGSLMVILEHTQKPLGPEVFQAYDPDSACEGLTFQVLGTSSGLPVERRDQPGEPATEFSCRELEAGSLVYVHRGGPAQDLTFRVSDGLQASPPATLKVVAIRPAIQIHRSTGLRLAQGSAMPILPANLSVETNAVGQDVSVLFRVTGALQFGELQKQGAGGVEGAEWWATQAFHQRDVEQGRVRYLSTDPQHHAYDTVENLALEVQVGQEILSNLSFPVTIQRATVWMLRLEPLHTQNTQQETLTTAHLEATLEEAGPSPPTFHYEVVQAPRKGNLQLQGTRLSDGQGFTQDDIQAGRVTYGATARASEAVEDTFRFRVTAPPYFSPLYTFPIHIGGDPDAPVLTNVLLVVPEGGEGVLSADHLFVKSLNSASYLYEVMERPRHGRLAWRGTQDKTTMVTSFTNEDLLRGRLVYQHDDSETTEDDIPFVATRQGESSGDMAWEEVRGVFRVAIQPVNDHAPVQTISRIFHVARGGRRLLTTDDVAFSDADSGFADAQLVLTRKDLLFGSIVAVDEPTRPIYRFTQEDLRKRRVLFVHSGADRGWIQLQVSDGQHQATALLEVQASEPYLRVANGSSLVVPQGGQGTIDTAVLHLDTNLDIRSGDEVHYHVTAGPRWGQLVRAGQPATAFSQQDLLDGAVLYSHNGSLSPRDTMAFSVEAGPVHTDATLQVTIALEGPLAPLKLVRHKKIYVFQGEAAEIRRDQLEAAQEAVPPADIVFSVKSPPSAGYLVMVSRGALADEPPSLDPVQSFSQEAVDTGRVLYLHSRPEAWSDAFSLDVASGLGAPLEGVLVELEVLPAAIPLEAQNFSVPEGGSLTLAPPLLRVSGPYFPTLLGLSLQVLEPPQHGALQKEDGPQARTLSAFSWRMVEEQLIRYVHDGSETLTDSFVLMANASEMDRQSHPVAFTVTVLPVNDQPPILTTNTGLQMWEGATAPIPAEALRSTDGDSGSEDLVYTIEQPSNGRVVLRGAPGTEVRSFTQAQLDGGLVLFSHRGTLDGGFRFRLSDGEHTSPGHFFRVTAQKQVLLSLKGSQTLTVCPGSVQPLSSQTLRASSSAGTDPQLLLYRVVRGPQLGRLFHAQQDSTGEALVNFTQAEVYAGNILYEHEMPPEPFWEAHDTLELQLSSPPARDVAATLAVAVSFEAACPQRPSHLWKNKGLWVPEGQRARITVAALDASNLLASVPSPQRSEHDVLFQVTQFPSRGQLLVSEEPLHAGQPHFLQSQLAAGQLVYAHGGGGTQQDGFHFRAHLQGPAGASVAGPQTSEAFAITVRDVNERPPQPQASVPLRLTRGSRAPISRAQLSVVDPDSAPGEIEYEVQRAPHNGFLSLVGGGLGPVTRFTQADVDSGRLAFVANGSSVAGIFQLSMSDGASPPLPMSLAVDILPSAIEVQLRAPLEVPQALGRSSLSQQQLRVVSDREEPEAAYRLIQGPQYGHLLVGGRPTSAFSQFQIDQGEVVFAFTNFSSSHDHFRVLALARGVNASAVVNVTVRALLHVWAGGPWPQGATLRLDPTVLDAGELANRTGSVPRFRLLEGPRHGRVVRVPRARTEPGGSQLVEQFTQQDLEDGRLGLEVGRPEGRAPGPAGDSLTLELWAQGVPPAVASLDFATEPYNAARPYSVALLSVPEAARTEAGKPESSTPTGEPGPMASSPEPAVAKGGFLSFLEANMFS

SEQ ID NO: 1148 - protein, 393 aa, synthetic construct
  REGION 1..393: note = CSPG5 (O95196) ECD
VPAREAGSAVEAEELVKGSPAWEPPANDTREEAGPPAAGEDEASWTAPGGELAGPEEVLQESAAVTGTAWLEADSPGLGGVTAEAGSGDAQALPATLQAPHEVLGQSIMPPAIPEATEASGPPSPTPGDKLSPASELPKESPLEVWLNLGGSTPDPQGPELTYPFQGTLEPQPASDIIDIDYFEGLDGEGRGADLGSFPGSPGTSENHPDTEGETPSWSLLDLYDDFTPFDESDFYPTTSFYDDLDEEEEEEEDDKDAVGGGDLEDENELLVPTGKPGLGPGTGQPTSRWHAVPPQHTLGSVPGSSIALRPRPGEPGRDLASSENGTECRSGFVRHNGSCRSVCDLFPSYCHNGGQCYLVENIGAFCRCNTQDYIWHKGMRCESIITDFQVMC

SEQ ID NO: 1149 - protein, 126 aa, synthetic construct [sequence omitted]

SEQ ID NO: 1150 - protein, 544 aa, synthetic construct
  REGION 1..544: note = CUZD1 (Q86UP6) ECD
EAEGNASCTVSLGGANMAETHKAMILQLNPSENCTWTIERPENKSIRIIFSYVQLDPDGSCESENIKVFDGTSSNGPLLGQVCSKNDYVPVFESSSSTLTFQIVTDSARIQRTVFVFYYFFSPNISIPNCGGYLDTLEGSFTSPNYPKPHPELAYCVWHIQVEKDYKIKLNFKEIFLEIDKQCKFDFLAIYDGPSTNSGLIGQVCGRVTPTFESSSNSLTVVLSTDYANSYRGFSASYTSIYAENINTTSLTCSSDRMRVIISKSYLEAFNSNGNNLQLKDPTCRPKLSNVVEFSVPLNGCGTIRKVEDQSITYTNIITFSASSTSEVITRQKQLQIIVKCEMGHNSTVEIIYITEDDVIQSQNALGKYNTSMALFESNSFEKTILESPYYVDLNQTLFVQVSLHTSDPNLVVFLDTCRASPTSDFASPTYDLIKSGCSRDETCKVYPLFGHYGRFQFNAFKFLRSMSSVYLQCKVLICDSSDHQSRCNQGCVSRSKRDISSYKWKTDSIIGPIRLKRDRSASGNSGFQHETHAEETPNQPFNS

SEQ ID NO: 1151 - protein, 317 aa, synthetic construct
  REGION 1..317: note = CX3CL1 (P78423) ECD
QHHGVTKCNITCSKMTSKIPVALLIHYQQNQASCGKRAIILETRQHRLFCADPKEQWVKDAMQHLDRQAAALTRNGGTFEKQIGEVKPRTTPAAGGMDESVVLEPEATGESSSLEPTPSSQEAQRALGTSPELPTGVTGSSGTRLPPTPKAQDGGPVGTELFRVPPVSTAATWQSSAPHQPGPSLWAEAKTSEAPSTQDPSTQASTASSPAPEENAPSEGQRVWGQGQSPRPENSLEREEMGPVPAHTDAFQDWGPGSMAHVSVVPVSSEGTPSREPVASGSWTPKAEEPIHATMDPQRLGVLITPVPDAQAATRRQ

SEQ ID NO: 1152 - protein, 218 aa, synthetic construct [sequence omitted]

SEQ ID NO: 1153 - protein, 176 aa, synthetic construct
  REGION 1..176: note = CXCL16 (Q9H2A7) ECD
NEGSVTGSCYCGKRISSDSPPSVQFMNRLRKHLRAYHRCLYYTRFQLLSWSVCGGNKDPWVQELMSCLDLKECGHAYSGIVAHQKHLLPTSPPISQASEGASSDIHTPAQMLLSTLQSTQRPTLPVGSLSSDKELTRPNETTIHTAGHSLAAGPEAGENQKQPEKNAGPTARTSAT

SEQ ID NO: 1154 - protein, 96 aa, synthetic construct
  REGION 1..96: note = DAG1 (Q14118) ECD
SIVVEWTNNTLPLEPCPKEQIAGLSRRIAEDDGKPRPAFSNALEPDFKATSITVTGSGSCRHLQFIPVVPPRRVPSEAPPTEVPDRDPEKSSEDDV

SEQ ID NO: 1155 - protein, 425 aa, synthetic construct
  REGION 1..425: note = DCBLD1 (Q8N8Z6) ECD
EELGDGCGHLVTYQDSGTMTSKNYPGTYPNHTVCEKTITVPKGKRLILRLGDLDIESQTCASDYLLFTSSSDQYGPYCGSMTVPKELLLNTSEVTVRFESGSHISGRGFLLTYASSDHPDLITCLERASHYLKTEYSKFCPAGCRDVAGDISGNMVDGYRDTSLLCKAAIHAGIIADELGGQISVLQRKGISRYEGILANGVLSRDGSLSDKRFLFTSNGCSRSLSFEPDGQIRASSSWQSVNESGDQVHWSPGQARLQDQGPSWASGDSSNNHKPREWLEIDLGEKKKITGIRTTGSTQSNFNFYVKSFVMNFKNNNSKWKTYKGIVNNEEKVFQGNSNFRDPVQNNFIPPIVARYVRVVPQTWHQRIALKVELIGCQITQGNDSLVWRKTSQSTSVSTKKEDETITRPIPSEETSTGINITTV

SEQ ID NO: 1156 - protein, 462 aa, synthetic construct
  REGION 1..462: note = DCBLD2 (Q96PD2) ECD
QQGDGCGHTVLGPESGTLTSINYPQTYPNSTVCEWEIRVKMGERVRIKFGDFDIEDSDSCHFNYLRIYNGIGVSRTEIGKYCGLGLQMNHSIESKGNEITLLFMSGIHVSGRGFLASYSVIDKQDLITCLDTASNFLEPEFSKYCPAGCLLPFAEISGTIPHGYRDSSPLCMAGVHAGVVSNTLGGQISVVISKGIPYYESSLANNVTSVVGHLSTSLFTFKTSGCYGTLGMESGVIADPQITASSVLEWTDHTGQENSWKPKKARLKKPGPPWAAFATDEYQWLQIDLNKEKKITGIITTGSTMVEHNYYVSAYRILYSDDGQKWTVYREPGVEQDKIFQGNKDYHQDVRNNFLPPIIARFIRVNPTQWQQKIAMKMELLGCQFIPKGRPPKLTQPPPPRNSNDLKNTTAPPKIAKGRAPKFTQPLQPRSSNEFPAQTEQTTASPDIRNTTVTPNVTKDVA

SEQ ID NO: 1157 - protein, 1072 aa, synthetic construct
  REGION 1..1072: note = DCC (P43146) ECD
HLQVTGFQIKAFTALRFLSEPSDAVTMRGGNVLLDCSAESDRGVPVIKWKKDGIHLALGMDERKQQLSNGSLLIQNILHSRHHKPDEGLYQCEASLGDSGSIISRTAKVAVAGPLRFLSQTESVTAFMGDTVLLKCEVIGEPMPTIHWQKNQQDLTPIPGDSRVVVLPSGALQISRLQPGDIGIYRCSARNPASSRTGNEAEVRILSDPGLHRQLYFLQRPSNVVAIEGKDAVLECCVSGYPPPSFTWLRGEEVIQLRSKKYSLLGGSNLLISNVTDDDSGMYTCVVTYKNENISASAELTVLVPPWFLNHPSNLYAYESMDIEFECTVSGKPVPTVNWMKNGDVVIPSDYFQIVGGSNLRILGVVKSDEGFYQCVAENEAGNAQTSAQLIVPKPAIPSSSVLPSAPRDVVPVLVSSRFVRLSWRPPAEAKGNIQTFTVFFSREGDNRERALNTTQPGSLQLTVGNLKPEAMYTFRVVAYNEWGPGESSQPIKVATQPELQVPGPVENLQAVSTSPTSILITWEPPAYANGPVQGYRLFCTEVSTGKEQNIEVDGLSYKLEGLKKFTEYSLRFLAYNRYGPGVSTDDITVVTLSDVPSAPPQNVSLEVVNSRSIKVSWLPPPSGTQNGFITGYKIRHRKTTRRGEMETLEPNNLWYLFTGLEKGSQYSFQVSAMTVNGTGPPSNWYTAETPENDLDESQVPDQPSSLHVRPQTNCIIMSWTPPLNPNIVVRGYIIGYGVGSPYAETVRVDSKQRYYSIERLESSSHYVISLKAFNNAGEGVPLYESATTRSITDPTDPVDYYPLLDDFPTSVPDLSTPMLPPVGVQAVALTHDAVRVSWADNSVPKNQKTSEVRLYTVRWRTSFSASAKYKSEDTTSLSYTATGLKPNTMYEFSVMVTKNRRSSTWSMTAHATTYEAAPTSAPKDLTVITREGKPRAVIVSWQPPLEANGKITAYILFYTLDKNIPIDDWIMETISGDRLTHQIMDLNLDTMYYFRIQARNSKGVGPLSDPILFRTLKVEHPDKMANDQGRHGDGGYWPVDTNLIDRSTLNEPPIGQMHPPHGSVTPQKNSN

SEQ ID NO: 1158 - protein, 2898 aa, synthetic construct
  REGION 1..2898: note = DCHS1 (Q96JQ0) ECD
QAGSLDLQIDEEQPAGTLIGDISAGLPAGTAAPLMYFISAQEGSGVGTDLAIDEHSGVVRTARVLDREQRDRYRFTAVTPDGATVEVTVRVADINDHAPAFPQARAALQVPEHTAFGTRYPLEPARDADAGRLGTQGYALSGDGAGETFRLETRPGPDGTPVPELVVTGELDRENRSHYMLQLEAYDGGSPPRRAQALLDVTLLDINDHAPAFNQSRYHAVVSESLAPGSPVLQVFASDADAGVNGAVTYEINRRQSEGDGPFSIDAHTGLLQLERPLDFEQRRVHELVVQARDGGAHPELGSAFVTVHVRDANDNQPSMTVIFLSADGSPQVSEAAPPGQLVARISVSDPDDGDFAHVNVSLEGGEGHFALSTQDSVIYLVCVARRLDREERDAYNLRVTATDSGSPPLRAEAAFVLHVTDVNDNAPAFDRQLYRPEPLPEVALPGSFVVRVTARDPDQGTNGQVTYSLAPGAHTHWFSIDPTSGIITTAASLDYELEPQPQLIVVATDGGLPPLASSATVSVALQDVNDNEPQFQRTFYNASLPEGTQPGTCFLQVTATDADSGPFGLLSYSLGAGLGSSGSPPFRIDAHSGDVCTTRTLDRDQGPSSFDFTVTAVDGGGLKSMVYVKVFLSDENDNPPQFYPREYAASISAQSPPGTAVLRLRAHDPDQGSHGRLSYHILAGNSPPLFTLDEQSGLLTVAWPLARRANSVVQLEIGAEDGGGLQAEPSARVDISIVPGTPTPPIFEQLQYVFSVPEDVAPGTSVGIVQAHNPPGRLAPVTLSLSGGDPRGLFSLDAVSGLLQTLRPLDRELLGPVLELEVRAGSGVPPAFAVARVRVLLDDVNDNSPAFPAPEDTVLLPPNTAPGTPIYTLRALDPDSGVNSRVTFTLLAGGGGAFTVDPTTGHVRLMRPLGPSGGPAHELELEARDGGSPPRTSHFRLRVVVQDVGTRGLAPRFNSPTYRVDLPSGTTAGTQVLQVQAQAPDGGPITYHLAAEGASSPFGLEPQSGWLWVRAALDREAQELYILKVMAVSGSKAELGQQTGTATVRVSILNQNEHSPRLSEDPTFLAVAENQPPGTSVGRVFATDRDSGPNGRLTYSLQQLSEDSKAFRIHPQTGEVTTLQTLDREQQSSYQLLVQVQDGGSPPRSTTGTVHVAVLDLNDNSPTFLQASGAAGGGLPIQVPDRVPPGTLVTTLQAKDPDEGENGTILYTLTGPGSELFSLHPHSGELLTAAPLIRAERPHYVLTLSAHDQGSPPRSASLQLLVQVLPSARLAEPPPDLAERDPAAPVPVVLTVTAAEGLRPGSLLGSVAAPEPAGVGALTYTLVGGADPEGTFALDAASGRLYLARPLDFEAGPPWRALTVRAEGPGGAGARLLRVQVQVQDENEHAPAFARDPLALALPENPEPGAALYTFRASDADGPGPNSDVRYRLLRQEPPVPALRLDARTGALSAPRGLDRETTPALLLLVEATDRPANASRRRAARVSARVFVTDENDNAPVFASPSRVRLPEDQPPGPAALHVVARDPDLGEAARVSYRLASGGDGHFRLHSSTGALSVVRPLDREQRAEHVLTVVASDHGSPPRSATQVLTVSVADVNDEAPTFQQQEYSVLLRENNPPGTSLLTLRATDPDVGANGQVTYGGVSSESFSLDPDTGVLTTLRALDREEQEEINLTVYAQDRGSPPQLTHVTVRVAVEDENDHAPTFGSAHLSLEVPEGQDPQTLTMLRASDPDVGANGQLQYRILDGDPSGAFVLDLASGEFGTMRPLDREVEPAFQLRIEARDGGQPALSATLLLTVTVLDANDHAPAFPVPAYSVEVPEDVPAGTLLLQLQAHDPDAGANGHVTYYLGAGTAGAFLLEPSSGELRTAAALDREQCPSYTFSVSAVDGAAAGPLSTTVSVTITVRDVNDHAPTFPTSPLRLRLPRPGPSFSTPTLALATLRAEDRDAGANASILYRLAGTPPPGTTVDSYTGEIRVARSPVALGPRDRVLFIVATDLGRPARSATGVIIVGLQGEAERGPRFPRASSEATIRENAPPGTPIVSPRAVHAGGTNGPITYSILSGNEKGTFSIQPSTGAITVRSAEGLDFEVSPRLRLVLQAESGGAFAFTVLTLTLQDANDNAPRFLRPHYVAFLPESRPLEGPLLQVEADDLDQGSGGQISYSLAASQPARGLFHVDPTTGTITTTAILDREIWAETRLVLMATDRGSPALVGSATLTVMVIDTNDNRPTIPQPWELRVSEDALLGSEIAQVTGNDVDSGPVLWYVLSPSGPQDPFSVGRYGGRVSLTGPLDFEQCDRYQLQLLAHDGPHEGRANLTVLVEDVNDNAPAFSQSLYQVMLLEHTPPGSAILSVSATDRDSGANGHISYHLASPADGFSVDPNNGTLFTIVGTVALGHDGSGAVDVVLEARDHGAPGRAARATVHVQLQDQNDHAPSFTLSHYRVAVTEDLPPGSTLLTLEATDADGSRSHAAVDYSIISGNWGRVFQLEPRLAEAGESAGPGPRALGCLVLLEPLDFESLTQYNLTVAAADRGQPPQSSVVPVTVTVLDVNDNPPVFTRASYRVTVPEDTPVGAELLHVEASDADPGPHGLVRFTVSSGDPSGLFELDESSGTLRLAHALDCETQARHQLVVQAADPAGAHFALAPVTIEVQDVNDHGPAFPLNLLSTSVAENQPPGTLVTTLHAIDGDAGAFGRLRYSLLEAGPGPEGREAFALNSSTGELRARVPFDYEHTESFRLLVGAADAGNLSASVTVSVLVTGEDEYDPVFLAPAFHFQVPEGARRGHSLGHVQATDEDGGADGLVLYSLATSSPYFGINQTTGALYLRVDSRAPGSGTATSGGGGRTRREAPRELRLEVIARGPLPGSRSATVPVTVDITHTALGLAPDLNLLLVGA

SEQ ID NO: 1159 - protein, 449 aa, synthetic construct
  REGION 1..449: note = DCT (P40126) ECD
QFPRVCMTVDSLVNKECCPRLGAESANVCGSQQGRGQCTEVRADTRPWSGPYILRNQDDRELWPRKFFHRTCKCTGNFAGYNCGDCKFGWTGPNCERKKPPVIRQNIHSLSPQEREQFLGALDLAKKRVHPDYVITTQHWLGLLGPNGTQPQFANCSVYDFFVWLHYYSVRDTLLGPGRPYRAIDFSHQGPAFVTWHRYHLLCLERDLQRLIGNESFALPYWNFATGRNECDVCTDQLFGAARPDDPTLISRNSRFSSWETVCDSLDDYNHLVTLCNGTYEGLLRRNQMGRNSMKLPTLKDIRDCLSLQKFDNPPFFQNSTFSFRNALEGFDKADGTLDSQVMSLHNLVHSFLNGTNALPHSAANDPIFVVLHSFTDAIFDEWMKRFNPPADAWPQELAPIGHNRMYNMVPFFPPVTNEELFLTSDQLGYSYAIDLPVSVEETPGWPTT

SEQ ID NO: 1160 - protein, 397 aa, synthetic construct
  REGION 1..397: note = DDR1 (Q08345) ECD
DMKGHFDPAKCRYALGMQDRTIPDSDISASSSWSDSTAARHSRLESSDGDGAWCPAGSVFPKEEEYLQVDLQRLHLVALVGTQGRHAGGLGKEFSRSYRLRYSRDGRRWMGWKDRWGQEVISGNEDPEGVVLKDLGPPMVARLVRFYPRADRVMSVCLRVELYGCLWRDGLLSYTAPVGQTMYLSEAVYLNDSTYDGHTVGGLQYGGLGQLADGVVGLDDFRKSQELRVWPGYDYVGWSNHSFSSGYVEMEFEFDRLRAFQAMQVHCNNMHTLGARLPGGVECRFRRGPAMAWEGEPMRHNLGGNLGDPRARAVSVPLGGRVARFLQCRFLFAGPWLLFSEISFISDVVNNSSPALGGTFPPAPWWPPGPPPTNFSSLELEPRGQQPVAKAEGSPTA

SEQ ID NO: 1161 - protein, 378 aa, synthetic construct
  REGION 1..378: note = DDR2 (Q16832) ECD
KAQVNPAICRYPLGMSGGQIPDEDITASSQWSESTAAKYGRLDSEEGDGAWCPEIPVEPDDLKEFLQIDLHTLHFITLVGTQGRHAGGHGIEFAPMYKINYSRDGTRWISWRNRHGKQVLDGNSNPYDIFLKDLEPPIVARFVRFIPVTDHSMNVCMRVELYGCVWLDGLVSYNAPAGQQFVLPGGSIIYLNDSVYDGAVGYSMTEGLGQLTDGVSGLDDFTQTHEYHVWPGYDYVGWRNESATNGYIEIMFEFDRIRNFTTMKVHCNNMFAKGVKIFKEVQCYFRSEASEWEPNAISFPLVLDDVNPSARFVTVPLHHRMASAIKCQYHFADTWMMFSEITFQSDAAMYNNSEALPTSPMAPTTYDPMLKVDDSNTR

SEQ ID NO: 1162 - protein, 329 aa, synthetic construct
  REGION 1..329: note = DGCR2 (P98153) ECD
TEPLRPELRCNPGQFACRSGTIQCIPLPWQCDGWATCEDESDEANCPEVTGEVRPHHGKEAVDPRQGRARGGDPSHFHAVNVAQPVRFSSFLGKCPTGWHHYEGTASCYRVYLSGENYWDAAQTCQRLNGSLATFSTDQELRFVLAQEWDQPERSFGWKDQRKLWVGYQYVITGRNRSLEGRWEVAFKGSSEVFLPPDPIFASAMSENDNVFCAQLQCFHFPTLRHHDLHSWHAESCYEKSSFLCKRSQTCVDIKDNVVDEGFYFTPKGDDPCLSCTCHGGEPEMCVAALCERPQGCQQYRKDPKECCKFMCLDPDGNSLFDSMASGMR

SEQ ID NO: 1163 - protein, 280 aa, synthetic construct
  REGION 1..280: note = DLK1 (P80370) ECD
AECFPACNPQNGFCEDDNVCRCQPGWQGPLCDQCVTSPGCLHGLCGEPGQCICTDGWDGELCDRDVRACSSAPCANNRTCVSLDDGLYECSCAPGYSGKDCQKKDGPCVINGSPCQHGGTCVDDEGRASHASCLCPPGFSGNFCEIVANSCTPNPCENDGVCTDIGGDFRCRCPAGFIDKTCSRPVTNCASSPCQNGGTCLQHTQVSYECLCKPEFTGLTCVKKRALSPQQVTRLPSGYGLAYRLTPGVHELPVQQPEHRILKVSMKELNKKTPLLTEGQ

SEQ ID NO: 1164 - protein, 280 aa, synthetic construct
  REGION 1..280: note = DLK2 (Q6UY11) ECD
DDCSSHCDLAHGCCAPDGSCRCDPGWEGLHCERCVRMPGCQHGTCHQPWQCICHSGWAGKFCDKDEHICTTQSPCQNGGQCMYDGGGEYHCVCLPGFHGRDCERKAGPCEQAGSPCRNGGQCQDDQGFALNFTCRCLVGFVGARCEVNVDDCLMRPCANGATCLDGINRFSCLCPEGFAGRFCTINLDDCASRPCQRGARCRDRVHDFDCLCPSGYGGKTCELVLPVPDPPTTVDTPLGPTSAVVVPATGPAPHSAGAGLLRISVKEVVRRQEAGLGEPS

SEQ ID NO: 1165 - protein, 528 aa, synthetic construct
  REGION 1..528: note = DLL1 (O00548) ECD
QVWSSGVFELKLQEFVNKKGLLGNRNCCRGGAGPPPCACRTFFRVCLKHYQASVSPEPPCTYGSAVTPVLGVDSFSLPDGGGADSAFSNPIRFPFGFTWPGTFSLIIEALHTDSPDDLATENPERLISRLATQRHLTVGEEWSQDLHSSGRTDLKYSYRFVCDEHYYGEGCSVFCRPRDDAFGHFTCGERGEKVCNPGWKGPYCTEPICLPGCDEQHGFCDKPGECKCRVGWQGRYCDECIRYPGCLHGTCQQPWQCNCQEGWGGLFCNQDLNYCTHHKPCKNGATCTNTGQGSYTCSCRPGYTGATCELGIDECDPSPCKNGGSCTDLENSYSCTCPPGFYGKICELSAMTCADGPCFNGGRCSDSPDGGYSCRCPVGYSGFNCEKKIDYCSSSPCSNGAKCVDLGDAYLCRCQAGFSGRHCDDNVDDCASSPCANGGTCRDGVNDFSCTCPPGYTGRNCSAPVSRCEHAPCHNGATCHERGHRYVCECARGYGGPNCQFLLPELPPGPAVVDLTEKLEGQGGPFPW

SEQ ID NO: 1166 - protein, 466 aa, synthetic construct
  REGION 1..466: note = DLL3 (Q9NYJ7) ECD
AGVFELQIHSFGPGPGPGAPRSPCSARLPCRLFFRVCLKPGLSEEAAESPCALGAALSARGPVYTEQPGAPAPDLPLPDGLLQVPFRDAWPGTFSFIIETWREELGDQIGGPAWSLLARVAGRRRLAAGGPWARDIQRAGAWELRFSYRARCEPPAVGTACTRLCRPRSAPSRCGPGLRPCAPLEDECEAPLVCRAGCSPEHGFCEQPGECRCLEGWTGPLCTVPVSTSSCLSPRGPSSATTGCLVPGPGPCDGNPCANGGSCSETPRSFECTCPRGFYGLRCEVSGVTCADGPCFNGGLCVGGADPDSAYICHCPPGFQGSNCEKRVDRCSLQPCRNGGLCLDLGHALRCRCRAGFAGPRCEHDLDDCAGRACANGGTCVEGGGAHRCSCALGFGGRDCRERADPCAARPCAHGGRCYAHFSGLVCACAPGYMGARCEFPVHPDGASALPAAPPGLRPGDPQRYL

SEQ ID NO: 1167 - protein, 503 aa, synthetic construct
  REGION 1..503: note = DLL4 (Q9NR61) ECD
SGVFQLQLQEFINERGVLASGRPCEPGCRTFFRVCLKHFQAVVSPGPCTFGTVSTPVLGTNSFAVRDDSSGGGRNPLQLPFNFTWPGTFSLIIEAWHAPGDDLRPEALPPDALISKIAIQGSLAVGQNWLLDEQTSTLTRLRYSYRVICSDNYYGDNCSRLCKKRNDHFGHYVCQPDGNLSCLPGWTGEYCQQPICLSGCHEQNGYCSKPAECLCRPGWQGRLCNECIPHNGCRHGTCSTPWQCTCDEGWGGLFCDQDLNYCTHHSPCKNGATCSNSGQRSYTCTCRPGYTGVDCELELSECDSNPCRNGGSCKDQEDGYHCLCPPGYYGLHCEHSTLSCADSPCFNGGSCRERNQGANYACECPPNFTGSNCEKKVDRCTSNPCANGGQCLNRGPSRMCRCRPGFTGTYCELHVSDCARNPCAHGGTCHDLENGLMCTCPAGFSGRRCEVRTSIDACASSPCFNRATCYTDLSTDTFVCNCPYGFVGSRCEFPVGLPPSFPW

SEQ ID NO: 1168 - protein, 606 aa, synthetic construct
  REGION 1..606: note = DNER (Q8NFT8) ECD
NPVPAAPLSAPGPCAAQPCRNGGVCTSRPEPDPQHPAPAGEPGYSCTCPAGISGANCQLVADPCASNPCHHGNCSSSSSSSSDGYLCICNEGYEGPNCEQALPSLPATGWTESMAPRQLQPVPATQEPDKILPRSQATVTLPTWQPKTGQKVVEMKWDQVEVIPDIACGNASSNSSAGGRLVSFEVPQNTSVKIRQDATASLILLWKVTATGFQQCSLIDGRSVTPLQASGGLVLLEEMLALGNNHFIGFVNDSVTKSIVALRLTLVVKVSTCVPGESHANDLECSGKGKCTTKPSEATFSCTCEEQYVGTFCEEYDACQRKPCQNNASCIDANEKQDGSNFTCVCLPGYTGELCQSKIDYCILDPCRNGATCISSLSGFTCQCPEGYFGSACEEKVDPCASSPCQNNGTCYVDGVHFTCNCSPGFTGPTCAQLIDFCALSPCAHGTCRSVGTSYKCLCDPGYHGLYCEEEYNECLSAPCLNAATCRDLVNGYECVCLAEYKGTHCELYKDPCANVSCLNGATCDSDGLNGTCICAPGFTGEECDIDINECDSNPCHHGGSCLDQPNGYNCHCPHGWVGANCEIHLQWKSGHMAESLTNMPRHSLY

SEQ ID NO: 1169 - protein, 419 aa, synthetic construct
  REGION 1..419: note = DPCR1 (Q3MIW9) ECD
TTFQEYQKTGELSTSDHIFPLTPGLVYSIPFDHIVLHSGQRPPELPKSTEIHEQKRHCNTTRHSKPTDKPTGNSKTIDHKSSTDNHEAPPTSEENSSNQGKDPMIRNQRSVDPADSTTTHKESAGKKHITPAPKSKINCRKSTTGKSTVTRKSDKTGRPLEKSMSTLDKTSTSSHKTTTSFHNSGNSQTKQKSTSFPEKITAASKTTYKTTGTPEESEKTEDSRTTVASDKLLTKTTKNIQETISANELTQSLAEPTEHGGRTANENNTPSPAEPTENRERTANENKKTICTKGKNTPVPEKPTENLGNTTLTTETIKAPVKSTENPEKTAAVTKTIKPSVKVTGDKSLTTTSSHLNKTEVTHQVPTGSFTLITSRTKLSSITSEATGNESHPYLNKDGSQKGIHAGQMGENDSFPAWA

SEQ ID NO: 1170 - protein, 557 aa, synthetic construct
  REGION 1..557: note = DSC1 (Q08554) ECD
RWAPIPASLMENSLGPFPQHVQQIQSDAAQNYTIFYSISGPGVDKEPFNLFYIEKDTGDIFCTRSIDREKYEQFALYGYATTADGYAPEYPLPLIIKIEDDNDNAPYFEHRVTIFTVPENCRSGTSVGKVTATDLDEPDTLHTRLKYKILQQIPDHPKHFSIHPDTGVITTTTPFLDREKCDTYQLIMEVRDMGGQPFGLFNTGTITISLEDENDNPPSFTETSYVTEVEENRIDVEILRMKVQDQDLPNTPHSKAVYKILQGNENGNFIISTDPNTNEGVLCVVKPLNYEVNRQVILQVGVINEAQFSKAASSQTPTMCTTTVTVKIIDSDEGPECHPPVKVIQSQDGFPAGQELLGYKALDPEISSGEGLRYQKLGDEDNWFEINQHTGDLRTLKVLDRESKFVKNNQYNISVVAVDAVGRSCTGTLVVHLDDYNDHAPQIDKEVTICQNNEDFAVLKPVDPDGPENGPPFQFFLDNSASKNWNIEEKDGKTAILRQRQNLDYNYYSVPIQIKDRHGLVATHMLTVRVCDCSTPSECRMKDKSTRDVRPNVILGR

SEQ ID NO: 1171 - protein, 559 aa, synthetic construct
  REGION 1..559: note = DSC2 (Q02487) ECD
RWAPIPCSMLENSLGPFPLFLQQVQSDTAQNYTIYYSIRGPGVDQEPRNLFYVERDTGNLYCTRPVDREQYESFEIIAFATTPDGYTPELPLPLIIKIEDENDNYPIFTEETYTFTIFENCRVGTTVGQVCATDKDEPDTMHTRLKYSIIGQVPPSPTLFSMHPTTGVITTTSSQLDRELIDKYQLKIKVQDMDGQYFGLQTTSTCIINIDDVNDHLPTFTRTSYVTSVEENTVDVEILRVTVEDKDLVNTANWRANYTILKGNENGNFKIVTDAKTNEGVLCVVKPLNYEEKQQMILQIGVVNEAPFSREASPRSAMSTATVTVNVEDQDEGPECNPPIQTVRMKENAEVGTTSNGYKAYDPETRSSSGIRYKKLTDPTGWVTIDENTGSIKVFRSLDREAETIKNGIYNITVLASDQGGRTCTGTLGIILQDVNDNSPFIPKKTVIICKPTMSSAEIVAVDPDEPIHGPPFDFSLESSTSEVQRMWRLKAINDTAARLSYQNDPPFGSYVVPITVRDRLGMSSVTSLDVTLCDCITENDCTHRVDPRIGGGGVQLGK

SEQ ID NO: 1172 - protein, 555 aa, synthetic construct
  REGION 1..555: note = DSC3 (Q14574) ECD
RWAPIPCSMQENSLGPFPLFLQQVESDAAQNYTVFYSISGRGVDKEPLNLFYIERDTGNLFCTRPVDREEYDVFDLIAYASTADGYSADLPLPLPIRVEDENDNHPVFTEAIYNFEVLESSRPGTTVGVVCATDRDEPDTMHTRLKYSILQQTPRSPGLFSVHPSTGVITTVSHYLDREVVDKYSLIMKVQDMDGQFFGLIGTSTCIITVTDSNDNAPTFRQNAYEAFVEENAFNVEILRIPIEDKDLINTANWRVNFTILKGNENGHFKISTDKETNEGVLSVVKPLNYEENRQVNLEIGVNNEAPFARDIPRVTALNRALVTVHVRDLDEGPECTPAAQYVRIKENLAVGSKINGYKAYDPENRNGNGLRYKKLHDPKGWITIDEISGSIITSKILDREVETPKNELYNITVLAIDKDDRSCTGTLAVNIEDVNDNPPEILQEYVVICKPKMGYTDILAVDPDEPVHGAPFYFSLPNTSPEISRLWSLTKVNDTAARLSYQKNAGFQEYTIPITVKDRAGQAATKLLRVNLCECTHPTQCRATSRSTGVILGK

SEQ ID NO: 1173 - protein, 1578 aa, synthetic construct
  REGION 1..1578: note = DSCAM (O60469) ECD
EDLHSSLYFVNASLQEVVFASTTGTLVPCPAAGIPPVTLRWYLATGEEIYDVPGIRHVHPNGTLQIFPFPPSSFSTLIHDNTYYCTAENPSGKIRSQDVHIKAVLREPYTVRVEDQKTMRGNVAVFKCIIPSSVEAYITVVSWEKDTVSLVSGSRFLITSTGALYIKDVQNEDGLYNYRCITRHRYTGETRQSNSARLFVSDPANSAPSILDGFDHRKAMAGQRVELPCKALGHPEPDYRWLKDNMPLELSGRFQKTVTGLLIENIRPSDSGSYVCEVSNRYGTAKVIGRLYVKQPLKATISPRKVKSSVGSQVSLSCSVTGTEDQELSWYRNGEILNPGKNVRITGINHENLIMDHMVKSDGGAYQCFVRKDKLSAQDYVQVVLEDGTPKIISAFSEKVVSPAEPVSLMCNVKGTPLPTITWTLDDDPILKGGSHRISQMITSEGNVVSYLNISSSQVRDGGVYRCTANNSAGVVLYQARINVRGPASIRPMKNITAIAGRDTYIHCRVIGYPYYSIKWYKNSNLLPFNHRQVAFENNGTLKLSDVQKEVDEGEYTCNVLVQPQLSTSQSVHVTVKVPPFIQPFEFPRFSIGQRVFIPCVVVSGDLPITITWQKDGRPIPGSLGVTIDNIDFTSSLRISNLSLMHNGNYTCIARNEAAAVEHQSQLIVRVPPKFVVQPRDQDGIYGKAVILNCSAEGYPVPTIVWKFSKGAGVPQFQPIALNGRIQVLSNGSLLIKHVVEEDSGYYLCKVSNDVGADVSKSMYLTVKIPAMITSYPNTTLATQGQKKEMSCTAHGEKPIIVRWEKEDRIINPEMARYLVSTKEVGEEVISTLQILPTVREDSGFFSCHAINSYGEDRGIIQLTVQEPPDPPEIEIKDVKARTITLRWTMGFDGNSPITGYDIECKNKSDSWDSAQRTKDVSPQLNSATIIDIHPSSTYSIRMYAKNRIGKSEPSNELTITADEAAPDGPPQEVHLEPISSQSIRVTWKAPKKHLQNGIIRGYQIGYREYSTGGNFQFNIISVDTSGDSEVYTLDNLNKFTQYGLVVQACNRAGTGPSSQEIITTTLEDVPSYPPENVQAIATSPESISISWSTLSKEALNGILQGFRVIYWANLMDGELGEIKNITTTQPSLELDGLEKYTNYSIQVLAFTRAGDGVRSEQIFTRTKEDVPGPPAGVKAAAASASMVFVSWLPPLKLNGIIRKYTVFCSHPYPTVISEFEASPDSFSYRIPNLSRNRQYSVWVVAVTSAGRGNSSEIITVEPLAKAPARILTFSGTVTTPWMKDIVLPCKAVGDPSPAVKWMKDSNGTPSLVTIDGRRSIFSNGSFIIRTVKAEDSGYYSCIANNNWGSDEIILNLQVQVPPDQPRLTVSKTTSSSITLSWLPGDNGGSSIRGYILQYSEDNSEQWGSFPISPSERSYRLENLKCGTWYKFTLTAQNGVGPGRISEIIEAKTLGKEPQFSKEQELFASINTTRVRLNLIGWNDGGCPITSFTLEYRPFGTTVWTTAQRTSLSKSYILYDLQEATWYELQMRVCNSAGCAEKQANFATLNYDGSTIPPLIKSVVQNEEGLTTNEGLKM

SEQ ID NO: 1174 - protein, 1573 aa, synthetic construct
  REGION 1..1573: note = DSCAML1 (Q8TD84) ECD
EDVGTSLYFVNDSLQQVTFSSSVGVVVPCPAAGSPSAALRWYLATGDDIYDVPHIRHVHANGTLQLYPFSPSAFNSFIHDNDYFCTAENAAGKIRSPNIRVKAVFREPYTVRVEDQRSMRGNVAVFKCLIPSSVQEYVSVVSWEKDTVSIIPEHRFFITYHGGLYISDVQKEDALSTYRCITKHKYSGETRQSNGARLSVTDPAESIPTILDGFHSQEVWAGHTVELPCTASGYPIPAIRWLKDGRPLPADSRWTKRITGLTISDLRTEDSGTYICEVTNTFGSAEATGILMVIDPLHVTLTPKKLKTGIGSTVILSCALTGSPEFTIRWYRNTELVLPDEAISIRGLSNETLLITSAQKSHSGAYQCFATRKAQTAQDFAIIALEDGTPRIVSSFSEKVVNPGEQFSLMCAAKGAPPPTVTWALDDEPIVRDGSHRTNQYTMSDGTTISHMNVTGPQIRDGGVYRCTARNLVGSAEYQARINVRGPPSIRAMRNITAVAGRDTLINCRVIGYPYYSIKWYKDALLLPDNHRQVVFENGTLKLTDVQKGMDEGEYLCSVLIQPQLSISQSVHVAVKVPPLIQPFEFPPASIGQLLYIPCVVSSGDMPIRITWRKDGQVIISGSGVTIESKEFMSSLQISSVSLKHNGNYTCIASNAAATVSRERQLIVRVPPRFVVQPNNQDGIYGKAGVLNCSVDGYPPPKVMWKHAKGSGNPQQYHPVPLTGRIQILPNSSLLIRHVLEEDIGYYLCQASNGVGTDISKSMFLTVKIPAMITSHPNTTIAIKGHAKELNCTARGERPIIIRWEKGDTVIDPDRVMRYAIATKDNGDEVVSTLKLKPADRGDSVFFSCHAINSYGEDRGLIQLTVQEPPDPPELEIREVKARSMNLRWTQRFDGNSIITGFDIEYKNKSDSWDFKQSTRNISPTINQANIVDLHPASVYSIRMYSFNKIGRSEPSKELTISTEEAAPDGPPMDVTLQPVTSQSIQVTWKAPKKELQNGVIRGYQIGYRENSPGSNGQYSIVEMKATGDSEVYTLDNLKKFAQYGVVVQAFNRAGTGPSSSEINATTLEDVPSQPPENVRALSITSDVAVISWSEPPRSTLNGVLKGYRVIFWSLYVDGEWGEMQNITTTRERVELRGMEKFTNYSVQVLAYTQAGDGVRSSVLYIQTKEDVPGPPAGIKAVPSSASSVVVSWLPPTKPNGVIRKYTIFCSSPGSGQPAPSEYETSPEQLFYRIAHLNRGQQYLLWVAAVTSAGRGNSSEKVTIEPAGKAPAKIISFGGTVTTPWMKDVRLPCNSVGDPAPAVKWTKDSEDSAIPVSMDGHRLIHTNGTLLLRAVKAEDSGYYTCTATNTGGFDTIIVNLLVQVPPDQPRLTVSKTSASSITLTWIPGDNGGSSIRGFVLQYSVDNSEEWKDVFISSSERSFKLDSLKCGTWYKVKLAAKNSVGSGRISEIIEAKTHGREPSFSKDQHLFTHINSTHARLNLQGWNNGGCPITAIVLEYRPKGTWAWQGLRANSSGEVFLTELREATWYELRMRACNSAGCGNETAQFATLDYDGSTIPPIKSAQGEGDDVKK

SEQ ID NO: 1175 - protein, 499 aa, synthetic construct
  REGION 1..499: note = DSG1 (Q02413) ECD
EWIKFAAACREGEDNSKRNPIAKIHSDCAANQQVTYRISGVGIDQPPYGIFVINQKTGEINITSIVDREVTPFFIIYCRALNSMGQDLERPLELRVRVLDINDNPPVFSMATFAGQIEENSNANTLVMILNATDADEPNNLNSKIAFKIIRQEPSDSPMFIINRNTGEIRTMNNFLDREQYGQYALAVRGSDRDGGADGMSAECECNIKILDVNDNIPYMEQSSYTIEIQENTLNSNLLEIRVIDLDEEFSANWMAVIFFISGNEGNWFEIEMNERTNVGILKVVKPLDYEAMQSLQLSIGVRNKAEFHHSIMSQYKLKASAISVTVLNVIEGPVFRPGSKTYVVTGNMGSNDKVGDFVATDLDTGRPSTTVRYVMGNNPADLLAVDSRTGKLTLKNKVTKEQYNMLGGKYQGTILSIDDNLQRTCTGTININIQSFGNDDRTNTEPNTKITTNTGRQESTSSTNYDTSTTSTDSSQVYSSEPGNGAKDLLSDNVHFGP

SEQ ID NO: 1176 - protein, 560 aa, synthetic construct
  REGION 1..560: note = DSG2 (Q14126) ECD
AWITAPVALREGEDLSKKNPIAKIHSDLAEERGLKITYKYTGKGITEPPFGIFVFNKDTGELNVTSILDREETPFFLLTGYALDARGNNVEKPLELRIKVLDINDNEPVFTQDVFVGSVEELSAAHTLVMKINATDADEPNTLNSKISYRIVSLEPAYPPVFYLNKDTGEIYTTSVTLDREEHSSYTLTVEARDGNGEVTDKPVKQAQVQIRILDVNDNIPVVENKVLEGMVEENQVNVEVTRIKVFDADEIGSDNWLANFTFASGNEGGYFHIETDAQTNEGIVTLIKEVDYEEMKNLDFSVIVANKAAFHKSIRSKYKPTPIPIKVKVKNVKEGIHFKSSVISIYVSESMDRSSKGQIIGNFQAFDEDTGLPAHARYVKLEDRDNWISVDSVTSEIKLAKLPDFESRYVQNGTYTVKIVAISEDYPRKTITGTVLINVEDINDNCPTLIEPVQTICHDAEYVNVTAEDLDGHPNSGPFSFSVIDKPPGMAEKWKIARQESTSVLLQQSEKKLGRSEIQFLISDNQGFSCPEKQVLTLTVCECLHGSGCREAQHDSYVG

SEQ ID NO: 1177 - protein, 566 aa, synthetic construct
  REGION 1..566: note = DSG3 (P32926) ECD
EWVKFAKPCREGEDNSKRNPIAKITSDYQATQKITYRISGVGIDQPPFGIFVVDKNTGDINITAIVDREETPSFLITCRALNAQGLDVEKPLILTVKILDINDNPPVFSQQIFMGEIEENSASNSLVMILNATDADEPNHLNSKIAFKIVSQEPAGTPMFLLSRNTGEVRTLTNSLDREQASSYRLVVSGADKDGEGLSTQCECNIKVKDVNDNFPMFRDSQYSARIEENILSSELLRFQVTDLDEEYTDNWLAVYFFTSGNEGNWFEIQTDPRTNEGILKVVKALDYEQLQSVKLSIAVKNKAEFHQSVISRYRVQSTPVTIQVINVREGIAFRPASKTFTVQKGISSKKLVDYILGTYQAIDEDTNKAASNVKYVMGRNDGGYLMIDSKTAEIKFVKNMNRDSTFIVNKTITAEVLAIDEYTGKTSTGTVYVRVPDFNDNCPTAVLEKDAVCSSSPSVVVSARTLNNRYTGPYTFALEDQPVKLPAVWSITTLNATSALLRAQEQIPPGVYHISLVLTDSQNNRCEMPRSLTLEVCQCDNRGICGTSYPTTSPGTRYGRPHSGR

SEQ ID NO: 1178 - protein, 582 aa, synthetic construct
  REGION 1..582: note = DSG4 (Q86SJ6) ECD
EWIKFAAACREGEDNSKRNPIAKIRSDCESNQKITYRISGVGIDRPPYGVFTINPRTGEINITSVVDREITPLFLIYCRALNSRGEDLERPLELRVKVMDINDNAPVFSQSVYTASIEENSDANTLVVKLCATDADEENHLNSKIAYKIVSQEPSGAPMFILNRYTGEVCTMSSFLDREQHSMYNLVVRGSDRDGAADGLSSECDCRIKVLDVNDNFPTLEKTSYSASIEENCLSSELIRLQAIDLDEEGTDNWLAQYLILSGNDGNWFDIQTDPQTNEGILKVVKMLDYEQAPNIQLSIGVKNQADFHYSVASQFQMHPTPVRIQVVDVREGPAFHPSTMAFSVREGIKGSSLLNYVLGTYTAIDLDTGNPATDVRYIIGHDAGSWLKIDSRTGEIQFSREFDKKSKYIINGIYTAEILAIDDGSGKTATGTICIEVPDINDYCPNIFPERRTICIDSPSVLISVNEHSYGSPFTFCVVDEPPGIADMWDVRSTNATSAILTAKQVLSPGFYEIPILVKDSYNRACELAQMVQLYACDCDDNHMCLDSGAAGIYTEDITGDTYGPVTEDQAGVSNVGLGPA

SEQ ID NO: 1179 - protein, 100 aa, synthetic construct
  REGION 1..100: note = ECSCR (Q19T08) ECD
QPTMTQTSSSQGGLGGLSLTTEPVSSNPGYIPSSEANRPSHLSSTGTPGAGVPSSGRDGGTSRDTFQTVPPNSTTMSLSMREDATILPSPTSETVLTVAA

SEQ ID NO: 1180 - protein, 161 aa, synthetic construct
  REGION 1..161: note = EDAR (Q9UNE0) ECD
EYSNCGENEYYNQTTGLCQECPPCGPGEEPYLSCGYGTKDEDYGCVPCPAEKFSKGGYQICRRHKDCEGFFRATVLTPGDMENDAECGPCLPGYYMLENRPRNIYGMVCYSCLLAPPNTKECVGATSGASANFPGTSGSSTLSPFQHAHKELSGQGHLATA

SEQ ID NO: 1181 - protein, 210 aa, synthetic construct
  REGION 1..210: note = EFNB1 (P98172) ECD
LAKNLEPVSWSSLNPKFLSGKGLVIYPKIGDKLDIICPRAEAGRPYEYYKLYLVRPEQAAACSTVLDPNVLVTCNRPEQEIRFTIKFQEFSPNYMGLEFKKHHDYYITSTSNGSLEGLENREGGVCRTRTMKIIMKVGQDPNAVTPEQLTTSRPSKEADNTVKMATQAPGSRGSLGDSDGKHETVNQEEKSGPGASGGSSGDPDGFFNSK

SEQ ID NO: 1182 - protein, 202 aa, synthetic construct
  REGION 1..202: note = EFNB2 (P52799) ECD
IVLEPIYWNSSNSKFLPGQGLVLYPQIGDKLDIICPKVDSKTVGQYEYYKVYMVDKDQADRCTIKKENTPLLNCAKPDQDIKFTIKFQEFSPNLWGLEFQKNKDYYIISTSNGSLEGLDNQEGGVCQTRAMKILMKVGQDASSAGSTRNKDPTRRPELEAGTNGRSSTTSPFVKPNPGSSTDGNSAGHSGNNILGSEVALFA

SEQ ID NO: 1183 - protein, 199 aa, synthetic construct
  REGION 1..199: note = EFNB3 (Q15768) ECD
LSLEPVYWNSANKRFQAEGGYVLYPQIGDRLDLLCPRARPPGPHSSPNYEFYKLYLVGGAQGRRCEAPPAPNLLLTCDRPDLDLRFTIKFQEYSPNLWGHEFRSHHDYYIIATSDGTREGLESLQGGVCLTRGMKVLLRVGQSPRGGAVPRKPVSEMPMERDRGAAHSLEPGKENLPGDPTSNATSRGAEGPLPPPSMP

SEQ ID NO: 1184 - protein, 1010 aa, synthetic construct
  REGION 1..1010: note = EGF (P01133) ECD
PQHWSCPEGTLAGNGNSTCVGPAPFLIFSHGNSIFRIDTEGTNYEQLVVDAGVSVIMDFHYNEKRIYWVDLERQLLQRVFLNGSRQERVCNIEKNVSGMAINWINEEVIWSNQQEGIITVTDMKGNNSHILLSALKYPANVAVDPVERFIFWSSEVAGSLYRADLDGVGVKALLETSEKITAVSLDVLDKRLFWIQYNREGSNSLICSCDYDGGSVHISKHPTQHNLFAMSLFGDRIFYSTWKMKTIWIANKHTGKDMVRINLHSSFVPLGELKVVHPLAQPKAEDDTWEPEQKLCKLRKGNCSSTVCGQDLQSHLCMCAEGYALSRDRKYCEDVNECAFWNHGCTLGCKNTPGSYYCTCPVGFVLLPDGKRCHQLVSCPRNVSECSHDCVLTSEGPLCFCPEGSVLERDGKTCSGCSSPDNGGCSQLCVPLSPVSWECDCFPGYDLQLDEKSCAASGPQPFLLFANSQDIRHMHFDGTDYGTLLSQQMGMVYALDHDPVENKIYFAHTALKWIERANMDGSQRERLIEEGVDVPEGLAVDWIGRRFYWTDRGKSLIGRSDLNGKRSKIITKENISQPRGIAVHPMAKRLFWTDTGINPRIESSSLQGLGRLVIASSDLIWPSGITIDFLTDKLYWCDAKQSVIEMANLDGSKRRRLTQNDVGHPFAVAVFEDYVWFSDWAMPSVMRVNKRTGKDRVRLQGSMLKPSSLVVVHPLAKPGADPCLYQNGGCEHICKKRLGTAWCSCREGFMKASDGKTCLALDGHQLLAGGEVDLKNQVTPLDILSKTRVSEDNITESQHMLVAEIMVSDQDDCAPVGCSMYARCISEGEDATCQCLKGFAGDGKLCSDIDECEMGVPVCPPASSKCINTEGGYVCRCSEGYQGDGIHCLDIDECQLGEHSCGENASCTNTEGGYTCMCAGRLSEPGLICPDSTPPPHLREDDHHYSVRNSDSECPLSHDGYCLHDGVCMYIEALDKYACNCVVGYIGERCQYRDLKWWELRHAGHGQQQK

SEQ ID NO: 1185 - protein, 621 aa, synthetic construct [sequence omitted]

SEQ ID NO: 1186 - protein, 391 aa, synthetic construct
  REGION 1..391: note = ELFN1 (P0C7U0) ECD
DCWLIEGDKGFVWLAICSQNQPPYEAIPQQINSTIVDLRLNENRIRSVQYASLSRFGNLTYLNLTKNEIGYIEDGAFSGQFNLQVLQLGYNRLRNLTEGMLRGLGKLEYLYLQANLIEVVMASSFWECPNIVNIDLSMNRIQQLNSGTFAGLAKLSVCELYSNPFYCSCELLGFLRWLAAFTNATQTYDRMQCESPPVYSGYYLLGQGRRGHRSILSKLQSVCTEDSYAAEVVGPPRPASGRSQPGRSPPPPPPPEPSDMPCADDECFSGDGTTPLVALPTLATQAEARPLIKVKQLTQNSATITVQLPSPFHRMYTLEHFNNSKASTVSRLTKAQEEIRLTNLFTLTNYTYCVVSTSAGLRHNHTCLTICLPRLPSPPGPVPSPSTATHY

SEQ ID NO: 1187 - protein, 375 aa, synthetic construct
  REGION 1..375: note = ELFN2 (Q5R3F8) ECD
DCWLIEGDKGYVWLAICSQNQPPYETIPQHINSTVHDLRLNENKLKAVLYSSLNRFGNLTDLNLTKNEISYIEDGAFLGQSSLQVLQLGYNKLSNLTEGMLRGMSRLQFLFVQHNLIEVVTPTAFSECPSLISIDLSSNRLSRLDGATFASLASLMVCELAGNPFNCECDLFGFLAWLVVFNNVTKNYDRLQCESPREFAGYPLLVPRPYHSLNAITVLQAKCRNGSLPARPVSHPTPYSTDAQREPDENSGFNPDEILSVEPPASSTTDASAGPAIKLHHVTFTSATLVVIIPHPYSKMYILVQYNNSYFSDVMTLKNKKEIVTLDKLRAHTEYTFCVTSLRNSRRFNHTCLTFTTRDPVPGDLAPSTSTTTHY

SEQ ID NO: 1188 - protein, 228 aa, synthetic construct
  REGION 1..228: note = EMB (Q6PCB8) ECD
DGSAPDSPFTSPPLREEIMANNFSLESHNISLTEHSSMPVEKNITLERPSNVNLTCQFTTSGDLNAVNVTWKKDGEQLENNYLVSATGSTLYTQYRFTIINSKQMGSYSCFFREEKEQRGTFNFKVPELHGKNKPLISYVGDSTVLTCKCQNCFPLNWTWYSSNGSVKVPVGVQMNKYVINGTYANETKLKITQLLEEDGESYWCRALFQLGESEEHIELVVLSYLVP

SEQ ID NO: 1189 - protein, 172 aa, synthetic construct
  REGION 1..172: note = EMCN (Q9ULC0) ECD
NSTGVLEAANNSLVVTTTKPSITTPNTESLQKNVVTPTTGTTPKGTITNELLKMSLMSTATFLTSKDEGLKATTTDVRKNDSIISNVTVTSVTLPNAVSTLQSSKPKTETQSSIKTTEIPGSVLQPDASPSKTGTLTSIPVTIPENTSQSQVIGTEGGKNASTSATSRSYSS

SEQ ID NO: 1190 - protein, 561 aa, synthetic construct
  REGION 1..561: note = ENG (P17813) ECD
ETVHCDLQPVGPERGEVTYTTSQVSKGCVAQAPNAILEVHVLFLEFPTGPSQLELTLQASKQNGTWPREVLLVLSVNSSVFLHLQALGIPLHLAYNSSLVTFQEPPGVNTTELPSFPKTQILEWAAERGPITSAAELNDPQSILLRLGQAQGSLSFCMLEASQDMGRTLEWRPRTPALVRGCHLEGVAGHKEAHILRVLPGHSAGPRTVTVKVELSCAPGDLDAVLILQGPPYVSWLIDANHNMQIWTTGEYSFKIFPEKNIRGFKLPDTPQGLLGEARMLNASIVASFVELPLASIVSLHASSCGGRLQTSPAPIQTTPPKDTCSPELLMSLIQTKCADDAMTLVLKKELVAHLKCTITGLTFWDPSCEAEDRGDKFVLRSAYSSCGMQVSASMISNEAVVNILSSSSPQRKKVHCLNMDSLSFQLGLYLSPHFLQASNTIEPGQQSFVQVRVSPSVSEFLLQLDSCHLDLGPEGGTVELIQGRAAKGNCVSLLSPSPEGDPRFSFLLHFYTVPIPKTGTLSCTVALRPKTGSQDQEVHRTVFMRLNIISPDLSGCTSKG

SEQ ID NO: 1191 - protein, 392 aa, synthetic construct
  REGION 1..392: note = ENPP4 (Q9Y6X5) ECD
FRSDSSSSLPPKLLLVSFDGFRADYLKNYEFPHLQNFIKEGVLVEHVKNVFITKTFPNHYSIVTGLYEESHGIVANSMYDAVTKKHFSDSNDKDPFWWNEAVPIWVTNQLQENRSSAAAMWPGTDVPIHDTISSYFMNYNSSVSFEERLNNITMWLNNSNPPVTFATLYWEEPDASGHKYGPEDKENMSRVLKKIDDLIGDLVQRLKMLGLWENLNVIITSDHGMTQCSQDRLINLDSCIDHSYYTLIDLSPVAAILPKINRTEVYNKLKNCSPHMNVYLKEDIPNRFYYQHNDRIQPIILVADEGWTIVLNESSQKLGDHGYDNSLPSMHPFLAAHGPAFHKGYKHSTINIVDIYPMMCHILGLKPHPNNGTFGHTKCLLVDQWCINLPEA

SEQ ID NO: 1192 - protein, 407 aa, synthetic construct
  REGION 1..407: note = ENPP5 (Q9UJA9) ECD
PDQQKVLLVSFDGFRWDYLYKVPTPHFHYIMKYGVHVKQVTNVFITKTYPNHYTLVTGLFAENHGIVANDMFDPIRNKSFSLDHMNIYDSKFWEEATPIWITNQRAGHTSGAAMWPGTDVKIHKRFPTHYMPYNESVSFEDRVAKIIEWFTSKEPINLGLLYWEDPDDMGHHLGPDSPLMGPVISDIDKKLGYLIQMLKKAKLWNTLNLIITSDHGMTQCSEERLIELDQYLDKDHYTLIDQSPVAAILPKEGKFDEVYEALTHAHPNLTVYKKEDVPERWHYKYNSRIQPIIAVADEGWHILQNKSDDFLLGNHGYDNALADMHPIFLAHGPAFRKNFSKEAMNSTDLYPLLCHLLNITAMPHNGSFWNVQDLLNSAMPRVVPYTQSTILLPGSVKPAEYDQEGSY

SEQ ID NO: 1193 - protein, 242 aa, synthetic construct
  REGION 1..242: note = EPCAM (P16422) ECD
QEECVCENYKLAVNCFVNNNRQCQCTSVGAQNTVICSKLAAKCLVMKAEMNGSKLGRRAKPEGALQNNDGLYDPDCDESGLFKAKQCNGTSMCWCVNTAGVRRTDKDTEITCSERVRTYWIIIELKHKAREKPYDSKSLRTALQKEITTRYQLDPKFITSILYENNVITIDLVQNSSQKTQNDVDIADVAYYFEKDVKGESLFHSKKMDLTVNGEQLDLDPGQTLIYYVDEKAPEFSMQGLK

SEQ ID NO: 1194 - protein, 88 aa, synthetic construct
  REGION 1..88: note = EPGN (Q6UW88) ECD
AAVTVTPPITAQQGNWTVNKTEADNIEGPIALKFSHLCLEDHNSYCINGACAFHHELEKAICRCFTGYTGERCEHLTLTSYAVDSYEK

SEQ ID NO: 1195 - protein, 522 aa, synthetic construct
  REGION 1..522: note = EPHA1 (P21709) ECD
KEVTLMDTSKAQGELGWLLDPPKDGWSEQQQILNGTPLYMYQDCPMQGRRDTDHWLRSNWIYRGEEASRVHVELQFTVRDCKSFPGGAGPLGCKETFNLLYMESDQDVGIQLRRPLFQKVTTVAADQSFTIRDLVSGSVKLNVERCSLGRLTRRGLYLAFHNPGACVALVSVRVFYQRCPETLNGLAQFPDTLPGPAGLVEVAGTCLPHARASPRPSGAPRMHCSPDGEWLVPVGRCHCEPGYEEGGSGEACVACPSGSYRMDMDTPHCLTCPQQSTAESEGATICTCESGHYRAPGEGPQVACTGPPSAPRNLSFSASGTQLSLRWEPPADTGGRQDVRYSVRCSQCQGTAQDGGPCQPCGVGVHFSPGARGLTTPAVHVNGLEPYANYTFNVEAQNGVSGLGSSGHASTSVSISMGHAESLSGLSLRLVKKEPRQLELTWAGSRPRSPGANLTYELHVLNQDEERYQMVLEPRVLLTELQPDTTYIVRVRMLTPLGPGPFSPDHEFRTSPPVSRGLTGGE

SEQ ID NO: 1196 - protein, 532 aa, synthetic construct
  REGION 1..532: note = EPHA10 (Q5JZY3) ECD
EEVILLDSKASQAELGWTALPSNGWEEISGVDEHDRPIRTYQVCNVLEPNQDNWLQTGWISRGRGQRIFVELQFTLRDCSSIPGAAGTCKETFNVYYLETEADLGRGRPRLGGSRPRKIDTIAADESFTQGDLGERKMKLNTEVREIGPLSRRGFHLAFQDVGACVALVSVRVYYKQCRATVRGLATFPATAAESAFSTLVEVAGTCVAHSEGEPGSPPRMHCGADGEWLVPVGRCSCSAGFQERGDFCEACPPGFYKVSPRRPLCSPCPEHSRALENASTFCVCQDSYARSPTDPPSASCTRPPSAPRDLQYSLSRSPLVLRLRWLPPADSGGRSDVTYSLLCLRCGREGPAGACEPCGPRVAFLPRQAGLRERAATLLHLRPGARYTVRVAALNGVSGPAAAAGTTYAQVTVSTGPGAPWEEDEIRRDRVEPQSVSLSWREPIPAGAPGANDTEYEIRYYEKGQSEQTYSMVKTGAPTVTVTNLKPATRYVFQIRAASPGPSWEAQSFNPSIEVQTLGEAASGSRDQSPA

SEQ ID NO: 1197 - protein, 514 aa, synthetic construct
  REGION 1..514: note = EPHA2 (P29317) ECD
AQGKEVVLLDFAAAGGELGWLTHPYGKGWDLMQNIMNDMPIYMYSVCNVMSGDQDNWLRTNWVYRGEAERIFIELKFTVRDCNSFPGGASSCKETFNLYYAESDLDYGTNFQKRLFTKIDTIAPDEITVSSDFEARHVKLNVEERSVGPLTRKGFYLAFQDIGACVALLSVRVYYKKCPELLQGLAHFPETIAGSDAPSLATVAGTCVDHAVVPPGGEEPRMHCAVDGEWLVPIGQCLCQAGYEKVEDACQACSPGFFKFEASESPCLECPEHTLPSPEGATSCECEEGFFRAPQDPASMPCTRPPSAPHYLTAVGMGAKVELRWTPPQDSGGREDIVYSVTCEQCWPESGECGPCEASVRYSEPPHGLTRTSVTVSDLEPHMNYTFTVEARNGVSGLVTSRSFRTASVSINQTEPPKVRLEGRSTTSLSVSWSIPPPQQSRVWKYEVTYRKKGDSNSYNVRRTEGFSVTLDDLAPDTTYLVQVQALTQEGQGAGSKVHEFQTLSPEGSGNLAV

SEQ ID NO: 1198 - protein, 521 aa, synthetic construct
  REGION 1..521: note = EPHA3 (P29320) ECD
ELIPQPSNEVNLLDSKTIQGELGWISYPSHGWEEISGVDEHYTPIRTYQVCNVMDHSQNNWLRTNWVPRNSAQKIYVELKFTLRDCNSIPLVLGTCKETFNLYYMESDDDHGVKFREHQFTKIDTIAADESFTQMDLGDRILKLNTEIREVGPVNKKGFYLAFQDVGACVALVSVRVYFKKCPFTVKNLAMFPDTVPMDSQSLVEVRGSCVNNSKEEDPPRMYCSTEGEWLVPIGKCSCNAGYEERGFMCQACRPGFYKALDGNMKCAKCPPHSSTQEDGSMNCRCENNYFRADKDPPSMACTRPPSSPRNVISNINETSVILDWSWPLDTGGRKDVTFNIICKKCGWNIKQCEPCSPNVRFLPRQFGLTNTTVTVTDLLAHTNYTFEIDAVNGVSELSSPPRQFAAVSITTNQAAPSPVLTIKKDRTSRNSISLSWQEPEHPNGIILDYEVKYYEKQEQETSYTILRARGTNVTISSLKPDTIYVFQIRARTAAGYGTNSRKFEFETSPDSFSISGESSQ

SEQ ID NO: 1199 - protein, 528 aa, synthetic construct
  REGION 1..528: note = EPHA4 (P54764) ECD
VTGSRVYPANEVTLLDSRSVQGELGWIASPLEGGWEEVSIMDEKNTPIRTYQVCNVMEPSQNNWLRTDWITREGAQRVYIEIKFTLRDCNSLPGVMGTCKETFNLYYYESDNDKERFIRENQFVKIDTIAADESFTQVDIGDRIMKLNTEIRDVGPLSKKGFYLAFQDVGACIALVSVRVFYKKCPLTVRNLAQFPDTITGADTSSLVEVRGSCVNNSEEKDVPKMYCGADGEWLVPIGNCLCNAGHEERSGECQACKIGYYKALSTDATCAKCPPHSYSVWEGATSCTCDRGFFRADNDAASMPCTRPPSAPLNLISNVNETSVNLEWSSPQNTGGRQDISYNVVCKKCGAGDPSKCRPCGSGVHYTPQQNGLKTTKVSITDLLAHTNYTFEIWAVNGVSKYNPNPDQSVSVTVTTNQAAPSSIALVQAKEVTRYSVALAWLEPDRPNGVILEYEVKYYEKDQNERSYRIVRTAARNTDIKGLNPLTSYVFHVRARTAAGYGDFSEPLEVTTNTVPSRIIGDGANST

SEQ ID NO: 1200 - protein, 549 aa, synthetic construct
  REGION 1..549: note = EPHA5 (P54756) ECD
PASLAGCYSAPRRAPLWTCLLLCAALRTLLASPSNEVNLLDSRTVMGDLGWIAFPKNGWEEIGEVDENYAPIHTYQVCKVMEQNQNNWLLTSWISNEGASRIFIELKFTLRDCNSLPGGLGTCKETFNMYYFESDDQNGRNIKENQYIKIDTIAADESFTELDLGDRVMKLNTEVRDVGPLSKKGFYLAFQDVGACIALVSVRVYYKKCPSVVRHLAVFPDTITGADSSQLLEVSGSCVNHSVTDEPPKMHCSAEGEWLVPIGKCMCKAGYEEKNGTCQVCRPGFFKASPHIQSCGKCPPHSYTHEEASTSCVCEKDYFRRESDPPTMACTRPPSAPRNAISNVNETSVFLEWIPPADTGGRKDVSYYIACKKCNSHAGVCEECGGHVRYLPRQSGLKNTSVMMVDLLAHTNYTFEIEAVNGVSDLSPGARQYVSVNVTTNQAAPSPVTNVKKGKIAKNSISLSWQEPDRPNGIILEYEIKYFEKDQETSYTIIKSKETTITAEGLKPASVYVFQIRARTAAGYGVFSRRFEFETTPVFAASSDQSQIP

SEQ ID NO: 1201 - protein, 528 aa, synthetic construct
  REGION 1..528: note = EPHA6 (Q9UF33) ECD
WPGDCSHVSNNQVVLLDTTTVLGELGWKTYPLNGWDAITEMDEHNRPIHTYQVCNVMEPNQNNWLRTNWISRDAAQKIYVEMKFTLRDCNSIPWVLGTCKETFNLFYMESDESHGIKFKPNQYTKIDTIAADESFTQMDLGDRILKLNTEIREVGPIERKGFYLAFQDIGACIALVSVRVFYKKCPFTVRNLAMFPDTIPRVDSSSLVEVRGSCVKSAEERDTPKLYCGADGDWLVPLGRCICSTGYEEIEGSCHACRPGFYKAFAGNTKCSKCPPHSLTYMEATSVCQCEKGYFRAEKDPPSMACTRPPSAPRNVVFNINETALILEWSPPSDTGGRKDLTYSVICKKCGLDTSQCEDCGGGLRFIPRHTGLINNSVIVLDFVSHVNYTFEIEAMNGVSELSFSPKPFTAITVTTDQDAPSLIGVVRKDWASQNSIALSWQAPAFSNGAILDYEIKYYEKEHEQLTYSSTRSKAPSVIITGLKPATKYVFHIRVRTATGYSGYSQKFEFETGDETSDMAAEQGQILV

SEQ ID NO: 1202 - protein, 528 aa, synthetic construct
  REGION 1..528: note = EPHA7 (Q15375) ECD
QAAKEVLLLDSKAQQTELEWISSPPNGWEEISGLDENYTPIRTYQVCQVMEPNQNNWLRTNWISKGNAQRIFVELKFTLRDCNSLPGVLGTCKETFNLYYYETDYDTGRNIRENLYVKIDTIAADESFTQGDLGERKMKLNTEVREIGPLSKKGFYLAFQDVGACIALVSVKVYYKKCWSIIENLAIFPDTVTGSEFSSLVEVRGTCVSSAEEEAENAPRMHCSAEGEWLVPIGKCICKAGYQQKGDTCEPCGRGFYKSSSQDLQCSRCPTHSFSDKEGSSRCECEDGYYRAPSDPPYVACTRPPSAPQNLIFNINQTTVSLEWSPPADNGGRNDVTYRILCKRCSWEQGECVPCGSNIGYMPQQTGLEDNYVTVMDLLAHANYTFEVEAVNGVSDLSRSQRLFAAVSITTGQAAPSQVSGVMKERVLQRSVELSWQEPEHPNGVITEYEIKYYEKDQRERTYSTVKTKSTSASINNLKPGTVYVFQIRAFTAAGYGNYSPRLDVATLEEATGKMFEATAVSSEQNPV

SEQ ID NO: 1203 - protein, 515 aa, synthetic construct
  REGION 1..515: note = EPHA8 (P29322) ECD
ARGEVNLLDTSTIHGDWGWLTYPAHGWDSINEVDESFQPIHTYQVCNVMSPNQNNWLRTSWVPRDGARRVYAEIKFTLRDCNSMPGVLGTCKETFNLYYLESDRDLGASTQESQFLKIDTIAADESFTGADLGVRRLKLNTEVRSVGPLSKRGFYLAFQDIGACLAILSLRIYYKKCPAMVRNLAAFSEAVTGADSSSLVEVRGQCVRHSEERDTPKMYCSAEGEWLVPIGKCVCSAGYEERRDACVACELGFYKSAPGDQLCARCPPHSHSAAPAAQACHCDLSYYRAALDPPSSACTRPPSAPVNLISSVNGTSVTLEWAPPLDPGGRSDITYNAVCRRCPWALSRCEACGSGTRFVPQQTSLVQASLLVANLLAHMNYSFWIEAVNGVSDLSPEPRRAAVVNITTNQAAPSQVVVIRQERAGQTSVSLLWQEPEQPNGIILEYEIKYYEKDKEMQSYSTLKAVTTRATVSGLKPGTRYVFQVRARTSAGCGRFSQAMEVETGKPRPRYDTRT

SEQ ID NO: 1204 - protein, 523 aa, synthetic construct
  REGION 1..523: note = EPHB1 (P54762) ECD
MEETLMDTRTATAELGWTANPASGWEEVSGYDENLNTIRTYQVCNVFEPNQNNWLLTTFINRRGAHRIYTEMRFTVRDCSSLPNVPGSCKETFNLYYYETDSVIATKKSAFWSEAPYLKVDTIAADESFSQVDFGGRLMKVNTEVRSFGPLTRNGFYLAFQDYGACMSLLSVRVFFKKCPSIVQNFAVFPETMTGAESTSLVIARGTCIPNAEEVDVPIKLYCNGDGEWMVPIGRCTCKPGYEPENSVACKACPAGTFKASQEAEGCSHCPSNSRSPAEASPICTCRTGYYRADFDPPEVACTSVPSGPRNVISIVNETSIILEWHPPRETGGRDDVTYNIICKKCRADRRSCSRCDDNVEFVPRQLGLTECRVSISSLWAHTPYTFDIQAINGVSSKSPFPPQHVSVNITTNQAAPSTVPIMHQVSATMRSITLSWPQPEQPNGIILDYEIRYYEKEHNEFNSSMARSQTNTARIDGLRPGMVYVVQVRARTVAGYGKFSGKMCFQTLTDDDYKSELREQLP

SEQ ID NO: 1205 - protein, 525 aa, synthetic construct
  REGION 1..525: note = EPHB2 (P29323) ECD
VEETLMDSTTATAELGWMVHPPSGWEEVSGYDENMNTIRTYQVCNVFESSQNNWLRTKFIRRRGAHRIHVEMKFSVRDCSSIPSVPGSCKETFNLYYYEADFDSATKTFPNWMENPWVKVDTIAADESFSQVDLGGRVMKINTEVRSFGPVSRSGFYLAFQDYGGCMSLIAVRVFYRKCPRIIQNGAIFQETLSGAESTSLVAARGSCIANAEEVDVPIKLYCNGDGEWLVPIGRCMCKAGFEAVENGTVCRGCPSGTFKANQGDEACTHCPINSRTTSEGATNCVCRNGYYRADLDPLDMPCTTIPSAPQAVISSVNETSLMLEWTPPRDSGGREDLVYNIICKSCGSGRGACTRCGDNVQYAPRQLGLTEPRIYISDLLAHTQYTFEIQAVNGVTDQSPFSPQFASVNITTNQAAPSAVSIMHQVSRTVDSITLSWSQPDQPNGVILDYELQYYEKELSEYNATAIKSPTNTVTVQGLKAGAIYVFQVRARTVAGYGRYSGKMYFQTMTEAEYQTSIQEKLPL

SEQ ID NO: 1206 - protein, 526 aa, synthetic construct
  REGION 1..526: note = EPHB3 (P54753) ECD
GCRALEETLMDTKWVTSELAWTSHPESGWEEVSGYDEAMNPIRTYQVCNVRESSQNNWLRTGFIWRRDVQRVYVELKFTVRDCNSIPNIPGSCKETFNLFYYEADSDVASASSPFWMENPYVKVDTIAPDESFSRLDAGRVNTKVRSFGPLSKAGFYLAFQDQGACMSLISVRAFYKKCASTTAGFALFPETLTGAEPTSLVIAPGTCIPNAVEVSVPLKLYCNGDGEWMVPVGACTCATGHEPAAKESQCRPCPPGSYKAKQGEGPCLPCPPNSRTTSPAASICTCHNNFYRADSDSADSACTTVPSPPRGVISNVNETSLILEWSEPRDLGGRDDLLYNVICKKCHGAGGASACSRCDDNVEFVPRQLGLTERRVHISHLLAHTRYTFEVQAVNGVSGKSPLPPRYAAVNITTNQAAPSEVPTLRLHSSSGSSLTLSWAPPERPNGVILDYEMKYFEKSEGIASTVTSQMNSVQLDGLRPDARYVVQVRARTVAGYGQYSRPAEFETTSERGSGAQQLQEQLPL

SEQ ID NO: 1207 - protein, 524 aa, synthetic construct
  REGION 1..524: note = EPHB4 (P54760) ECD
LEETLLNTKLETADLKWVTFPQVDGQWEELSGLDEEQHSVRTYEVCDVQRAPGQAHWLRTGWVPRRGAVHVYATLRFTMLECLSLPRAGRSCKETFTVFYYESDADTATALTPAWMENPYIKVDTVAAEHLTRKRPGAEATGKVNVKTLRLGPLSKAGFYLAFQDQGACMALLSLHLFYKKCAQLTVNLTRFPETVPRELVVPVAGSCVVDAVPAPGPSPSLYCREDGQWAEQPVTGCSCAPGFEAAEGNTKCRACAQGTFKPLSGEGSCQPCPANSHSNTIGSAVCQCRVGYFRARTDPRGAPCTTPPSAPRSVVSRLNGSSLHLEWSAPLESGGREDLTYALRCRECRPGGSCAPCGGDLTFDPGPRDLVEPWVVVRGLRPDFTYTFEVTALNGVSSLATGPVPFEPVNVTTDREVPPAVSDIRVTRSSPSSLSLAWAVPRAPSGAVLDYEVKYHEKGAEGPSSVRFLKTSENRAELRGLKRGASYLVQVRARSEAGYGPFGQEHHSQTQLDESEGWREQLA

SEQ ID NO: 1208 - protein, 563 aa, synthetic construct
  REGION 1..563: note = EPHB6 (O15197) ECD
LEEVLLDTTGETSEIGWLTYPPGGWDEVSVLDDQRRLTRTFEACHVAGAPPGTGQDNWLQTHFVERRGAQRAHIRLHFSVRACSSLGVSGGTCRETFTLYYRQAEEPDSPDSVSSWHLKRWTKVDTIAADESFPSSSSSSSSSSSAAWAVGPHGAGQRAGLQLNVKERSFGPLTQRGFYVAFQDTGACLALVAVRLFSYTCPAVLRSFASFPETQASGAGGASLVAAVGTCVAHAEPEEDGVGGQAGGSPPRLHCNGEGKWMVAVGGCRCQPGYQPARGDKACQACPRGLYKSSAGNAPCSPCPARSHAPNPAAPVCPCLEGFYRASSDPPEAPCTGPPSAPQELWFEVQGSALMLHWRLPRELGGRGDLLFNVVCKECEGRQEPASGGGGTCHRCRDEVHFDPRQRGLTESRVLVGGLRAHVPYILEVQAVNGVSELSPDPPQAAAINVSTSHEVPSAVPVVHQVSRASNSITVSWPQPDQTNGNILDYQLRYYDQAEDESHSFTLTSETNTATVTQLSPGHIYGFQVRARTAAGHGPYGGKVYFQTLPQGELSSQLPERLS

SEQ ID NO: 1209 - protein, 226 aa, synthetic construct
  REGION 1..226: note = EPOR (P19235) ECD
APPPNLPDPKFESKAALLAARGPEELLCFTERLEDLVCFWEEAASAGVGPGNYSFSYQLEDEPWKLCRLHQAPTARGAVRFWCSLPTADTSSFVPLELRVTAASGAPRYHRVIHINEVVLLDAPVGLVARLADESGHVVLRWLPPPETPMTSHIRYEVDVSAGNGAGSVQRVEILEGRTECVLSNLRGRTRYTFAVRARMAEPSFGGFWSAWSEPVSLLTPSDLDP

SEQ ID NO: 1210 - protein, 167 aa, synthetic construct
  REGION 1..167: note = EQTN (Q9NQ60) ECD
LKSSTLKPTIEALPNVLPLNEDVNKQEEKNEDHTPNYAPANEKNGNYYKDIKQYVFTTQNPNGTESEISVRATTDLNFALKNDKTVNATTYEKSTIEEETTTSEPSHKNIQRSTPNVPAFWTMLAKAINGTAVVMDDKDQLFHPIPESDVNATQGENQPDLEDLKIK

SEQ ID NO: 1211 - protein, 630 aa, synthetic construct
  REGION 1..630: note = ERBB2 (P04626) ECD
TQVCTGTDMKLRLPASPETHLDMLRHLYQGCQVVQGNLELTYLPTNASLSFLQDIQEVQGYVLIAHNQVRQVPLQRLRIVRGTQLFEDNYALAVLDNGDPLNNTTPVTGASPGGLRELQLRSLTEILKGGVLIQRNPQLCYQDTILWKDIFHKNNQLALTLIDTNRSRACHPCSPMCKGSRCWGESSEDCQSLTRTVCAGGCARCKGPLPTDCCHEQCAAGCTGPKHSDCLACLHFNHSGICELHCPALVTYNTDTFESMPNPEGRYTFGASCVTACPYNYLSTDVGSCTLVCPLHNQEVTAEDGTQRCEKCSKPCARVCYGLGMEHLREVRAVTSANIQEFAGCKKIFGSLAFLPESFDGDPASNTAPLQPEQLQVFETLEEITGYLYISAWPDSLPDLSVFQNLQVIRGRILHNGAYSLTLQGLGISWLGLRSLRELGSGLALIHHNTHLCFVHTVPWDQLFRNPHQALLHTANRPEDECVGEGLACHQLCARGHCWGPGPTQCVNCSQFLRGQECVEECRVLQGLPREYVNARHCLPCHPECQPQNGSVTCFGPEADQCVACAHYKDPPFCVARCPSGVKPDLSYMPIWKFPDEEGACQPCPINCTHSCVDLDDKGCPAEQRASPLT

SEQ ID NO: 1212 - protein, 624 aa, synthetic construct
  REGION 1..624: note = ERBB3 (P21860) ECD
SEVGNSQAVCPGTLNGLSVTGDAENQYQTLYKLYERCEVVMGNLEIVLTGHNADLSFLQWIREVTGYVLVAMNEFSTLPLPNLRVVRGTQVYDGKFAIFVMLNYNTNSSHALRQLRLTQLTEILSGGVYIEKNDKLCHMDTIDWRDIVRDRDAEIVVKDNGRSCPPCHEVCKGRCWGPGSEDCQTLTKTICAPQCNGHCFGPNPNQCCHDECAGGCSGPQDTDCFACRHFNDSGACVPRCPQPLVYNKLTFQLEPNPHTKYQYGGVCVASCPHNFVVDQTSCVRACPPDKMEVDKNGLKMCEPCGGLCPKACEGTGSGSRFQTVDSSNIDGFVNCTKILGNLDFLITGLNGDPWHKIPALDPEKLNVFRTVREITGYLNIQSWPPHMHNFSVFSNLTTIGGRSLYNRGFSLLIMKNLNVTSLGFRSLKEISAGRIYISANRQLCYHHSLNWTKVLRGPTEERLDIKHNRPRRDCVAEGKVCDPLCSSGGCWGPGPGQCLSCRNYSRGGVCVTHCNFLNGEPREFAHEAECFSCHPECQPMEGTATCNGSGSDTCAQCAHFRDGPHCVSSCPHGVLGAKGPIYKYPDVQNECRPCHENCTQGCKGPELQDCLGQTLVLIGKTHLT

SEQ ID NO: 1213 - protein, 626 aa, synthetic construct
  REGION 1..626: note = ERBB4 (Q15303) ECD
QSVCAGTENKLSSLSDLEQQYRALRKYYENCEVVMGNLEITSIEHNRDLSFLRSVREVTGYVLVALNQFRYLPLENLRIIRGTKLYEDRYALAIFLNYRKDGNFGLQELGLKNLTEILNGGVYVDQNKFLCYADTIHWQDIVRNPWPSNLTLVSTNGSSGCGRCHKSCTGRCWGPTENHCQTLTRTVCAEQCDGRCYGPYVSDCCHRECAGGCSGPKDTDCFACMNFNDSGACVTQCPQTFVYNPTTFQLEHNFNAKYTYGAFCVKKCPHNFVVDSSSCVRACPSSKMEVEENGIKMCKPCTDICPKACDGIGTGSLMSAQTVDSSNIDKFINCTKINGNLIFLVTGIHGDPYNAIEAIDPEKLNVFRTVREITGFLNIQSWPPNMTDFSVFSNLVTIGGRVLYSGLSLLILKQQGITSLQFQSLKEISAGNIYITDNSNLCYYHTINWTTLFSTINQRIVIRDNRKAENCTAEGMVCNHLCSSDGCWGPGPDQCLSCRRFSRGRICIESCNLYDGEFREFENGSICVECDPQCEKMEDGLLTCHGPGPDNCTKCSHFKDGPNCVEKCPDGLQGANSFIFKYADPDRECHPCHPNCTQGCNGPTSHDCIYYPWTGHSTLPQHARTP

SEQ ID NO: 1214 - protein, 60 aa, synthetic construct
  REGION 1..60: note = EREG (O14944) ECD
VAQVSITKCSSDMNGYCLHGQCIYLVDMSQNYCRCEVGYTGVRCEHFFLTVHQPLSKEYV

SEQ ID NO: 1215 - protein, 126 aa, synthetic construct
  REGION 1..126: note = ERMAP (Q96PL5) ECD
HAGDAGKFHVALLGGTAELLCPLSLWPGTVPKEVRWLRSPFPQRSQAVHIFRDGKDQDEDLMPEYKGRTVLVRDAQEGSVTLQILDVRLEDQGSYRCLIQVGNLSKEDTVILQVAAPSVGSLSPSA

SEQ ID NO: 1216 - protein, 496 aa, synthetic construct
  REGION 1..496: note = ERVFC1 (P60507) ECD
NSLLTEPPFRWRFYLHETWTQGNRLSTVTLATVDCQPHGCQAQVTFNFTSFKSVLRGWSNPTICFVYDQTHSNCRDYWVDTNGGCPYAYCRMHVTQLHTAKKLQHTYRLTSDGRTTYFLTIPDPWDSRWVSGVTGRLYRWPTDSYPVGKLRIFLTYIRVIPQVLSNLKDQADNIKHQEEVINTLVQSHPKADMVTYDDKAEAGPFSWITLVRHGARLVNMAGLVNLSHCFLCTALSQPPLVAVPLPQAFNTSGNHTAHPSGVFSEQVPLFRDPLQPQFPFCYTTPNSSWCNQTYSGSLSNLSAPAGGYFWCNFTLTKHLNISSNNTLSRNLCLPISLVPRLTLYSEAELSSLVNPPMRQKRAVFPPLVIGVSLTSSLVASGLGTGAIVHFISSSQDLSIKLQMAIEASAESLASLQRQITSVAKVAMQNRRALDLLTADKGGTCMFLGEECCYYINESGLVETSLLTLDKIRDGLHRPSSTPNYGGGWWQSPLTTW

SEQ ID NO: 1217 - protein, 496 aa, synthetic construct; identical to SEQ ID NO: 1216
  REGION 1..496: note = ERVFRD-1 (P60508) ECD

SEQ ID NO: 1218 - protein, 543 aa, synthetic construct
  REGION 1..543: note = ERVK-19 (O71037) ECD
LPMPAGAAAANYTYWAYVPFPPLIRAVTWMDNPIEVYVNDSVWVPGPTDDHCPAKPEEEGMMINISIGYRYPPICLGRAPGCLMPAVQNWLVEVPTVSPISRFTYHMVSGMSLRPRVNYLQDFSYQRSFKFRPKGKPCPKEIPKESKNTEVLVWEECVANSAVILQNNEFGTIIDWAPRGQFYHNCSGQTQSCPSAQVSPAVDSDLTESLDKHKHKKLQSFYPWEWGEKGISTPRPKIISPVSGPEHPELWRLTVASHHIRIWSGNQTLETRDRKPFYTVDLNSSVTVPLQSCIKPPYMLVVGNIVIKPDSQTITCENCRLLTCIDSTFNWQHRILLVRAREGVWIPVSMDRPWETSPSIHTLTEVLKGVLNRSKRFIFTLIAVIMGLIAVTATAAVAGVALHSSVQSVNFVNDWQKNSTRLWNSQSSIDQKLANQINDLRQTVIWMGDRLMSLEHRFQLQCDWNTSDFSITPQIYNESEHHWDMVRRHLQGREDNLTLDISKLKEQIFEASKAHLNLVPGTEAIAGVADGLANLNPVTWVKT

SEQ ID NO: 1219 - protein, 543 aa, synthetic construct
  REGION 1..543: note = ERVK-21 (P61565) ECD
LPMPAGAAAANYTNWAYVPFPPLIRAVTWMDNPIEVYVNDSVWVHGPIDDRCPAKPEEEGMMINISIGYHYPPICLGRAPGCLMPAVQNWLVEVPTVSPISRFTYNMVSGMSLRPRVNYLQDFSYQRSLKFRPKGKPCPKEIPKESKNTEVLVWEECVANSVVILQNNEFGTIIDWAPRGQFYHNCSGQTQSCPSAQVSPAVDSDLTESLDKHKHKKLQSFYPWEWGEKGISTPRPKIISPVSGPEHPELWRLTVASHHIRIWSGNQTLETRDRKPFYTVDLNSSLTVPLQSCVKPPYMLVVGNIVIKPDSQTITCENCRLLTCIDSTFNWQHRILLVRAREGVWIPVSMDRPWEASPSIHILTEVLKGVLNRSKRFIFTLIAVIMGLIAVTAMAAVAGVALHSFVQSVNFVNDWQKNSTRLWNSQSSIDQKLANQINDLRQTVIWMGDRLMSLEHRFQLQCDWNTSDFCITPQIYNESEHHWDMVRRHLQGREDNLTLDISKLKEQIFEASKAHLNLVPGTEAIAGVADGLANLNPVTWVKT

SEQ ID NO: 1220 - protein, 543 aa, synthetic construct
  REGION 1..543: note = ERVK-6 (Q69384) ECD
LPMPAGAAAANYTYWAYVPFPPLIRAVTWMDNPTEVYVNDSVWVPGPIDDRCPAKPEEEGMMINISIGYHYPPICLGRAPGCLMPAVQNWLVEVPTVSPICRFTYHMVSGMSLRPRVNYLQDFSYQRSLKFRPKGKPCPKEIPKESKNTEVLVWEECVANSAVILQNNEFGTIIDWAPRGQFYHNCSGQTQSCPSAQVSPAVDSDLTESLDKHKHKKLQSFYPWEWGEKGISTPRPKIVSPVSGPEHPELWRLTVASHHIRIWSGNQTLETRDRKPFYTIDLNSSLTVPLQSCVKPPYMLVVGNIVIKPDSQTITCENCRLLTCIDSTFNWQHRILLVRAREGVWIPVSMDRPWEASPSVHILTEVLKGVLNRSKRFIFTLIAVIMGLIAVTATAAVAGVALHSSVQSVNFVNDWQKNSTRLWNSQSSIDQKLANQINDLRQTVIWMGDRLMSLEHRFQLQCDWNTSDFCITPQIYNESEHHWDMVRRHLQGREDNLTLDISKLKEQIFEASKAHLNLVPGTEAIAGVADGLANLNPVTWVKT

SEQ ID NO: 1221 - protein, 543 aa, synthetic construct
  REGION 1..543: note = ERVK-8 (Q902F8) ECD
LPMPAGAAVANYTNWAYVPFPPLIRAVTWMDNPIEVYVNDSVWVPGPIDDRCPAKPEEEGMMINISIGYRYPPICLGRAPGCLMPAVQNWLVEVPTVSPISRFTYHMVSGMSLRPRVNYLQDFSYQRSLKFRPKGKPCPKEIPKESKNTEVLVWEECVANSAVILQNNEFGTIIDWAPRGQFYHNCSGQTQSCPSAQVSPAVDSDLTESLDKHKHKKLQSFYPWEWGEKRISTPRPKIVSPVSGPEHPELWRLTVASHHIRIWSGNQTLETRDRKPFYTVDLNSSLTLPLQSCVKPPYMLVVGNIVIKPDSQTITCENCRLLTCIDSTFNWQHRILLVRAREGVWIPVSMDRPWEASPSVHILTEVLKGVLNRSKRFIFTLIAVIMGLIAVTATAAVAGVALHSSVQSVNFVNDGQKNSTRLWNSQSSIDQKLANQINDLRQTVIWMGDRLMSLEHRFQLQCDWNTSDFCITPQIYNDSEHHWDMVRRHLQGREDNLTLDISKLKEQIFEASKAHLNLVPGTEAIAGVADGLANLNPVTWVKT

SEQ ID NO: 1222 - protein, 542 aa, synthetic construct
  REGION 1..542: note = ERVK-9 (Q9UKH3) ECD
LPMPAGAAAANYTNWAYVPFPPLIRAVTWMDNPIEVYVNDSVWVPGPIDDRCPAKPEEEGMMINISIGYRYPICLGRAPGCLMPAVQNWLVEVPIVSPICRFTYHMVSGMSLRPRVNYLQDFSYQRSLKFRPKGKPCPKEIPKESKNTEVLVWEECVANSAVILQNNEFGTIIDWTPQGQFYHNCSGQTQSCPSAQVSPAVDSDLTESLDKHKHKKLQSFYPWEWGEKGISTPRPKIISPVSGPEHPELWRLTVASHHIRIWSGNQTLETRDRKPFYTVDLNSSLTLPLQSCVKPPYMLVVGNIVIKPDSQTITCENCRLLTCIDSTFNWQHRILLVRAREGVWIPVSMDRPWEASPSIHILTEVLKGVLNRSKRFIFTLIAVIMGLIAVTATAAVAGVALHSSVQSVNFVNDGQKNSTRLWNSQSSIDQKLANQINDLRQTVIWMGDRLMSLEHRFQLQCDWNTSDFCITPQIYNESEHHWDMVRRHLQGREDNLTLDISKLKEQIFEASKAHLNLVPGTEAIAGVADGLANLNPVTWVKT

SEQ ID NO: 1223 - protein, 462 aa, synthetic construct
  REGION 1..462: note = ERVMER34-1 (Q9H9K5) ECD
LLAPVFRTLSILTNQSNCWLCEHLDNAEQPELVFVPASASTWWTYSGQWMYERVWYPQAEVQNHSTSSYRKVTWHWEASMEAQGLSFAQVRLLEGNFSLCVENKNGSGPFLGNIPKQYCNQILWFDSTDGTFMPSIDVTNESRNDDDDTSVCLGTRQCSWFAGCTNRTWNSSAVPLIGLPNTQDYKWVDRNSGLTWSGNDTCLYSCQNQTKGLLYQLFRNLFCSYGLTEAHGKWRCADASITNDKGHDGHRTPTWWLTGSNLTLSVNNSGLFFLCGNGVYKGFPPKWSGRCGLGYLVPSLTRYLTLNASQITNLRSFIHKVTPHRCTQGDTDNPPLYCNPKDNSTIRALFPSLGTYDLEKAILNISKAMEQEFSATKQTLEAHQSKVSSLASASRKDHVLDIPTTQRQTACGTVGKQCCLYINYSEEIKSNIQRLHEASENLKNVPLLDWQGIFAKVGDWFR

SEQ ID NO: 1224 - protein, 451 aa, synthetic construct
  REGION 1..451: note = ERVPABLB-1 (P60509) ECD
MDPLHTIEKVPARRNIHDRGHQGHRMGDGTPGRPKISVQQMTRFSLIIFFLSAPFVVNASTSNVFLQWAHSYADGLQQGDPCWVCGSLPVTNTMELPWWVSPLQGKDWVFFQSFIGDLKQWTGAQMTGVTRKNISEWPINKTLNEPGHDKPFSVNETRDKVIAFAIPLLDTKVFVQTSRPQNTQYRNGFLQIWDGFIWLTATKGHLSQIAPLCWEQRNHSLDNWPNTTRVMGWIPPGQCRHTILLQQRDLFATDWSQQPGLNWYAPNGTQWLCSPNLWPWLPSGWLGCCTLGIPWAQGRWVKTMEVYPYLPHVVNQGTRAIVHRNDHLPTIFMPSVGLGTVIQHIEALANFTQRALNDSLQSISLMNAEVYYMHEDILQNRMALDILTAAEGGTCALIKTECCVYIPNNSRNISLALEDTCRQIQVISSSALSLHDWIASQFSGRPSWWQK

SEQ ID NO: 1225 - protein, 537 aa, synthetic construct
  REGION 1..537: note = ERVS71-1 (P61550) ECD
EPSYSFLLTSFTTGRVFANTTWRAGTSKEVSFAVDLCVLFPEPARTHEEQHNLPVIGAGSVDLAAGFGHSGSQTGCGSSKGAEKGLQNVDFYLCPGNHPDASCRDTYQFFCPDWTCVTLATYSGGSTRSSTLSISRVPHPKLCTRKNCNPLTITVHDPNAAQWYYGMSWGLRLYIPGFDVGTMFTIQKKILVSWSSPKPIGPLTDLGDPIFQKHPDKVDLTVPLPFLVPRPQLQQQHLQPSLMSILGGVHHLLNLTQPKLAQDCWLCLKAKPPYYVGLGVEATLKRGPLSCHTRPRALTIGDVSGNASCLISTGYNLSASPFQATCNQSLLTSISTSVSYQAPNNTWLACTSGLTRCINGTEPGPLLCVLVHVLPQVYVYSGPEGRQLIAPPELHPRLHQAVPLLVPLLAGLSIAGSAAIGTAALVQGETGLISLSQQVDADFSNLQSAIDILHSQVESLAEVVLQNCRCLDLLFLSQGGLCAALGESCCFYANQSGVIKGTVKKVRENLDRHQQERENNIPWYQSMFNWNPWLTTL

SEQ ID NO: 1226 - protein, 300 aa, synthetic construct
  REGION 1..300: note = ERVV-1 (B6SEH8) ECD
QWNENSLVSFSKIIASGNHLSNCWICHNFITRSSSYQYILVRNFSLNLTFGSGIPEGQHKSVPLQVSLANSAHQVPCLDLTPPFNQSSKTSFYFYNCSSLNQTCCPCPEGHCDRKNTSEEGFPSPTIHPMSFSPAGCHPNLTHWCPAKQMNDYRDKSPQNRCAAWEGKELITWRVLYLLPKAHTVPTWPKSTVPLGGPLSPACNQTIPAGWKSQLHKWFDSHIPRWACTPPGYVFLCGPQKNKLPFDGSPKITYSTPPVANLYTCINNIQHTGECAVGLLGPRGIGVTIYNTTQPRQKRA

SEQ ID NO: 1227 - protein, 423 aa, synthetic construct
  REGION 1..423: note = ERVW-1 (Q9UQF0) ECD
APPPCRCMTSSSPYQEFLWRMQRPGNIDAPSYRSLSKGTPTFTAHTHMPRNCYHSATLCMHANTHYWTGKMINPSCPGGLGVTVCWTYFTQTGMSDGGGVQDQAREKHVKEVISQLTRVHGTSSPYKGLDLSKLHETLRTHTRLVSLFNTTLTGLHEVSAQNPTNCWICLPLNFRPYVSIPVPEQWNNFSTEINTTSVLVGPLVSNLEITHTSNLTCVKFSNTTYTTNSQCIRWVTPPTQIVCLPSGIFFVCGTSAYRCLNGSSESMCFLSFLVPPMTIYTEQDLYSYVISKPRNKRVPILPFVIGAGVLGALGTGIGGITTSTQFYYKLSQELNGDMERVADSLVTLQDQLNSLAAVVLQNRRALDLLTAERGGTCLFLGEECCYYVNQSGIVTEKVKEIRDRIQRRAEELRNTGPWGLLSQ

SEQ ID NO: 1228 - protein, 219 aa, synthetic construct
  REGION 1..219: note = ESAM (Q96AP7) ECD
QLQLHLPANRLQAVEGGEVVLPAWYTLHGEVSSSQPWEVPFVMWFFKQKEKEDQVLSYINGVTTSKPGVSLVYSMPSRNLSLRLEGLQEKDSGPYSCSVNVQDKQGKSRGHSIKTLELNVLVPPAPPSCRLQGVPHVGANVTLSCQSPRSKPAVQYQWDRQLPSFQTFFAPALDVIRGSLSLTNLSSSMAGVYVCKAHNEVGTAQCNVTLEVSTGPGAA

SEQ ID NO: 1229 - protein, 274 aa, synthetic construct
  REGION 1..274: note = EVA1C (P58658) ECD
LTDFSGYLTKLLQNHTTYACDGDYLNLQCPRHSTISVQSAFYGQDYQMCSSQKPASQREDSLTCVAATTFQKVLDECQNQRACHLLVNSRVFGPDLCPGSSKYLLVSFKCQPNELKNKTVCEDQELKLHCHESKFLNIYSATYGRRTQERDICSSKAERLPPFDCLSYSALQVLSRRCYGKQRCKIIVNNHHFGSPCLPGVKKYLTVTYACVPKNILTAIDPAIANLKPSLKQKDGEYGINFDPSGSKVLRKDGILVSNSLAAFAYIRAHPERA

SEQ ID NO: 1230 - protein, 274 aa, synthetic construct
  REGION 1..274: note = EVC2 (Q86UK5) ECD
GRGCLGASSRPRWRPLGAQPPRDPQVAPRSGPGLRIPPGRSGAGPESSTQDLPCMIWPKVECCHFKTAVEAPLGMKLDKKMEVFIPLSTSAASSGPWAHSLFAFIPSWPKKNLFKRESPITHRLYGDISREVQGTSENGVIFQKCALVSGSSEAQTARIWLLVNNTKTTSSANLSELLLLDSIAGLTIWDSVGNRTSEGFQAFSKKFLQVGDAFAVSYAATLQAGDLGNGESLKLPAQLTFQSSSRNRTQLKVLFSITAEENVTVLPHHGLHAA

SEQ ID NO: 1231 - protein, 103 aa, synthetic construct
  REGION 1..103: note = EVI2A (P22794) ECD
NYTRLWANSTSSWDSVIQNKTGRNQNENINTNPITPEVDYKGNSTNMPETSHIVALTSKSEQELYIPSVVSNSPSTVQSIENTSKSHGEIFKKDVCAENNNNM

SEQ ID NO: 1232 - protein, 181 aa, synthetic construct
  REGION 1..181: note = EVI2B (P34910) ECD
KTETITTEKQSQPTLFTSSMSQVLANSQNTTGNPLGQPTQFSDTFSGQSISPAKVTAGQPTPAVYTSSEKPEAHTSAGQPLAYNTKQPTPIANTSSQQAVFTSARQLPSARTSTTQPPKSFVYTFTQQSSSVQIPSRKQITVHNPSTQPTSTVKNSPRSTPGFILDTTSNKQTPQKNNYNS

SEQ ID NO: 1233 - protein, 211 aa, synthetic construct
  REGION 1..211: note = F11R (Q9Y624) ECD
SVTVHSSEPEVRIPENNPVKLSCAYSGFSSPRVEWKFDQGDTTRLVCYNNKITASYEDRVTFLPTGITFKSVTREDTGTYTCMVSEEGGNSYGEVKVKLIVLVPPSKPTVNIPSSATIGNRAVLTCSEQDGSPPSEYTWFKDGIVMPTNPKSTRAFSNSSYVLNPTTGELVFDPLSASDTGEYSCEARNGYGTPMTSNAVRMEAVERNVGV

SEQ ID NO: 1234 - protein, 219 aa, synthetic construct
  REGION 1..219: note = F3 (P13726) ECD
SGTTNTVAAYNLTWKSTNFKTILEWEPKPVNQVYTVQISTKSGDWKSKCFYTTDTECDLTDEIVKDVKQTYLARVFSYPAGNVESTGSAGEPLYENSPEFTPYLETNLGQPTIQSFEQVGTKVNVTVEDERTLVRRNNTFLSLRDVFGKDLIYTLYYWKSSSSGKKTAKTNTNEFLIDVDKGENYCFSVQAVIPSRTVNRKSTDSPVECMGQEKGEFRE

SEQ ID NO: 1235 - protein, 282 aa, synthetic construct
  REGION 1..282: note = FAM171A1 (Q5VUB5) ECD
KTLREPGAGAQEVTLKVHISDASTHQPVADALIEIFTNQASIASGTSGTDGVAFIKFQYKLGSQLIVTASKHAYVPNSAPWKPIRLPVFSSLSLGLLPERSATLMVYEDVVQIVSGFQGARPQPRVHFQRRALRLPENTSYSDLTAFLTAASSPSEVDSFPYLRGLDGNGTGNSTRHDLTPVTAVSVHLLSSNGTPVLVDGPIYVTVPLATQSSLRHNAYVAAWRFDQKLGTWLKSGLGLVHQEGSQLTWTYIAPQLGYWVAAMSPPIPGPVVTQDITTYHT

SEQ ID NO: 1236 - protein, 286 aa, synthetic construct
  REGION 1..286: note = FAM171A2 (A8MVW0) ECD
KSPPEPPSPQEILIKVQVYVSGELVPLARASVDVFGNRTLLAAGTTDSEGVATLPLSYRLGTWVLVTAARPGFLTNSVPWRVDKLPLYASVSLYLLPERPATLILYEDLVHILLGSPGARSQPLVQFQRRAARLPVSSTYSQLWASLTPASTQQEMRAFPAFLGTEASSSGNGSWLELMPLTAVSVHLLTGNGTEVPLSGPIHLSLPVPSETRALTVGTSIPAWRFDPKSGLWVRNGTGVIRKEGRQLYWTFVSPQLGYWVAAMASPTAGLVTITSGIQDIGTYHT

SEQ ID NO: 1237 - protein, 321 aa, synthetic construct
  REGION 1..321: note = FAM171B (Q6P995) ECD
ELSRSDLSLIQQQQQQQQQQQQQQKQLEEAEEERTEVPGATSTLTVPVSVFMLKVQVNDIISRQYLSQAVVEVFVNYTKTNSTVTKSNGAVLIKVPYKLGLSLTIIAYKDGYVLTPLPWKTRRMPIYSSVTLSLFPQSQANIWLFEDTVLITGKLADAKSQPSVQFSKALIKLPDNHHISNVTGYLTVLQQFLKVDNFLHTTGITLNKPGFENIELTPLAAICVKIYSGGKELKVNGSIQVSLPLLRLNDISAGDRIPAWTFDMNTGAWVNHGRGMVKEHNNHLIWTYDAPHLGYWIAAPLPGTRGSGINEDSKDITAYHT

SEQ ID NO: 1238 - protein, 94 aa, synthetic construct
  REGION 1..94: note = FAM174A (Q8TBP5) ECD
LAVLLQAAEAAPGLGPPDPRPRTLPPLPPGPTPAQQPGRGLAEAAGPRGSEGGNGSNPVAGLETDDHGGKAGEGSVGGGLAVSPNPGDKPMTQR

SEQ ID NO: 1239 - protein, 64 aa, synthetic construct
  REGION 1..64: note = FAM174B (Q3ZCQ3) ECD
SRAESVSAPWPEPERESRPPPGPGPGNTTRFGSGAAGGSGSSSSNSSGDALVTRISILLRDLPT

SEQ ID NO: 1240 - protein, 318 aa, synthetic construct
  REGION 1..318: note = FAM187B (Q17R55) ECD
FYFSISCPSGKQCQQALLSGNDILLYCNSSGAHWYYLFTQGKKGRLTSLTNISNMEIMPEGSLLIKDPLPSQTGLYHCWNKNGRQVVQYEIDFQDVTTLHITHKDLGQRPLQNETLHLGSKQLIFTWWEPWQDCNRCEEPGECKRLGYRYIEEPLEEAMPCWLYLGEVLVWSSRLRPELQVEACHVQCTNNTQLRVDYVIFDNFRLDEKTEFVWLDCPLGSMYRPVNWRANDTPLTWESQLSGQDFTTFLDPSTGGRQLQVFQPAVYKCFVQQELVAQFKPAASLETLEAQWRENDAQWREARKALRGRADSVLKGLK

SEQ ID NO: 1241 - protein, 148 aa, synthetic construct
  REGION 1..148: note = FAS (P25445) ECD
QVTDINSKGLELRKTVTTVETQNLEGLHHDGQFCHKPCPPGERKARDCTVNGDEPDCVPCQEGKEYTDKAHFSSKCRRCRLCDEGHGLEVEINCTRTQNTKCRCKPNFFCNSTVCEHCDPCTKCEHGIIKECTLTSNTKCKEEGSRSN

SEQ ID NO: 1242 - protein, 4160 aa, synthetic construct
  REGION 1..4160: note = FAT1 (Q14517) ECD
DGSQRLEQTPLQFTHLEYNVTVQENSAAKTYVGHPVKMGVYITHPAWEVRYKIVSGDSENLFKAEEYILGDFCFLRIRTKGGNTAILNREVKDHYTLIVKALEKNTNVEARTKVRVQVLDTNDLRPLFSPTSYSVSLPENTAIRTSIARVSATDADIGTNGEFYYSFKDRTDMFAIHPTSGVIVLTGRLDYLETKLYEMEILAADRGMKLYGSSGISSMAKLTVHIEQANECAPVITAVTLSPSELDRDPAYAIVTVDDCDQGANGDIASLSIVAGDLLQQFRTVRSFPGSKEYKVKAIGGIDWDSHPFGYNLTLQAKDKGTPPQFSSVKVIHVTSPQFKAGPVKFEKDVYRAEISEFAPPNTPVVMVKAIPAYSHLRYVFKSTPGKAKFSLNYNTGLISILEPVKRQQAAHFELEVTTSDRKASTKVLVKVLGANSNPPEFTQTAYKAAFDENVPIGTTVMSLSAVDPDEGENGYVTYSIANLNHVPFAIDHFTGAVSTSENLDYELMPRVYTLRIRASDWGLPYRREVEVLATITLNNLNDNTPLFEKINCEGTIPRDLGVGEQITTVSAIDADELQLVQYQIEAGNELDFFSLNPNSGVLSLKRSLMDGLGAKVSFHSLRITATDGENFATPLYINITVAASHKLVNLQCEETGVAKMLAEKLLQANKLHNQGEVEDIFFDSHSVNAHIPQFRSTLPTGIQVKENQPVGSSVIFMNSTDLDTGFNGKLVYAVSGGNEDSCFMIDMETGMLKILSPLDRETTDKYTLNITVYDLGIPQKAAWRLLHVVVVDANDNPPEFLQESYFVEVSEDKEVHSEIIQVEATDKDLGPNGHVTYSIVTDTDTFSIDSVTGVVNIARPLDRELQHEHSLKIEARDQAREEPQLFSTVVVKVSLEDVNDNPPTFIPPNYRVKVREDLPEGTVIMWLEAHDPDLGQSGQVRYSLLDHGEGNFDVDKLSGAVRIVQQLDFEKKQVYNLTVRAKDKGKPVSLSSTCYVEVEVVDVNENLHPPVFSSFVEKGTVKEDAPVGSLVMTVSAHDEDARRDGEIRYSIRDGSGVGVFKIGEETGVIETSDRLDRESTSHYWLTVFATDQGVVPLSSFIEIYIEVEDVNDNAPQTSEPVYYPEIMENSPKDVSVVQIEAFDPDSSSNDKLMYKITSGNPQGFFSIHPKTGLITTTSRKLDREQQDEHILEVTVTDNGSPPKSTIARVIVKILDENDNKPQFLQKFYKIRLPEREKPDRERNARREPLYHVIATDKDEGPNAEISYSIEDGNEHGKFFIEPKTGVVSSKRFSAAGEYDILSIKAVDNGRPQKSSTTRLHIEWISKPKPSLEPISFEESFFTFTVMESDPVAHMIGVISVEPPGIPLWFDITGGNYDSHFDVDKGTGTIIVAKPLDAEQKSNYNLTVEATDGTTTILTQVFIKVIDTNDHRPQFSTSKYEVVIPEDTAPETEILQISAVDQDEKNKLIYTLQSSRDPLSLKKFRLDPATGSLYTSEKLDHEAVHQHTLTVMVRDQDVPVKRNFARIVVNVSDTNDHAPWFTASSYKGRVYESAAVGSVVLQVTALDKDKGKNAEVLYSIESGNIGNSFMIDPVLGSIKTAKELDRSNQAEYDLMVKATDKGSPPMSEITSVRIFVTIADNASPKFTSKEYSVELSETVSIGSFVGMVTAHSQSSVVYEIKDGNTGDAFDINPHSGTIITQKALDFETLPIYTLIIQGTNMAGLSTNTTVLVHLQDENDNAPVFMQAEYTGLISESASINSVVLTDRNVPLVIRAADADKDSNALLVYHIVEPSVHTYFAIDSSTGAIHTVLSLDYEETSIFHFTVQVHDMGTPRLFAEYAANVTVHVIDINDCPPVFAKPLYEASLLLPTYKGVKVITVNATDADSSAFSQLIYSITEGNIGEKFSMDYKTGALTVQNTTQLRSRYELTVRASDGRFAGLTSVKINVKESKESHLKFTQDVYSAVVKENSTEAETLAVITAIGNPINEPLFYHILNPDRRFKISRTSGVLSTTGTPFDREQQEAFDVVVEVTEEHKPSAVAHVVVKVIVEDQNDNAPVFVNLPYYAVVKVDTEVGHVIRYVTAVDRDSGRNGEVHYYLKEHHEHFQIGPLGEISLKKQFELDTLNKEYLVTVVAKDGGNPAFSAEVIVPITVMNKAMPVFEKPFYSAEIAESIQVHSPVVHVQANSPEGLKVFYSITDGDPFSQFTINFNTGVINVIAPLDFEAHPAYKLSIRATDSLTGAHAEVFVDIIVDDINDNPPVFAQQSYAVTLSEASVIGTSVVQVRATDSDSEPNRGISYQMFGNHSKSHDHFHVDSSTGLISLLRTLDYEQSRQHTIFVRAVDGGMPTLSSDVIVTVDVTDLNDNPPLFEQQIYEARISEHAPHGHFVTCVKAYDADSSDIDKLQYSILSGNDHKHFVIDSATGIITLSNLHRHALKPFYSLNLSVSDGVFRSSTQVHVTVIGGNLHSPAFLQNEYEVELAENAPLHTLVMEVKTTDGDSGIYGHVTYHIVNDFAKDRFYINERGQIFTLEKLDRETPAEKVISVRLMAKDAGGKVAFCTVNVILTDDNDNAPQFRATKYEVNIGSSAAKGTSVVKVLASDADEGSNADITYAIEADSESVKENLEINKLSGVITTKESLIGLENEFFTFFVRAVDNGSPSKESVVLVYVKILPPEMQLPKFSEPFYTFTVSEDVPIGTEIDLIRAEHSGTVLYSLVKGNTPESNRDESFVIDRQSGRLKLEKSLDHETTKWYQFSILARCTQDDHEMVASVDVSIQVKDANDNSPVFESSPYEAFIVENLPGGSRVIQIRASDADSGTNGQVMYSLDQSQSVEVIESFAINMETGWITTLKELDHEKRDNYQIKVVASDHGEKIQLSSTAIVDVTVTDVNDSPPRFTAEIYKGTVSEDDPQGGVIAILSTTDADSEEINRQVTYFITGGDPLGQFAVETIQNEWKVYVKKPLDREKRDNYLLTITATDGTFSSKAIVEVKVLDANDNSPVCEKTLYSDTIPEDVLPGKLIMQISATDADIRSNAEITYTLLGSGAEKFKLNPDTGELKTSTPLDREEQAVYHLLVRATDGGGRFCQASIVLTLEDVNDNAPEFSADPYAITVFENTEPGTLLTRVQATDADAGLNRKILYSLIDSADGQFSINELSGIIQLEKPLDRELQAVYTLSLKAVDQGLPRRLTATGTVIVSVLDINDNPPVFEYREYGATVSEDILVGTEVLQVYAASRDIEANAEITYSIISGNEHGKFSIDSKTGAVFIIENLDYESSHEYYLTVEATDGGTPSLSDVATVNVNVTDINDNTPVFSQDTYTTVISEDAVLEQSVITVMADDADGPSNSHIHYSIIDGNQGSSFTIDPVRGEVKVTKLLDRETISGYTLTVQASDNGSPPRVNTTTVNIDVSDVNDNAPVFSRGNYSVIIQENKPVGFSVLQLVVTDEDSSHNGPPFFFTIVTGNDEKAFEVNPQGVLLTSSAIKRKEKDHYLLQVKVADNGKPQLSSLTYIDIRVIEESIYPPAILPLEIFITSSGEEYSGGVIGKIHATDQDVYDTLTYSLDPQMDNLFSVSSTGGKLIAHKKLDIGQYLLNVSVTDGKFTTVADITVHIRQVTQEMLNHTIAIRFANLTPEEFVGDYWRNFQRALRNILGVRRNDIQIVSLQSSEPHPHLDVLLFVEKPGSAQISTKQLLHKINSSVTDIEEIIGVRILNVFQKLCAGLDCPWKFCDEKVSVDESVMSTHSTARLSFVTPRHHRAAVCLCKEGRCPPVHHGCEDDPCPEGSECVSDPWEEKHTCVCPSGRFGQCPGSSSMTLTGNSYVKYRLTENENKLEMKLTMRLRTYSTHAVVMYARGTDYSILEIHHGRLQYKFDCGSGPGIVSVQSIQVNDGQWHAVALEVNGNYARLVLDQVHTASGTAPGTLKTLNLDNYVFFGGHIRQQGTRHGRSPQVGNGFRGCMDSIYLNGQELPLNSKPRSYAHIEESVDVSPGCFLTATEDCASNPCQNGGVCNPSPAGGYYCKCSALYIGTHCEISVNPCSSKPCLYGGTCVVDNGGFVCQCRGLYTGQRCQLSPYCKDEPCKNGGTCFDSLDGAVCQCDSGFRGERCQSDIDECSGNPCLHGALCENTHGSYHCNCSHEYRGRHCEDAAPNQYVSTPWNIGLAE

SEQ ID NO: 1243 - protein, 4030 aa, synthetic construct
  REGION 1..4030: note = FAT2 (Q9NYQ8) ECD
EKPLEGILSSSAWHFTHSHYNATIYENSSPKTYVESFEKMGIYLAEPQWAVRYRIISGDVANVFKTEEYVVGNFCFLRIRTKSSNTALLNREVRDSYTLIIQATEKTLELEALTRVVVHILDQNDLKPLFSPPSYRVTISEDMPLKSPICKVTATDADLGQNAEFYYAFNTRSEMFAIHPTSGVVTVAGKLNVTWRGKHELQVLAVDRMRKISEGNGFGSLAALVVHVEPALRKPPAIASVVVTPPDSNDGTTYATVLVDANSSGAEVESVEVVGGDPGKHFKAIKSYARSNEFSLVSVKDINWMEYLHGFNLSLQARSGSGPYFYSQIRGFHLPPSKLSSLKFEKAVYRVQLSEFSPPGSRVVMVRVTPAFPNLQYVLKPSSENVGFKLNARTGLITTTKLMDFHDRAHYQLHIRTSPGQASTVVVIDIVDCNNHAPLFNRSSYDGTLDENIPPGTSVLAVTATDRDHGENGYVTYSIAGPKALPFSIDPYLGIISTSKPMDYELMKRIYTFRVRASDWGSPFRREKEVSIFLQLRNLNDNQPMFEEVNCTGSIRQDWPVGKSIMTMSAIDVDELQNLKYEIVSGNELEYFDLNHFSGVISLKRPFINLTAGQPTSYSLKITASDGKNYASPTTLNITVVKDPHFEVPVTCDKTGVLTQFTKTILHFIGLQNQESSDEEFTSLSTYQINHYTPQFEDHFPQSIDVLESVPINTPLARLAATDPDAGFNGKLVYVIADGNEEGCFDIELETGLLTVAAPLDYEATNFYILNVTVYDLGTPQKSSWKLLTVNVKDWNDNAPRFPPGGYQLTISEDTEVGTTIAELTTKDADSEDNGRVRYTLLSPTEKFSLHPLTGELVVTGHLDRESEPRYILKVEARDQPSKGHQLFSVTDLIITLEDVNDNSPQCITEHNRLKVPEDLPPGTVLTFLDASDPDLGPAGEVRYVLMDGAHGTFRVDLMTGALILERELDFERRAGYNLSLWASDGGRPLARRTLCHVEVIVLDVNENLHPPHFASFVHQGQVQENSPSGTQVIVVAAQDDDSGLDGELQYFLRAGTGLAAFSINQDTGMIQTLAPLDREFASYYWLTVLAVDRGSVPLSSVTEVYIEVTDANDNPPQMSQAVFYPSIQEDAPVGTSVLQLDAWDPDSSSKGKLTFNITSGNYMGFFMIHPVTGLLSTAQQLDRENKDEHILEVTVLDNGEPSLKSTSRVVVGILDVNDNPPIFSHKLFNVRLPERLSPVSPGPVYRLVASDLDEGLNGRVTYSIEDSDEEAFSIDLVTGVVSSSSTFTAGEYNILTIKATDSGQPPLSASVRLHIEWIPWPRPSSIPLAFDETYYSFTVMETDPVNHMVGVISVEGRPGLFWFNISGGDKDMDFDIEKTTGSIVIARPLDTRRRSNYNLTVEVTDGSRTIATQVHIFMIANINHHRPQFLETRYEVRVPQDTVPGVELLRVQAIDQDKGKSLIYTIHGSQDPGSASLFQLDPSSGVLVTVGKLDLGSGPSQHTLTVMVRDQEIPIKRNFVWVTIHVEDGNLHPPRFTQLHYEASVPDTIAPGTELLQVRAMDADRGVNAEVHYSLLKGNSEGFFNINALLGIITLAQKLDQANHAPHTLTVKAEDQGSPQWHDLATVIIHVYPSDRSAPIFSKSEYFVEIPESIPVGSPILLVSAMSPSEVTYELREGNKDGVFSMNSYSGLISTQKKLDHEKISSYQLKIRGSNMAGAFTDVMVVVDIIDENDNAPMFLKSTFVGQISEAAPLYSMIMDKNNNPFVIHASDSDKEANSLLVYKILEPEALKFFKIDPSMGTLTIVSEMDYESMPSFQFCVYVHDQGSPVLFAPRPAQVIIHVRDVNDSPPRFSEQIYEVAIVGPIHPGMELLMVRASDEDSEVNYSIKTGNADEAVTIHPVTGSISVLNPAFLGLSRKLTIRASDGLYQDTALVKISLTQVLDKSLQFDQDVYWAAVKENLQDRKALVILGAQGNHLNDTLSYFLLNGTDMFHMVQSAGVLQTRGVAFDREQQDTHELAVEVRDNRTPQRVAQGLVRVSIEDVNDNPPKFKHLPYYTIIQDGTEPGDVLFQVSATDEDLGTNGAVTYEFAEDYTYFRIDPYLGDISLKKPFDYQALNKYHLKVIARDGGTPSLQSEEEVLVTVRNKSNPLFQSPYYKVRVPENITLYTPILHTQARSPEGLRLIYNIVEEEPLMLFTTDFKTGVLTVTGPLDYESKTKHVFTVRATDTALGSFSEATVEVLVEDVNDNPPTFSQLVYTTSISEGLPAQTPVIQLLASDQDSGRNRDVSYQIVEDGSDVSKFFQINGSTGEMSTVQELDYEAQQHFHVKVRAMDKGDPPLTGETLVVVNVSDINDNPPEFRQPQYEANVSELATCGHLVLKVQAIDPDSRDTSRLEYLILSGNQDRHFFINSSSGIISMFNLCKKHLDSSYNLRVGASDGVFRATVPVYINTTNANKYSPEFQQHLYEAELAENAMVGTKVIDLLAIDKDSGPYGTIDYTIINKLASEKFSINPNGQIATLQKLDRENSTERVIAIKVMARDGGGRVAFCTVKIILTDENDNPPQFKASEYTVSIQSNVSKDSPVIQVLAYDADEGQNADVTYSVNPEDLVKDVIEINPVTGVVKVKDSLVGLENQTLDFFIKAQDGGPPHWNSLVPVRLQVVPKKVSLPKFSEPLYTFSAPEDLPEGSEIGIVKAVAAQDPVIYSLVRGTTPESNKDGVFSLDPDTGVIKVRKPMDHESTKLYQIDVMAHCLQNTDVVSLVSVNIQVGDVNDNRPVFEADPYKAVLTENMPVGTSVIQVTAIDKDTGRDGQVSYRLSADPGSNVHELFAIDSESGWITTLQELDCETCQTYHFHVVAYDHGQTIQLSSQALVQVSITDENDNAPRFASEEYRGSVVENSEPGELVATLKTLDADISEQNRQVTCYITEGDPLGQFGISQVGDEWRISSRKTLDREHTAKYLLRVTASDGKFQASVTVEIFVLDVNDNSPQCSQLLYTGKVHEDVFPGHFILKVSATDLDTDTNAQITYSLHGPGAHEFKLDPHTGELTTLTALDRERKDVFNLVAKATDGGGRSCQADITLHVEDVNDNAPRFFPSHCAVAVFDNTTVKTPVAVVFARDPDQGANAQVVYSLPDSAEGHFSIDATTGVIRLEKPLQVRPQAPLELTVRASDLGTPIPLSTLGTVTVSVVGLEDYLPVFLNTEHSVQVPEDAPPGTEVLQLATLTRPGAEKTGYRVVSGNEQGRFRLDARTGILYVNASLDFETSPKYFLSIECSRKSSSSLSDVTTVMVNITDVNEHRPQFPQDPYSTRVLENALVGDVILTVSATDEDGPLNSDITYSLIGGNQLGHFTIHPKKGELQVAKALDREQASSYSLKLRATDSGQPPLHEDTDIAIQVADVNDNPPRFFQLNYSTTVQENSPIGSKVLQLILSDPDSPENGPPYSFRITKGNNGSAFRVTPDGWLVTAEGLSRRAQEWYQLQIQASDSGIPPLSSLTSVRVHVTEQSHYAPSALPLEIFITVGEDEFQGGMVGKIHATDRDPQDTLTYSLAEEETLGRHFSVGAPDGKIIAAQGLPRGHYSFNVTVSDGTFTTTAGVHVYVWHVGQEALQQAMWMGFYQLTPEELVSDHWRNLQRFLSHKLDIKRANIHLASLQPAEAVAGVDVLLVFEGHSGTFYEFQELASIITHSAKEMEHSVGVQMRSAMPMVPCQGPTCQGQICHNTVHLDPKVGPTYSTARLSILTPRHHLQRSCSCNGTATRFSGQSYVRYRAPAARNWHIHFYLKTLQPQAILLFTNETASVSLKLASGVPQLEYHCLGGFYGNLSSQRHVNDHEWHSILVEEMDASIRLMVDSMGNTSLVVPENCRGLRPERHLLLGGLILLHSSSNVSQGFEGCLDAVVVNEEALDLLAPGKTVAGLLETQALTQCCLHSDYCSQNTCLNGGKCSWTHGAGYVCKCPPQFSGKHCEQGRENCTFAPCLEGGTCILSPKGASCNCPHPYTGDRCEMEARGCSEGHCLVTPEIQRGDWGQQE

SEQ ID NO: 1244 - protein, 4122 aa, synthetic construct
  REGION 1..4122: note = FAT3 (Q8TDW7) ECD
LPGTGPLGFHFTHSIYNATVYENSAARTYVNSQSRMGITLIDLSWDIKYRIVSGDEEGFFKAEEVIIADFCFLRIRTKGGNSAILNREIQDNYLLIVKGSVRGEDLEAWTKVNIQVLDMNDLRPLFSPTTYSVTIAESTPLRTSVAQVTATDADIGSNGEFYYYFKNKVDLFSVHPTSGVISLSGRLNYDEKNRYDLEILAVDRGMKLYGNNGVSSTAKLYVHIERINEHAPTIHVVTHVPFSLEKEPTYAVVTVDDLDDGANGEIESVSIVAGDPLDQFFLAKEGKWLNEYKIKERKQIDWESFPYGYNLTLQAKDKGSPQKCSALKAVYIGNPTRDTVPIRFEKEVYDVSISEFSPPGVVVAIVKLSPEPIDVEYKLSPGEDAVYFKINPRSGLIVTARPLNTVKKEVYKLEVTNKEGDLKAQVTISIEDANDHTPEFQQPLYDAYVNESVPVGTSVLTVSASDKDKGENGYITYSIASLNLLPFVINQFTGVISTTEELDFESSPEIYRFIVRASDWGSPYRHESEVNVTIRIGNVNDNSPLFEKVACQGVISYDFPVGGHITAVSAIDIDELELVKYKIISGNELGFFYLNPDSGVLQLKKSLTNSGIKNGNFALRITATDGENLADPMSINISVLHGKVSSKSFSCRETRVAQKLAEKLLIKAKANGKLNLEDGFLDFYSINRQGPYFDKSFPSDVAVKEDLPVGANILKIKAYDADSGFNGKVLFTISDGNTDSCFNIDMETGQLKVLMPMDREHTDLYLLNITIYDLGNPQKSSWRLLTINVEDANDNSPVFIQDSYSVNILESSGIGTEIIQVEARDKDLGSNGEVTYSVLTDTQQFAINSSTGIVYVADQLDRESKANYSLKIEARDKAESGQQLFSVVTLKVFLDDVNDCSPAFIPSSYSVKVLEDLPVGTVIAWLETHDPDLGLGGQVRYSLVNDYNGRFEIDKASGAIRLSKELDYEKQQFYNLTVRAKDKGRPVSLSSVSFVEVEVVDVNENLHTPYFPDFAVVGSVKENSRIGTSVLQVTARDEDSGRDGEIQYSIRDGSGLGRFSIDDESGVITAADILDRETMGSYWLTVYATDRGVVPLYSTIEVYIEVEDVNDNAPLTSEPIYYPVVMENSPKDVSVIQIQAEDPDSSSNEKLTYRITSGNPQNFFAINIKTGLITTTSRKLDREQQAEHFLEVTVTDGGPSPKQSTIWVVVQVLDENDNKPQFPEKVYQIKLPERDRKKRGEPIYRAFAFDRDEGPNAEISYSIVDGNDDGKFFIDPKTGMVSSRKQFTAGSYDILTIKAVDNGRPQKSSTARLHIEWIKKPPPSPIPLTFDEPFYNFTVMESDRVTEIVGVVSVQPANTPLWFDIVGGNFDSAFDAEKGVGTIVIAKPLDAEQRSIYNMSVEVTDGTNVAVTQVFIKVLDNNDNGPEFSQPNYDVTISEDVLPDTEILQIEATDRDEKHKLSYTVHSSIDSISMRKFRIDPSTGVLYTAERLDHEAQDKHILNIMVRDQEFPYRRNLARVIVNVEDANDHSPYFTNPLYEASVFESAALGSAVLQVTALDKDKGENAELIYTIEAGNTGNMFKIEPVLGIITICKEPDMTTMGQFVLSIKVTDQGSPPMSATAIVRISVTMSDNSHPKFIHKDYQAEVNENVDIGTSVILISAISQSTLIYEVKDGDINGIFTINPYSGVITTQKALDYERTSSYQLIIQATNMAGMASNATVNIQIVDENDNAPVFLFSQYSGSLSEAAPINSIVRSLDNSPLVIRATDADSNRNALLVYQIVESTAKKFFTVDSSTGAIRTIANLDHETIAHFHFHVHVRDSGSPQLTAESPVEVNIEVTDVNDNPPVFTQAVFETILLLPTYVGVEVLKVSATDPDSEVPPELTYSLMEGSLDHFLIDSNSGVLTIKNNNLSKDHYMLIVKVSDGKFYSTSMVTIMVKEAMDSGLHFTQSFYSTSISENNTNITKVAIVNAVGNRLNEPLKYSILNPGNKFKIKSTSGVIQTTGVPFDREEQELYELVVEASRELDHLRVARVVVRVNIEDINDNSPVFVGLPYYAAVQVDAEPGTLIYQVTAIDKDKGPNGEVTYVLQDDYGHFEINPNSGNVILKEAFNSDLSNIEYGVTILAKDGGKPSLSTSVELPITIVNKAMPVFDKPFYTASVNEDIRMNTPILSINATSPEGQGIIYIIIDGDPFKQFNIDFDTGVLKVVSPLDYEVTSAYKLTIRASDALTGARAEVTVDLLVNDVNDNPPIFDQPTYNTTLSEASLIGTPVLQVVSIDADSENNKMVHYQIVQDTYNSTDYFHIDSSSGLILTARMLDHELVQHCTLKVRSIDSGFPSLSSEVLVHIYISDVNDNPPVFNQLIYESYVSELAPRGHFVTCVQASDADSSDFDRLEYSILSGNDRTSFLMDSKSGVITLSNHRKQRMEPLYSLNVSVSDGLFTSTAQVHIRVLGANLYSPAFSQSTYVAEVRENVAAGTKVIHVRATDGDPGTYGQISYAIINDFAKDRFLIDSNGQVITTERLDRENPLEGDVSIFVRALDGGGRTTFCTVRVIVVDENDNAPQFMTVEYRASVRADVGRGHLVTQVQAIDPDDGANSRITYSLYSEASVSVADLLEIDPDNGWMVTKGNFNQLKNTVLSFFVKAVDGGIPVKHSLIPVYIHVLPPETFLPSFTQSQYSFTIAEDTAIGSTVDTLRILPSQNVWFSTVNGERPENNKGGIFVIEQETGTIKLDKRLDRETSPAFHFKVAATIPLDKVDIVFTVDVDIKVLDLNDNKPVFETSSYDTIIMEGMPVGTKLTQVRAIDMDWGANGQVTYSLHSDSQPEKVMEAFNIDSNTGWISTLKDLDHETDPTFTFSVVASDLGEAFSLSSTALVSVRVTDINDNAPVFAQEVYRGNVKESDPPGEVVAVLSTWDRDTSDVNRQVSYHITGGNPRGRFALGLVQSEWKVYVKRPLDREEQDIYFLNITATDGLFVTQAMVEVSVSDVNDNSPVCDQVAYTALLPEDIPSNKIILKVSAKDADIGSNGYIRYSLYGSGNSEFFLDPESGELKTLALLDRERIPVYSLMAKATDGGGRFCQSNIHLILEDVNDNPPVFSSDHYNTCVYENTATKALLTRVQAVDPDIGINRKVVYSLADSAGGVFSIDSSSGIIILEQPLDREQQSSYNISVRATDQSPGQSLSSLTTVTITVLDINDNPPVFERRDYLVTVPEDTSPGTQVLAVFATSKDIGTNAEITYLIRSGNEQGKFKINPKTGGISVSEVLDYELCKRFYLVVEAKDGGTPALSAVATVNINLTDVNDNPPKFSQDVYSAVISEDALVGDSVILLIAEDVDSQPNGQIHFSIVNGDRDNEFTVDPVLGLVKVKKKLDRERVSGYSLLVQAVDSGIPAMSSTATVNIDISDVNDNSPVFTPANYTAVIQENKPVGTSILQLVVTDRDSFHNGPPFSFSILSGNEEEEFVLDPHGILRSAVVFQHTESLEYVLCVQAKDSGKPQQVSHTYIRVRVIEESTHKPTAIPLEIFIVTMEDDFPGGVIGKIHATDQDMYDVLTFALKSEQKSLFKVNSHDGKIIALGGLDSGKYVLNVSVSDGRFQVPIDVVVHVEQLVHEMLQNTVTIRFENVSPEDFVGLHMHGFRRTLRNAVLTQKQDSLRIISIQPVAGTNQLDMLFAVEMHSSEFYKPAYLIQKLSNARRHLENIMRISAILEKNCSGLDCQEQHCEQGLSLDSHALMTYSTARISFVCPRFYRNVRCTCNGGLCPGSNDPCVEKPCPGDMQCVSYEASRRPFLCQCPPGKLGECSGHTSLSFAGNSYIKYRLSENSKEEDFKLALRLRTLQSNGIIMYTRANPCIILKIVDGKLWFQLDCGSGPGILGISGRAVNDGSWHSVFLELNRNFTSLSLDDSYVERRRAPLYFQTLSTESSIYFGALVQADNIRSLTDTRVTQVLSGFQGCLDSVILNNNELPLQNKRSSFAEVVGLTELKLGCVLYPDACKRSPCQHGGSCTGLPSGGYQCTCLSQFTGRNCESEITACFPNPCRNGGSCDPIGNTFICNCKAGLTGVTCEEDINECEREECENGGSCVNVFGSFLCNCTPGYVGQYCGLRPVVVPNIQAGHSYVGKEE

SEQ ID NO: 1245 - protein, 4466 aa, synthetic construct
  REGION 1..4466: note = FAT4 (Q6V0I7) ECD
WVHGAEPRQVFQVLEEQPPGTLVGTIQTRPGFTYRLSESHALFAINSSTGALYTTSTIDRESLPSDVINLVVLSSAPTYPTEVRVLVRDLNDNAPVFPDPSIVVTFKEDSSSGRQVILDTATDSDIGSNGVDHRSYRIIRGNEAGRFRLDITLNPSGEGAFLHLVSKGGLDREVTPQYQLLVEVEDKGEPKRRGYLQVNVTVQDINDNPPVFGSSHYQAGVPEDAVVGSSVLQVAAADADEGTNADIRYRLQDEGTPFQMDPETGLITVREPLDFEARRQYSLTVQAMDRGVPSLTGRAEALIQLLDVNDNDPVVKFRYFPATSRYASVDENAQVGTVVALLTVTDADSPAANGNISVQILGGNEQRHFEVQSSKVPNLSLIKVASALDRERIPSYNLTVSVSDNYGAPPGAAVQARSSVASLVIFVNDINDHPPVFSQQVYRVNLSEEAPPGSYVSGISATDGDSGLNANLRYSIVSGNGLGWFHISEHSGLVTTGSSGGLDRELASQIVLNISARDQGVHPKVSYAQLVVTLLDVNDEKPVFSQPEGYDVSVVENAPTGTELLMLRATDGDLGDNGTVRFSLQEAETDRRSFRLDPVSGRLSTISSLDREEQAFYSLLVLATDLGSPPQSSMARINVSLLDINDNSPVFYPVQYFAHIKENEPGGSYITTVSATDPDLGTNGTVKYSISAGDRSRFQVNAQSGVISTRMALDREEKTAYQLQIVATDGGNLQSPNQAIVTITVLDTQDNPPVFSQVAYSFVVFENVALGYHVGSVSASTMDLNSNISYLITTGDQKGMFAINQVTGQLTTANVIDREEQSFYQLKVVASGGTVTGDTMVNITVKDLNDNSPHFLQAIESVNVVENWQAGHSIFQAKAVDPDEGVNGMVLYSLKQNPKNLFAINEKNGTISLLGPLDVHAGSYQIEILASDMGVPQLSSSVILTVYVHDVNDNSPVFDQLSYEVTLSESEPVNSRFFKVQASDKDSGANGEIAYTIAEGNTGDAFGIFPDGQLYIKSELDRELQDRYVLMVVASDRAVEPLSATVNVTVILEDVNDNRPLFNSTNYTFYFEEEQRAGSFVGKVSAVDKDFGPNGEVRYSFEMVQPDFELHAISGEITNTHQFDRESLMRRRGTAVFSFTVIATDQGIPQPLKDQATVHVYMKDINDNAPKFLKDFYQATISESAANLTQVLRVSASDVDEGNNGLIHYSIIKGNEERQFAIDSTSGQVTLIGKLDYEATPAYSLVIQAVDSGTIPLNSTCTLNIDILDENDNTPSFPKSTLFVDVLENMRIGELVSSVTATDSDSGDNADLYYSITGTNNHGTFSISPNTGSIFLAKKLDFETQSLYKLNITAKDQGRPPRSSTMSVVIHVRDFNDNPPSFPPGDIFKSIVENIPIGTSVISVTAHDPDADINGQLSYTIIQQMPRGNHFTIDEVKGTIYTNAEIDREFANLFELTVKANDQAVPIETRRYALKNVTILVTDLNDNVPMFISQNALAADPSAVIGSVLTTIMAADPDEGANGEIEYEIINGDTDTFIVDRYSGDLRVASALVPSQLIYNLIVSATDLGPERRKSTTELTIILQGLDGPVFTQPKYITILKEGEPIGTNVISIEAASPRGSEAPVEYYIVSVRCEEKTVGRLFTIGRHTGIIQTAAILDREQGACLYLVDVYAIEKSTAFPRTQRAEVEITLQDINDNPPVFPTDMLDLTVEENIGDGSKIMQLTAMDADEGANALVTYTIISGADDSFRIDPESGDLIATRRLDRERRSKYSLLVRADDGLQSSDMRINITVSDVNDHTPKFSRPVYSFDIPEDTIPGSLVAAILATDDDSGVNGEITYIVNEDDEDGIFFLNPITGVFNLTRLLDYEVQQYYILTVRAEDGGGQFTTIRVYFNILDVNDNPPIFSLNSYSTSLMENLPVGSTVLVFNVTDADDGINSQLTYSIASGDSLGQFTVDKNGVLKVLKALDRESQSFYNLVVQVHDLPQIPASRFTSTAQVSIILLDVNDNPPTFLSPKLTYIPENTPIDTVVFKAQATDPDSGPNSYIEYTLLNPLGNKFSIGTIDGEVRLTGELDREEVSNYTLTVVATDKGQPSLSSSTEVVVMVLDINDNNPIFAQALYKVEINENTLTGTDIIQVFAADGDEGTNGQVRYGIVNGNTNQEFRIDSVTGAITVAKPLDREKTPTYHLTVQATDRGSTPRTDTSTVSIVLLDINDFVPVFELSPYSVNVPENLGTLPRTILQVVARDDDRGSNSKLSYVLFGGNEDNAFTLSASGELGVTQSLDRETKERFVLMITATDSGSPALTGTGTINVIVDDVNDNVPTFASKAYFTTIPEDAPTGTDVLLVNASDADASKNAVIRIIGGNSQFTINPSTGQIITSALLDRETKDNYTLVVVCSDAGSPEPLSSSTSVLVTVTDVNDNPPRFQHHPYVTHIPSPTLPGSFVFAVTVTDADIGPNSELHYSLSGRNSEKFHIDPLRGAIMAAGPLNGASEVTFSVHVKDGGSFPKTDSTTVTVRFVNKADFPKVRAKEQTFMFPENQPVSSLVTTITGSSLRGEPMSYYIASGNLGNTFQIDQLTGQVSISQPLDFEKIQKYVVWIEARDGGFPPFSSYEKLDITVLDVNDNAPIFKEDPFISEILENLSPRKILTVSAMDKDSGPNGQLDYEIVNGNMENSFSINHATGEIRSVRPLDREKVSHYVLTIKSSDKGSPSQSTSVKVMINILDENDNAPRFSQIFSAHVPENSPLGYTVTRVTTSDEDIGINAISRYSIMDASLPFTINPSTGDIVISRPLNREDTDRYRIRVSAHDSGWTVSTDVTIFVTDINDNAPRFSRTSYYLDCPELTEIGSKVTQVFATDPDEGSNGQVFYFIKSQSEYFRINATTGEIFNKQILKYQNVTGFSNVNINRHSFIVTSSDRGKPSLISETTVTINIVDSNDNAPQFLKSKYFTPVTKNVKVGTKLIRVTAIDDKDFGLNSEVEYFISNDNHLGKFKLDNDTGWISVASSLISDLNQNFFITVTAKDKGNPPLSSQATVHITVTEENYHTPEFSQSHMSATIPESHSIGSIVRTVSARDRDAAMNGLIKYSISSGNEEGIFAINSSTGILTLAKALDYELCQKHEMTISAIDGGWVARTGYCSVTVNVIDVNDNSPVFLSDDYFPTVLENAPSGTTVIHLNATDADSGTNAVIAYTVQSSDSDLFVIDPNTGVITTQGFLDFETKQSYHLTVKAFNVPDEERCSFATVNIQLKGTNEYVPRFVSKLYYFEISEAAPKGTIVGEVFASDRDLGTDGEVHYLIFGNSRKKGFQINKKTGQIYVSGILDREKEERVSLKVLAKNFGSIRGADIDEVTVNVTVLDANDPPIFTLNIYSVQISEGVPIGTHVTFVSAFDSDSIPSWSRFSYFIGSGNENGAFSINPQTGQITVTAELDRETLPIYNLSVLAVDSGTPSATGSASLLVTLEDINDNGPMLTVSEGEVMENKRPGTLVMTLQSTDPDLPPNQGPFTYYLLSTGPATSYFSLSTAGVLSTTREIDREQIADFYLSVVTKDSGVPQMSSTGTVHITVIDQNDNPSQSRTVEIFVNYYGNLFPGGILGSVKPQDPDVLDSFHCSLTSGVTSLFSIPGGTCDLNSQPRSTDGTFDLTVLSNDGVHSTVTSNIRVFFAGFSNATVDNSILLRLGVPTVKDFLTNHYLHFLRIASSQLTGLGTAVQLYSAYEENNRTFLLAAVKRNHNQYVNPSGVATFFESIKEILLRQSGVKVESVDHDSCVHGPCQNGGSCLRRLAVSSVLKSRESLPVIIVANEPLQPFLCKCLPGYAGSWCEIDIDECLPSPCHSGGTCHNLVGGFSCSCPDGFTGRACERDINECLQSPCKNGAICQNFPGSFNCVCKTGYTGKMCESSVNYCECNPCFNGGSCQSGVDSYYCHCPFGVFGKHCELNSYGFEELSYMEFPSLDPNNNYIYVKFATIKSHALLLYNYDNQTGDRAEFLALEIAEERLRFSYNLGSGTYKLTTMKKVSDGHFHTVIARRAGMAASLTVDSCSENQEPGYCTVSNVAVSDDWTLDVQPNRVTVGGIRSLEPILQRRGHVESHDFVGCIMEFAVNGRPLEPSQALAAQGILDQCPRLEGACTRSPCQHGGTCMDYWSWQQCHCKEGLTGKYCEKSVTPDTALSLEGKGRLDYHMSQNEKREYLLRQSLRGAMLEPFGVNSLEVKFRTRSENGVLIHIQESSNYTTVKIKNGKVYFTSDAGIAGKVERNIPEVYVADGHWHTFLIGKNGTATVLSVDRIYNRDIIHPTQDFGGLDVLTISLGGIPPNQAHRDAQTAGFDGCIASMWYGGESLPFSGKHSLASISKTDPSVKIGCRGPNICASNPCWGDLLCINQWYAYRCVPPGDCASHPCQNGGSCEPGLHSGFTCSCPDSHTGRTCEMVVACLGVLCPQGKVCKAGSPAGHVCVLSQGPEEISLPLWA

SEQ ID NO: 1246 - protein, 434 aa, synthetic construct
  REGION 1..434: note = FCAMR (Q8WWV6) ECD
LPQKRPHPRWLWEGSLPSRTHLRAMGTLRPSSPLCWREESSFAAPNSLKGSRLVSGEPGGAVTIQCHYAPSSVNRHQRKYWCRLGPPRWICQTIVSTNQYTHHRYRDRVALTDFPQRGLFVVRLSQLSPDDIGCYLCGIGSENNMLFLSMNLTISAGPASTLPTATPAAGELTMRSYGTASPVANRWTPGTTQTLGQGTAWDTVASTPGTSKTTASAEGRRTPGATRPAAPGTGSWAEGSVKAPAPIPESPPSKSRSMSNTTEGVWEGTRSSVTNRARASKDRREMTTTKADRPREDIEGVRIALDAAKKVLGTIGPPALVSETLAWEILPQATPVSKQQSQGSIGETTPAAGMWTLGTPAADVWILGTPAADVWTSMEAASGEGSAAGDLDAATGDRGPQATLSQTPAVGPWGPPGKESSVKRTFPEDESSSR

SEQ ID NO: 1247 - protein, 206 aa, synthetic construct
  REGION 1..206: note = FCAR (P24071) ECD
QEGDFPMPFISAKSSPVIPLDGSVKIQCQAIREAYLTQLMIIKNSTYREIGRRLKFWNETDPEFVIDHMDANKAGRYQCQYRIGHYRFRYSDTLELVVTGLYGKPFLSADRGLVLMPGENISLTCSSAHIPFDRFSLAKEGELSLPQHQSGEHPANFSLGPVDLNVSGIYRCYGWYNRSPYLWSFPSNALELVVTDSIHQDYTTQN

SEQ ID NO: 1248 - protein, 180 aa, synthetic construct
  REGION 1..180: note = FCER1A (P12319) ECD
VPQKPKVSLNPPWNRIFKGENVTLTCNGNNFFEVSSTKWFHNGSLSEETNSSLNIVNAKFEDSGEYKCQHQQVNESEPVYLEVFSDWLLLQASAEVVMEGQPLFLRCHGWRNWDVYKVIYYKDGEALKYWYENHNISITNATVEDSGTYYCTGKVWQLDYESEPLNITVIKAPREKYWLQ

SEQ ID NO: 1249 - protein, 277 aa, synthetic construct [sequence omitted]

SEQ ID NO: 1250 - protein, 183 aa, synthetic construct
  REGION 1..183: note = FCGR1B (Q92637) ECD
QVDTTKAVITLQPPWVSVFQEETVTLHCEVLHLPGSSSTQWFLNGTATQTSTPSYRITSASVNDSGEYRCQRGLSGRSDPIQLEIHRGWLLLQVSSRVFMEGEPLALRCHAWKDKLVYNVLYYRNGKAFKFFHWNSNLTILKTNISHNGTYHCSGMGKHRYTSAGISQYTVKGLQLPTPVWFH

SEQ ID NO: 1251 - protein, 184 aa, synthetic construct
  REGION 1..184: note = FCGR2A (P12318) ECD
QAAAPPKAVLKLEPPWINVLQEDSVTLTCQGARSPESDSIQWFHNGNLIPTHTQPSYRFKANNNDSGEYTCQTGQTSLSDPVHLTVLSEWLVLQTPHLEFQEGETIMLRCHSWKDKPLVKVTFFQNGKSQKFSHLDPTFSIPQANHSHSGDYHCTGNIGYTLFSSKPVTITVQVPSMGSSSPMG

SEQ ID NO: 1252 - protein, 175 aa, synthetic construct
  REGION 1..175: note = FCGR2B (P31994) ECD
TPAAPPKAVLKLEPQWINVLQEDSVTLTCRGTHSPESDSIQWFHNGNLIPTHTQPSYRFKANNNDSGEYTCQTGQTSLSDPVHLTVLSEWLVLQTPHLEFQEGETIVLRCHSWKDKPLVKVTFFQNGKSKKFSRSDPNFSIPQANHSHSGDYHCTGNIGYTLYSSKPVTITVQAP

SEQ ID NO: 1253 - protein, 181 aa, synthetic construct
  REGION 1..181: note = FCGR2C (P31995) ECD
TPAAPPKAVLKLEPQWINVLQEDSVTLTCRGTHSPESDSIQWFHNGNLIPTHTQPSYRFKANNNDSGEYTCQTGQTSLSDPVHLTVLSEWLVLQTPHLEFQEGETIVLRCHSWKDKPLVKVTFFQNGKSKKFSRSDPNFSIPQANHSHSGDYHCTGNIGYTLYSSKPVTITVQAPSSSPMG

SEQ ID NO: 1254 - protein, 192 aa, synthetic construct
  REGION 1..192: note = FCGR3A (P08637) ECD
GMRTEDLPKAVVFLEPQWYRVLEKDSVTLKCQGAYSPEDNSTQWFHNESLISSQASSYFIDAATVDDSGEYRCQTNLSTLSDPVQLEVHIGWLLLQAPRWVFKEEDPIHLRCHSWKNTALHKVTYLQNGKGRKYFHHNSDFYIPKATLKDSGSYFCRGLFGSKNVSSETVNITITQGLAVSTISSFFPPGYQ

SEQ ID NO: 1255 - protein, 274 aa, synthetic construct
  REGION 1..274: note = FCGRT (P55899) ECD
AESHLSLLYHLTAVSSPAPGTPAFWVSGWLGPQQYLSYNSLRGEAEPCGAWVWENQVSWYWEKETTDLRIKEKLFLEAFKALGGKGPYTLQGLLGCELGPDNTSVPTAKFALNGEEFMNFDLKQGTWGGDWPEALAISQRWQQQDKAANKELTFLLFSCPHRLREHLERGRGNLEWKEPPSMRLKARPSSPGFSVLTCSAFSFYPPELQLRFLRNGLAAGTGQGDFGPNSDGSFHASSSLTVKSGDEHHYCCIVQHAGLAQPLRVELESPAKSS

SEQ ID NO: 1256 - protein, 291 aa, synthetic construct
  REGION 1..291: note = FCRL1 (Q96LA6) ECD
AELFLIASPSHPTEGSPVTLTCKMPFLQSSDAQFQFCFFRDTRALGPGWSSSPKLQIAAMWKEDTGSYWCEAQTMASKVLRSRRSQINVHRVPVADVSLETQPPGGQVMEGDRLVLICSVAMGTGDITFLWYKGAVGLNLQSKTQRSLTAEYEIPSVRESDAEQYYCVAENGYGPSPSGLVSITVRIPVSRPILMLRAPRAQAAVEDVLELHCEALRGSPPILYWFYHEDITLGSRSAPSGGGASFNLSLTEEHSGNYSCEANNGLGAQRSEAVTLNFTVPTGARSNHLTS

SEQ ID NO: 1257 - protein, 382 aa, synthetic construct
  REGION 1..382: note = FCRL2 (Q96LA5) ECD
LTLVAPSSVFEGDSIVLKCQGEQNWKIQKMAYHKDNKELSVFKKFSDFLIQSAVLSDSGNYFCSTKGQLFLWDKTSNIVKIKVQELFQRPVLTASSFQPIEGGPVSLKCETRLSPQRLDVQLQFCFFRENQVLGSGWSSSPELQISAVWSEDTGSYWCKAETVTHRIRKQSLQSQIHVQRIPISNVSLEIRAPGGQVTEGQKLILLCSVAGGTGNVTFSWYREATGTSMGKKTQRSLSAELEIPAVKESDAGKYYCRADNGHVPIQSKVVNIPVRIPVSRPVLTLRSPGAQAAVGDLLELHCEALRGSPPILYQFYHEDVTLGNSSAPSGGGASFNLSLTAEHSGNYSCEANNGLGAQCSEAVPVSISGPDGYRRDLMTAGV

SEQ ID NO: 1258 - protein, 556 aa, synthetic construct
  REGION 1..556: note = FCRL3 (Q96P31) ECD
GVAPKAVLLLNPPWSTAFKGEKVALICSSISHSLAQGDTYWYHDEKLLKIKHDKIQITEPGNYQCKTRGSSLSDAVHVEFSPDWLILQALHPVFEGDNVILRCQGKDNKNTHQKVYYKDGKQLPNSYNLEKITVNSVSRDNSKYHCTAYRKFYILDIEVTSKPLNIQVQELFLHPVLRASSSTPIEGSPMTLTCETQLSPQRPDVQLQFSLFRDSQTLGLGWSRSPRLQIPAMWTEDSGSYWCEVETVTHSIKKRSLRSQIRVQRVPVSNVNLEIRPTGGQLIEGENMVLICSVAQGSGTVTFSWHKEGRVRSLGRKTQRSLLAELHVLTVKESDAGRYYCAADNVHSPILSTWIRVTVRIPVSHPVLTFRAPRAHTVVGDLLELHCESLRGSPPILYRFYHEDVTLGNSSAPSGGGASFNLSLTAEHSGNYSCDADNGLGAQHSHGVSLRVTVPVSRPVLTLRAPGAQAVVGDLLELHCESLRGSFPILYWFYHEDDTLGNISAHSGGGASFNLSLTTEHSGNYSCEADNGLGAQHSKVVTLNVTGTSRNRTGLT

SEQ ID NO: 1259 - protein, 368 aa, synthetic construct
  REGION 1..368: note = FCRL4 (Q96PJ5) ECD
AHKPVISVHPPWTTFFKGERVTLTCNGFQFYATEKTTWYHRHYWGEKLTLTPGNTLEVRESGLYRCQARGSPRSNPVRLLFSSDSLILQAPYSVFEGDTLVLRCHRRRKEKLTAVKYTWNGNILSISNKSWDLLIPQASSNNNGNYRCIGYGDENDVFRSNFKIIKIQELFPHPELKATDSQPTEGNSVNLSCETQLPPERSDTPLHFNFFRDGEVILSDWSTYPELQLPTVWRENSGSYWCGAETVRGNIHKHSPSLQIHVQRIPVSGVLLETQPSGGQAVEGEMLVLVCSVAEGTGDTTFSWHREDMQESLGRKTQRSLRAELELPAIRQSHAGGYYCTADNSYGPVQSMVLNVTVRETPGNRDGL

SEQ ID NO: 1260 - protein, 836 aa, synthetic construct [sequence omitted]

SEQ ID NO: 1261 - protein, 288 aa, synthetic construct
  REGION 1..288: note = FCRL6 (Q6DN72) ECD
LYLQAWPNPVFEGDALTLRCQGWKNTPLSQVKFYRDGKFLHFSKENQTLSMGAATVQSRGQYSCSGQVMYIPQTFTQTSETAMVQVQELFPPPVLSAIPSPEPREGSLVTLRCQTKLHPLRSALRLLFSFHKDGHTLQDRGPHPELCIPGAKEGDSGLYWCEVAPEGGQVQKQSPQLEVRVQAPVSRPVLTLHHGPADPAVGDMVQLLCEAQRGSPPILYSFYLDEKIVGNHSAPCGGTTSLLFPVKSEQDAGNYSCEAENSVSRERSEPKKLSLKGSQVLFTPASNW

SEQ ID NO: 1262 - protein, 355 aa, synthetic construct
  REGION 1..355: note = FGFR1 (P11362) ECD
RPSPTLPEQAQPWGAPVEVESFLVHPGDLLQLRCRLRDDVQSINWLRDGVQLAESNRTRITGEEVEVQDSVPADSGLYACVTSSPSGSDTTYFSVNVSDALPSSEDDDDDDDSSSEEKETDNTKPNRMPVAPYWTSPEKMEKKLHAVPAAKTVKFKCPSSGTPNPTLRWLKNGKEFKPDHRIGGYKVRYATWSIIMDSVVPSDKGNYTCIVENEYGSINHTYQLDVVERSPHRPILQAGLPANKTVALGSNVEFMCKVYSDPQPHIQWLKHIEVNGSKIGPDNLPYVQILKTAGVNTTDKEMEVLHLRNVSFEDAGEYTCLAGNSIGLSHHSAWLTVLEALEERPAVMTSPLYLE

SEQ ID NO: 1263 - protein, 356 aa, synthetic construct
  REGION 1..356: note = FGFR2 (P21802) ECD
RPSFSLVEDTTLEPEEPPTKYQISQPEVYVAAPGESLEVRCLLKDAAVISWTKDGVHLGPNNRTVLIGEYLQIKGATPRDSGLYACTASRTVDSETWYFMVNVTDAISSGDDEDDTDGAEDFVSENSNNKRAPYWTNTEKMEKRLHAVPAANTVKFRCPAGGNPMPTMRWLKNGKEFKQEHRIGGYKVRNQHWSLIMESVVPSDKGNYTCVVENEYGSINHTYHLDVVERSPHRPILQAGLPANASTVVGGDVEFVCKVYSDAQPHIQWIKHVEKNGSKYGPDGLPYLKVLKAAGVNTTDKEIEVLYIRNVTFEDAGEYTCLAGNSIGISFHSAWLTVLPAPGREKEITASPDYLE

SEQ ID NO: 1264 - protein, 353 aa, synthetic construct
  REGION 1..353: note = FGFR3 (P22607) ECD
ESLGTEQRVVGRAAEVPGPEPGQQEQLVFGSGDAVELSCPPPGGGPMGPTVWVKDGTGLVPSERVLVGPQRLQVLNASHEDSGAYSCRQRLTQRVLCHFSVRVTDAPSSGDDEDGEDEAEDTGVDTGAPYWTRPERMDKKLLAVPAANTVRFRCPAAGNPTPSISWLKNGREFRGEHRIGGIKLRHQQWSLVMESVVPSDRGNYTCVVENKFGSIRQTYTLDVLERSPHRPILQAGLPANQTAVLGSDVEFHCKVYSDAQPHIQWLKHVEVNGSKVGPDGTPYVTVLKTAGANTTDKELEVLSLHNVTFEDAGEYTCLAGNSIGFSHHSAWLVVLPAEEELVEADEAGSVYAG

SEQ ID NO: 1265 - protein, 348 aa, synthetic construct
  REGION 1..348: note = FGFR4 (P22455) ECD
LEASEEVELEPCLAPSLEQQEQELTVALGQPVRLCCGRAERGGHWYKEGSRLAPAGRVRGWRGRLEIASFLPEDAGRYLCLARGSMIVLQNLTLITGDSLTSSNDDEDPKSHRDPSNRHSYPQQAPYWTHPQRMEKKLHAVPAGNTVKFRCPAAGNPTPTIRWLKDGQAFHGENRIGGIRLRHQHWSLVMESVVPSDRGTYTCLVENAVGSIRYNYLLDVLERSPHRPILQAGLPANTTAVVGSDVELLCKVYSDAQPHIQWLKHIVINGSSFGADGFPYVQVLKTADINSSEVEVLYLRNVSAEDAGEYTCLAGNSIGLSYQSAWLTVLPEEDPTWTAAAPEARYTD

SEQ ID NO: 1266 - protein, 354 aa, synthetic construct
  REGION 1..354: note = FGFRL1 (Q8N441) ECD
ARGPPKMADKVVPRQVARLGRTVRLQCPVEGDPPPLTMWTKDGRTIHSGWSRFRVLPQGLKVKQVEREDAGVYVCKATNGFGSLSVNYTLVVLDDISPGKESLGPDSSSGGQEDPASQQWARPRFTQPSKMRRRVIARPVGSSVRLKCVASGHPRPDITWMKDDQALTRPEAAEPRKKKWTLSLKNLRPEDSGKYTCRVSNRAGAINATYKVDVIQRTRSKPVLTGTHPVNTTVDFGGTTSFQCKVRSDVKPVIQWLKRVEYGAEGRHNSTIDVGGQKFVVLPTGDVWSRPDGSYLNKLLITRARQDDAGMYICLGANTMGYSFRSAFLTVLPDPKPPGPPVASSSSATSLPWP

SEQ ID NO: 1267 - protein, 504 aa, synthetic construct
  REGION 1..504: note = FLRT1 (Q9NZU1) ECD
IDSTTCPSVCRCDNGFIYCNDRGLTSIPADIPDDATTLYLQNNQINNAGIPQDLKTKVNVQVIYLYENDLDEFPINLPRSLRELHLQDNNVRTIARDSLARIPLLEKLHLDDNSVSTVSIEEDAFADSKQLKLLFLSRNHLSSIPSGLPHTLEELRLDDNRISTIPLHAFKGLNSLRRLVLDGNLLANQRIADDTFSRLQNLTELSLVRNSLAAPPLNLPSAHLQKLYLQDNAISHIPYNTLAKMRELERLDLSNNNLTTLPRGLFDDLGNLAQLLLRNNPWFCGCNLMWLRDWVKARAAVVNVRGLMCQGPEKVRGMAIKDITSEMDECFETGPQGGVANAAAKTTASNHASATTPQGSLFTLKAKRPGLRLPDSNIDYPMATGDGAKTLAIHVKALTADSIRITWKATLPASSFRLSWLRLGHSPAVGSITETLVQGDKTEYLLTALEPKSTYIICMVTMETSNAYVADETPVCAKAETADSYGPTTTLNQEQNAGPMASLP

SEQ ID NO: 1268 - protein, 506 aa, synthetic construct
  REGION 1..506: note = FLRT2 (O43155) ECD
CPSVCRCDRNFVYCNERSLTSVPLGIPEGVTVLYLHNNQINNAGFPAELHNVQSVHTVYLYGNQLDEFPMNLPKNVRVLHLQENNIQTISRAALAQLLKLEELHLDDNSISTVGVEDGAFREAISLKLLFLSKNHLSSVPVGLPVDLQELRVDENRIAVISDMAFQNLTSLERLIVDGNLLTNKGIAEGTFSHLTKLKEFSIVRNSLSHPPPDLPGTHLIRLYLQDNQINHIPLTAFSNLRKLERLDISNNQLRMLTQGVFDNLSNLKQLTARNNPWFCDCSIKWVTEWLKYIPSSLNVRGFMCQGPEQVRGMAVRELNMNLLSCPTTTPGLPLFTPAPSTASPTTQPPTLSIPNPSRSYTPPTPTTSKLPTIPDWDGRERVTPPISERIQLSIHFVNDTSIQVSWLSLFTVMAYKLTWVKMGHSLVGGIVQERIVSGEKQHLSLVNLEPRSTYRICLVPLDAFNYRAVEDTICSEATTHASYLNNGSNTASSHEQTTSHSMGSPF

SEQ ID NO: 1269 - protein, 500 aa, synthetic construct
  REGION 1..500: note = FLRT3 (Q9NZU0) ECD
KSCPSVCRCDAGFIYCNDRFLTSIPTGIPEDATTLYLQNNQINNAGIPSDLKNLLKVERIYLYHNSLDEFPTNLPKYVKELHLQENNIRTITYDSLSKIPYLEELHLDDNSVSAVSIEEGAFRDSNYLRLLFLSRNHLSTIPWGLPRTIEELRLDDNRISTISSPSLQGLTSLKRLVLDGNLLNNHGLGDKVFFNLVNLTELSLVRNSLTAAPVNLPGTNLRKLYLQDNHINRVPPNAFSYLRQLYRLDMSNNNLSNLPQGIFDDLDNITQLILRNNPWYCGCKMKWVRDWLQSLPVKVNVRGLMCQAPEKVRGMAIKDLNAELFDCKDSGIVSTIQITTAIPNTVYPAQGQWPAPVTKQPDIKNPKLTKDHQTTGSPSRKTITITVKSVTSDTIHISWKLALPMTALRLSWLKLGHSPAFGSITETIVTGERSEYLVTALEPDSPYKVCMVPMETSNLYLFDETPVCIETETAPLRMYNPTTTLNREQEKEPYKNPNLP

SEQ ID NO: 1270 - protein, 732 aa, synthetic construct
  REGION 1..732: note = FLT1 (P17948) ECD
SKLKDPELSLKGTQHIMQAGQTLHLQCRGEAAHKWSLPEMVSKESERLSITKSACGRNGKQFCSTLTLNTAQANHTGFYSCKYLAVPTSKKKETESAIYIFISDTGRPFVEMYSEIPEIIHMTEGRELVIPCRVTSPNITVTLKKFPLDTLIPDGKRIIWDSRKGFIISNATYKEIGLLTCEATVNGHLYKTNYLTHRQTNTIIDVQISTPRPVKLLRGHTLVLNCTATTPLNTRVQMTWSYPDEKNKRASVRRRIDQSNSHANIFYSVLTIDKMQNKDKGLYTCRVRSGPSFKSVNTSVHIYDKAFITVKHRKQQVLETVAGKRSYRLSMKVKAFPSPEVVWLKDGLPATEKSARYLTRGYSLIIKDVTEEDAGNYTILLSIKQSNVFKNLTATLIVNVKPQIYEKAVSSFPDPALYPLGSRQILTCTAYGIPQPTIKWFWHPCNHNHSEARCDFCSNNEESFILDADSNMGNRIESITQRMAIIEGKNKMASTLVVADSRISGIYICIASNKVGTVGRNISFYITDVPNGFHVNLEKMPTEGEDLKLSCTVNKFLYRDVTWILLRTVNNRTMHYSISKQKMAITKEHSITLNLTIMNVSLQDSGTYACRARNVYTGEEILQKKEITIRDQEAPYLLRNLSDHTVAISSSTTLDCHANGVPEPQITWFKNNHKIQQEPGIILGPGSSTLFIERVTEEDEGVYHCKATNQKGSVESSAYLTVQGTSDKSNLE

SEQ ID NO: 1271 - protein, 517 aa, synthetic construct
  REGION 1..517: note = FLT3 (P36888) ECD
NQDLPVIKCVLINHKNNDSSVGKSSSYPMVSESPEDLGCALRPQSSGTVYEAAAVEVDVSASITLQVLVDAPGNISCLWVFKHSSLNCQPHFDLQNRGVVSMVILKMTETQAGEYLLFIQSEATNYTILFTVSIRNTLLYTLRRPYFRKMENQDALVCISESVPEPIVEWVLCDSQGESCKEESPAVVKKEEKVLHELFGTDIRCCARNELGRECTRLFTIDLNQTPQTTLPQLFLKVGEPLWIRCKAVHVNHGFGLTWELENKALEEGNYFEMSTYSTNRTMIRILFAFVSSVARNDTGYYTCSSSKHPSQSALVTIVEKGFINATNSSEDYEIDQYEEFCFSVRFKAYPQIRCTWTFSRKSFPCEQKGLDNGYSISKFCNHKHQPGEYIFHAENDDAQFTKMFTLNIRRKPQVLAEASASQASCFSDGYPLPSWTWKKCSDKSPNCTEEITEGVWNRKANRKVFGQWVSSSTLNMSEAIKGFLVKCCAYNSLGTSCETILLNSPGPFPFIQDNIS

SEQ ID NO: 1272 - protein, 158 aa, synthetic construct
  REGION 1..158: note = FLT3LG (P49771) ECD
TQDCSFQHSPISSDFAVKIRELSDYLLQDYPVTVASNLQDEELCGGLWRLVLAQRWMERLKTVAGSKMQGLLERVNTEIHFVTKCAFQPPPSCLRFVQTNISRLLQETSEQLVALKPWITRQNFSRCLELQCQPDSSTLPPPWSPRPLEATAPTAPQP

SEQ ID NO: 1273 - protein, 751 aa, synthetic construct
  REGION 1..751: note = FLT4 (P35916) ECD
YSMTPPTLNITEESHVIDTGDSLSISCRGQHPLEWAWPGAQEAPATGDKDSEDTGVVRDCEGTDARPYCKVLLLHEVHANDTGSYVCYYKYIKARIEGTTAASSYVFVRDFEQPFINKPDTLLVNRKDAMWVPCLVSIPGLNVTLRSQSSVLWPDGQEVVWDDRRGMLVSTPLLHDALYLQCETTWGDQDFLSNPFLVHITGNELYDIQLLPRKSLELLVGEKLVLNCTVWAEFNSGVTFDWDYPGKQAERGKWVPERRSQQTHTELSSILTIHNVSQHDLGSYVCKANNGIQRFRESTEVIVHENPFISVEWLKGPILEATAGDELVKLPVKLAAYPPPEFQWYKDGKALSGRHSPHALVLKEVTEASTGTYTLALWNSAAGLRRNISLELVVNVPPQIHEKEASSPSIYSRHSRQALTCTAYGVPLPLSIQWHWRPWTPCKMFAQRSLRRRQQQDLMPQCRDWRAVTTQDAVNPIESLDTWTEFVEGKNKTVSKLVIQNANVSAMYKCVVSNKVGQDERLIYFYVTTIPDGFTIESKPSEELLEGQPVLLSCQADSYKYEHLRWYRLNLSTLHDAHGNPLLLDCKNVHLFATPLAASLEEVAPGARHATLSLSIPRVAPEHEGHYVCEVQDRRSHDKHCHKKYLSVQALEAPRLTQNLTDLLVNVSDSLEMQCLVAGAHAPSIVWYKDERLLEEKSGVDLADSNQKLSIQRVREEDAGRYLCSVCNAKGCVNSSASVAVEGSEDKGSME

SEQ ID NO: 1274 - protein, 123 aa, synthetic construct
  REGION 1..123: note = FNDC4 (Q9H6D8) ECD
DRPPSPVNVTVTHLRANSATVSWDVPEGNIVIGYSISQQRQNGPGQRVIREVNTTTRACALWGLAEDSDYTVQVRSIGLRGESPPGPRVHFRTLKGSDRLPSNSSSPGDITVEGLDGERPLQT

SEQ ID NO: 1275 - protein, 121 aa, synthetic construct
  REGION 1..121: note = FNDC5 (Q8NAU1) ECD
DSPSAPVNVTVRHLKANSAVVSWDVLEDEVVIGFAISQQKKDVRMLRFIQEVNTTTRSCALWDLEEDTEYIVHVQAISIQGQSPASEPVLFKTPREAEKMASKNKDEVTMKEMGRNQQLRT

SEQ ID NO: 1276 - protein, 3875 aa, synthetic construct
  REGION 1..3875: note = FRAS1 (Q86XX4) ECD
ACVYQDSLLADATIWKPDSCQSCRCHGDIVICKPAVCRNPQCAFEKGEVLQIAANQCCPECVLRTPGSCHHEKKIHEHGTEWASSPCSVCSCNHGEVRCTPQPCPPLSCGHQELAFIPEGSCCPVCVGLGKPCSYEGHVFQDGEDWRLSRCAKCLCRNGVAQCFTAQCQPLFCNQDETVVRVPGKCCPQCSARSCSAAGQVYEHGEQWSENACTTCICDRGEVRCHKQACLPLRCGKGQSRARRHGQCCEECVSPAGSCSYDGVVRYQDEMWKGSACEFCMCDHGQVTCQTGECAKVECARDEELIHLDGKCCPECISRNGYCVYEETGEFMSSNASEVKRIPEGEKWEDGPCKVCECRGAQVTCYEPSCPPCPVGTLALEVKGQCCPDCTSVHCHPDCLTCSQSPDHCDLCQDPTKLLQNGWCVHSCGLGFYQAGSLCLACQPQCSTCTSGLECSSCQPPLLMRHGQCVPTCGDGFYQDRHSCAVCHESCAGCWGPTEKHCLACRDPLHVLRDGGCESSCGKGFYNRQGTCSACDQSCDSCGPSSPRCLTCTEKTVLHDGKCMSECPGGYYADATGRCKVCHNSCASCSGPTPSHCTACSPPKALRQGHCLPRCGEGFYSDHGVCKACHSSCLACMGPAPSHCTGCKKPEEGLQVEQLSDVGIPSGECLAQCRAHFYLESTGICEACHQSCFRCAGKSPHNCTDCGPSHVLLDGQCLSQCPDGYFHQEGSCTECHPTCRQCHGPLESDCISCYPHISLTNGNCRTSCREEQFLNLVGYCADCHHLCQHCAADLHNTGSICLRCQNAHYLLLGDHCVPDCPSGYYAERGACKKCHSSCRTCQGRGPFSCSSCDTNLVLSHTGTCSTTCFPGHYLDDNHVCQPCNTHCGSCDSQASCTSCRDPNKVLLFGECQYESCAPQYYLDFSTNTCKECDWSCSACSGPLKTDCLQCMDGYVLQDGACVEQCLSSFYQDSGLCKNCDSYCLQCQGPHECTRCKGPFLLLEAQCVQECGKGYFADHAKHKCTACPQGCLQCSHRDRCHLCDHGFFLKSGLCVYNCVPGFSVHTSNETCSGKIHTPSLHVNGSLILPIGSIKPLDFSLLNVQDQEGRVEDLLFHVVSTPTNGQLVLSRNGKEVQLDKAGRFSWKDVNEKKVRFVHSKEKLRKGYLFLKISDQQFFSEPQLINIQAFSTQAPYVLRNEVLHISRGERATITTQMLDIRDDDNPQDVVIEIIDPPLHGQLLQTLQSPATPIYQFQLDELSRGLLHYAHDGSDSTSDVAVLQANDGHSFHNILFQVKTVPQNDRGLQLVANSMVWVPEGGMLQITNRILQAEAPGASAEEIIYKITQDYPQFGEVVLLVNMPADSPADEGQHLPDGRTATPTSTFTQQDINEGIVWYRHSGAPAQSDSFRFEVSSASNAQTRLESHMFNIAILPQTPEAPKVSLEASLHMTAREDGLTVIQPHSLSFINSEKPSGKIVYNITLPLHPNQGIIEHRDHPHSPIRYFTQEDINQGKVMYRPPPAAPHLQELMAFSFAGLPESVKFHFTVSDGEHTSPEMVLTIHLLPSDQQLPVFQVTAPRLAVSPGGSTSVGLQVVVRDAETAPKELFFELRRPPQHGVLLKHTAEFRRPMATGDTFTYEDVEKNALQYIHDGSSTREDSMEISVTDGLTVTMLEVRVEVSLSEDRGPRLAAGSSLSITVASKSTAIITRSHLAYVDDSSPDPEIWIQLNYLPSYGTLLRISGSEVEELSEVSNFTMEDINNKKIRYSAVFETDGHLVTDSFYFSVSDMDHNHLDNQIFTIMITPAENPPPVIAFADLITVDEGGRAPLSFHHFFATDDDDNLQRDAIIKLSALPKYGCIENTGTGDRFGPETASDLEASFPIQDVLENYIYYFQSVHESIEPTHDIFSFYVSDGTSRSEIHSINITIERKNDEPPRMTLQPLRVQLSSGVVISNSSLSLQDLDTPDNELIFVLTKKPDHGHVLWRQTASEPLENGRVLVQGSTFTYQDILAGLVGYVPSVPGMVVDEFQFSLTDGLHVDTGRMKIYTELPASDTPHLAINQGLQLSAGSVARITEQHLKVTDIDSDDHQVMYIMKEDPGAGRLQMMKHGNLEQISIKGPIRSFTQADISQGQPEYSHGTGEPGGSFAFKFDVVDGEGNRLIDKSFSISISEDKSPPVITTNKGLVLDENSVKKITTLQLSATDQDSGPTELIYRITRQPQLGHLEHAASPGIQISSFTQADLTSRNVQYVHSSEAEKHSDAFSFTLSDGVSEVTQTFHITLHPVDDSLPVVQNLGMRVQEGMRKTITEFELKAVDADTEAESVTFTIVQPPRHGTIERTSNGQHFHLTSTFTMKDIYQNRVSYSHDGSNSLKDRFTFTVSDGTNPFFIIEEGGKEIMTAAPQPFRVDILPVDDGTPRIVTNLGLQWLEYMDGKATNLITKKELLTMDPDTEDAQLVYEITTGPKHGFVENKLQPGRAAATFTQEDVNLGLIRYVLHKEKIREMMDSFQFLVKDSKPNVVSDNVFHIQWSLISFKYTSYNVSEKAGSVSVTVQRTGNLNQYAIVLCRTEQGTASSSSQPGQQDYVEYAGQVQFDEREDTKSCTIVINDDDVFENVESFTVELSMPAYALLGEFTQAKVIINDTEDEPTLEFDKKIYWVNESAGFLFAPIERKGDASSIVSAICYTVPKSAMGSLFYALESGSDFKSRGMSAASRVIFGPGVTMSTCDVMLIDDSEYEEEEEFEIALADASDNARIGRVATAKVLISGPNDASTVSLGNTAFTVSEDAGTVKIPVIRHGTDLSTFASVWCATRPSDPASATPGVDYVPSSRKVEFGPGVIEQYCTLTILDDTQYPVIEGLETFVVFLSSAQGAELTKPFQAVIAINDTFQDVPSMQFAKDLLLVKEKEGVLHVPITRSGDLSYESSVRCYTQSHSAQVMEDFEERQNADSSRITFLKGDKVKNCTVYIHDDSMFEPEEQFRVYLGLPLGNHWSGARIGKNNMATITISNDEDAPTIEFEEAAYQVREPAGPDAIAILNIKVIRRGDQNRTSKVRCSTRDGSAQSGVDYYPKSRVLKFSPGVDHIFFKVEILSNEDREWHESFSLVLGPDDPVEAVLGDVTTATVTILDQEAAGSLILPAPPIVVTLADYDHVEEVTKEGVKKSPSPGYPLVCVTPCDPHFPRYAVMKERCSEAGINQTSVQFSWEVAAPTDGNGARSPFETITDNTPFTSVNHMVLDSIYFSRRFHVRCVAKAVDKVGHVGTPLRSNIVTIGTDSAICHTPVVAGTSRGFQAQSFIATLKYLDVKHKEHPNRIHISVQIPHQDGMLPLISTMPLHNLHFLLSESIYRHQHVCSNLVTTYDLRGLAEAGFLDDVVYDSTALGPGYDRPFQFDPSVREPKTIQLYKHLNLKSCVWTFDAYYDMTELIDVCGGSVTADFQVRDSAQSFLTVHVPLYVSYIYVTAPRGWASLEHHTEMEFSFFYDTVLWRTGIQTDSVLSARLQIIRIYIREDGRLVIEFKTHAKFRGQFVMEHHTLPEVKSFVLTPDHLGGIEFDLQLLWSAQTFDSPHQLWRATSSYNRKDYSGEYTIYLIPCTVQPTQPWVDPGEKPLACTAHAPERFLIPIAFQQTNRPVPVVYSLNTEFQLCNNEKVFLMDPNTSDMSLAEMDYKGAFSKGQILYGRVLWNPEQNLNSAYKLQLEKVYLCTGKDGYVPFFDPTGTIYNEGPQYGCIQPNKHLKHRFLLLDRNQPEVTDKYFHDVPFEAHFASELPDFHVVSNMPGVDGFTLKVDALYKVEAGHQWYLQVIYIIGPDTISGPRVQRSLTAPLRRNRRDLVEPDGQLILDDSLIYDNEGDQVKNGTNMKSLNLEMQELAVAASLSQTGAS

SEQ ID NO: 1277 - protein, 3067 aa, synthetic construct
  REGION 1..3067: note = FREM2 (Q5SZK8) ECD
QPAAFGRALLSPGLAGAAGVPAEEAIVLANRGLRVPFGREVWLDPLHDLVLQVQPGDRCAVSVLDNDALAQRPGRLSPKRFPCDFGPGEVRYSHLGARSPSRDRVRLQLRYDAPGGAVVLPLVLEVEVVFTQLEVVTRNLPLVVEELLGTSNALDARSLEFAFQPETEECRVGILSGLGALPRYGELLHYPQVPGGAREGGAPETLLMDCKAFQELGVRYRHTAASRSPNRDWIPMVVELRSRGAPVGSPALKREHFQVLVRIRGGAENTAPKPSFVAMMMMEVDQFVLTALTPDMLAAEDAESPSDLLIFNLTSPFQPGQGYLVSTDDRSLPLSSFTQRDLRLLKIAYQPPSEDSDQERLFELELEVVDLEGAASDPFAFMVVVKPMNTMAPVVTRNTGLILYEGQSRPLTGPAGSGPQNLVISDEDDLEAVRLEVVAGLRHGHLVILGASSGSSAPKSFTVAELAAGQVVYQHDDRDGSLSDNLVLRMVDGGGRHQVQFLFPITLVPVDDQPPVLNANTGLTLAEGETVPILPLSLSATDMDSDDSLLLFVLESPFLTTGHLLLRQTHPPHEKQELLRGLWRKEGAFYERTVTEWQQQDITEGRLFYRHSGPHSPGPVTDQFTFRVQDNHDPPNQSGLQRFVIRIHPVDRLPPELGSGCPLRMVVQESQLTPLRKKWLRYTDLDTDDRELRYTVTQSPTDTDENHLPAPLGTLVLTDNPSVVVTHFTQAQINHHKIAYRPPGQELGVATRVAQFQFQVEDRAGNVAPGTFTLYLHPVDNQPPEILNTGFTIQEKGHHILSETELHVNDVDTDVAHISFTLTQAPKHGHMRVSGQILHVGGLFHLEDIKQGRVSYAHNGDKSLTDSCSLEVSDRHHVVPITLRVNVRPVDDEVPILSHPTGTLESYLDVLENGATEITANVIKGTNEETDDLMLTFLLEDPPLYGEILVNGIPAEQFTQRDILEGSVVYTHTSGEIGLLPKADSFNLSLSDMSQEWRIGGNTIQGVTIWVTILPVDSQAPEIFVGEQLIVMEGDKSVITSVHISAEDVDSLNDDILCTIVIQPTSGYVENISPAPGSEKSRAGIAISAFNLKDLRQGHINYVQSVHKGVEPVEDRFVFRCSDGINFSERQFFPIVIIPTNDEQPEMFMREFMVMEGMSLVIDTPILNAADADVPLDDLTFTITQFPTHGHIMNQLINGTVLVESFTLDQIIESSSIIYEHDDSETQEDSFVIKLTDGKHSVEKTVLIIVIPVDDETPRMTINNGLEIEIGDTKIINNKILMATDLDSEDKSLVYIIRYGPGHGLLQRRKPTGAFENITLGMNFTQDEVDRNLIQYVHLGQEGIRDLIKFDVTDGINPLIDRYFYVSIGSIDIVFPDVISKGVSLKEGGKVTLTTDLLSTSDLNSPDENLVFTITRAPMRGHLECTDQPGVSITSFTQLQLAGNKIYYIHTADDEVKMDSFEFQVTDGRNPVFRTFRISISDVDNKKPVVTIHKLVVSESENKLITPFELTVEDRDTPDKLLKFTITQVPIHGHLLFNNTRPVMVFTKQDLNENLISYKHDGTESSEDSFSFTVTDGTHTDFYVFPDTVFETRRPQVMKIQVLAVDNSVPQIAVNKGASTLRTLATGHLGFMITSKILKVEDRDSLHISLRFIVTEAPQHGYLLNLDKGNHSITQFTQADIDDMKICYVLREGANATSDMFYFAVEDGGGNKLTYQNFRLNWAWISFEKEYYLVNEDSKFLDVVLKRRGYLGETSFISIGTRDRTAEKDKDFKGKAQKQVQFNPGQTRATWRVRILSDGEHEQSETFQVVLSEPVLAALEFPTVATVEIVDPGDEPTVFIPQSKYSVEEDVGELFIPIRRSGDVSQELMVVCYTQQGTATGTVPTSVLSYSDYISRPEDHTSVVRFDKDEREKLCRIVIIDDSLYEEEETFHVLLSMPMGGRIGSEFPGAQVTIVPDKDDEPIFYFGDVEYSVDESAGYVEVQVWRTGTDLSKSSSVTVRSRKTDPPSADAGTDYVGISRNLDFAPGVNMQPVRVVILDDLGQPALEGIEKFELVLRMPMNAALGEPSKATVSINDSVSDLPKMQFKERIYTGSESDGQIVTMIHRTGDVQYRSSVRCYTRQGSAQVMMDFEERPNTDTSIITFLPGETEKPCILELMDDVLYEEVEELRLVLGTPQSNSPFGAAVGEQNETLIRIRDDADKTVIKFGETKFSVTEPKEPGESVVIRIPVIRQGDTSKVSIVRVHTKDGSATSGEDYHPVSEEIEFKEGETQHVVEIEVTFDGVREMREAFTVHLKPDENMIAEMQLTKAIVYIEEMSSMADVTFPSVPQIVSLLMYDDTSKAKESAEPMSGYPVICITACNPKYSDYDKTGSICASENINDTLTRYRWLISAPAGPDGVTSPMREVDFDTFFTSSKMVTLDSIYFQPGSRVQCAARAVNTNGDEGLELMSPIVTISREEGLCQPRVPGVVGAEPFSAKLRYTGPEDADYTNLIKLTVTMPHIDGMLPVISTRELSNFELTLSPDGTRVGNHKCSNLLDYTEVKTHYGFLTDATKNPEIIGETYPYQYSLSIRGSTTLRFYRNLNLEACLWEFVSYYDMSELLADCGGTIGTDGQVLNLVQSYVTLRVPLYVSYVFHSPVGVGGWQHFDLKSELRLTFVYDTAILWNDGIGSPPEAELQGSLYPTSMRIGDEGRLAVHFKTEAQFHGLFVLSHPASFTSSVIMSADHPGLTFSLRLIRSEPTYNQPVQQWSFVSDFAVRDYSGTYTVKLVPCTAPSHQEYRLPVTCNPREPVTFDLDIRFQQVSDPVAAEFSLNTQMYLLSKKSLWLSDGSMGFGQESDVAFAEGDIIYGRVMVDPVQNLGDSFYCSIEKVFLCTGADGYVPKYSPMNAEYGCLADSPSLLYRFKIVDKAQPETQATSFGNVLFNAKLAVDDPEAILLVNQPGSDGFKVDSTPLFQVALGREWYIHTIYTVRSKDNANRGIGKRSVEYHSLVSQGKPQSTTKSRKKREIRSTPSLAWEIGAENSRGTNIQHIALDRTKRQIPHGRAPPDGILPWELNSPSSAVSLVT

SEQ ID NO: 1278 - protein, 608 aa, synthetic construct
  REGION 1..608: note = FURIN (P09958) ECD
DVYQEPTDPKFPQQWYLSGVTQRDLNVKAAWAQGYTGHGIVVSILDDGIEKNHPDLAGNYDPGASFDVNDQDPDPQPRYTQMNDNRHGTRCAGEVAAVANNGVCGVGVAYNARIGGVRMLDGEVTDAVEARSLGLNPNHIHIYSASWGPEDDGKTVDGPARLAEEAFFRGVSQGRGGLGSIFVWASGNGGREHDSCNCDGYTNSIYTLSISSATQFGNVPWYSEACSSTLATTYSSGNQNEKQIVTTDLRQKCTESHTGTSASAPLAAGIIALTLEANKNLTWRDMQHLVVQTSKPAHLNANDWATNGVGRKVSHSYGYGLLDAGAMVALAQNWTTVAPQRKCIIDILTEPKDIGKRLEVRKTVTACLGEPNHITRLEHAQARLTLSYNRRGDLAIHLVSPMGTRSTLLAARPHDYSADGFNDWAFMTTHSWDEDPSGEWVLEIENTSEANNYGTLTKFTLVLYGTAPEGLPVPPESSGCKTLTSSQACVVCEEGFSLHQKSCVQHCPPGFAPQVLDTHYSTENDVETIRASVCAPCHASCATCQGPALTDCLSCPSHASLDPVEQTCSRQSQSSRESPPQQQPPRLPPEVEAGQRLRAGLLPSHLPE

SEQ ID NO: 1279 - protein, 125 aa, synthetic construct
  REGION 1..125: note = G6B (O95866) ECD
NPGASLDGRPGDRVNLSCGGVSHPIRWVWAPSFPACKGLSKGRRPILWASSSGTPTVPPLQPFVGRLRSLDSGIRRLELLLSAGDSGTFFCKGRHEDESRTVLHVLGDRTYCKAPGPTHGSVYPQ

SEQ ID NO: 1280 - protein, 333 aa, synthetic construct
  REGION 1..333: note = GFRAL (Q6UXV0) ECD
SQTNNCTYLREQCLRDANGCKHAWRVMEDACNDSDPGDPCKMRNSSYCNLSIQYLVESNFQFKECLCTDDFYCTVNKLLGKKCINKSDNVKEDKFKWNLTTRSHHGFKGMWSCLEVAEACVGDVVCNAQLASYLKACSANGNPCDLKQCQAAIRFFYQNIPFNIAQMLAFCDCAQSDIPCQQSKEALHSKTCAVNMVPPPTCLSVIRSCQNDELCRRHYRTFQSKCWQRVTRKCHEDENCISTLSKQDLTCSGSDDCKAAYIDILGTVLQVQCTCRTITQSEESLCKIFQHMLHRKSCFNYPTLSNVKGMALYTRKHANKITLTGFHSPFNGE

SEQ ID NO: 1281 - protein, 390 aa, synthetic construct
  REGION 1..390: note = GFY (I3L273) ECD
KAAPSAPLPLGCGFPDMAHPSETSPLKGASENSKRDRLNPEFPGTPYPEPSKLPHTVSLETFPLDFTEPLNPDLRETPHPESPETPKADSLTTSISESLDMPKTNLSKMAHPESSETPTPGPTEMPHPGSPETPKPNFSKTSRPEFPETPNTDLMQTTPQESPEILQLNATEVSQAELPETSNTNPTKTPDPKSPEKHDLNSTETPNSEFLQALHPDPSKTPHPESHVTHNPSPTEISQTEFPTTYYQNATDVPRTSDPQISTSLYPETPVPFKDDATALNELSLNPKPGTPAAIQPDSPKLPTSDSPGMVELKAPQNSGPKESNVPPPSARIAGPPALPGRPSQLAPATLRAPQRHSRGEGVNTIIVVERVKETGVTLVGRPRGAAGGA

SEQ ID NO: 1282 - protein, 246 aa, synthetic construct
  REGION 1..246: note = GHR (P10912) ECD
FSGSEATAAILSRAPWSLQSVNPGLKTNSSKEPKFTKCRSPERETFSCHWTDEVHHGTKNLGPIQLFYTRRNTQEWTQEWKECPDYVSAGENSCYFNSSFTSIWIPYCIKLTSNGGTVDEKCFSVDEIVQPDPPIALNWTLLNVSLTGIHADIQVRWEAPRNADIQKGWMVLEYELQYKEVNETKWKMMDPILTTSVPVYSLKVDKEYEVRVRSKQRNSGNYGEFSEVLYVTLPQMSQFTCEEDFY

SEQ ID NO: 1283 - protein, 245 aa, synthetic construct
  REGION 1..245: note = GINM1 (Q9NU53) ECD
WLTTGAPEPPPLSGAPQDGIRINVTTLKDDGDISKQQVVLNITYESGQVYVNDLPVNSGVTRISCQTLIVKNENLENLEEKEYFGIVSVRILVHEWPMTSGSSLQLIVIQEEVVEIDGKQVQQKDVTEIDILVKNRGVLRHSNYTLPLEESMLYSISRDSDILFTLPNLSKKESVSSLQTTSQYLIRNVETTVDEDVLPGKLPETPLRAEPPSSYKVMCQWMEKFRKDLCRFWSNVFPVFFQFLN

SEQ ID NO: 1284 - protein, 211 aa, synthetic construct
  REGION 1..211: note = GLIPR1 (P48060) ECD
ANILPDIENEDFIKDCVRIHNKFRSEVKPTASDMLYMTWDPALAQIAKAWASNCQFSHNTRLKPPHKLHPNFTSLGENIWTGSVPIFSVSSAITNWYDEIQDYDFKTRICKKVCGHYTQVVWADSYKVGCAVQFCPKVSGFDALSNGAHFICNYGPGGNYPTWPYKRGATCSACPNNDKCLDNLCVNRQRDQVKRYYSVVYPGWPIYPRNR

SEQ ID NO: 1285 - protein, 515 aa, synthetic construct
  REGION 1..515: note = GP1BA (P07359) ECD
HPICEVSKVASHLEVNCDKRNLTALPPDLPKDTTILHLSENLLYTFSLATLMPYTRLTQLNLDRCELTKLQVDGTLPVLGTLDLSHNQLQSLPLLGQTLPALTVLDVSFNRLTSLPLGALRGLGELQELYLKGNELKTLPPGLLTPTPKLEKLSLANNNLTELPAGLLNGLENLDTLLLQENSLYTIPKGFFGSHLLPFAFLHGNPWLCNCEILYFRRWLQDNAENVYVWKQGVDVKAMTSNVASVQCDNSDKFPVYKYPGKGCPTLGDEGDTDLYDYYPEEDTEGDKVRATRTVVKFPTKAHTTPWGLFYSWSTASLDSQMPSSLHPTQESTKEQTTFPPRWTPNFTLHMESITFSKTPKSTTEPTPSPTTSEPVPEPAPNMTTLEPTPSPTTPEPTSEPAPSPTTPEPTSEPAPSPTTPEPTSEPAPSPTTPEPTPIPTIATSPTILVSATSLITPKSTFLTTTKPVSLLESTKKTIPELDQPPKLRGVLQGHLESSRNDPFLHPDFCCLLPL

SEQ ID NO: 1286 - protein, 122 aa, synthetic construct
  REGION 1..122: note = GP1BB (P13224) ECD
CPAPCSCAGTLVDCGRRGLTWASLPTAFPVDTTELVLTGNNLTALPPGLLDALPALRTAHLGANPWRCDCRLVPLRAWLAGRPERAPYRDLRCVAPPALRGRLLPYLAEDELRAACAPGPLC

SEQ ID NO: 1287 - protein, 507 aa, synthetic construct
  REGION 1..507: note = GP5 (P40197) ECD
QPFPCPPACKCVFRDAAQCSGGDVARISALGLPTNLTHILLFGMGRGVLQSQSFSGMTVLQRLMISDSHISAVAPGTFSDLIKLKTLRLSRNKITHLPGALLDKMVLLEQLFLDHNALRGIDQNMFQKLVNLQELALNQNQLDFLPASLFTNLENLKLLDLSGNNLTHLPKGLLGAQAKLERLLLHSNRLVSLDSGLLNSLGALTELQFHRNHIRSIAPGAFDRLPNLSSLTLSRNHLAFLPSALFLHSHNLTLLTLFENPLAELPGVLFGEMGGLQELWLNRTQLRTLPAAAFRNLSRLRYLGVTLSPRLSALPQGAFQGLGELQVLALHSNGLTALPDGLLRGLGKLRQVSLRRNRLRALPRALFRNLSSLESVQLDHNQLETLPGDVFGALPRLTEVLLGHNSWRCDCGLGPFLGWLRQHLGLVGGEEPPRCAGPGAHAGLPLWALPGGDAECPGPRGPPPRPAADSSSEAPVHPALAPNSSEPWVWAQPVTTGKGQDHSPFWG

SEQ ID NO: 1288 - protein, 247 aa, synthetic construct
  REGION 1..247: note = GP6 (Q9HCN6) ECD
QSGPLPKPSLQALPSSLVPLEKPVTLRCQGPPGVDLYRLEKLSSSRYQDQAVLFIPAMKRSLAGRYRCSYQNGSLWSLPSDQLELVATGVFAKPSLSAQPGPAVSSGGDVTLQCQTRYGFDQFALYKEGDPAPYKNPERWYRASFPIITVTAAHSGTYRCYSFSSRDPYLWSAPSDPLELVVTGTSVTPSRLPTEPPSPVAEFSEATAELTVSFTNEVFTTETSRSITASPKESDSPAGPARQYYTK

SEQ ID NO: 1289 - protein, 214 aa, synthetic construct
  REGION 1..214: note = GPA33 (Q99795) ECD
ISVETPQDVLRASQGKSVTLPCTYHTSTSSREGLIQWDKLLLTHTERVVIWPFSNKNYIHGELYKNRVSISNNAEQSDASITIDQLTMADNGTYECSVSLMSDLEGNTKSRVRLLVLVPPSKPECGIEGETIIGNNIQLTCQSKEGSPTPQYSWKRYNILNQEQPLAQPASGQPVSLKNISTDTSGYYICTSSNEEGTQFCNITVAVRSPSMNV

SEQ ID NO: 1290 - protein, 476 aa, synthetic construct
  REGION 1..476: note = GPNMB (Q14956) ECD
KRFHDVLGNERPSAYMREHNQLNGWSSDENDWNEKLYPVWKRGDMRWKNSWKGGRVQAVLTSDSPALVGSNITFAVNLIFPRCQKEDANGNIVYEKNCRNEAGLSADPYVYNWTAWSEDSDGENGTGQSHHNVFPDGKPFPHHPGWRRWNFIYVFHTLGQYFQKLGRCSVRVSVNTANVTLGPQLMEVTVYRRHGRAYVPIAQVKDVYVVTDQIPVFVTMFQKNDRNSSDETFLKDLPIMFDVLIHDPSHFLNYSTINYKWSFGDNTGLFVSTNHTVNHTYVLNGTFSLNLTVKAAAPGPCPPPPPPPRPSKPTPSLATTLKSYDSNTPGPAGDNPLELSRIPDENCQINRYGHFQATITIVEGILEVNIIQMTDVLMPVPWPESSLIDFVVTCQGSIPTEVCTIISDPTCEITQNTVCSPVDVDEMCLLTVRRTFNGSGTYCVNLTLGDDTSLALTSTLISVPDRDPASPLRMAN

SEQ ID NO: 1291 - protein, 407 aa, synthetic construct
  REGION 1..407: note = GUCY2C (P25092) ECD
SQVSQNCHNGSYEISVLMMGNSAFAEPLKNLEDAVNEGLEIVRGRLQNAGLNVTVNATFMYSDGLIHNSGDCRSSTCEGLDLLRKISNAQRMGCVLIGPSCTYSTFQMYLDTELSYPMISAGSFGLSCDYKETLTRLMSPARKLMYFLVNFWKTNDLPFKTYSWSTSYVYKNGTETEDCFWYLNALEASVSYFSHELGFKVVLRQDKEFQDILMDHNRKSNVIIMCGGPEFLYKLKGDRAVAEDIVIILVDLFNDQYFEDNVTAPDYMKNVLVLTLSPGNSLLNSSFSRNLSPTKRDFALAYLNGILLFGHMLKIFLENGENITTPKFAHAFRNLTFEGYDGPVTLDDWGDVDSTMVLLYTSVDTKKYKVLLTYDTHVNKTYPVDMSPTFTWKNSKLPNDITGRGPQ

SEQ ID NO: 1292 - protein, 72 aa, synthetic construct
  REGION 1..72: note = GYPA (P02724) ECD
SSTTGVAMHTSTSSSVTKSYISSQTNDTHKRDTYAATPRAHEVSEISVRTVYPPEEETGERVQLAHHFSEPE

SEQ ID NO: 1293 - protein, 275 aa, synthetic construct
  REGION 1..275: note = HAVCR1 (Q96D42) ECD
SVKVGGEAGPSVTLPCHYSGAVTSMCWNRGSCSLFTCQNGIVWTNGTHVTYRKDTRYKLLGDLSRRDVSLTIENTAVSDSGVYCCRVEHRGWFNDMKITVSLEIVPPKVTTTPIVTTVPTVTTVRTSTTVPTTTTVPMTTVPTTTVPTTMSIPTTTTVLTTMTVSTTTSVPTTTSIPTTTSVPVTTTVSTFVPPMPLPRQNHEPVATSPSSPQPAETHPTTLQGAIRREPTSSPLYSYTTDGNDTVTESSDGLWNNNQTQLFLEHSLLTANTTKG

SEQ ID NO: 1294 - protein, 181 aa, synthetic construct
  REGION 1..181: note = HAVCR2 (Q8TDQ0) ECD
SEVEYRAEVGQNAYLPCFYTPAAPGNLVPVCWGKGACPVFECGNVVLRTDERDVNYWTSRYWLNGDFRKGDVSLTIENVTLADSGIYCCRIQIPGIMNDEKFNLKLVIKPAKVTPAPTRQRDFTAAFPRMLTTRGHGPAETQTLGSLPDINLTQISTLANELRDSRLANDLRDSGATIRIG

SEQ ID NO: 1295 - protein, 141 aa, synthetic construct
  REGION 1..141: note = HBEGF (Q99075) ECD
LVTGESLERLRRGLAAGTSNPDPPTVSTDQLLPLGGGRDRKVRDLQEADLDLLRVTLSSKPQALATPNKEEHGKRKKKGKGLGKKRDPCLRKYKDFCIHGECKYVKELRAPSCICHPGYHGERCHGLSLPVENRLYTYDHT

SEQ ID NO: 1296 - protein, 1219 aa, synthetic construct
  REGION 1..1219: note = HEG1 (Q9ULI3) ECD
TRDPPPSPARRALSLAPLAGAGLELQLERRPEREPPPTPPRERRGPATPGPSYRAPEPGAATQRGPSGRAPRGGSADAAWKHWPESNTEAHVENITFYQNQEDFSTVSSKEGVMVQTSGKSHAASDAPENLTLLAETADARGRSGSSSRTNFTILPVGYSLEIATALTSQSGNLASESLHLPSSSSEFDERIAAFQTKSGTASEMGTERAMGLSEEWTVHSQEATTSAWSPSFLPALEMGELTTPSRKRNSSGPDLSWLHFYRTAASSPLLDLSSSSESTEKLNNSTGLQSSSVSQTKTMHVATVFTDGGPRTLRSLTVSLGPVSKTEGFPKDSRIATTSSSVLLSPSAVESRRNSRVTGNPGDEEFIEPSTENEFGLTSLRWQNDSPTFGEHQLASSSEVQNGSPMSQTETVSRSVAPMRGGEITAHWLLTNSTTSADVTGSSASYPEGVNASVLTQFSDSTVQSGGSHTALGDRSYSESSSTSSSESLNSSAPRGERSIAGISYGQVRGTAIEQRTSSDHTDHTYLSSTFTKGERALLSITDNSSSSDIVESSTSYIKISNSSHSEYSSFFHAQTERSNISSYDGEYAQPSTESPVLHTSNLPSYTPTINMPNTSVVLDTDAEFVSDSSSSSSSSSSSSSSGPPLPLPSVSQSHHLFSSILPSTRASVHLLKSTSDASTPWSSSPSPLPVSLTTSTSAPLSVSQTTLPQSSSTPVLPRARETPVTSFQTSTMTSFMTMLHSSQTADLKSQSTPHQEKVITESKSPSLVSLPTESTKAVTTNSPLPPSLTESSTEQTLPATSTNLAQMSPTFTTTILKTSQPLMTTPGTLSSTASLVTGPIAVQTTAGKQLSLTHPEILVPQISTEGGISTERNRVIVDATTGLIPLTSVPTSAKEMTTKLGVTAEYSPASRSLGTSPSPQTTVVSTAEDLAPKSATFAVQSSTQSPTTVSSSASVNSCAVNPCLHNGECVADNTSRGYHCRCPPSWQGDDCSVDVNECLSNPCPSTAMCNNTQGSFICKCPVGYQLEKGICNLVRTFVTEFKLKRTFLNTTVEKHSDLQEVENEITKTLNMCFSALPSYIRSTVHASRESNAVVISLQTTFSLASNVTLFDLADRMQKCVNSCKSSAEVCQLLGSQRRIFRAGSLCKRKSPECDKDTSICTDLDGVALCQCKSGYFQFNKMDHSCRACEDGYRLENETCMSCPFGLGGLNCGNPYQL

SEQ ID NO: 1297 - protein, 207 aa, synthetic construct
  REGION 1..207: note = HEPACAM (Q14CZ8) ECD
VNITSPVRLIHGTVGKSALLSVQYSSTSSDRPVVKWQLKRDKPVTVVQSIGTEVIGTLRPDYRDRIRLFENGSLLLSDLQLADEGTYEVEISITDDTFTGEKTINLTVDVPISRPQVLVASTTVLELSEAFTLNCSHENGTKPSYTWLKDGKPLLNDSRMLLSPDQKVLTITRVLMEDDDLYSCMVENPISQGRSLPVKITVYRRSS

SEQ ID NO: 1298 - protein, 320 aa, synthetic construct
  REGION 1..320: note = HEPACAM2 (A8MVW5) ECD
LKVTVPSHTVHGVRGQALYLPVHYGFHTPASDIQIIWLFERPHTMPKYLLGSVNKSVVPDLEYQHKFTMMPPNASLLINPLQFPDEGNYIVKVNIQGNGTLSASQKIQVTVDDPVTKPVVQIHPPSGAVEYVGNMTLTCHVEGGTRLAYQWLKNGRPVHTSSTYSFSPQNNTLHIAPVTKEDIGNYSCLVRNPVSEMESDIIMPIIYYGPYGLQVNSDKGLKVGEVFTVDLGEAILFDCSADSHPPNTYSWIRRTDNTTYIIKHGPRLEVASEKVAQKTMDYVCCAYNNITGRQDETHFTVIITSVGLEKLAQKGKSLSP

SEQ ID NO: 1299 - protein, 1087 aa, synthetic construct
  REGION 1..1087: note = HEPH (Q9BQS7) ECD
ATRVYYLGIRDVQWNYAPKGRNVITNQPLDSDIVASSFLKSDKNRIGGTYKKTIYKEYKDDSYTDEVAQPAWLGFLGPVLQAEVGDVILIHLKNFATRPYTIHPHGVFYEKDSEGSLYPDGSSGPLKADDSVPPGGSHIYNWTIPEGHAPTDADPACLTWIYHSHVDAPRDIATGLIGPLITCKRGALDGNSPPQRQDVDHDFFLLFSVVDENLSWHLNENIATYCSDPASVDKEDETFQESNRMHAINGFVFGNLPELNMCAQKRVAWHLFGMGNEIDVHTAFFHGQMLTTRGHHTDVANIFPATFVTAEMVPWEPGTWLISCQVNSHFRDGMQALYKVKSCSMAPPVDLLTGKVRQYFIEAHEIQWDYGPMGHDGSTGKNLREPGSISDKFFQKSSSRIGGTYWKVRYEAFQDETFQEKMHLEEDRHLGILGPVIRAEVGDTIQVVFYNRASQPFSMQPHGVFYEKDYEGTVYNDGSSYPGLVAKPFEKVTYRWTVPPHAGPTAQDPACLTWMYFSAADPIRDTNSGLVGPLLVCRAGALGADGKQKGVDKEFFLLFTVLDENKSWYSNANQAAAMLDFRLLSEDIEGFQDSNRMHAINGFLFSNLPRLDMCKGDTVAWHLLGLGTETDVHGVMFQGNTVQLQGMRKGAAMLFPHTFVMAIMQPDNLGTFEIYCQAGSHREAGMRAIYNVSQCPGHQATPRQRYQAARIYYIMAEEVEWDYCPDRSWEREWHNQSEKDSYGYIFLSNKDGLLGSRYKKAVFREYTDGTFRIPRPRTGPEEHLGILGPLIKGEVGDILTVVFKNNASRPYSVHAHGVLESTTVWPLAAEPGEVVTYQWNIPERSGPGPNDSACVSWIYYSAVDPIKDMYSGLVGPLAICQKGILEPHGGRSDMDREFALLFLIFDENKSWYLEENVATHGSQDPGSINLQDETFLESNKMHAINGKLYANLRGLTMYQGERVAWYMLAMGQDVDLHTIHFHAESFLYRNGENYRADVVDLFPGTFEVVEMVASNPGTWLMHCHVTDHVHAGMETLFTVFSRTEHLSPLTVITKETEKAVPPRDIEEGNVKMLGMQIPIKNVEMLAS

SEQ ID NO: 1300 - protein, 1090 aa, synthetic construct
  REGION 1..1090: note = HEPHL1 (Q6MZM0) ECD
VTRTYYIGIVEEYWNYVPQGKNVITGKSFTEDKLATLFLERGPNRIGSIYKKAVYRRFTDGTYSIEIPKPPWLGFLGPILRAEVGDVIVIHLKNFASRPYSLHPHGVFYNKDSEGALYPDGTSGRNKNDDMVPPGKNYTYVWPVREEYAPTPADANCLTWVYHSHIDAPKDICSGLIGPLLVCKEGILNRYSGTRNDVDREFVIMFTLVDENQSWYLNENIKHFCTNPDSVDKKDAVFQRSNKMHALNGYLFGNFPEPDMCVGESVSWHLFGMGNEIDIHSIYFYGNTFISRGHRTDVVNLFPATFLTTEMIAENPGKWMITCQVSDHLQAGMLGQYNVDNCKSDIFYPKMKGQQRRYFIAAEKILWDYAPQGYNKFSGLPLNASGSDSDLYFTQGDNRIGGKYWKVRYTEFVDATFTKRKRLSAEEAHLGILGPVIKAEVGDTLLVTFANKADKVYSILPHGVIYDKASDAAPNLDGFVKPGAHVKPGETFTYKWTVPESVSPTAGDPPCLTYLYFSAVDPIKDTSSGLVGPLLVCKKGVLNADGTQKGIDKEFYLLFTVFDENLSRYFDENIQKFIWHPFSIDKEDKEFVKSNRMHAVNGYMYGNQPGLNMCKRDRVSWHLIGLGTDTDMHGIVFQGNTIHLRGTHRDSLALFPHMATTAFMQPDHAGIFRVFCATMPHLSRGMGQIYEVSSCDNRDPSEQRYGMIRTFYIAAEEVEWDYAPNKNWEFEKQHVDARGERHGDIFMNRTENWIGSQYKKVVYREYTDGEFVEIKARPPREEHLELLGPMIHAEVGNTVLIIFKNKASRPYSISAQGVEEMDSGKQFQVPMTKPGEVKTYRWNIPKRSGPGPSDPNCIPWVYYSTVNFVKDTYSGLMGPLITCRKGVLNEKGRRSDVDYEFALLFLVFNENESWYLDDNIKKYLNKDPRDFKRTDDFEESNRMHAINGKIFGNLHGLIMNEDTMTNWYLLGIGSEVDIHTIHYHAESFLFKIDKSYREDVYDLFPGTFQTIELFADHPGTWLLHCHVSDHIHAGMETTYTVLRNIDNRIPYSTTSPGVASHPATVPSNERPGKEQLYFFGKNLGPTGAKA

SEQ ID NO: 1301 - protein, 480 aa, synthetic construct
  REGION 1..480: note = HERVH59 (Q9N2J8) ECD
LPLPSYLHHTINLTHSLPAASNPSLANNCWLCISLSSSAYIAVPTLQTDRATSPVSLHLRTSFNSPHLYPPEELIYFLDRSSKTSPDISHQPAAALLHIYLKNLSPYINSTPPIFGPLTTQTTIPVAAPLCISRQRPTGIPLGNISPSRCSFTLHLQSPTTHVTETIGVFQLHIIDKPSINTDKLKNVSSNYCLGRHLPYISLHPWLPSPCSSDSPPRPSSCLLTPSPQNNSERLLVDTQRFLIHHENRTSSSMQLAHQSPLQPLTAAALAGSLGVWVQDTPFSTPSHPFSLHLQFCLTQGLFFLCGSSTYMCLPANWTGTCTLVFLTPKIQFANGTKELPVPLMTLTPQKRVIPLIPLMVGLGLSASTIALSTGIAGISTSVTTFRSPSNDFSASITDISQTLSVLQAQVDSLAAVVLQNRRGLGLSILLNEECCFYLNQSGLVYENIKKLKDRAQKLANQASNYAESPWALSNWMSWV

SEQ ID NO: 1302 - protein, 488 aa, synthetic construct
  REGION 1..488: note = HERVH62 (Q9N2K0) ECD
LPLPSYLHHTINLTHSLLAASNPSLVNNCWLCISLSSSAYTAVPAVQTDWATSPISLHLRTSFNSPHLYPPEELIYFLDRSSKTSPDISHQQAAALLRTYLKNLSPYINSTPPIFGPLTTQTTIPVAAPLCISWQRPTGIPLGNLSPSRCSFTLHLRSPTTNINETIGAFQLHITDKPSINTDKLKNISSNYCLGRHLPCISLHPWLSSPCSSDSPPRPSSCLLIPSPENNSERLLVDTRRFLIHHENRTFPSTQLPHQSPLQPLTAAALAGSLGVWVQDTPFSTPSHLFTLHLQFCLAQGLFFLCGSSTYMCLPANWTGTCTLVFLTPKIQFANGTEELPVPLMTPTQQKRVIPLIPLMVGLGLSASTVALGTGIAGISTSVMTFRSLSNDFSASITDISQTLSVLQAQVDSLAAVVLQNRRGLDLLTAEKGGLCIFLNEECCFYLNQSGLVYDNIKKLKDRAQKLANQASNYAEPPWALSNWMSWV

SEQ ID NO: 1303 - protein, 543 aa, synthetic construct
  REGION 1..543: note = HERVK_113 (Q902F9) ECD
LPMPAGAAAANYTYWAYVPFPPLIRAVTWMDNPIEIYVNDSVWVPGPTDDCCPAKPEEEGMMINISIGYRYPPICLGRAPGCLMPAVQNWLVEVPTVSPISRFTYHMVSGMSLRPRVNYLQDFSYQRSLKFRPKGKPCPKEIPKESKNTEVLVWEECVANSAVILQNNEFGTLIDWAPRGQFYHNCSGQTQSCPSAQVSPAVDSDLTESLDKHKHKKLQSFYPWEWGEKGISTARPKIISPVSGPEHPELWRLTVASHHIRIWSGNQTLETRDRKPFYTIDLNSSLTVPLQSCVKPPYMLVVGNIVIKPDSQTITCENCRLLTCIDSTFNWQHRILLVRAREGVWIPVSMDRPWEASPSVHILTEVLKGVLNRSKRFIFTLIAVIMGLIAVTATAAVAGVALHSSVQSVNFVNDWQNNSTRLWNSQSSIDQKLANQINDLRQTVIWMGDRLMSLEHRFQLQCDWNTSDFCITPQIYNESEHHWDMVRCHLQGREDNLTLDISKLKEQIFEASKAHLNLVPGTEAIAGVADGLANLNTVTWVKT

SEQ ID NO: 1304 - protein, 284 aa, synthetic construct
  REGION 1..284: note = HFE (Q30201) ECD
RLLRSHSLHYLFMGASEQDLGLSLFEALGYVDDQLFVFYDHESRRVEPRTPWVSSRISSQMWLQLSQSLKGWDHMFTVDFWTIMENHNHSKESHTLQVILGCEMQEDNSTEGYWKYGYDGQDHLEFCPDTLDWRAAEPRAWPTKLEWERHKIRARQNRAYLERDCPAQLQQLLELGRGVLDQQVPPLVKVTHHVTSSVTTLRCRALNYYPQNITMKWLKDKQPMDAKEFEPKDVLPNGDGTYQGWITLAVPPGEEQRYTCQVEHPGLDQPLIVIWEPSPSGTLV

SEQ ID NO: 1305 - protein, 322 aa, synthetic construct
  REGION 1..322: note = HHLA2 (Q9UM44) ECD
IFPLAFFIYVPMNEQIVIGRLDEDIILPSSFERGSEVVIHWKYQDSYKVHSYYKGSDHLESQDPRYANRTSLFYNEIQNGNASLFFRRVSLLDEGIYTCYVGTAIQVITNKVVLKVGVFLTPVMKYEKRNTNSFLICSVLSVYPRPIITWKMDNTPISENNMEETGSLDSFSINSPLNITGSNSSYECTIENSLLKQTWTGRWTMKDGLHKMQSEHVSLSCQPVNDYFSPNQDFKVTWSRMKSGTFSVLAYYLSSSQNTIINESRFSWNKELINQSDFSMNLMDLNLSDSGEYLCNISSDEYTLLTIHTVHVEPSQETASHN

SEQ ID NO: 1306 - protein, 98 aa, synthetic construct
  REGION 1..98: note = HIDE1 (A8MVS5) ECD
IRLVPPYPSSQEDPIHIACMAPGNFPGANFTLYRGGQVVQLLQAPTDQRGVTFNLSGGSSKAPGGPFHCQYGVLGELNQSQLSDLSEPVNVSFPVPTW

SEQ ID NO: 1307 - protein, 284 aa, synthetic construct
  REGION 1..284: note = HLA-A (P01891) ECD
GSHSMRYFFTSVSRPGRGEPRFIAVGYVDDTQFVRFDSDAASQRMEPRAPWIEQEGPEYWDQETRNVKAQSQTDRVDLGTLRGYYNQSEAGSHTIQIMYGCDVGSDGRFLRGYRQDAYDGKDYIALNEDLRSWTAADMAAQITKRKWEAAHEAEQLRAYLDGTCVEWLRRYLENGKETLQRTDPPKTHMTHHPISDHEATLRCWALGFYPAEITLTWQRDGEDQTQDTELVETRPAGDGTFQKWAAVVVPSGEEQRYTCHVQHEGLPKPLTLRWELSSQPTIPI

SEQ ID NO: 1308 - protein, 284 aa, synthetic construct; identical to SEQ ID NO: 1307
  REGION 1..284: note = HLA-A (P01892) ECD

SEQ ID NO: 1309 - protein, 284 aa, synthetic construct; identical to SEQ ID NO: 1307
  REGION 1..284: note = HLA-A (P04439) ECD

SEQ ID NO: 1310 - protein, 284 aa, synthetic construct; identical to SEQ ID NO: 1307
  REGION 1..284: note = HLA-A (P05534) ECD

SEQ ID NO: 1311 - protein, 284 aa, synthetic construct; identical to SEQ ID NO: 1307
  REGION 1..284: note = HLA-A (P10314) ECD

SEQ ID NO: 1312 - protein, 284 aa, synthetic construct; identical to SEQ ID NO: 1307
  REGION 1..284: note = HLA-A (P10316) ECD

SEQ ID NO: 1313 - protein, 284 aa, synthetic construct; identical to SEQ ID NO: 1307
  REGION 1..284: note = HLA-A (P13746) ECD

SEQ ID NO: 1314 - protein, 284 aa, synthetic construct; identical to SEQ ID NO: 1307
  REGION 1..284: note = HLA-A (P16188) ECD

SEQ ID NO: 1315 - protein, 284 aa, synthetic construct; identical to SEQ ID NO: 1307
  REGION 1..284: note = HLA-A (P16189) ECD

SEQ ID NO: 1316 - protein, 284 aa, synthetic construct; identical to SEQ ID NO: 1307
  REGION 1..284: note = HLA-A (P16190) ECD

SEQ ID NO: 1317 - protein, 284 aa, synthetic construct; identical to SEQ ID NO: 1307
  REGION 1..284: note = HLA-A (P18462) ECD

SEQ ID NO: 1318 - protein, 284 aa, synthetic construct; identical to SEQ ID NO: 1307
  REGION 1..284: note = HLA-A (P30443) ECD

SEQ ID NO: 1319 - protein, 284 aa, synthetic construct; identical to SEQ ID NO: 1307
  REGION 1..284: note = HLA-A (P30447) ECD

SEQ ID NO: 1320 - protein, 284 aa, synthetic construct; identical to SEQ ID NO: 1307
  REGION 1..284: note = HLA-A (P30450) ECD

SEQ ID NO: 1321 - protein, 284 aa, synthetic construct; identical to SEQ ID NO: 1307
  REGION 1..284: note = HLA-A (P30453) ECD

SEQ ID NO: 1322 - protein, 284 aa, synthetic construct; identical to SEQ ID NO: 1307
  REGION 1..284: note = HLA-A (P30455) ECD

SEQ ID NO: 1323 - protein, 284 aa, synthetic construct; identical to SEQ ID NO: 1307
  REGION 1..284: note = HLA-A (P30456) ECD

SEQ ID NO: 1324 - protein, 284 aa, synthetic construct; identical to SEQ ID NO: 1307
  REGION 1..284: note = HLA-A (P30457) ECD

SEQ ID NO: 1325 - protein, 284 aa, synthetic construct; identical to SEQ ID NO: 1307
  REGION 1..284: note = HLA-A (P30459) ECD

SEQ ID NO: 1326 - protein, 284 aa, synthetic construct; identical to SEQ ID NO: 1307
  REGION 1..284: note = HLA-A (P30512) ECD

SEQ ID NO: 1327 - protein, 284 aa, synthetic construct; identical to SEQ ID NO: 1307
  REGION 1..284: note = HLA-A (Q09160) ECD

SEQ ID NO: 1328 - protein, 285 aa, synthetic construct
  REGION 1..285: note = HLA-B (P01889) ECD
GSHSMRYFYTSVSRPGRGEPRFISVGYVDDTQFVRFDSDAASPREEPRAPWIEQEGPEYWDRNTQIYKAQAQTDRESLRNLRGYYNQSEAGSHTLQSMYGCDVGPDGRLLRGHDQYAYDGKDYIALNEDLRSWTAADTAAQITQRKWEAAREAEQRRAYLEGECVEWLRRYLENGKDKLERADPPKTHVTHHPISDHEATLRCWALGFYPAEITLTWQRDGEDQTQDTELVETRPAGDRTFQKWAAVVVPSGEEQRYTCHVQHEGLPKPLTLRWEPSSQSTVPIV

SEQ ID NO: 1329 - protein, 285 aa, synthetic construct; identical to SEQ ID NO: 1328
  REGION 1..285: note = HLA-B (P03989) ECD

SEQ ID NO: 1330 - protein, 285 aa, synthetic construct; identical to SEQ ID NO: 1328
  REGION 1..285: note = HLA-B (P10319) ECD

SEQ ID NO: 1331 - protein, 285 aa, synthetic construct; identical to SEQ ID NO: 1328
  REGION 1..285: note = HLA-B (P18463) ECD

SEQ ID NO: 1332 - protein, 285 aa, synthetic construct; identical to SEQ ID NO: 1328
  REGION 1..285: note = HLA-B (P18464) ECD

SEQ ID NO: 1333 - protein, 285 aa, synthetic construct; identical to SEQ ID NO: 1328
  REGION 1..285: note = HLA-B (P18465) ECD

SEQ ID NO: 1334 - protein, 285 aa, synthetic construct; identical to SEQ ID NO: 1328
  REGION 1..285: note = HLA-B (P30460) ECD

SEQ ID NO: 1335 - protein, 285 aa, synthetic construct; identical to SEQ ID NO: 1328
  REGION 1..285: note = HLA-B (P30461) ECD

SEQ ID NO: 1336 - protein, 285 aa, synthetic construct; identical to SEQ ID NO: 1328
  REGION 1..285: note = HLA-B (P30462) ECD

SEQ ID NO: 1337 - protein, 285 aa, synthetic construct; identical to SEQ ID NO: 1328
  REGION 1..285: note = HLA-B (P30464) ECD

SEQ ID NO: 1338 - protein, 285 aa, synthetic construct; identical to SEQ ID NO: 1328
  REGION 1..285: note = HLA-B (P30466) ECD

SEQ ID NO: 1339 - protein, 285 aa, synthetic construct; identical to SEQ ID NO: 1328
  REGION 1..285: note = HLA-B (P30475) ECD

SEQ ID NO: 1340 - protein, 285 aa, synthetic construct; identical to SEQ ID NO: 1328
  REGION 1..285: note = HLA-B (P30479) ECD

SEQ ID NO: 1341 - protein, 285 aa, synthetic construct; identical to SEQ ID NO: 1328
  REGION 1..285: note = HLA-B (P30480) ECD

SEQ ID NO: 1342 - protein, 285 aa, synthetic construct; identical to SEQ ID NO: 1328
  REGION 1..285: note = HLA-B (P30481) ECD

SEQ ID NO: 1343 - protein, 285 aa, synthetic construct; identical to SEQ ID NO: 1328
  REGION 1..285: note = HLA-B (P30483) ECD

SEQ ID NO: 1344 - protein, 285 aa, synthetic construct; identical to SEQ ID NO: 1328
  REGION 1..285: note = HLA-B (P30484) ECD

SEQ ID NO: 1345 - protein, 285 aa, synthetic construct; identical to SEQ ID NO: 1328
  REGION 1..285: note = HLA-B (P30485) ECD

SEQ ID NO: 1346 - protein, 285 aa, synthetic construct; identical to SEQ ID NO: 1328
  REGION 1..285: note = HLA-B (P30486) ECD

SEQ ID NO: 1347 - protein, 285 aa, synthetic construct; identical to SEQ ID NO: 1328
  REGION 1..285: note = HLA-B (P30487) ECD

SEQ ID NO: 1348 - protein, 285 aa, synthetic construct; identical to SEQ ID NO: 1328
  REGION 1..285: note = HLA-B (P30488) ECD

SEQ ID NO: 1349 - protein, 285 aa, synthetic construct; identical to SEQ ID NO: 1328
  REGION 1..285: note = HLA-B (P30490) ECD

SEQ ID NO: 1350 - protein, 285 aa, synthetic construct; identical to SEQ ID NO: 1328
  REGION 1..285: note = HLA-B (P30491) ECD

SEQ ID NO: 1351 - protein, 285 aa, synthetic construct; identical to SEQ ID NO: 1328
  REGION 1..285: note = HLA-B (P30492) ECD

SEQ ID NO: 1352 - protein, 285 aa, synthetic construct; identical to SEQ ID NO: 1328
  REGION 1..285: note = HLA-B (P30493) ECD

SEQ ID NO: 1353 - protein, 285 aa, synthetic construct; identical to SEQ ID NO: 1328
  REGION 1..285: note = HLA-B (P30495) ECD

SEQ ID NO: 1354 - protein, 285 aa, synthetic construct; identical to SEQ ID NO: 1328
  REGION 1..285: note = HLA-B (P30498) ECD

SEQ ID NO: 1355 - protein, 285 aa, synthetic construct; identical to SEQ ID NO: 1328
  REGION 1..285: note = HLA-B (P30685) ECD

SEQ ID NO: 1356 - protein, 285 aa, synthetic construct; identical to SEQ ID NO: 1328
  REGION 1..285: note = HLA-B (Q04826) ECD

SEQ ID NO: 1357 - protein, 285 aa, synthetic construct; identical to SEQ ID NO: 1328
  REGION 1..285: note = HLA-B (Q29718) ECD

SEQ ID NO: 1358 - protein, 285 aa, synthetic construct; identical to SEQ ID NO: 1328
  REGION 1..285: note = HLA-B (Q29836) ECD

SEQ ID NO: 1359 - protein, 285 aa, synthetic construct; identical to SEQ ID NO: 1328
  REGION 1..285: note = HLA-B (Q29940) ECD

SEQ ID NO: 1360 - protein, 285 aa, synthetic construct; identical to SEQ ID NO: 1328
  REGION 1..285: note = HLA-B (Q31610) ECD

SEQ ID NO: 1361 - protein, 285 aa, synthetic construct; identical to SEQ ID NO: 1328
  REGION 1..285: note = HLA-B (Q31612) ECD

SEQ ID NO: 1362 - protein, 285 aa, synthetic construct; identical to SEQ ID NO: 1328
  REGION 1..285: note = HLA-B (Q95365) ECD

SEQ ID NO: 1363 - protein, 284 aa, synthetic construct
  REGION 1..284: note = HLA-C (P04222) ECD
CSHSMRYFDTAVSRPGRGEPRFISVGYVDDTQFVRFDSDAASPRGEPRAPWVEQEGPEYWDRETQKYKRQAQADRVSLRNLRGYYNQSEDGSHTLQRMSGCDLGPDGRLLRGYDQSAYDGKDYIALNEDLRSWTAADTAAQITQRKLEAARAAEQLRAYLEGTCVEWLRRYLENGKETLQRAEPPKTHVTHHPLSDHEATLRCWALGFYPAEITLTWQRDGEDQTQDTELVETRPAGDGTFQKWAAVVVPSGQEQRYTCHMQHEGLQEPLTLSWEPSSQPTIPI

SEQ ID NO: 1364 - protein, 284 aa, synthetic construct; identical to SEQ ID NO: 1363
  REGION 1..284: note = HLA-C (P10321) ECD

SEQ ID NO: 1365 - protein, 284 aa, synthetic construct; identical to SEQ ID NO: 1363
  REGION 1..284: note = HLA-C (P30499) ECD

SEQ ID NO: 1366 - protein, 284 aa, synthetic construct; identical to SEQ ID NO: 1363
  REGION 1..284: note = HLA-C (P30501) ECD

SEQ ID NO: 1367 - protein, 284 aa, synthetic construct; identical to SEQ ID NO: 1363
  REGION 1..284: note = HLA-C (P30504) ECD

SEQ ID NO: 1368 - protein, 284 aa, synthetic construct; identical to SEQ ID NO: 1363
  REGION 1..284: note = HLA-C (P30505) ECD

SEQ ID NO: 1369 - protein, 284 aa, synthetic construct; identical to SEQ ID NO: 1363
  REGION 1..284: note = HLA-C (P30508) ECD

SEQ ID NO: 1370 - protein, 284 aa, synthetic construct; identical to SEQ ID NO: 1363
  REGION 1..284: note = HLA-C (P30510) ECD

SEQ ID NO: 1371 - protein, 284 aa, synthetic construct; identical to SEQ ID NO: 1363
  REGION 1..284: note = HLA-C (Q07000) ECD

SEQ ID NO: 1372 - protein, 284 aa, synthetic construct; identical to SEQ ID NO: 1363
  REGION 1..284: note = HLA-C (Q29865) ECD

SEQ ID NO: 1373 - protein, 284 aa, synthetic construct; identical to SEQ ID NO: 1363
  REGION 1..284: note = HLA-C (Q29960) ECD

SEQ ID NO: 1374 - protein, 284 aa, synthetic construct; identical to SEQ ID NO: 1363
  REGION 1..284: note = HLA-C (Q29963) ECD

SEQ ID NO: 1375 - protein, 284 aa, synthetic construct; identical to SEQ ID NO: 1363
  REGION 1..284: note = HLA-C (Q95604) ECD

SEQ ID NO: 1376 - protein, 284 aa, synthetic construct; identical to SEQ ID NO: 1363
  REGION 1..284: note = HLA-C (Q9TNN7) ECD

SEQ ID NO: 1377 - protein, 207 aa, synthetic construct
  REGION 1..207: note = HLA-DMA (P28067) ECD
VPEAPTPMWPDDLQNHTFLHTVYCQDGSPSVGLSEAYDEDQLFFFDFSQNTRVPRLPEFADWAQEQGDAPAILFDKEFCEWMIQQIGPKLDGKIPVSRGFPIAEVFTLKPLEFGKPNTLVCFVSNLFPPMLTVNWHDHSVPVEGFGPTFVSAVDGLSFQAFSYLNFTPEPSDIFSCIVTHEIDRYTAIAYWVPRNALPSDLLENVLC

SEQ ID NO: 1378 - protein, 200 aa, synthetic construct
  REGION 1..200: note = HLA-DMB (P28068) ECD
GGFVAHVESTCLLDDAGTPKDFTYCISFNKDLLTCWDPEENKMAPCEFGVLNSLANVLSQHLNQKDTLMQRLRNGLQNCATHTQPFWGSLTNRTRPPSVQVAKTTPFNTREPVMLACYVWGFYPAEVTITWRKNGKLVMPHSSAHKTAQPNGDWTYQTLSHLALTPSYGDTYTCVVEHIGAPEPILRDWTPGLSPMQTLK

SEQ ID NO: 1379 - protein, 192 aa, synthetic construct
  REGION 1..192: note = HLA-DOA (P06340) ECD
TKADHMGSYGPAFYQSYGASGQFTHEFDEEQLFSVDLKKSEAVWRLPEFGDFARFDPQGGLAGIAAIKAHLDILVERSNRSRAINVPPRVTVLPKSRVELGQPNILICIVDNIFPPVINITWLRNGQTVTEGVAQTSFYSQPDHLFRKFHYLPFVPSAEDVYDCQVEHWGLDAPLLRHWELQVPIPPPDAME

SEQ ID NO: 1380 - protein, 198 aa, synthetic construct
  REGION 1..198: note = HLA-DOB (P13765) ECD
TDSPEDFVIQAKADCYFTNGTEKVQFVVRFIFNLEEYVRFDSDVGMFVALTKLGQPDAEQWNSRLDLLERSRQAVDGVCRHNYRLGAPFTVGRKVQPEVTVYPERTPLLHQHNLLHCSVTGFYPGDIKIKWFLNGQEERAGVMSTGPIRNGDWTFQTVVMLEMTPELGHVYTCLVDHSSLLSPVSVEWRAQSEYSWRK

SEQ ID NO: 1381 - protein, 194 aa, synthetic construct
  REGION 1..194: note = HLA-DPA1 (P20036) ECD
AGAIKADHVSTYAAFVQTHRPTGEFMFEFDEDEMFYVDLDKKETVWHLEEFGQAFSFEAQGGLANIAILNNNLNTLIQRSNHTQATNDPPEVTVFPKEPVELGQPNTLICHIDKFFPPVLNVTWLCNGELVTEGVAESLFLPRTDYSFHKFHYLTFVPSAEDFYDCRVEHWGLDQPLLKHWEAQEPIQMPETTE

SEQ ID NO: 1382 - protein, 196 aa, synthetic construct
  REGION 1..196: note = HLA-DPB1 (P04440) ECD
RATPENYLFQGRQECYAFNGTQRFLERYIYNREEFARFDSDVGEFRAVTELGRPAAEYWNSQKDILEEKRAVPDRMCRHNYELGGPMTLQRRVQPRVNVSPSKKGPLQHHNLLVCHVTDFYPGSIQVRWFLNGQEETAGVVSTNLIRNGDWTFQILVMLEMTPQQGDVYTCQVEHTSLDSPVTVEWKAQSDSARSK

SEQ ID NO: 1383 - protein, 193 aa, synthetic construct
  REGION 1..193: note = HLA-DQA1 (P01909) ECD
EDIVADHVASYGVNLYQSYGPSGQYTHEFDGDEQFYVDLGRKETVWCLPVLRQFRFDPQFALTNIAVLKHNLNSLIKRSNSTAATNEVPEVTVFSKSPVTLGQPNILICLVDNIFPPVVNITWLSNGHSVTEGVSETSFLSKSDHSFFKISYLTLLPSAEESYDCKVEHWGLDKPLLKHWEPEIPAPMSELTE

SEQ ID NO: 1384 - protein, 194 aa, synthetic construct
  REGION 1..194: note = HLA-DQA2 (P01906) ECD
EDIVADHVASYGVNFYQSHGPSGQYTHEFDGDEEFYVDLETKETVWQLPMFSKFISFDPQSALRNMAVGKHTLEFMMRQSNSTAATNEVPEVTVFSKFPVTLGQPNTLICLVDNIFPPVVNITWLSNGHSVTEGVSETSFLSKSDHSFFKISYLTFLPSADEIYDCKVEHWGLDEPLLKHWEPEIPAPMSELTE

SEQ ID NO: 1385 - protein, 198 aa, synthetic construct
  REGION 1..198: note = HLA-DQB1 (P01920) ECD
RDSPEDFVYQFKAMCYFTNGTERVRYVTRYIYNREEYARFDSDVEVYRAVTPLGPPDAEYWNSQKEVLERTRAELDTVCRHNYQLELRTTLQRRVEPTVTISPSRTEALNHHNLLVCSVTDFYPAQIKVRWFRNDQEETTGVVSTPLIRNGDWTFQILVMLEMTPQHGDVYTCHVEHPSLQNPITVEWRAQSESAQSK

SEQ ID NO: 1386 - protein, 197 aa, synthetic construct
  REGION 1..197: note = HLA-DQB2 (P05538) ECD
RDFPKDFLVQFKGMCYFTNGTERVRGVARYIYNREEYGRFDSDVGEFQAVTELGRSIEDWNNYKDFLEQERAAVDKVCRHNYEAELRTTLQRQVEPTVTISPSRTEALNHHNLLVCSVTDFYPAQIKVRWFRNDQEETAGVVSTSLIRNGDWTFQILVMLEITPQRGDIYTCQVEHPSLQSPITVEWRAQSESAQSK

SEQ ID NO: 1387 - protein, 191 aa, synthetic construct
  REGION 1..191: note = HLA-DRA (P01903) ECD
IKEEHVIIQAEFYLNPDQSGEFMFDFDGDEIFHVDMAKKETVWRLEEFGRFASFEAQGALANIAVDKANLEIMTKRSNYTPITNVPPEVTVLTNSPVELREPNVLICFIDKFTPPVVNVTWLRNGKPVTTGVSETVFLPREDHLFRKFHYLPFLPSTEDVYDCRVEHWGLDEPLLKHWEFDAPSPLPETTE

SEQ ID NO: 1388 - protein, 198 aa, synthetic construct
  REGION 1..198: note = HLA-DRB1 (P01911) ECD
GDTRPRFLWQPKRECHFFNGTERVRFLDRYFYNQEESVRFDSDVGEFRAVTELGRPDAEYWNSQKDILEQARAAVDTYCRHNYGVVESFTVQRRVQPKVTVYPSKTQPLQHHNLLVCSVSGFYPGSIEVRWFLNGQEEKAGMVSTGLIQNGDWTFQTLVMLETVPRSGEVYTCQVEHPSVTSPLTVEWRARSESAQSK

SEQ ID NO: 1389 - protein, 198 aa, synthetic construct
  REGION 1..198: note = HLA-DRB3 (P79483) ECD
GDTRPRFLELRKSECHFFNGTERVRYLDRYFHNQEEFLRFDSDVGEYRAVTELGRPVAESWNSQKDLLEQKRGRVDNYCRHNYGVGESFTVQRRVHPQVTVYPAKTQPLQHHNLLVCSVSGFYPGSIEVRWFRNGQEEKAGVVSTGLIQNGDWTFQTLVMLETVPRSGEVYTCQVEHPSVTSALTVEWRARSESAQSK

SEQ ID NO: 1390 - protein, 198 aa, synthetic construct
  REGION 1..198: note = HLA-DRB4 (P13762) ECD
GDTQPRFLEQAKCECHFLNGTERVWNLIRYIYNQEEYARYNSDLGEYQAVTELGRPDAEYWNSQKDLLERRRAEVDTYCRYNYGVVESFTVQRRVQPKVTVYPSKTQPLQHHNLLVCSVNGFYPGSIEVRWFRNGQEEKAGVVSTGLIQNGDWTFQTLVMLETVPRSGEVYTCQVEHPSMMSPLTVQWSARSESAQSK

SEQ ID NO: 1391 - protein, 198 aa, synthetic construct
  REGION 1..198: note = HLA-DRB5 (Q30154) ECD
GDTRPRFLQQDKYECHFFNGTERVRFLHRDIYNQEEDLRFDSDVGEYRAVTELGRPDAEYWNSQKDFLEDRRAAVDTYCRHNYGVGESFTVQRRVEPKVTVYPARTQTLQHHNLLVCSVNGFYPGSIEVRWFRNSQEEKAGVVSTGLIQNGDWTFQTLVMLETVPRSGEVYTCQVEHPSVTSPLTVEWRAQSESAQSK

SEQ ID NO: 1392 - protein, 284 aa, synthetic construct
  REGION 1..284: note = HLA-E (P13747) ECD
GSHSLKYFHTSVSRPGRGEPRFISVGYVDDTQFVRFDNDAASPRMVPRAPWMEQEGSEYWDRETRSARDTAQIFRVNLRTLRGYYNQSEAGSHTLQWMHGCELGPDGRFLRGYEQFAYDGKDYLTLNEDLRSWTAVDTAAQISEQKSNDASEAEHQRAYLEDTCVEWLHKYLEKGKETLLHLEPPKTHVTHHPISDHEATLRCWALGFYPAEITLTWQQDGEGHTQDTELVETRPAGDGTFQKWAAVVVPSGEEQRYTCHVQHEGLPEPVTLRWKPASQPTIPI

SEQ ID NO: 1393 - protein, 284 aa, synthetic construct
  REGION 1..284: note = HLA-F (P30511) ECD
GSHSLRYFSTAVSRPGRGEPRYIAVEYVDDTQFLRFDSDAAIPRMEPREPWVEQEGPQYWEWTTGYAKANAQTDRVALRNLLRRYNQSEAGSHTLQGMNGCDMGPDGRLLRGYHQHAYDGKDYISLNEDLRSWTAADTVAQITQRFYEAEEYAEEFRTYLEGECLELLRRYLENGKETLQRADPPKAHVAHHPISDHEATLRCWALGFYPAEITLTWQRDGEEQTQDTELVETRPAGDGTFQKWAAVVVPPGEEQRYTCHVQHEGLPQPLILRWEQSPQPTIPI

SEQ ID NO: 1394 - protein, 284 aa, synthetic construct [sequence omitted]

SEQ ID NO: 1395 - protein, 284 aa, synthetic construct
  REGION 1..284: note = HLA-H (P01893) ECD
RSHSMRYFYTTMSRPGAGEPRFISVGYVDDTQFVRFDSDDASPREEPRAPWMEREGPKYWDRNTQICKAQAQTERENLRIALRYYNQSEGGSHTMQVMYGCDVGPDGPFLRGYEQHAYDGKDYIALNEDLRSWTAADMAAQITKRKWEAARRAEQRRVYLEGEFVEWLRRYLENGKETLQRADPPKTHMTHHPISDHEATLRCWALGFYPAEITLTWQRDGEDQTQDTELVETRPAGDGTFQKWAAVVVPSGEEQRYTCHVQHEGLPEPLTLRWEPSSQPTVPI

SEQ ID NO: 1396 - protein, 453 aa, synthetic construct
  REGION 1..453: note = ICAM1 (P05362) ECD
QTSVSPSKVILPRGGSVLVTCSTSCDQPKLLGIETPLPKKELLLPGNNRKVYELSNVQEDSQPMCYSNCPDGQSTAKTFLTVYWTPERVELAPLPSWQPVGKNLTLRCQVEGGAPRANLTVVLLRGEKELKREPAVGEPAEVTTTVLVRRDHHGANFSCRTELDLRPQGLELFENTSAPYQLQTFVLPATPPQLVSPRVLEVDTQGTVVCSLDGLFPVSEAQVHLALGDQRLNPTVTYGNDSFSAKASVSVTAEDEGTQRLTCAVILGNQSQETLQTVTIYSFPAPNVILTKPEVSEGTEVTVKCEAHPRAKVTLNGVPAQPLGPRAQLLLKATPEDNGRSFSCSATLEVAGQLIHKNQTRELRVLYGPRLDERDCPGNWTWPENSQQTPMCQAWGNPLPELKCLKDGTFPLPIGESVTVTRDLEGTYLCRARSTQGEVTRKVTVNVLSPRYE

SEQ ID NO: 1397 - protein, 199 aa, synthetic construct
  REGION 1..199: note = ICAM2 (P13598) ECD
KVFEVHVRPKKLAVEPKGSLEVNCSTTCNQPEVGGLETSLDKILLDEQAQWKHYLVSNISHDTVLQCHFTCSGKQESMNSNVSVYQPPRQVILTLQPTLVAVGKSFTIECRVPTVEPLDSLTLFLFRGNETLHYETFGKAAPAPQEATATFNSTADREDGHRNFSCLAVLDLMSRGGNIFHKHSAPKMLEIYEPVSDSQ

SEQ ID NO: 1398 - protein, 456 aa, synthetic construct
  REGION 1..456: note = ICAM3 (P32942) ECD
QEFLLRVEPQNPVLSAGGSLFVNCSTDCPSSEKIALETSLSKELVASGMGWAAFNLSNVTGNSRILCSVYCNGSQITGSSNITVYRLPERVELAPLPPWQPVGQNFTLRCQVEDGSPRTSLTVVLLRWEEELSRQPAVEEPAEVTATVLASRDDHGAPFSCRTELDMQPQGLGLFVNTSAPRQLRTFVLPVTPPRLVAPRFLEVETSWPVDCTLDGLFPASEAQVYLALGDQMLNATVMNHGDTLTATATATARADQEGAREIVCNVTLGGERREARENLTVFSFLGPIVNLSEPTAHEGSTVTVSCMAGARVQVTLDGVPAAAPGQPAQLQLNATESDDGRSFFCSATLEVDGEFLHRNSSVQLRVLYGPKIDRATCPQHLKWKDKTRHVLQCQARGNPYPELRCLKEGSSREVPVGIPFFVNVTHNGTYQCQASSSRGKYTLVVVMDIEAGSSH

SEQ ID NO: 1399 - protein, 218 aa, synthetic construct
  REGION 1..218: note = ICAM4 (Q14773) ECD
ALGRRTKRAQSPKGSPLAPSGTSVPFWVRMSPEFVAVQPGKSVQLNCSNSCPQPQNSSLRTPLRQGKTLRGPGWVSYQLLDVRAWSSLAHCLVTCAGKTRWATSRITAYKPPHSVILEPPVLKGRKYTLRCHVTQVFPVGYLVVTLRHGSRVIYSESLERFTGLDLANVTLTYEFAAGPRDFWQPVICHARLNLDGLVVRNSSAPITLMLAWSPAPTA

SEQ ID NO: 1400 - protein, 804 aa, synthetic construct
  REGION 1..804: note = ICAM5 (Q9UMF0) ECD
EPFWADLQPRVAFVERGGSLWLNCSTNCPRPERGGLETSLRRNGTQRGLRWLARQLVDIREPETQPVCFFRCARRTLQARGLIRTFQRPDRVELMPLPPWQPVGENFTLSCRVPGAGPRASLTLTLLRGAQELIRRSFAGEPPRARGAVLTATVLARREDHGANFSCRAELDLRPHGLGLFENSSAPRELRTFSLSPDAPRLAAPRLLEVGSERPVSCTLDGLFPASEARVYLALGDQNLSPDVTLEGDAFVATATATASAEQEGARQLVCNVTLGGENRETRENVTIYSFPAPLLTLSEPSVSEGQMVTVTCAAGAQALVTLEGVPAAVPGQPAQLQLNATENDDRRSFFCDATLDVDGETLIKNRSAELRVLYAPRLDDSDCPRSWTWPEGPEQTLRCEARGNPEPSVHCARSDGGAVLALGLLGPVTRALSGTYRCKAANDQGEAVKDVTLTVEYAPALDSVGCPERITWLEGTEASLSCVAHGVPPPDVICVRSGELGAVIEGLLRVAREHAGTYRCEATNPRGSAAKNVAVTVEYGPRFEEPSCPSNWTWVEGSGRLFSCEVDGKPQPSVKCVGSGGATEGVLLPLAPPDPSPRAPRIPRVLAPGIYVCNATNRHGSVAKTVVVSAESPPEMDESTCPSHQTWLEGAEASALACAARGRPSPGVRCSREGIPWPEQQRVSREDAGTYHCVATNAHGTDSRTVTVGVEYRPVVAELAASPPGGVRPGGNFTLTCRAEAWPPAQISWRAPPGALNIGLSSNNSTLSVAGAMGSHGGEYECAATNAHGRHARRITVRVAGPW

SEQ ID NO: 1401 - protein, 120 aa, synthetic construct
  REGION 1..120: note = ICOS (Q9Y6W8) ECD
EINGSANYEMFIFHNGGVQILCKYPDIVQQFKMQLLKGGQILCDLTKTKGSGNTVSIKSLKFCHSQLSNNSVSFFLYNLDHSHANYYFCNLSIFDPPPFKVTLTGGYLHIYESQLCCQLK

SEQ ID NO: 1402 - protein, 238 aa, synthetic construct [sequence omitted]

SEQ ID NO: 1403 - protein, 409 aa, synthetic construct
  REGION 1..409: note = IFNAR1 (P17181) ECD
KNLKSPQKVEVDIIDDNFILRWNRSDESVGNVTFSFDYQKTGMDNWIKLSGCQNITSTKCNFSSLKLNVYEEIKLRIRAEKENTSSWYEVDSFTPFRKAQIGPPEVHLEAEDKAIVIHISPGTKDSVMWALDGLSFTYSLVIWKNSSGVEERIENIYSRHKIYKLSPETTYCLKVKAALLTSWKIGVYSPVHCIKTTVENELPPPENIEVSVQNQNYVLKWDYTYANMTFQVQWLHAFLKRNPGNHLYKWKQIPDCENVKTTQCVFPQNVFQKGIYLLRVQASDGNNTSFWSEEIKFDTEIQAFLLPPVFNIRSLSDSFHIYIGAPKQSGNTPVIQDYPLIYEIIFWENTSNAERKIIEKKTDVTVPNLKPLTVYCVKARAHTMDEKLNKSSVFSDAVCEKTKPGNTSK

SEQ ID NO: 1404 - protein, 217 aa, synthetic construct
  REGION 1..217: note = IFNAR2 (P48551) ECD
ISYDSPDYTDESCTFKISLRNFRSILSWELKNHSIVPTHYTLLYTIMSKPEDLKVVKNCANTTRSFCDLTDEWRSTHEAYVTVLEGFSGNTTLFSCSHNFWLAIDMSFEPPEFEIVGFTNHINVMVKFPSIVEEELQFDLSLVIEEQSEGIVKKHKPEIKGNMSGNFTYIIDKLIPNTNYCVSVYLEHSDEQAVIKSPLKCTLLPPGQESESAESAK

SEQ ID NO: 1405 - protein, 228 aa, synthetic construct [sequence omitted]

SEQ ID NO: 1406 - protein, 220 aa, synthetic construct
  REGION 1..220: note = IFNGR2 (P38484) ECD
SQLPAPQHPKIRLYNAEQVLSWEPVALSNSTRPVVYQVQFKYTDSKWFTADIMSIGVNCTQITATECDFTAASPSAGFPMDFNVTLRLRAELGALHSAWVTMPWFQHYRNVTVGPPENIEVTPGEGSLIIRFSSPFDIADTSTAFFCYYVHYWEKGGIQQVKGPFRSNSISLDNLKPSRVYCLQVQAQLLWNKSNIFRVGHLSNISCYETMADASTELQQ

SEQ ID NO: 1407 - protein, 208 aa, synthetic construct
  REGION 1..208: note = IFNLR1 (Q8IU57) ECD
RPRLAPPQNVTLLSQNFSVYLTWLPGLGNPQDVTYFVAYQSSPTRRRWREVEECAGTKELLCSMMCLKKQDLYNKFKGRVRTVSPSSKSPWVESEYLDYLFEVEPAPPVLVLTQTEEILSANATYQLPPCMPPLDLKYEVAFWKEGAGNKTLFPVTPHGQPVQITLQPAASEHHCLSARTIYTFSVPKYSKFSKPTCFLLEVPEANWA

SEQ ID NO: 1408 - protein, 605 aa, synthetic construct
  REGION 1..605: note = IGDCC3 (Q8IVU1) ECD
LGHSAELAFAVEPSDDVAVPGQPIVLDCRVEGTPPVRITWRKNGVELPESTHSTLLANGSLMIRHFRLEPGGSPSDEGDYECVAQNRFGLVVSRKARIQAATMSDFHVHPQATVGEEGGVARFQCQIHGLPKPLITWEKNRVPIDTDNERYTLLPKGVLQITGLRAEDGGIFHCVASNIASIRISHGARLTVSGSGSGAYKEPAILVGPENLTLTVHQTAVLECVATGNPRPIVSWSRLDGRPIGVEGIQVLGTGNLIISDVTVQHSGVYVCAANRPGTRVRRTAQGRLVVQAPAEFVQHPQSISRPAGTTAMFTCQAQGEPPPHVTWLKNGQVLGPGGHVRLKNNNSTLTISGIGPEDEAIYQCVAENSAGSSQASARLTVLWAEGLPGPPRNVRAVSVSSTEVRVSWSEPLANTKEIIGYVLHIRKAADPPELEYQEAVSKSTFQHLVSDLEPSTAYSFYIKAYTPRGASSASVPTLASTLGEAPAPPPLSVRVLGSSSLQLLWEPWPRLAQHEGGFKLFYRPASKTSFTGPILLPGTVSSYNLSQLDPTAVYEVKLLAYNQHGDGNATVRFVSLRGASERTALSPPCDCRKEEAANQTSTTG

SEQ ID NO: 1409 - protein, 933 aa, synthetic construct
  REGION 1..933: note = IGDCC4 (Q8TDY8) ECD
ELLLPQETTVELSCGVGPLQVILGPEQAAVLNCSLGAAAAGPPTRVTWSKDGDTLLEHDHLHLLPNGSLWLSQPLAPNGSDESVPEAVGVIEGNYSCLAHGPLGVLASQTAVVKLATLADFSLHPESQTVEENGTARFECHIEGLPAPIITWEKDQVTLPEEPRLIVLPNGVLQILDVQESDAGPYRCVATNSARQHFSQEALLSVAHRGSLASTRGQDVVIVAAPENTTVVSGQSVVMECVASADPTPFVSWVRQDGKPISTDVIVLGRTNLLIANAQPWHSGVYVCRANKPRTRDFATAAAELRVLAAPAITQAPEALSRTRASTARFVCRASGEPRPALRWLHNGAPLRPNGRVKVQGGGGSLVITQIGLQDAGYYQCVAENSAGMACAAASLAVVVREGLPSAPTRVTATPLSSSAVLVAWERPEMHSEQIIGFSLHYQKARGMDNVEYQFAVNNDTTELQVRDLEPNTDYEFYVVAYSQLGASRTSTPALVHTLDDVPSAAPQLSLSSPNPSDIRVAWLPLPPSLSNGQVVKYKIEYGLGKEDQIFSTEVRGNETQLMLNSLQPNKVYRVRISAGTAAGFGAPSQWMHHRTPSMHNQSHVPFAPAELKVQAKMESLVVSWQPPPHPTQISGYKLYWREVGAEEEANGDRLPGGRGDQAWDVGPVRLKKKVKQYELTQLVPGRLYEVKLVAFNKHEDGYAAVWKGKTEKAPAPDMPIQRGPPLPPAHVHAESNSSTSIWLRWKKPDFTTVKIVNYTVRFSPWGLRNASLVTYYTSSGEDILIGGLKPFTKYEFAVQSHGVDMDGPFGSVVERSTLPDRPSTPPSDLRLSPLTPSTVRLHWCPPTEPNGEIVEYLILYSSNHTQPEHQWTLLTTQGNIFSAEVHGLESDTRYFFKMGARTEVGPGPFSRLQDVITLQEKLSDSLDMHSVT

SEQ ID NO: 1410 - protein, 195 aa, synthetic construct
  REGION 1..195: note = IGF1R (P08069) ECD
DVMQVANTTMSSRSRNTTAADTYNITDPEELETEYPFFESRVDNKERTVISNLRPFTLYRIDIHSCNHEAEKLGCSASNFVFARTMPAEGADDIPGPVTWEPRPENSIFLKWPEPENPNGLILMYEIKYGSQVEDQRECVSRQEYRKYGGAKLNRLNPGNYTARIQATSLSGNGSWTDPVFFYVQAKTGYENFIH

SEQ ID NO: 1411 - protein, 2264 aa, synthetic construct
  REGION 1..2264: note = IGF2R (P11717) ECD
QAAPFPELCSYTWEAVDTKNNVLYKINICGSVDIVQCGPSSAVCMHDLKTRTYHSVGDSVLRSATRSLLEFNTTVSCDQQGTNHRVQSSIAFLCGKTLGTPEFVTATECVHYFEWRTTAACKKDIFKANKEVPCYVFDEELRKHDLNPLIKLSGAYLVDDSDPDTSLFINVCRDIDTLRDPGSQLRACPPGTAACLVRGHQAFDVGQPRDGLKLVRKDRLVLSYVREEAGKLDFCDGHSPAVTITFVCPSERREGTIPKLTAKSNCRYEIEWITEYACHRDYLESKTCSLSGEQQDVSIDLTPLAQSGGSSYISDGKEYLFYLNVCGETEIQFCNKKQAAVCQVKKSDTSQVKAAGRYHNQTLRYSDGDLTLIYFGGDECSSGFQRMSVINFECNKTAGNDGKGTPVFTGEVDCTYFFTWDTEYACVKEKEDLLCGATDGKKRYDLSALVRHAEPEQNWEAVDGSQTETEKKHFFINICHRVLQEGKARGCPEDAAVCAVDKNGSKNLGKFISSPMKEKGNIQLSYSDGDDCGHGKKIKTNITLVCKPGDLESAPVLRTSGEGGCFYEFEWHTAAACVLSKTEGENCTVFDSQAGFSFDLSPLTKKNGAYKVETKKYDFYINVCGPVSVSPCQPDSGACQVAKSDEKTWNLGLSNAKLSYYDGMIQLNYRGGTPYNNERHTPRATLITFLCDRDAGVGFPEYQEEDNSTYNFRWYTSYACPEEPLECVVTDPSTLEQYDLSSLAKSEGGLGGNWYAMDNSGEHVTWRKYYINVCRPLNPVPGCNRYASACQMKYEKDQGSFTEVVSISNLGMAKTGPVVEDSGSLLLEYVNGSACTTSDGRQTTYTTRIHLVCSRGRLNSHPIFSLNWECVVSFLWNTEAACPIQTTTDTDQACSIRDPNSGFVFNLNPLNSSQGYNVSGIGKIFMFNVCGTMPVCGTILGKPASGCEAETQTEELKNWKPARPVGIEKSLQLSTEGFITLTYKGPLSAKGTADAFIVRFVCNDDVYSGPLKFLHQDIDSGQGIRNTYFEFETALACVPSPVDCQVTDLAGNEYDLTGLSTVRKPWTAVDTSVDGRKRTFYLSVCNPLPYIPGCQGSAVGSCLVSEGNSWNLGVVQMSPQAAANGSLSIMYVNGDKCGNQRFSTRITFECAQISGSPAFQLQDGCEYVFIWRTVEACPVVRVEGDNCEVKDPRHGNLYDLKPLGLNDTIVSAGEYTYYFRVCGKLSSDVCPTSDKSKVVSSCQEKREPQGFHKVAGLLTQKLTYENGLLKMNFTGGDTCHKVYQRSTAIFFYCDRGTQRPVFLKETSDCSYLFEWRTQYACPPFDLTECSFKDGAGNSFDLSSLSRYSDNWEAITGTGDPEHYLINVCKSLAPQAGTEPCPPEAAACLLGGSKPVNLGRVRDGPQWRDGIIVLKYVDGDLCPDGIRKKSTTIRFTCSESQVNSRPMFISAVEDCEYTFAWPTATACPMKSNEHDDCQVTNPSTGHLFDLSSLSGRAGFTAAYSEKGLVYMSICGENENCPPGVGACFGQTRISVGKANKRLRYVDQVLQLVYKDGSPCPSKSGLSYKSVISFVCRPEARPTNRPMLISLDKQTCTLFFSWHTPLACEQATECSVRNGSSIVDLSPLIHRTGGYEAYDESEDDASDTNPDFYINICQPLNPMHGVPCPAGAAVCKVPIDGPPIDIGRVAGPPILNPIANEIYLNFESSTPCLADKHFNYTSLIAFHCKRGVSMGTPKLLRTSECDFVFEWETPVVCPDEVRMDGCTLTDEQLLYSFNLSSLSTSTFKVTRDSRTYSVGVCTFAVGPEQGGCKDGGVCLLSGTKGASFGRLQSMKLDYRHQDEAVVLSYVNGDRCPPETDDGVPCVFPFIFNGKSYEECIIESRAKLWCSTTADYDRDHEWGFCRHSNSYRTSSIIFKCDEDEDIGRPQVFSEVRGCDVTFEWKTKVVCPPKKLECKFVQKHKTYDLRLLSSLTGSWSLVHNGVSYYINLCQKIYKGPLGCSERASICRRTTTGDVQVLGLVHTQKLGVIGDKVVVTYSKGYPCGGNKTASSVIELTCTKTVGRPAFKRFDIDSCTYYFSWDSRAACAVKPQEVQMVNGTITNPINGKSFSLGDIYFKLFRASGDMRTNGDNYLYEIQLSSITSSRNPACSGANICQVKPNDQHFSRKVGTSDKTKYYLQDGDLDVVFASSSKCGKDKTKSVSSTIFFHCDPLVEDGIPEFSHETADCQYLFSWYTSAVCPLGVGFDSENPGDDGQMHKGLSERSQ

SEQ ID NO: 1412 - protein, 141 aa, synthetic construct
  REGION 1..141: note = IGFLR1 (Q9H665) ECD
SQYCGRLEYWNPDNKCCSSCLQRFGPPPCPDYEFRENCGLNDHGDFVTPPFRKCSSGQCNPDGAELCSPCGGGAVTPTPAAGGGRTPWRCRERPVPAKGHCPLTPGNPGAPSSQERSSPASSIAWRTPEPVPQQAWPNFLP

SEQ ID NO: 1413 - protein, 219 aa, synthetic construct
  REGION 1..219: note = IGSF11 (Q5DX21) ECD
LEVSESPGSIQVARGQPAVLPCTFTTSAALINLNVIWMVTPLSNANQPEQVILYQGGQMFDGAPRFHGRVGFTGTMPATNVSIFINNTQLSDTGTYQCLVNNLPDIGGRNIGVTGLTVLVPPSAPHCQIQGSQDIGSDVILLCSSEEGIPRPTYLWEKLDNTLKLPPTATQDQVQGTVTIRNISALSSGLYQCVASNAIGTSTCLLDLQVISPQPRNIG

SEQ ID NO: 1414 - protein, 1105 aa, synthetic construct
  REGION 1..1105: note = IGSF3 (O75054) ECD
QRQVTVQEGPLYRTEGSHITIWCNVSGYQGPSEQNFQWSIYLPSSPEREVQIVSTMDSSFPYAIYTQRVRGGKIFIERVQGNSTLLHITDLQARDAGEYECHTPSTDKQYFGSYSAKMNLVVIPDSLQTTAMPQTLHRVEQDPLELTCEVASETIQHSHLSVAWLRQKVGEKPVEVISLSRDFMLHSSSEYAQRQSLGEVRLDKLGRTTFRLTIFHLQPSDQGEFYCEAAEWIQDPDGSWYAMTRKRSEGAVVNVQPTDKEFTVRLETEKRLHTVGEPVEFRCILEAQNVPDRYFAVSWAFNSSLIATMGPNAVPVLNSEFAHREARGQLKVAKESDSVFVLKIYHLRQEDSGKYNCRVTEREKTVTGEFIDKESKRPKNIPIIVLPLKSSISVEVASNASVILEGEDLRFSCSVRTAGRPQGRFSVIWQLVDRQNRRSNIMWLDRDGTVQPGSSYWERSSFGGVQMEQVQPNSFSLGIFNSRKEDEGQYECHVTEWVRAVDGEWQIVGERRASTPISITALEMGFAVTAISRTPGVTYSDSFDLQCIIKPHYPAWVPVSVTWRFQPVGTVEFHDLVTFTRDGGVQWGDRSSSFRTRTAIEKAESSNNVRLSISRASDTEAGKYQCVAELWRKNYNNTWTRLAERTSNLLEIRVLQPVTKLQVSKSKRTLTLVENKPIQLNCSVKSQTSQNSHFAVLWYVHKPSDADGKLILKTTHNSAFEYGTYAEEEGLRARLQFERHVSGGLFSLTVQRAEVSDSGSYYCHVEEWLLSPNYAWYKLAEEVSGRTEVTVKQPDSRLRLSQAQGNLSVLETRQVQLECVVLNRTSITSQLMVEWFVWKPNHPERETVARLSRDATFHYGEQAAKNNLKGRLHLESPSPGVYRLFIQNVAVQDSGTYSCHVEEWLPSPSGMWYKRAEDTAGQTALTVMRPDASLQVDTVVPNATVSEKAAFQLDCSIVSRSSQDSRFAVAWYSLRTKAGGKRSSPGLEEQEEEREEEEEEDDDDDDDPTERTALLSVGPDAVFGPEGSPWEGRLRFQRLSPVLYRLTVLQASPQDTGNYSCHVEEWLPSPQKEWYRLTEEESAPIGIRVLDTSPTLQSIICSNDA

SEQ ID NO: 1415 - protein, 126 aa, synthetic construct
  REGION 1..126: note = IGSF6 (O95976) ECD
CTLSVTQPWYLEVDYTHEAVTIKCTFSATGCPSEQPTCLWFRYGAHQPENLCLDGCKSEADKFTVREALKENQVSLTVNRVTSNDSAIYICGIAFPSVPEARAKQTGGGTTLVVREIKLLSKELRS

SEQ ID NO: 1416 - protein, 552 aa, synthetic construct
  REGION 1..552: note = IGSF8 (Q969P0) ECD
REVLVPEGPLYRVAGTAVSISCNVTGYEGPAQQNFEWFLYRPEAPDTALGIVSTKDTQFSYAVFKSRVVAGEVQVQRLQGDAVVLKIARLQAQDAGIYECHTPSTDTRYLGSYSGKVELRVLPDVLQVSAAPPGPRGRQAPTSPPRMTVHEGQELALGCLARTSTQKHTHLAVSFGRSVPEAPVGRSTLQEVVGIRSDLAVEAGAPYAERLAAGELRLGKEGTDRYRMVVGGAQAGDAGTYHCTAAEWIQDPDGSWAQIAEKRAVLAHVDVQTLSSQLAVTVGPGERRIGPGEPLELLCNVSGALPPAGRHAAYSVGWEMAPAGAPGPGRLVAQLDTEGVGSLGPGYEGRHIAMEKVASRTYRLRLEAARPGDAGTYRCLAKAYVRGSGTRLREAASARSRPLPVHVREEGVVLEAVAWLAGGTVYRGETASLLCNISVRGGPPGLRLAASWWVERPEDGELSSVPAQLVGGVGQDGVAELGVRPGGGPVSVELVGPRSHRLRLHSLGPEDEGVYHCAPSAWVQHADYSWYQAGSARSGPVTVYPYMHALDT

SEQ ID NO: 1417 - protein, 714 aa, synthetic construct
  REGION 1..714: note = IGSF9 (Q9P2J2) ECD
RGKPEVVSVVGRAGESVVLGCDLLPPAGRPPLHVIEWLRFGFLLPIFIQFGLYSPRIDPDYVGRVRLQKGASLQIEGLRVEDQGWYECRVFFLDQHIPEDDFANGSWVHLTVNSPPQFQETPPAVLEVQELEPVTLRCVARGSPLPHVTWKLRGKDLGQGQGQVQVQNGTLRIRRVERGSSGVYTCQASSTEGSATHATQLLVLGPPVIVVPPKNSTVNASQDVSLACHAEAYPANLTYSWFQDNINVFHISRLQPRVRILVDGSLRLLATQPDDAGCYTCVPSNGLLHPPSASAYLTVLYPAQVTAMPPETPLPIGMPGVIRCPVRANPPLLFVSWTKDGKALQLDKFPGWSQGTEGSLIIALGNEDALGEYSCTPYNSLGTAGPSPVTRVLLKAPPAFIERPKEEYFQEVGRELLIPCSAQGDPPPVVSWTKVGRGLQGQAQVDSNSSLILRPLTKEAHGHWECSASNAVARVATSTNVYVLGTSPHVVTNVSVVALPKGANVSWEPGFDGGYLQRFSVWYTPLAKRPDRMHHDWVSLAVPVGAAHLLVPGLQPHTQYQFSVLAQNKLGSGPFSEIVLSAPEGLPTTPAAPGLPPTEIPPPLSPPRGLVAVRTPRGVLLHWDPPELVPKRLDGYVLEGRQGSQGWEVLDPAVAGTETELLVPGLIKDVLYEFRLVAFAGSFVSDPSNTANVSTSGLEVYPSRTQLPGLLPQP

SEQ ID NO: 1418 - protein, 702 aa, synthetic construct
  REGION 1..702: note = IGSF9B (Q9UPX0) ECD
EGAHGLREEPEFVTARAGESVVLRCDVIHPVTGQPPPYVVEWFKFGVPIPIFIKFGYYPPHVDPEYAGRASLHDKASLRLEQVRSEDQGWYECKVLMLDQQYDTFHNGSWVHLTINAPPTFTETPPQYIEAKEGGSITMTCTAFGNPKPIVTWLKEGTLLGASGKYQVSDGSLTVTSVSREDRGAYTCRAYSIQGEAVHTTHLLVQGPPFIVSPPENITVNISQDALLTCRAEAYPGNLTYTWYWQDENVYFQNDLKLRVRILIDGTLIIFRVKPEDSGKYTCVPSNSLGRSPSASAYLTVQYPARVLNMPPVIYVPVGIHGYIRCPVDAEPPATVVKWNKDGRPLQVEKNLGWTLMEDGSIRIEEATEEALGTYTCVPYNTLGTMGQSAPARLVLKDPPYFTVLPGWEYRQEAGRELLIPCAAAGDPFPVITWRKVGKPSRSKHSALPSGSLQFRALSKEDHGEWECVATNVVTSITASTHLTVIGTSPHAPGSVRVQVSMTTANVSWEPGYDGGYEQTFSVWMKRAQFGPHDWLSLPVPPGPSWLLVDTLEPETAYQFSVLAQNKLGTSAFSEVVTVNTLAFPITTPEPLVLVTPPRCLIANRTQQGVLLSWLPPANHSFPIDRYIMEFRVAERWELLDDGIPGTEGEFFAKDLSQDTWYEFRVLAVMQDLISEPSNIAGVSSTDIFPQPDLTEDGLARP

SEQ ID NO: 1419 - protein, 214 aa, synthetic construct
  REGION 1..214: note = IL10RA (Q13651) ECD
HGTELPSPPSVWFEAEFFHHILHWTPIPNQSESTCYEVALLRYGIESWNSISNCSQTLSYDLTAVTLDLYHSNGYRARVRAVDGSRHSNWTVTNTRFSVDEVTLTVGSVNLEIHNGFILGKIQLPRPKMAPANDTYESIFSHFREYEIAIRKVPGNFTFTHKKVKHENFSLLTSGEVGEFCVQVKPSVASRSNKGMWSKEECISLTRQYFTVTN

SEQ ID NO: 1420 - protein, 201 aa, synthetic construct
  REGION 1..201: note = IL10RB (Q08334) ECD
MVPPPENVRMNSVNFKNILQWESPAFAKGNLTFTAQYLSYRIFQDKCMNTTLTECDFSSLSKYGDHTLRVRAEFADEHSDWVNITFCPVDDTIIGPPGMQVEVLADSLHMRFLAPKIENEYETWTMKNVYNSWTYNVQYWKNGTDEKFQITPQYDFEVLRNLEPWTTYCVQVRGFLPDRNKAGEWSEPVCEQTTHDETVPS

SEQ ID NO: 1421 - protein, 347 aa, synthetic construct
  REGION 1..347: note = IL11RA (Q14626) ECD
SPCPQAWGPPGVQYGQPGRSVKLCCPGVTAGDPVSWFRDGEPKLLQGPDSGLGHELVLAQADSTDEGTYICQTLDGALGGTVTLQLGYPPARPVVSCQAADYENFSCTWSPSQISGLPTRYLTSYRKKTVLGADSQRRSPSTGPWPCPQDPLGAARCVVHGAEFWSQYRINVTEVNPLGASTRLLDVSLQSILRPDPPQGLRVESVPGYPRRLRASWTYPASWPCQPHFLLKFRLQYRPAQHPAWSTVEPAGLEEVITDAVAGLPHAVRVSARDFLDAGTWSTWSPEAWGTPSTGTIPKEIPAWGQLHTQPEVEPQVDSPAPPRPSLQPHPRLLDHRDSVEQVAVLA

SEQ ID NO: 1422 - protein, 522 aa, synthetic construct
  REGION 1..522: note = IL12RB1 (P42701) ECD
CRTSECCFQDPPYPDADSGSASGPRDLRCYRISSDRYECSWQYEGPTAGVSHFLRCCLSSGRCCYFAAGSATRLQFSDQAGVSVLYTVTLWVESWARNQTEKSPEVTLQLYNSVKYEPPLGDIKVSKLAGQLRMEWETPDNQVGAEVQFRHRTPSSPWKLGDCGPQDDDTESCLCPLEMNVAQEFQLRRRQLGSQGSSWSKWSSPVCVPPENPPQPQVRFSVEQLGQDGRRRLTLKEQPTQLELPEGCQGLAPGTEVTYRLQLHMLSCPCKAKATRTLHLGKMPYLSGAAYNVAVISSNQFGPGLNQTWHIPADTHTEPVALNISVGTNGTTMYWPARAQSMTYCIEWQPVGQDGGLATCSLTAPQDPDPAGMATYSWSRESGAMGQEKCYYITIFASAHPEKLTLWSTVLSTYHFGGNASAAGTPHHVSVKNHSLDSVSVDWAPSLLSTCPGVLKEYVVRCRDEDSKQVSEHPVQPTETQVTLSGLRAGVAYTVQVRADTAWLRGVWSQPQRFSIEVQVSD

SEQ ID NO: 1423 - protein, 599 aa, synthetic construct
  REGION 1..599: note = IL12RB2 (Q99665) ECD
KIDACKRGDVTVKPSHVILLGSTVNITCSLKPRQGCFHYSRRNKLILYKFDRRINFHHGHSLNSQVTGLPLGTTLFVCKLACINSDEIQICGAEIFVGVAPEQPQNLSCIQKGEQGTVACTWERGRDTHLYTEYTLQLSGPKNLTWQKQCKDIYCDYLDFGINLTPESPESNFTAKVTAVNSLGSSSSLPSTFTFLDIVRPLPPWDIRIKFQKASVSRCTLYWRDEGLVLLNRLRYRPSNSRLWNMVNVTKAKGRHDLLDLKPFTEYEFQISSKLHLYKGSWSDWSESLRAQTPEEEPTGMLDVWYMKRHIDYSRQQISLFWKNLSVSEARGKILHYQVTLQELTGGKAMTQNITGHTSWTTVIPRTGNWAVAVSAANSKGSSLPTRINIMNLCEAGLLAPRQVSANSEGMDNILVTWQPPRKDPSAVQEYVVEWRELHPGGDTQVPLNWLRSRPYNVSALISENIKSYICYEIRVYALSGDQGGCSSILGNSKHKAPLSGPHINAITEEKGSILISWNSIPVQEQMGCLLHYRIYWKERDSNSQPQLCEIPYRVSQNSHPINSLQPRVTYVLWMTALTAAGESSHGNEREFCLQGKAN

SEQ ID NO: 1424 - protein, 322 aa, synthetic construct
  REGION 1..322: note = IL13RA1 (P78552) ECD
GGGGAAPTETQPPVTNLSVSVENLCTVIWTWNPPEGASSNCSLWYFSHFGDKQDKKIAPETRRSIEVPLNERICLQVGSQCSTNESEKPSILVEKCISPPEGDPESAVTELQCIWHNLSYMKCSWLPGRNTSPDTNYTLYYWHRSLEKIHQCENIFREGQYFGCSFDLTKVKDSSFEQHSVQIMVKDNAGKIKPSFNIVPLTSRVKPDPPHIKNLSFHNDDLYVQWENPQNFISRCLFYEVEVNNSQTETHNVFYVQEAKCENPEFERNVENTSCFMVPGVLPDTLNTVRIRVKTNKLCYEDDKLWSNWSQEMSIGKKRNST

SEQ ID NO: 1425 - protein, 317 aa, synthetic construct
  REGION 1..317: note = IL13RA2 (Q14627) ECD
DTEIKVNPPQDFEIVDPGYLGYLYLQWQPPLSLDHFKECTVEYELKYRNIGSETWKTIITKNLHYKDGFDLNKGIEAKIHTLLPWQCTNGSEVQSSWAETTYWISPQGIPETKVQDMDCVYYNWQYLLCSWKPGIGVLLDTNYNLFYWYEGLDHALQCVDYIKADGQNIGCRFPYLEASDYKDFYICVNGSSENKPIRSSYFTFQLQNIVKPLPPVYLTFTRESSCEIKLKWSIPLGPIPARCFDYEIEIREDDTTLVTATVENETYTLKTTNETRQLCFVVRSKVNIYCSDDGIWSEWSDKQCWEGEDLSKKTLLR

SEQ ID NO: 1426 - protein, 175 aa, synthetic construct
  REGION 1..175: note = IL15RA (Q13261) ECD
ITCPPPMSVEHADIWVKSYSLYSRERYICNSGFKRKAGTSSLTECVLNKATNVAHWTTPSLKCIRDPALVHQRPAPPSTVTTAGVTPQPESLSPSGKEPAASSPSSNNTAATTAAIVPGSQLMPSKSPSTGTTEISSHESSHGTPSQTTAKNWELTASASHQPPGVYPQGHSDTT

SEQ ID NO: 1427 - protein, 288 aa, synthetic construct
  REGION 1..288: note = IL17RA (Q96F46) ECD
LRLLDHRALVCSQPGLNCTVKNSTCLDDSWIHPRNLTPSSPKDLQIQLHFAHTQQGDLFPVAHIEWTLQTDASILYLEGAELSVLQLNTNERLCVRFEFLSKLRHHHRRWRFTFSHFVVDPDQEYEVTVHHLPKPIPDGDPNHQSKNFLVPDCEHARMKVTTPCMSSGSLWDPNITVETLEAHQLRVSFTLWNESTHYQILLTSFPHMENHSCFEHMHHIPAPRPEEFHQRSNVTLTLRNLKGCCRHQVQIQPFFSSCLNDCLRHSATVSCPEMPDTPEPIPDYMPLW

SEQ ID NO: 1428 - protein, 275 aa, synthetic construct
  REGION 1..275: note = IL17RB (Q9NRM6) ECD
REPTVQCGSETGPSPEWMLQHDLIPGDLRDLRVEPVTTSVATGDYSILMNVSWVLRADASIRLLKATKICVTGKSNFQSYSCVRCNYTEAFQTQTRPSGGKWTFSYIGFPVELNTVYFIGAHNIPNANMNEDGPSMSVNFTSPGCLDHIMKYKKKCVKAGSLWDPNITACKKNEETVEVNFTTTPLGNRYMALIQHSTIIGFSQVFEPHQKKQTRASVVIPVTGDSEGATVQLTPYFPTCGSDCIRHKGTVVLCPQTGVPFPLDNNKSKPGGWLP

SEQ ID NO: 1429 - protein, 518 aa, synthetic construct
  REGION 1..518: note = IL17RC (Q8NAC3) ECD
LERLVGPQDATHCSPVSLEPWGDEERLRVQFLAQQSLSLAPVTAATARTALSGLSGADGRREERGRGKSWVCLSLGGSGNTEPQKKGLSCRLWDSDILCLPGDIVPAPGPVLAPTHLQTELVLRCQKETDCDLCLRVAVHLAVHGHWEEPEDEEKFGGAADSGVEEPRNASLQAQVVLSFQAYPTARCVLLEVQVPAALVQFGQSVGSVVYDCFEAALGSEVRIWSYTQPRYEKELNHTQQLPDCRGLEVWNSIPSCWALPWLNVSADGDNVHLVLNVSEEQHFGLSLYWNQVQGPPKPRWHKNLTGPQIITLNHTDLVPCLCIQVWPLEPDSVRTNICPFREDPRAHQNLWQAARLQLLTLQSWLLDAPCSLPAEAALCWRAPGGDPCQPLVPPLSWENVTVDKVLEFPLLKGHPNLCVQVNSSEKLQLQECLWADSLGPLKDDVLLLETRGPQDNRSLCALEPSGCTSLPSKASTRAARLGEYLLQDLQSGQCLQLWDDDLGALWACPMDKYIHKR

SEQ ID NO: 1430 - protein, 283 aa, synthetic construct
  REGION 1..283: note = IL17RD (Q8NFM7) ECD
CLNGSQLAVAAGGSGRARGADTCGWRGVGPASRNSGLYNITFKYDNCTTYLNPVGKHVIADAQNITISQYACHDQVAVTILWSPGALGIEFLKGFRVILEELKSEGRQCQQLILKDPKQLNSSFKRTGMESQPFLNMKFETDYFVKVVPFPSIKNESNYHPFFFRTRACDLLLQPDNLACKPFWKPRNLNISQHGSDMQVSFDHAPHNFGFRFFYLHYKLKHEGPFKRKTCKQEQTTETTSCLLQNVSPGDYIIELVDDTNTTRKVMHYALKPVHSPWAGPIR

SEQ ID NO: 1431 - protein, 431 aa, synthetic construct
  REGION 1..431: note = IL17RE (Q8NFR9) ECD
AGIGFRHLPHWNTRCPLASHTDDSFTGSSAYIPCRTWWALFSTKPWCVRVWHCSRCLCQHLLSGGSGLQRGLFHLLVQKSKKSSTFKFYRRHKMPAPAQRKLLPRRHLSEKSHHISIPSPDISHKGLRSKRTQPSDPETWESLPRLDSQRHGGPEFSFDLLPEARAIRVTISSGPEVSVRLCHQWALECEELSSPYDVQKIVSGGHTVELPYEFLLPCLCIEASYLQEDTVRRKKCPFQSWPEAYGSDFWKSVHFTDYSQHTQMVMALTLRCPLKLEAALCQRHDWHTLCKDLPNATARESDGWYVLEKVDLHPQLCFKFSFGNSSHVECPHQTGSLTSWNVSMDTQAQQLILHFSSRMHATFSAAWSLPGLGQDTLVPPVYTVSQARGSSPVSLDLIIPFLRPGCCVLVWRSDVQFAWKHLLCPDVSYRH

SEQ ID NO: 1432 - protein, 308 aa, synthetic construct
  REGION 1..308: note = IL18R1 (Q13478) ECD
CTSRPHITVVEGEPFYLKHCSCSLAHEIETTTKSWYKSSGSQEHVELNPRSSSRIALHDCVLEFWPVELNDTGSYFFQMKNYTQKWKLNVIRRNKHSCFTERQVTSKIVEVKKFFQITCENSYYQTLVNSTSLYKNCKKLLLENNKNPTIKKNAEFEDQGYYSCVHFLHHNGKLFNITKTFNITIVEDRSNIVPVLLGPKLNHVAVELGKNVRLNCSALLNEEDVIYWMFGEENGSDPNIHEEKEMRIMTPEGKWHASKVLRIENIGESNLNVLYNCTVASTGGTDTKSFILVRKADMADIPGHVFTR

SEQ ID NO: 1433 - protein, 337 aa, synthetic construct
  REGION 1..337: note = IL18RAP (O95256) ECD
FNISGCSTKKLLWTYSTRSEEEFVLFCDLPEPQKSHFCHRNRLSPKQVPEHLPFMGSNDLSDVQWYQQPSNGDPLEDIRKSYPHIIQDKCTLHFLTPGVNNSGSYICRPKMIKSPYDVACCVKMILEVKPQTNASCEYSASHKQDLLLGSTGSISCPSLSCQSDAQSPAVTWYKNGKLLSVERSNRIVVDEVYDYHQGTYVCDYTQSDTVSSWTVRAVVQVRTIVGDTKLKPDILDPVEDTLEVELGKPLTISCKARFGFERVFNPVIKWYIKDSDLEWEVSVPEAKSIKSTLKDEIIERNIILEKVTQRDLRRKFVCFVQNSIGNTTQSVQLKEKR

SEQ ID NO: 1434 - protein, 319 aa, synthetic construct
  REGION 1..319: note = IL1R1 (P14778) ECD
LEADKCKEREEKIILVSSANEIDVRPCPLNPNEHKGTITWYKDDSKTPVSTEQASRIHQHKEKLWFVPAKVEDSGHYYCVVRNSSYCLRIKISAKFVENEPNLCYNAQAIFKQKLPVAGDGGLVCPYMEFFKNENNELPKLQWYKDCKPLLLDNIHFSGVKDRLIVMNVAEKHRGNYTCHASYTYLGKQYPITRVIEFITLEENKPTRPVIVSPANETMEVDLGSQIQLICNVTGQLSDIAYWKWNGSVIDEDDPVLGEDYYSVENPANKRRSTLITVLNISEIESRFYKHPFTCFAKNTHGIDAAYIQLIYPVTNFQK

SEQ ID NO: 1435 - protein, 330 aa, synthetic construct
  REGION 1..330: note = IL1R2 (P27930) ECD
FTLQPAAHTGAARSCRFRGRHYKREFRLEGEPVALRCPQVPYWLWASVSPRINLTWHKNDSARTVPGEEETRMWAQDGALWLLPALQEDSGTYVCTTRNASYCDKMSIELRVFENTDAFLPFISYPQILTLSTSGVLVCPDLSEFTRDKTDVKIQWYKDSLLLDKDNEKFLSVRGTTHLLVHDVALEDAGYYRCVLTFAHEGQQYNITRSIELRIKKKKEETIPVIISPLKTISASLGSRLTIPCKVFLGTGTPLTTMLWWTANDTHIESAYPGGRVTEGPRQEYSENNENYIEVPLIFDPVTREDLHMDFKCVVHNTLSFQTLRTTVKE

SEQ ID NO: 1436 - protein, 347 aa, synthetic construct
  REGION 1..347: note = IL1RAP (Q9NPH3) ECD
SERCDDWGLDTMRQIQVFEDEPARIKCPLFEHFLKFNYSTAHSAGLTLIWYWTRQDRDLEEPINFRLPENRISKEKDVLWFRPTLLNDTGNYTCMLRNTTYCSKVAFPLEVVQKDSCFNSPMKLPVHKLYIEYGIQRITCPNVDGYFPSSVKPTITWYMGCYKIQNFNNVIPEGMNLSFLIALISNNGNYTCVVTYPENGRTFHLTRTLTVKVVGSPKNAVPPVIHSPNDHVVYEKEPGEELLIPCTVYFSFLMDSRNEVWWTIDGKKPDDITIDVTINESISHSRTEDETRTQILSIKKVTSEDLKRSYVCHARSAKGEVAKAAKVKQKVPAPRYTVELACGFGAT

SEQ ID NO: 1437 - protein, 339 aa, synthetic construct
  REGION 1..339: note = IL1RAPL1 (Q9NZN1) ECD
LKVVTKRGSADGCTDWSIDIKKYQVLVGEPVRIKCALFYGYIRTNYSLAQSAGLSLMWYKSSGPGDFEEPIAFDGSRMSKEEDSIWFRPTLLQDSGLYACVIRNSTYCMKVSISLTVGENDTGLCYNSKMKYFEKAELSKSKEISCRDIEDFLLPTREPEILWYKECRTKTWRPSIVFKRDTLLIREVREDDIGNYTCELKYGGFVVRRTTELTVTAPLTDKPPKLLYPMESKLTIQETQLGDSANLTCRAFFGYSGDVSPLIYWMKGEKFIEDLDENRVWESDIRILKEHLGEQEVSISLIVDSVEEGDLGNYSCYVENGNGRRHASVLLHKRELMYT

SEQ ID NO: 1438 - protein, 338 aa, synthetic construct
  REGION 1..338: note = IL1RAPL2 (Q9NP60) ECD
TNLKMVSKRNSVDGCIDWSVDLKTYMALAGEPVRVKCALFYSYIRTNYSTAQSTGLRLMWYKNKGDLEEPIIFSEVRMSKEEDSIWFHSAEAQDSGFYTCVLRNSTYCMKVSMSLTVAENESGLCYNSRIRYLEKSEVTKRKEISCPDMDDFKKSDQEPDVVWYKECKPKMWRSIIIQKGNALLIQEVQEEDGGNYTCELKYEGKLVRRTTELKVTALLTDKPPKPLFPMENQPSVIDVQLGKPLNIPCKAFFGFSGESGPMIYWMKGEKFIEELAGHIREGEIRLLKEHLGEKEVELALIFDSVVEADLANYTCHVENRNGRKHASVLLRKKDLIYK

SEQ ID NO: 1439 - protein, 310 aa, synthetic construct
  REGION 1..310: note = IL1RL1 (Q01638) ECD
KFSKQSWGLENEALIVRCPRQGKPSYTVDWYYSQTNKSIPTQERNRVFASGQLLKFLPAAVADSGIYTCIVRSPTFNRTGYANVTIYKKQSDCNVPDYLMYSTVSGSEKNSKIYCPTIDLYNWTAPLEWFKNCQALQGSRYRAHKSFLVIDNVMTEDAGDYTCKFIHNENGANYSVTATRSFTVKDEQGFSLFPVIGAPAQNEIKEVEIGKNANLTCSACFGKGTQFLAAVLWQLNGTKITDFGEPRIQQEEGQNQSFSNGLACLDMVLRIADVKEEDLLLQYDCLALNLHGLRRHTVRLSRKNPIDHHS

SEQ ID NO: 1440 - protein, 316 aa, synthetic construct
  REGION 1..316: note = IL1RL2 (Q9HB29) ECD
DGCKDIFMKNEILSASQPFAFNCTFPPITSGEVSVTWYKNSSKIPVSKIIQSRIHQDETWILFLPMEWGDSGVYQCVIKGRDSCHRIHVNLTVFEKHWCDTSIGGLPNLSDEYKQILHLGKDDSLTCHLHFPKSCVLGPIKWYKDCNEIKGERFTVLETRLLVSNVSAEDRGNYACQAILTHSGKQYEVLNGITVSITERAGYGGSVPKIIYPKNHSIEVQLGTTLIVDCNVTDTKDNTNLRCWRVNNTLVDDYYDESKRIREGVETHVSFREHNLYTVNITFLEVKMEDYGLPFMCHAGVSTAYIILQLPAPDFR

SEQ ID NO: 1441 - protein, 221 aa, synthetic construct
  REGION 1..221: note = IL20RA (Q9UHF4) ECD
VPCVSGGLPKPANITFLSINMKNVLQWTPPEGLQGVKVTYTVQYFIYGQKKWLNKSECRNINRTYCDLSAETSDYEHQYYAKVKAIWGTKCSKWAESGRFYPFLETQIGPPEVALTTDEKSISVVLTAPEKWKRNPEDLPVSMQQIYSNLKYNVSVLNTKSNRTWSQCVTNHTLVLTWLEPNTLYCVHVESFVPGPPRRAQPSEKQCARTLKDQSSEFKAK

SEQ ID NO: 1442 - protein, 204 aa, synthetic construct
  REGION 1..204: note = IL20RB (Q6UXL0) ECD
DEVAILPAPQNLSVLSTNMKHLLMWSPVIAPGETVYYSVEYQGEYESLYTSHIWIPSSWCSLTEGPECDVTDDITATVPYNLRVRATLGSQTSAWSILKHPFNRNSTILTRPGMEITKDGFHLVIELEDLGPQFEFLVAYWRREPGAEEHVKMVRSGGIPVHLETMEPGAAYCVKAQTFVKAIGRYSAFSQTECVEVQGEAIPL

SEQ ID NO: 1443 - protein, 213 aa, synthetic construct
  REGION 1..213: note = IL21R (Q9HBE5) ECD
CPDLVCYTDYLQTVICILEMWNLHPSTLTLTWQDQYEELKDEATSCSLHRSAHNATHATYTCHMDVFHFMADDIFSVNITDQSGNYSQECGSFLLAESIKPAPPFNVTVTFSGQYNISWRSDYEDPAFYMLKGKLQYELQYRNRGDPWAVSPRRKLISVDSRSVSLLPLEFRKDSSYELQVRAGPMPGSSYQGTWSEWSDPVIFQTQSEELKE

SEQ ID NO: 1444 - protein, 213 aa, synthetic construct
  REGION 1..213: note = IL22RA1 (Q8N6P7) ECD
HAPEDPSDLLQHVKFQSSNFENILTWDSGPEGTPDTVYSIEYKTYGERDWVAKKGCQRITRKSCNLTVETGNLTELYYARVTAVSAGGRSATKMTDRFSSLQHTTLKPPDVTCISKVRSIQMIVHPTPTPIRAGDGHRLTLEDIFHDLFYHLELQVNRTYQMHLGGKQREYEFFGLTPDTEFLGTIMICVPTWAKESAPYMCRVKTLPDRTWT

SEQ ID NO: 1445 - protein, 332 aa, synthetic construct; identical to SEQ ID NO: 874
  REGION 1..332: note = IL23R (Q5VWK5) ECD

SEQ ID NO: 1446 - protein, 484 aa, synthetic construct
  REGION 1..484: note = IL27RA (Q6UWB1) ECD
QGSAGPLQCYGVGPLGDLNCSWEPLGDLGAPSELHLQSQKYRSNKTQTVAVAAGRSWVAIPREQLTMSDKLLVWGTKAGQPLWPPVFVNLETQMKPNAPRLGPDVDFSEDDPLEATVHWAPPTWPSHKVLICQFHYRRCQEAAWTLLEPELKTIPLTPVEIQDLELATGYKVYGRCRMEKEEDLWGEWSPILSFQTPPSAPKDVWVSGNLCGTPGGEEPLLLWKAPGPCVQVSYKVWFWVGGRELSPEGITCCCSLIPSGAEWARVSAVNATSWEPLTNLSLVCLDSASAPRSVAVSSIAGSTELLVTWQPGPGEPLEHVVDWARDGDPLEKLNWVRLPPGNLSALLPGNFTVGVPYRITVTAVSASGLASASSVWGFREELAPLVGPTLWRLQDAPPGTPAIAWGEVPRHQLRGHLTHYTLCAQSGTSPSVCMNVSGNTQSVTLPDLPWGPCELWVTASTIAGQGPPGPILRLHLPDNTLRWK

SEQ ID NO: 1447 - protein, 219 aa, synthetic construct
  REGION 1..219: note = IL2RA (P01589) ECD
ELCDDDPPEIPHATFKAMAYKEGTMLNCECKRGFRRIKSGSLYMLCTGNSSHSSWDNQCQCTSSATRNTTKQVTPQPEEQKERKTTEMQSPMQPVDQASLPGHCREPPPWENEATERIYHFVVGQMVYYQCVQGYRALHRGPAESVCKMTHGKTRWTQPQLICTGEMETSQFPGEEKPQASPEGRPESETSCLVTTTDFQIQTEMAATMETSIFTTEYQ

SEQ ID NO: 1448 - protein, 214 aa, synthetic construct
  REGION 1..214: note = IL2RB (P14784) ECD
AVNGTSQFTCFYNSRANISCVWSQDGALQDTSCQVHAWPDRRRWNQTCELLPVSQASWACNLILGAPDSQKLTTVDIVTLRVLCREGVRWRVMAIQDFKPFENLRLMAPISLQVVHVETHRCNISWEISQASHYFERHLEFEARTLSPGHTWEEAPLLTLKQKQEWICLETLTPDTQYEFQVRVKPLQGEFTTWSPWSQPLAFRTKPAALGKDT

SEQ ID NO: 1449 - protein, 240 aa, synthetic construct
  REGION 1..240: note = IL2RG (P31785) ECD
LNTTILTPNGNEDTTADFFLTTMPTDSLSVSTLPLPEVQCFVFNVEYMNCTWNSSSEPQPTNLTLHYWYKNSDNDKVQKCSHYLFSEEITSGCQLQKKEIHLYQTFVVQLQDPREPRRQATQMLKLQNLVIPWAPENLTLHKLSESQLELNWNNRFLNHCLEHLVQYRTDWDHSWTEQSVDYRHKFSLPSVDGQKRYTFRVRSRFNPLCGSAQHWSEWSHPIHWGSNTSKENPFLFALEA

SEQ ID NO: 1450 - protein, 500 aa, synthetic construct
  REGION 1..500: note = IL31RA (Q8NI17) ECD
ALPAKPENISCVYYYRKNLTCTWSPGKETSYTQYTVKRTYAFGEKHDNCTTNSSTSENRASCSFFLPRITIPDNYTIEVEAENGDGVIKSHMTYWRLENIAKTEPPKIFRVKPVLGIKRMIQIEWIKPELAPVSSDLKYTLRFRTVNSTSWMEVNFAKNRKDKNQTYNLTGLQPFTEYVIALRCAVKESKFWSDWSQEKMGMTEEEAPCGLELWRVLKPAEADGRRPVRLLWKKARGAPVLEKTLGYNIWYYPESNTNLTETMNTTNQQLELHLGGESFWVSMISYNSLGKSPVATLRIPAIQEKSFQCIEVMQACVAEDQLVVKWQSSALDVNTWMIEWFPDVDSEPTTLSWESVSQATNWTIQQDKLKPFWCYNISVYPMLHDKVGEPYSIQAYAKEGVPSEGPETKVENIGVKTVTITWKEIPKSERKGIICNYTIFYQAEGGKGFSKTVNSSILQYGLESLKRKTSYIVQVMASTSAGGTNGTSINFKTLSFSVFE

SEQ ID NO: 1451 - protein, 287 aa, synthetic construct
  REGION 1..287: note = IL3RA (P26951) ECD
TKEDPNPPITNLRMKAKAQQLTWDLNRNVTDIECVKDADYSMPAVNNSYCQFGAISLCEVTNYTVRVANPPFSTWILFPENSGKPWAGAENLTCWIHDVDFLSCSWAVGPGAPADVQYDLYLNVANRRQQYECLHYKTDAQGTRIGCRFDDISRLSSGSQSSHILVRGRSAAFGIPCTDKFVVFSQIEILTPPNMTAKCNKTHSFMHWKMRSHFNRKFRYELQIQKRMQPVITEQVRDRTSFQLLNPGTYTVQIRARERVYEFLSAWSTPQRFECDQEEGANTRAWR

SEQ ID NO: 1452 - protein, 207 aa, synthetic construct
  REGION 1..207: note = IL4R (P24394) ECD
MKVLQEPTCVSDYMSISTCEWKMNGPTNCSTELRLLYQLVFLLSEAHTCIPENNGGAGCVCHLLMDDVVSADNYTLDLWAGQQLLWKGSFKPSEHVKPRAPGNLTVHTNVSDTLLLTWSNPYPPDNYLYNHLTYAVNIWSENDPADFRIYNVTYLEPSLRIAASTLKSGISYRARVRAWAQCYNTTWSEWSPSTKWHNSYREPFEQH

SEQ ID NO: 1453 - protein, 322 aa, synthetic construct
  REGION 1..322: note = IL5RA (Q01344) ECD
DLLPDEKISLLPPVNFTIKVTGLAQVLLQWKPNPDQEQRNVNLEYQVKINAPKEDDYETRITESKCVTILHKGFSASVRTILQNDHSLLASSWASAELHAPPGSPGTSIVNLTCTTNTTEDNYSRLRSYQVSLHCTWLVGTDAPEDTQYFLYYRYGSWTEECQEYSKDTLGRNIACWFPRTFILSKGRDWLAVLVNGSSKHSAIRPFDQLFALHAIDQINPPLNVTAEIEGTRLSIQWEKPVSAFPIHCFDYEVKIHNTRNGYLQIEKLMTNAFISIIDDLSKYDVQVRAAVSSMCREAGLWSEWSQPIYVGNDEHKPLREW

SEQ ID NO: 1454 - protein, 346 aa, synthetic construct
  REGION 1..346: note = IL6R (P08887) ECD
LAPRRCPAQEVARGVLTSLPGDSVTLTCPGVEPEDNATVHWVLRKPAAGSHPSRWAGMGRRLLLRSVQLHDSGNYSCYRAGRPAGTVHLLVDVPPEEPQLSCFRKSPLSNVVCEWGPRSTPSLTTKAVLLVRKFQNSPAEDFQEPCQYSQESQKFSCQLAVPEGDSSFYIVSMCVASSVGSKFSKTQTFQGCGILQPDPPANITVTAVARNPRWLSVTWQDPHSWNSSFYRLRFELRYRAERSKTFTTWMVKDLQHHCVIHDAWSGLRHVVQLRAQEEFGQGEWSEWSPEAMGTPWTESRSPPAENEVSTPMQALTTNKDDDNILFRDSANATSLPVQDSSSVPLP

SEQ ID NO: 1455 - protein, 597 aa, synthetic construct
  REGION 1..597: note = IL6ST (P40189) ECD
ELLDPCGYISPESPVVQLHSNFTAVCVLKEKCMDYFHVNANYIVWKTNHFTIPKEQYTIINRTASSVTFTDIASLNIQLTCNILTFGQLEQNVYGITIISGLPPEKPKNLSCIVNEGKKMRCEWDGGRETHLETNFTLKSEWATHKFADCKAKRDTPTSCTVDYSTVYFVNIEVWVEAENALGKVTSDHINFDPVYKVKPNPPHNLSVINSEELSSILKLTWTNPSIKSVIILKYNIQYRTKDASTWSQIPPEDTASTRSSFTVQDLKPFTEYVFRIRCMKEDGKGYWSDWSEEASGITYEDRPSKAPSFWYKIDPSHTQGYRTVQLVWKTLPPFEANGKILDYEVTLTRWKSHLQNYTVNATKLTVNLTNDRYLATLTVRNLVGKSDAAVLTIPACDFQATHPVMDLKAFPKDNMLWVEWTTPRESVKKYILEWCVLSDKAPCITDWQQEDGTVHRTYLRGNLAESKCYLITVTPVYADGPGSPESIKAYLKQAPPSKGPTVRTKKVGKNEAVLEWDQLPVDVQNGFIRNYTIFYRTIIGNETAVNVDSSHTEYTLSSLTSDTLYMVRMAAYTDEGGKDGPEFTFTTPKFAQGEIE

SEQ ID NO: 1456 - protein, 219 aa, synthetic construct
  REGION 1..219: note = IL7R (P16871) ECD
ESGYAQNGDLEDAELDDYSFSCYSQLEVNGSQHSLTCAFEDPDVNITNLEFEICGALVEVKCLNFRKLQEIYFIETKKFLLIGKSNICVKVGEKSLTCKKIDLTTIVKPEAPFDLSVVYREGANDFVVTFNTSHLQKKYVKVLMHDVAYRQEKDENKWTHVNLSSTKLTLLQRKLQPAAMYEIKVRSIPDHYFKGFWSEWSPSYYFRTPEINNSSGEMD

SEQ ID NO: 1457 - protein, 230 aa, synthetic construct; identical to SEQ ID NO: 856
  REGION 1..230: note = IL9R (Q01113) ECD

SEQ ID NO: 1458 - protein, 144 aa, synthetic construct
  REGION 1..144: note = ILDR1 (Q86SU0) ECD
LLVTVQHTERYVTLFASIILKCDYTTSAQLQDVVVTWRFKSFCKDPIFDYYSASYQAALSLGQDPSNDCNDNQREVRIVAQRRGQNEPVLGVDYRQRKITIQNRADLVINEVMWWDHGVYYCTIEAPGDTSGDPDKEVKLIVLH

SEQ ID NO: 1459 - protein, 1077 aa, synthetic construct
  REGION 1..1077: note = IMPG2 (Q9BZV3) ECD
DFPSLTAQTYLSIEEIQEPKSAVSFLLPEESTDLSLATKKKQPLDRRETERQWLIRRRRSILFPNGVKICPDESVAEAVANHVKYFKVRVCQEAVWEAFRTFWDRLPGREEYHYWMNLCEDGVTSIFEMGTNFSESVEHRSLIMKKLTYAKETVSSSELSSPVPVGDTSTLGDTTLSVPHPEVDAYEGASESSLERPEESISNEIENVIEEATKPAGEQIAEFSIHLLGKQYREELQDSSSFHHQHLEEEFISEVENAFTGLPGYKEIRVLEFRSPKENDSGVDVYYAVTFNGEAISNTTWDLISLHSNKVENHGLVELDDKPTVVYTISNFRDYIAETLQQNFLLGNSSLNPDPDSLQLINVRGVLRHQTEDLVWNTQSSSLQATPSSILDNTFQAAWPSADESITSSIPPLDFSSGPPSATGRELWSESPLGDLVSTHKLAFPSKMGLSSSPEVLEVSSLTLHSVTPAVLQTGLPVASEERTSGSHLVEDGLANVEESEDFLSIDSLPSSSFTQPVPKETIPSMEDSDVSLTSSPYLTSSIPFGLDSLTSKVKDQLKVSPFLPDASMEKELIFDGGLGSGSGQKVDLITWPWSETSSEKSAEPLSKPWLEDDDSLLPAEIEDKKLVLVDKMDSTDQISKHSKYEHDDRSTHFPEEEPLSGPAVPIFADTAAESASLTLPKHISEVPGVDDYSVTKAPLILTSVAISASTDKSDQADAILREDMEQITESSNYEWFDSEVSMVKPDMQTLWTILPESERVWTRTSSLEKLSRDILASTPQSADRLWLSVTQSTKLPPTTISTLLEDEVIMGVQDISLELDRIGTDYYQPEQVQEQNGKVGSYVEMSTSVHSTEMVSVAWPTEGGDDLSYTQTSGALVVFFSLRVTNMMFSEDLFNKNSLEYKALEQRFLELLVPYLQSNLTGFQNLEILNFRNGSIVVNSRMKFANSVPPNVNNAVYMILEDFCTTAYNTMNLAIDKYSLDVESGDEANPCKFQACNEFSECLVNPWSGEAKCRCFPGYLSVEERPCQSLCDLQPDFCLNDGKCDIMPGHGAICRCRVGENWWYRGKHCEEFVSEP

SEQ ID NO: 1460 - protein, 929 aa, synthetic construct
  REGION 1..929: note = INSR (P06213) ECD
HLYPGEVCPGMDIRNNLTRLHELENCSVIEGHLQILLMFKTRPEDFRDLSFPKLIMITDYLLLFRVYGLESLKDLFPNLTVIRGSRLFFNYALVIFEMVHLKELGLYNLMNITRGSVRIEKNNELCYLATIDWSRILDSVEDNYIVLNKDDNEECGDICPGTAKGKTNCPATVINGQFVERCWTHSHCQKVCPTICKSHGCTAEGLCCHSECLGNCSQPDDPTKCVACRNFYLDGRCVETCPPPYYHFQDWRCVNFSFCQDLHHKCKNSRRQGCHQYVIHNNKCIPECPSGYTMNSSNLLCTPCLGPCPKVCHLLEGEKTIDSVTSAQELRGCTVINGSLIINIRGGNNLAAELEANLGLIEEISGYLKIRRSYALVSLSFFRKLRLIRGETLEIGNYSFYALDNQNLRQLWDWSKHNLTITQGKLFFHYNPKLCLSEIHKMEEVSGTKGRQERNDIALKTNGDQASCENELLKFSYIRTSFDKILLRWEPYWPPDFRDLLGFMLFYKEAPYQNVTEFDGQDACGSNSWTVVDIDPPLRSNDPKSQNHPGWLMRGLKPWTQYAIFVKTLVTFSDERRTYGAKSDIIYVQTDATNPSVPLDPISVSNSSSQIILKWKPPSDPNGNITHYLVFWERQAEDSELFELDYCLKGLKLPSRTWSPPFESEDSQKHNQSEYEDSAGECCSCPKTDSQILKELEESSFRKTFEDYLHNVVFVPRKTSSGTGAEDPRPSRKRRSLGDVGNVTVAVPTVAAFPNTSSTSVPTSPEEHRPFEKVVNKESLVISGLRHFTGYRIELQACNQDTPEERCSVAAYVSARTMPEAKADDIVGPVTHEIFENNVVHLMWQEPKEPNGLIVLYEVSYRRYGDEELHLCVSRKHFALERGCRLRGLSPGNYSVRIRATSLAGNGSWTEPTYFYVTDYLDVPSNIAK

SEQ ID NO: 1461 - protein, 175 aa, synthetic construct
  REGION 1..175: note = INSRR (P14616) ECD
AAGPLRLGGNSSDFEIQEDKVPRERAVLSGLRHFTEYRIDIHACNHAAHTVGCSAATFVFARTMPHREADGIPGKVAWEASSKNSVLLRWLEPPDPNGLILKYEIKYRRLGEEATVLCVSRLRYAKFGGVHLALLPPGNYSARVRATSLAGNGSWTDSVAFYILGPEEEDAGGLH

SEQ ID NO: 1462 - protein, 571 aa, synthetic construct
  REGION 1..571: note = ISLR2 (Q6UXK2) ECD
SCPEPCACVDKYAHQFADCAYKELREVPEGLPANVTTLSLSANKITVLRRGAFADVTQVTSLWLAHNEVRTVEPGALAVLSQLKNLDLSHNFISSFPWSDLRNLSALQLLKMNHNRLGSLPRDALGALPDLRSLRINNNRLRTLAPGTFDALSALSHLQLYHNPFHCGCGLVWLQAWAASTRVSLPEPDSIACASPPALQGVPVYRLPALPCAPPSVHLSAEPPLEAPGTPLRAGLAFVLHCIADGHPTPRLQWQLQIPGGTVVLEPPVLSGEDDGVGAEEGEGEGDGDLLTQTQAQTPTPAPAWPAPPATPRFLALANGSLLVPLLSAKEAGVYTCRAHNELGANSTSIRVAVAATGPPKHAPGAGGEPDGQAPTSERKSTAKGRGNSVLPSKPEGKIKGQGLAKVSILGETETEPEEDTSEGEEAEDQILADPAEEQRCGNGDPSRYVSNHAFNQSAELKPHVFELGVIALDVAEREARVQLTPLAARWGPGPGGAGGAPRPGRRPLRLLYLCPAGGGAAVQWSRVEEGVNAYWFRGLRPGTNYSVCLALAGEACHVQVVFSTKKELPS

SEQ ID NO: 1463 - protein, 533 aa, synthetic construct
  REGION 1..533: note = ITFG1 (Q8TB96) ECD
LHNVTAELFGAEAWGTLAAFGDLNSDKQTDLFVLRERNDLIVFLADQNAPYFKPKVKVSFKNHSALITSVVPGDYDGDSQMDVLLTYLPKNYAKSELGAVIFWGQNQTLDPNNMTILNRTFQDEPLIMDFNGDLIPDIFGITNESNQPQILLGGNLSWHPALTTTSKMRIPHSHAFIDLTEDFTADLFLTTLNATTSTFQFEIWENLDGNFSVSTILEKPQNMMVVGQSAFADFDGDGHMDHLLPGCEDKNCQKSTIYLVRSGMKQWVPVLQDFSNKGTLWGFVPFVDEQQPTEIPIPITLHIGDYNMDGYPDALVILKNTSGSNQQAFLLENVPCNNASCEEARRMFKVYWELTDLNQIKDAMVATFFDIYEDGILDIVVLSKGYTKNDFAIHTLKNNFEADAYFVKVIVLSGLCSNDCPRKITPFGVNQPGPYIMYTTVDANGYLKNGSAGQLSQSAHLALQLPYNVLGLGRSANFLDHLYVGIPRPSGEKSIRKQEWTAIIPNSQLIVIPYPHNVPRSWSAKLYLTPSNI

SEQ ID NO: 1464 - protein, 1113 aa, synthetic construct
  REGION 1..1113: note = ITGA1 (P56199) ECD
FNVDVKNSMTFSGPVEDMFGYTVQQYENEEGKWVLIGSPLVGQPKNRTGDVYKCPVGRGESLPCVKLDLPVNTSIPNVTEVKENMTFGSTLVTNPNGGFLACGPLYAYRCGHLHYTTGICSDVSPTFQVVNSIAPVQECSTQLDIVIVLDGSNSIYPWDSVTAFLNDLLERMDIGPKQTQVGIVQYGENVTHEFNLNKYSSTEEVLVAAKKIVQRGGRQTMTALGIDTARKEAFTEARGARRGVKKVMVIVTDGESHDNHRLKKVIQDCEDENIQRFSIAILGSYNRGNLSTEKFVEEIKSIASEPTEKHFFNVSDELALVTIVKTLGERIFALEATADQSAASFEMEMSQTGFSAHYSQDWVMLGAVGAYDWNGTVVMQKASQIIIPRNTTFNVESTKKNEPLASYLGYTVNSATASSGDVLYIAGQPRYNHTGQVIIYRMEDGNIKILQTLSGEQIGSYFGSILTTTDIDKDSNTDILLVGAPMYMGTEKEEQGKVYVYALNQTRFEYQMSLEPIKQTCCSSRQHNSCTTENKNEPCGARFGTAIAAVKDLNLDGFNDIVIGAPLEDDHGGAVYIYHGSGKTIRKEYAQRIPSGGDGKTLKFFGQSIHGEMDLNGDGLTDVTIGGLGGAALFWSRDVAVVKVTMNFEPNKVNIQKKNCHMEGKETVCINATVCFDVKLKSKEDTIYEADLQYRVTLDSLRQISRSFFSGTQERKVQRNITVRKSECTKHSFYMLDKHDFQDSVRITLDFNLTDPENGPVLDDSLPNSVHEYIPFAKDCGNKEKCISDLSLHVATTEKDLLIVRSQNDKFNVSLTVKNTKDSAYNTRTIVHYSPNLVFSGIEAIQKDSCESNHNITCKVGYPFLRRGEMVTFKILFQFNTSYLMENVTIYLSATSDSEEPPETLSDNVVNISIPVKYEVGLQFYSSASEYHISIAANETVPEVINSTEDIGNEINIFYLIRKSGSFPMPELKLSISFPNMTSNGYPVLYPTGLSSSENANCRPHIFEDPFSINSGKKMTTSTDHLKRGTILDCNTCKFATITCNLTSSDISQVNVSLILWKPTFIKSYFSSLNLTIRGELRSENASLVLSSSNQKRELAIQISKDGLPGRVP

SEQ ID NO: 1465 - protein, 1100 aa, synthetic construct
  REGION 1..1100: note = ITGA10 (O75578) ECD
FNLDEHHPRLFPGPPEAEFGYSVLQHVGGGQRWMLVGAPWDGPSGDRRGDVYRCPVGGAHNAPCAKGHLGDYQLGNSSHPAVNMHLGMSLLETDGDGGFMACAPLWSRACGSSVFSSGICARVDASFQPQGSLAPTAQRCPTYMDVVIVLDGSNSIYPWSEVQTFLRRLVGKLFIDPEQIQVGLVQYGESPVHEWSLGDFRTKEEVVRAAKNLSRREGRETKTAQAIMVACTEGFSQSHGGRPEAARLLVVVTDGESHDGEELPAALKACEAGRVTRYGIAVLGHYLRRQRDPSSFLREIRTIASDPDERFFFNVTDEAALTDIVDALGDRIFGLEGSHAENESSFGLEMSQIGFSTHRLKDGILFGMVGAYDWGGSVLWLEGGHRLFPPRMALEDEFPPALQNHAAYLGYSVSSMLLRGGRRLFLSGAPRFRHRGKVIAFQLKKDGAVRVAQSLQGEQIGSYFGSELCPLDTDRDGTTDVLLVAAPMFLGPQNKETGRVYVYLVGQQSLLTLQGTLQPEPPQDARFGFAMGALPDLNQDGFADVAVGAPLEDGHQGALYLYHGTQSGVRPHPAQRIAAASMPHALSYFGRSVDGRLDLDGDDLVDVAVGAQGAAILLSSRPIVHLTPSLEVTPQAISVVQRDCRRRGQEAVCLTAALCFQVTSRTPGRWDHQFYMRFTASLDEWTAGARAAFDGSGQRLSPRRLRLSVGNVTCEQLHFHVLDTSDYLRPVALTVTFALDNTTKPGPVLNEGSPTSIQKLVPFSKDCGPDNECVTDLVLQVNMDIRGSRKAPFVVRGGRRKVLVSTTLENRKENAYNTSLSLIFSRNLHLASLTPQRESPIKVECAAPSAHARLCSVGHPVFQTGAKVTFLLEFEFSCSSLLSQVFVKLTASSDSLERNGTLQDNTAQTSAYIQYEPHLLFSSESTLHRYEVHPYGTLPVGPGPEFKTTLRVQNLGCYVVSGLIISALLPAVAHGGNYFLSLSQVITNNASCIVQNLTEPPGPPVHPEELQHTNRLNGSNTQCQVVRCHLGQLAKGTEVSVGLLRLVHNEFFRRAKFKSLTVVSTFELGTEEGSVLQLTEASRWSESLLEVVQTRPILIS

SEQ ID NO: 1466 - protein, 1119 aa, synthetic construct
  REGION 1..1119: note = ITGA11 (Q9UKX5) ECD
FNMDTRKPRVIPGSRTAFFGYTVQQHDISGNKWLVVGAPLETNGYQKTGDVYKCPVIHGNCTKLNLGRVTLSNVSERKDNMRLGLSLATNPKDNSFLACSPLWSHECGSSYYTTGMCSRVNSNFRFSKTVAPALQRCQTYMDIVIVLDGSNSIYPWVEVQHFLINILKKFYIGPGQIQVGVVQYGEDVVHEFHLNDYRSVKDVVEAASHIEQRGGTETRTAFGIEFARSEAFQKGGRKGAKKVMIVITDGESHDSPDLEKVIQQSERDNVTRYAVAVLGYYNRRGINPETFLNEIKYIASDPDDKHFFNVTDEAALKDIVDALGDRIFSLEGTNKNETSFGLEMSQTGFSSHVVEDGVLLGAVGAYDWNGAVLKETSAGKVIPLRESYLKEFPEELKNHGAYLGYTVTSVVSSRQGRVYVAGAPRFNHTGKVILFTMHNNRSLTIHQAMRGQQIGSYFGSEITSVDIDGDGVTDVLLVGAPMYFNEGRERGKVYVYELRQNLFVYNGTLKDSHSYQNARFGSSIASVRDLNQDSYNDVVVGAPLEDNHAGAIYIFHGFRGSILKTPKQRITASELATGLQYFGCSIHGQLDLNEDGLIDLAVGALGNAVILWSRPVVQINASLHFEPSKINIFHRDCKRSGRDATCLAAFLCFTPIFLAPHFQTTTVGIRYNATMDERRYTPRAHLDEGGDRFTNRAVLLSSGQELCERINFHVLDTADYVKPVTFSVEYSLEDPDHGPMLDDGWPTTLRVSVPFWNGCNEDEHCVPDLVLDARSDLPTAMEYCQRVLRKPAQDCSAYTLSFDTTVFIIESTRQRVAVEATLENRGENAYSTVLNISQSANLQFASLIQKEDSDGSIECVNEERRLQKQVCNVSYPFFRAKAKVAFRLDFEFSKSIFLHHLEIELAAGSDSNERDSTKEDNVAPLRFHLKYEADVLFTRSSSLSHYEVKPNSSLERYDGIGPPFSCIFRIQNLGLFPIHGMMMKITIPIATRSGNRLLKLRDFLTDEANTSCNIWGNSTEYRPTPVEEDLRRAPQLNHSNSDVVSINCNIRLVPNQEINFHLLGNLWLRSLKALKYKSMKIMVNAALQRQFHSPFIFREEDPSRQIVFEISKQEDWQVP

SEQ ID NO: 1467 - protein, 1103 aa, synthetic construct
  REGION 1..1103: note = ITGA2 (P17301) ECD
YNVGLPEAKIFSGPSSEQFGYAVQQFINPKGNWLLVGSPWSGFPENRMGDVYKCPVDLSTATCEKLNLQTSTSIPNVTEMKTNMSLGLILTRNMGTGGFLTCGPLWAQQCGNQYYTTGVCSDISPDFQLSASFSPATQPCPSLIDVVVVCDESNSIYPWDAVKNFLEKFVQGLDIGPTKTQVGLIQYANNPRVVFNLNTYKTKEEMIVATSQTSQYGGDLTNTFGAIQYARKYAYSAASGGRRSATKVMVVVTDGESHDGSMLKAVIDQCNHDNILRFGIAVLGYLNRNALDTKNLIKEIKAIASIPTERYFFNVSDEAALLEKAGTLGEQIFSIEGTVQGGDNFQMEMSQVGFSADYSSQNDILMLGAVGAFGWSGTIVQKTSHGHLIFPKQAFDQILQDRNHSSYLGYSVAAISTGESTHFVAGAPRANYTGQIVLYSVNENGNITVIQAHRGDQIGSYFGSVLCSVDVDKDTITDVLLVGAPMYMSDLKKEEGRVYLFTIKKGILGQHQFLEGPEGIENTRFGSAIAALSDINMDGFNDVIVGSPLENQNSGAVYIYNGHQGTIRTKYSQKILGSDGAFRSHLQYFGRSLDGYGDLNGDSITDVSIGAFGQVVQLWSQSIADVAIEASFTPEKITLVNKNAQIILKLCFSAKFRPTKQNNQVAIVYNITLDADGFSSRVTSRGLFKENNERCLQKNMVVNQAQSCPEHIIYIQEPSDVVNSLDLRVDISLENPGTSPALEAYSETAKVFSIPFHKDCGEDGLCISDLVLDVRQIPAAQEQPFIVSNQNKRLTFSVTLKNKRESAYNTGIVVDFSENLFFASFSLPVDGTEVTCQVAASQKSVACDVGYPALKREQQVTFTINFDFNLQNLQNQASLSFQALSESQEENKADNLVNLKIPLLYDAEIHLTRSTNINFYEISSDGNVPSIVHSFEDVGPKFIFSLKVTTGSVPVSMATVIIHIPQYTKEKNPLMYLTGVQTDKAGDISCNADINPLKIGQTSSSVSFKSENFRHTKELNCRTASCSNVTCWLKDVHMKGEYFVNVTTRIWNGTFASSTFQTVQLTAAAEINTYNPEIYVIEDNTVTIPLMIMKPDEKAEVPT

SEQ ID NO: 1468 - protein, 962 aa, synthetic construct
  REGION 1..962: note = ITGA2B (P08514) ECD
LNLDPVQLTFYAGPNGSQFGFSLDFHKDSHGRVAIVVGAPRTLGPSQEETGGVFLCPWRAEGGQCPSLLFDLRDETRNVGSQTLQTFKARQGLGASVVSWSDVIVACAPWQHWNVLEKTEEAEKTPVGSCFLAQPESGRRAEYSPCRGNTLSRIYVENDFSWDKRYCEAGFSSVVTQAGELVLGAPGGYYFLGLLAQAPVADIFSSYRPGILLWHVSSQSLSFDSSNPEYFDGYWGYSVAVGEFDGDLNTTEYVVGAPTWSWTLGAVEILDSYYQRLHRLRGEQMASYFGHSVAVTDVNGDGRHDLLVGAPLYMESRADRKLAEVGRVYLFLQPRGPHALGAPSLLLTGTQLYGRFGSAIAPLGDLDRDGYNDIAVAAPYGGPSGRGQVLVFLGQSEGLRSRPSQVLDSPFPTGSAFGFSLRGAVDIDDNGYPDLIVGAYGANQVAVYRAQPVVKASVQLLVQDSLNPAVKSCVLPQTKTPVSCFNIQMCVGATGHNIPQKLSLNAELQLDRQKPRQGRRVLLLGSQQAGTTLNLDLGGKHSPICHTTMAFLRDEADFRDKLSPIVLSLNVSLPPTEAGMAPAVVLHGDTHVQEQTRIVLDCGEDDVCVPQLQLTASVTGSPLLVGADNVLELQMDAANEGEGAYEAELAVHLPQGAHYMRALSNVEGFERLICNQKKENETRVVLCELGNPMKKNAQIGIAMLVSVGNLEEAGESVSFQLQIRSKNSQNPNSKIVLLDVPVRAEAQVELRGNSFPASLVVAAEEGEREQNSLDSWGPKVEHTYELHNNGPGTVNGLHLSIHLPGQSQPSDLLYILDIQPQGGLQCFPQPPVNPLKVDWGLPIPSPSPIHPAHHKRDRRQIFLPEPEQPSRLQDPVLVSCDSAPCTVVQCDLQEMARGQRAMVTVLAFLWLPSLYQRPLDQFVLQSHAWFNVSSLPYAVPPLSLPRGEAQVWTQLLRALEER

SEQ ID NO: 1469 - protein, 959 aa, synthetic construct
  REGION 1..959: note = ITGA3 (P26006) ECD
FNLDTRFLVVKEAGNPGSLFGYSVALHRQTERQQRYLLLAGAPRELAVPDGYTNRTGAVYLCPLTAHKDDCERMNITVKNDPGHHIIEDMWLGVTVASQGPAGRVLVCAHRYTQVLWSGSEDQRRMVGKCYVRGNDLELDSSDDWQTYHNEMCNSNTDYLETGMCQLGTSGGFTQNTVYFGAPGAYNWKGNSYMIQRKEWDLSEYSYKDPEDQGNLYIGYTMQVGSFILHPKNITIVTGAPRHRHMGAVFLLSQEAGGDLRRRQVLEGSQVGAYFGSAIALADLNNDGWQDLLVGAPYYFERKEEVGGAIYVFMNQAGTSFPAHPSLLLHGPSGSAFGLSVASIGDINQDGFQDIAVGAPFEGLGKVYIYHSSSKGLLRQPQQVIHGEKLGLPGLATFGYSLSGQMDVDENFYPDLLVGSLSDHIVLLRARPVINIVHKTLVPRPAVLDPALCTATSCVQVELCFAYNQSAGNPNYRRNITLAYTLEADRDRRPPRLRFAGSESAVFHGFFSMPEMRCQKLELLLMDNLRDKLRPIIISMNYSLPLRMPDRPRLGLRSLDAYPILNQAQALENHTEVQFQKECGPDNKCESNLQMRAAFVSEQQQKLSRLQYSRDVRKLLLSINVTNTRTSERSGEDAHEALLTLVVPPALLLSSVRPPGACQANETIFCELGNPFKRNQRMELLIAFEVIGVTLHTRDLQVQLQLSTSSHQDNLWPMILTLLVDYTLQTSLSMVNHRLQSFFGGTVMGESGMKTVEDVGSPLKYEFQVGPMGEGLVGLGTLVLGLEWPYEVSNGKWLLYPTEITVHGNGSWPCRPPGDLINPLNLTLSDPGDRPSSPQRRRRQLDPGGGQGPPPVTLAAAKKAKSETVLTCATGRAHCVWLECPIPDAPVVTNVTVKARVWNSTFIEDYRDFDRVRVNGWATLFLRTSIPTINMENKTTWFSVDIDSELVEELPAEIE

SEQ ID NO: 1470 - protein, 943 aa, synthetic construct
  REGION 1..943: note = ITGA4 (P13612) ECD
NVDTESALLYQGPHNTLFGYSVVLHSHGANRWLLVGAPTANWLANASVINPGAIYRCRIGKNPGQTCEQLQLGSPNGEPCGKTCLEERDNQWLGVTLSRQPGENGSIVTCGHRWKNIFYIKNENKLPTGGCYGVPPDLRTELSKRIAPCYQDYVKKFGENFASCQAGISSFYTKDLIVMGAPGSSYWTGSLFVYNITTNKYKAFLDKQNQVKFGSYLGYSVGAGHFRSQHTTEVVGGAPQHEQIGKAYIFSIDEKELNILHEMKGKKLGSYFGASVCAVDLNADGFSDLLVGAPMQSTIREEGRVFVYINSGSGAVMNAMETNLVGSDKYAARFGESIVNLGDIDNDGFEDVAIGAPQEDDLQGAIYIYNGRADGISSTFSQRIEGLQISKSLSMFGQSISGQIDADNNGYVDVAVGAFRSDSAVLLRTRPVVIVDASLSHPESVNRTKFDCVENGWPSVCIDLTLCFSYKGKEVPGYIVLFYNMSLDVNRKAESPPRFYFSSNGTSDVITGSIQVSSREANCRTHQAFMRKDVRDILTPIQIEAAYHLGPHVISKRSTEEFPPLQPILQQKKEKDIMKKTINFARFCAHENCSADLQVSAKIGFLKPHENKTYLAVGSMKTLMLNVSLFNAGDDAYETTLHVKLPVGLYFIKILELEEKQINCEVTDNSGVVQLDCSIGYIYVDHLSRIDISFLLDVSSLSRAEEDLSITVHATCENEEEMDNLKHSRVTVAIPLKYEVKLTVHGFVNPTSFVYGSNDENEPETCMVEKMNLTFHVINTGNSMAPNVSVEIMVPNSFSPQTDKLFNILDVQTTTGECHFENYQRVCALEQQKSAMQTLKGIVRFLSKTDKRLLYCIKADPHCLNFLCNFGKMESGKEASVHIQLEGRPSILEMDETSALKFEIRATGFPEPNPRVIELNKDENVAHVLLEGLHHQRPKRYFT

SEQ ID NO: 1471 - protein, 954 aa, synthetic construct
  REGION 1..954: note = ITGA5 (P08648) ECD
FNLDAEAPAVLSGPPGSFFGFSVEFYRPGTDGVSVLVGAPKANTSQPGVLQGGAVYLCPWGASPTQCTPIEFDSKGSRLLESSLSSSEGEEPVEYKSLQWFGATVRAHGSSILACAPLYSWRTEKEPLSDPVGTCYLSTDNFTRILEYAPCRSDFSWAAGQGYCQGGFSAEFTKTGRVVLGGPGSYFWQGQILSATQEQIAESYYPEYLINLVQGQLQTRQASSIYDDSYLGYSVAVGEFSGDDTEDFVAGVPKGNLTYGYVTILNGSDIRSLYNFSGEQMASYFGYAVAATDVNGDGLDDLLVGAPLLMDRTPDGRPQEVGRVYVYLQHPAGIEPTPTLTLTGHDEFGRFGSSLTPLGDLDQDGYNDVAIGAPFGGETQQGVVFVFPGGPGGLGSKPSQVLQPLWAASHTPDFFGSALRGGRDLDGNGYPDLIVGSFGVDKAVVYRGRPIVSASASLTIFPAMFNPEERSCSLEGNPVACINLSFCLNASGKHVADSIGFTVELQLDWQKQKGGVRRALFLASRQATLTQTLLIQNGAREDCREMKIYLRNESEFRDKLSPIHIALNFSLDPQAPVDSHGLRPALHYQSKSRIEDKAQILLDCGEDNICVPDLQLEVFGEQNHVYLGDKNALNLTFHAQNVGEGGAYEAELRVTAPPEAEYSGLVRHPGNFSSLSCDYFAVNQSRLLVCDLGNPMKAGASLWGGLRFTVPHLRDTKKTIQFDFQILSKNLNNSQSDVVSFRLSVEAQAQVTLNGVSKPEAVLFPVSDWHPRDQPQKEEDLGPAVHHVYELINQGPSSISQGVLELSCPQALEGQQLLYVTRVTGLNCTTNHPINPKGLELDPEGSLHHQQKREAPSRSSASSGPQILKCPEAECFRLRCELGPLHQQESQSLQLHFRVWAKTFLQREHQPFSLQCEAVYKALKMPYRILPRQLPQKERQVATAVQWTKAEGSY

SEQ ID NO: 1472 - protein, 1027 aa, synthetic construct
  REGION 1..1027: note = ITGA6 (P23229) ECD
FNLDTREDNVIRKYGDPGSLFGFSLAMHWQLQPEDKRLLLVGAPRAEALPLQRANRTGGLYSCDITARGPCTRIEFDNDADPTSESKEDQWMGVTVQSQGPGGKVVTCAHRYEKRQHVNTKQESRDIFGRCYVLSQNLRIEDDMDGGDWSFCDGRLRGHEKFGSCQQGVAATFTKDFHYIVFGAPGTYNWKGIVRVEQKNNTFFDMNIFEDGPYEVGGETEHDESLVPVPANSYLGLLFLTSVSYTDPDQFVYKTRPPREQPDTFPDVMMNSYLGFSLDSGKGIVSKDEITFVSGAPRANHSGAVVLLKRDMKSAHLLPEHIFDGEGLASSFGYDVAVVDLNKDGWQDIVIGAPQYFDRDGEVGGAVYVYMNQQGRWNNVKPIRLNGTKDSMFGIAVKNIGDINQDGYPDIAVGAPYDDLGKVFIYHGSANGINTKPTQVLKGISPYFGYSIAGNMDLDRNSYPDVAVGSLSDSVTIFRSRPVINIQKTITVTPNRIDLRQKTACGAPSGICLQVKSCFEYTANPAGYNPSISIVGTLEAEKERRKSGLSSRVQFRNQGSEPKYTQELTLKRQKQKVCMEETLWLQDNIRDKLRPIPITASVEIQEPSSRRRVNSLPEVLPILNSDEPKTAHIDVHFLKEGCGDDNVCNSNLKLEYKFCTREGNQDKFSYLPIQKGVPELVLKDQKDIALEITVTNSPSNPRNPTKDGDDAHEAKLIATFPDTLTYSAYRELRAFPEKQLSCVANQNGSQADCELGNPFKRNSNVTFYLVLSTTEVTFDTPDLDINLKLETTSNQDNLAPITAKAKVVIELLLSVSGVAKPSQVYFGGTVVGEQAMKSEDEVGSLIEYEFRVINLGKPLTNLGTATLNIQWPKEISNGKWLLYLVKVESKGLEKVTCEPQKEINSLNLTESHNSRKKREITEKQIDDNRKFSLFAERKYQTLNCSVNVNCVNIRCPLRGLDSKASLILRSRLWNSTFLEEYSKLNYLDILMRAFIDVTAAAENIRLPNAGTQVRVTVFPSKTVAQYS

SEQ ID NO: 1473 - protein, 1049 aa, synthetic construct
  REGION 1..1049: note = ITGA7 (Q13683) ECD
FNLDVMGALRKEGEPGSLFGFSVALHRQLQPRPQSWLLVGAPQALALPGQQANRTGGLFACPLSLEETDCYRVDIDQGADMQKESKENQWLGVSVRSQGPGGKIVTCAHRYEARQRVDQILETRDMIGRCFVLSQDLAIRDELDGGEWKFCEGRPQGHEQFGFCQQGTAAAFSPDSHYLLFGAPGTYNWKGTARVELCAQGSADLAHLDDGPYEAGGEKEQDPRLIPVPANSYFGLLFVTNIDSSDPDQLVYKTLDPADRLPGPAGDLALNSYLGFSIDSGKGLVRAEELSFVAGAPRANHKGAVVILRKDSASRLVPEVMLSGERLTSGFGYSLAVADLNSDGWPDLIVGAPYFFERQEELGGAVYVYLNQGGHWAGISPLRLCGSPDSMFGISLAVLGDLNQDGFPDIAVGAPFDGDGKVFIYHGSSLGVVAKPSQVLEGEAVGIKSFGYSLSGSLDMDGNQYPDLLVGSLADTAVLFRARPILHVSHEVSIAPRSIDLEQPNCAGGHSVCVDLRVCFSYIAVPSSYSPTVALDYVLDADTDRRLRGQVPRVTFLSRNLEEPKHQASGTVWLKHQHDRVCGDAMFQLQENVKDKLRAIVVTLSYSLQTPRLRRQAPGQGLPPVAPILNAHQPSTQRAEIHFLKQGCGEDKICQSNLQLVRARFCTRVSDTEFQPLPMDVDGTTALFALSGQPVIGLELMVTNLPSDPAQPQADGDDAHEAQLLVMLPDSLHYSGVRALDPAEKPLCLSNENASHVECELGNPMKRGAQVTFYLILSTSGISIETTELEVELLLATISEQELHPVSARARVFIELPLSIAGMAIPQQLFFSGVVRGERAMQSERDVGSKVKYEVTVSNQGQSLRTLGSAFLNIMWPHEIANGKWLLYPMQVELEGGQGPGQKGLCSPRPNILHLDVDSRDRRRRELEPPEQQEPGERQEPSMSWWPVSSAEKKKNITLDCARGTANCVVFSCPLYSFDRAAVLHVWGRLWNSTFLEEYSAVKSLEVIVRANITVKSSIKNLMLRDASTVIPVMVYLDPMAVVAEGVPW

SEQ ID NO: 1474 - protein, 974 aa, synthetic construct [sequence omitted]

SEQ ID NO: 1475 - protein, 952 aa, synthetic construct
  REGION 1..952: note = ITGA9 (Q13797) ECD
YNLDPQRPVHFQGPADSFFGYAVLEHFHDNTRWVLVGAPKADSKYSPSVKSPGAVFKCRVHTNPDRRCTELDMARGKNRGTSCGKTCREDRDDEWMGVSLARQPKADGRVLACAHRWKNIYYEADHILPHGFCYIIPSNLQAKGRTLIPCYEEYKKKYGEEHGSCQAGIAGFFTEELVVMGAPGSFYWAGTIKVLNLTDNTYLKLNDEVIMNRRYTYLGYAVTAGHFSHPSTIDVVGGAPQDKGIGKVYIFRADRRSGTLIKIFQASGKKMGSYFGSSLCAVDLNGDGLSDLLVGAPMFSEIRDEGQVTVYINRGNGALEEQLALTGDGAYNAHFGESIASLDDLDNDGFPDVAIGAPKEDDFAGAVYIYHGDAGGIVPQYSMKLSGQKINPVLRMFGQSISGGIDMDGNGYPDVTVGAFMSDSVVLLRARPVITVDVSIFLPGSINITAPQCHDGQQPVNCLNVTTCFSFHGKHVPGEIGLNYVLMADVAKKEKGQMPRVYFVLLGETMGQVTEKLQLTYMEETCRHYVAHVKRRVQDVISPIVFEAAYSLSEHVTGEEERELPPLTPVLRWKKGQKIAQKNQTVFERNCRSEDCAADLQLQGKLLLSSMDEKTLYLALGAVKNISLNISISNLGDDAYDANVSFNVSRELFFINMWQKEEMGISCELLESDFLKCSVGFPFMRSKSKYEFSVIFDTSHLSGEEEVLSFIVTAQSGNTERSESLHDNTLVLMVPLMHEVDTSITGIMSPTSFVYGESVDAANFIQLDDLECHFQPINITLQVYNTGPSTLPGSSVSISFPNRLSSGGAEMFHVQEMVVGQEKGNCSFQKNPTPCIIPQEQENIFHTIFAFFTKSGRKVLDCEKPGISCLTAHCNFSALAKEESRTIDIYMLLNTEILKKDSSSVIQFMSRAKVKVDPALRVVEIAHGNPEEVTVVFEALHNLEPRGYVVGW

SEQ ID NO: 1476 - protein, 1082 aa, synthetic construct
  REGION 1..1082: note = ITGAD (Q13349) ECD
FNLDVEEPTIFQEDAGGFGQSVVQFGGSRLVVGAPLEVVAANQTGRLYDCAAATGMCQPIPLHIRPEAVNMSLGLTLAASTNGSRLLACGPTLHRVCGENSYSKGSCLLLGSRWEIIQTVPDATPECPHQEMDIVFLIDGSGSIDQNDFNQMKGFVQAVMGQFEGTDTLFALMQYSNLLKIHFTFTQFRTSPSQQSLVDPIVQLKGLTFTATGILTVVTQLFHHKNGARKSAKKILIVITDGQKYKDPLEYSDVIPQAEKAGIIRYAIGVGHAFQGPTARQELNTISSAPPQDHVFKVDNFAALGSIQKQLQEKIYAVEGTQSRASSSFQHEMSQEGFSTALTMDGLFLGAVGSFSWSGGAFLYPPNMSPTFINMSQENVDMRDSYLGYSTELALWKGVQNLVLGAPRYQHTGKAVIFTQVSRQWRKKAEVTGTQIGSYFGASLCSVDVDSDGSTDLILIGAPHYYEQTRGGQVSVCPLPRGRVQWQCDAVLRGEQGHPWGRFGAALTVLGDVNEDKLIDVAIGAPGEQENRGAVYLFHGASESGISPSHSQRIASSQLSPRLQYFGQALSGGQDLTQDGLMDLAVGARGQVLLLRSLPVLKVGVAMRFSPVEVAKAVYRCWEEKPSALEAGDATVCLTIQKSSLDQLGDIQSSVRFDLALDPGRLTSRAIFNETKNPTLTRRKTLGLGIHCETLKLLLPDCVEDVVSPIILHLNFSLVREPIPSPQNLRPVLAVGSQDLFTASLPFEKNCGQDGLCEGDLGVTLSFSGLQTLTVGSSLELNVIVTVWNAGEDSYGTVVSLYYPAGLSHRRVSGAQKQPHQSALRLACETVPTEDEGLRSSRCSVNHPIFHEGSNGTFIVTFDVSYKATLGDRMLMRASASSENNKASSSKATFQLELPVKYAVYTMISRQEESTKYFNFATSDEKKMKEAEHRYRVNNLSQRDLAISINFWVPVLLNGVAVWDVVMEAPSQSLPCVSERKPPQHSDFLTQISRSPMLDCSIADCLQFRCDVPSFSVQEELDFTLKGNLSFGWVRETLQKKVLVVSVAEITFDTSVYSQLPGQEAFMRAQMEMVLEEDEVYN

SEQ ID NO: 1477 - protein, 1106 aa, synthetic construct
  REGION 1..1106: note = ITGAE (P38570) ECD
FNVDVARPWLTPKGGAPFVLSSLLHQDPSTNQTWLLVTSPRTKRTPGPLHRCSLVQDEILCHPVEHVPIPKGRHRGVTVVRSHHGVLICIQVLVRRPHSLSSELTGTCSLLGPDLRPQAQANFFDLENLLDPDARVDTGDCYSNKEGGGEDDVNTARQRRALEKEEEEDKEEEEDEEEEEAGTEIAIILDGSGSIDPPDFQRAKDFISNMMRNFYEKCFECNFALVQYGGVIQTEFDLRDSQDVMASLARVQNITQVGSVTKTASAMQHVLDSIFTSSHGSRRKASKVMVVLTDGGIFEDPLNLTTVINSPKMQGVERFAIGVGEEFKSARTARELNLIASDPDETHAFKVTNYMALDGLLSKLRYNIISMEGTVGDALHYQLAQIGFSAQILDERQVLLGAVGAFDWSGGALLYDTRSRRGRFLNQTAAAAADAEAAQYSYLGYAVAVLHKTCSLSYIAGAPRYKHHGAVFELQKEGREASFLPVLEGEQMGSYFGSELCPVDIDMDGSTDFLLVAAPFYHVHGEEGRVYVYRLSEQDGSFSLARILSGHPGFTNARFGFAMAAMGDLSQDKLTDVAIGAPLEGFGADDGASFGSVYIYNGHWDGLSASPSQRIRASTVAPGLQYFGMSMAGGFDISGDGLADITVGTLGQAVVFRSRPVVRLKVSMAFTPSALPIGFNGVVNVRLCFEISSVTTASESGLREALLNFTLDVDVGKQRRRLQCSDVRSCLGCLREWSSGSQLCEDLLLMPTEGELCEEDCFSNASVKVSYQLQTPEGQTDHPQPILDRYTEPFAIFQLPYEKACKNKLFCVAELQLATTVSQQELVVGLTKELTLNINLTNSGEDSYMTSMALNYPRNLQLKRMQKPPSPNIQCDDPQPVASVLIMNCRIGHPVLKRSSAHVSVVWQLEENAFPNRTADITVTVTNSNERRSLANETHTLQFRHGFVAVLSKPSIMYVNTGQGLSHHKEFLFHVHGENLFGAEYQLQICVPTKLRGLQVVAVKKLTRTQASTVCTWSQERACAYSSVQHVEEWHSVSCVIASDKENVTVAAEISWDHSEELLKDVTELQILGEISFNKSLYEGLNAENHRTKITVVFLKDEKYHS

SEQ ID NO: 1478 - protein, 1065 aa, synthetic construct
  REGION 1..1065: note = ITGAL (P20701) ECD
YNLDVRGARSFSPPRAGRHFGYRVLQVGNGVIVGAPGEGNSTGSLYQCQSGTGHCLPVTLRGSNYTSKYLGMTLATDPTDGSILACDPGLSRTCDQNTYLSGLCYLFRQNLQGPMLQGRPGFQECIKGNVDLVFLFDGSMSLQPDEFQKILDFMKDVMKKLSNTSYQFAAVQFSTSYKTEFDFSDYVKRKDPDALLKHVKHMLLLTNTFGAINYVATEVFREELGARPDATKVLIIITDGEATDSGNIDAAKDIIRYIIGIGKHFQTKESQETLHKFASKPASEFVKILDTFEKLKDLFTELQKKIYVIEGTSKQDLTSFNMELSSSGISADLSRGHAVVGAVGAKDWAGGFLDLKADLQDDTFIGNEPLTPEVRAGYLGYTVTWLPSRQKTSLLASGAPRYQHMGRVLLFQEPQGGGHWSQVQTIHGTQIGSYFGGELCGVDVDQDGETELLLIGAPLFYGEQRGGRVFIYQRRQLGFEEVSELQGDPGYPLGRFGEAITALTDINGDGLVDVAVGAPLEEQGAVYIFNGRHGGLSPQPSQRIEGTQVLSGIQWFGRSIHGVKDLEGDGLADVAVGAESQMIVLSSRPVVDMVTLMSFSPAEIPVHEVECSYSTSNKMKEGVNITICFQIKSLIPQFQGRLVANLTYTLQLDGHRTRRRGLFPGGRHELRRNIAVTTSMSCTDFSFHFPVCVQDLISPINVSLNFSLWEEEGTPRDQRAQGKDIPPILRPSLHSETWEIPFEKNCGEDKKCEANLRVSFSPARSRALRLTAFASLSVELSLSNLEEDAYWVQLDLHFPPGLSFRKVEMLKPHSQIPVSCEELPEESRLLSRALSCNVSSPIFKAGHSVALQMMFNTLVNSSWGDSVELHANVTCNNEDSDLLEDNSATTIIPILYPINILIQDQEDSTLYVSFTPKGPKIHQVKHMYQVRIQPSIHDHNIPTLEAVVGVPQPPSEGPITHQWSVQMEPPVPCHYEDLERLPDAAEPCLPGALFRCPVVFRQEILVQVIGTLELVGEIEASSMFSLCSSLSISFNSSKHFHLYGSNASLAQVVMKVDVVYEKQML

SEQ ID NO: 1479 - protein, 1088 aa, synthetic construct
  REGION 1..1088: note = ITGAM (P11215) ECD
FNLDTENAMTFQENARGFGQSVVQLQGSRVVVGAPQEIVAANQRGSLYQCDYSTGSCEPIRLQVPVEAVNMSLGLSLAATTSPPQLLACGPTVHQTCSENTYVKGLCFLFGSNLRQQPQKFPEALRGCPQEDSDIAFLIDGSGSIIPHDFRRMKEFVSTVMEQLKKSKTLFSLMQYSEEFRIHFTFKEFQNNPNPRSLVKPITQLLGRTHTATGIRKVVRELFNITNGARKNAFKILVVITDGEKFGDPLGYEDVIPEADREGVIRYVIGVGDAFRSEKSRQELNTIASKPPRDHVFQVNNFEALKTIQNQLREKIFAIEGTQTGSSSSFEHEMSQEGFSAAITSNGPLLSTVGSYDWAGGVFLYTSKEKSTFINMTRVDSDMNDAYLGYAAAIILRNRVQSLVLGAPRYQHIGLVAMFRQNTGMWESNANVKGTQIGAYFGASLCSVDVDSNGSTDLVLIGAPHYYEQTRGGQVSVCPLPRGRARWQCDAVLYGEQGQPWGRFGAALTVLGDVNGDKLTDVAIGAPGEEDNRGAVYLFHGTSGSGISPSHSQRIAGSKLSPRLQYFGQSLSGGQDLTMDGLVDLTVGAQGHVLLLRSQPVLRVKAIMEFNPREVARNVFECNDQVVKGKEAGEVRVCLHVQKSTRDRLREGQIQSVVTYDLALDSGRPHSRAVFNETKNSTRRQTQVLGLTQTCETLKLQLPNCIEDPVSPIVLRLNFSLVGTPLSAFGNLRPVLAEDAQRLFTALFPFEKNCGNDNICQDDLSITFSFMSLDCLVVGGPREFNVTVTVRNDGEDSYRTQVTFFFPLDLSYRKVSTLQNQRSQRSWRLACESASSTEVSGALKSTSCSINHPIFPENSEVTFNITFDVDSKASLGNKLLLKANVTSENNMPRTNKTEFQLELPVKYAVYMVVTSHGVSTKYLNFTASENTSRVMQHQYQVSNLGQRSLPISLVFLVPVRLNQTVIWDRPQVTFSENLSSTCHTKERLPSHSDFLAELRKAPVVNCSIAVCQRIQCDIPFFGIQEEFNATLKGNLSFDWYIKTSHNHLLIVSTAEILFNDSVFTLLPGQGAFVRSQTETKVEPFEVPN

SEQ ID NO: 1480 - protein, 962 aa, synthetic construct
  REGION 1..962: note = ITGAV (P06756) ECD
FNLDVDSPAEYSGPEGSYFGFAVDFFVPSASSRMFLLVGAPKANTTQPGIVEGGQVLKCDWSSTRRCQPIEFDATGNRDYAKDDPLEFKSHQWFGASVRSKQDKILACAPLYHWRTEMKQEREPVGTCFLQDGTKTVEYAPCRSQDIDADGQGFCQGGFSIDFTKADRVLLGGPGSFYWQGQLISDQVAEIVSKYDPNVYSIKYNNQLATRTAQAIFDDSYLGYSVAVGDFNGDGIDDFVSGVPRAARTLGMVYIYDGKNMSSLYNFTGEQMAAYFGFSVAATDINGDDYADVFIGAPLFMDRGSDGKLQEVGQVSVSLQRASGDFQTTKLNGFEVFARFGSAIAPLGDLDQDGFNDIAIAAPYGGEDKKGIVYIFNGRSTGLNAVPSQILEGQWAARSMPPSFGYSMKGATDIDKNGYPDLIVGAFGVDRAILYRARPVITVNAGLEVYPSILNQDNKTCSLPGTALKVSCFNVRFCLKADGKGVLPRKLNFQVELLLDKLKQKGAIRRALFLYSRSPSHSKNMTISRGGLMQCEELIAYLRDESEFRDKLTPITIFMEYRLDYRTAADTTGLQPILNQFTPANISRQAHILLDCGEDNVCKPKLEVSVDSDQKKIYIGDDNPLTLIVKAQNQGEGAYEAELIVSIPLQADFIGVVRNNEALARLSCAFKTENQTRQVVCDLGNPMKAGTQLLAGLRFSVHQQSEMDTSVKFDLQIQSSNLFDKVSPVVSHKVDLAVLAAVEIRGVSSPDHVFLPIPNWEHKENPETEEDVGPVVQHIYELRNNGPSSFSKAMLHLQWPYKYNNNTLLYILHYDIDGPMNCTSDMEINPLRIKISSLQTTEKNDTVAGQGERDHLITKRDLALSEGDIHTLGCGVAQCLKIVCQVGRLDRGKSAILYVKSLLWTETFMNKENQNHSYSLKSSASFNVIEFPYKNLPIEDITNSTLVTTNVTWGIQPAPMPV

SEQ ID NO: 1481 - protein, 1088 aa, synthetic construct
  REGION 1..1088: note = ITGAX (P20702) ECD
FNLDTEELTAFRVDSAGFGDSVVQYANSWVVVGAPQKITAANQTGGLYQCGYSTGACEPIGLQVPPEAVNMSLGLSLASTTSPSQLLACGPTVHHECGRNMYLTGLCFLLGPTQLTQRLPVSRQECPRQEQDIVFLIDGSGSISSRNFATMMNFVRAVISQFQRPSTQFSLMQFSNKFQTHFTFEEFRRSSNPLSLLASVHQLQGFTYTATAIQNVVHRLFHASYGARRDAAKILIVITDGKKEGDSLDYKDVIPMADAAGIIRYAIGVGLAFQNRNSWKELNDIASKPSQEHIFKVEDFDALKDIQNQLKEKIFAIEGTETTSSSSFELEMAQEGFSAVFTPDGPVLGAVGSFTWSGGAFLYPPNMSPTFINMSQENVDMRDSYLGYSTELALWKGVQSLVLGAPRYQHTGKAVIFTQVSRQWRMKAEVTGTQIGSYFGASLCSVDVDSDGSTDLVLIGAPHYYEQTRGGQVSVCPLPRGWRRWWCDAVLYGEQGHPWGRFGAALTVLGDVNGDKLTDVVIGAPGEEENRGAVYLFHGVLGPSISPSHSQRIAGSQLSSRLQYFGQALSGGQDLTQDGLVDLAVGARGQVLLLRTRPVLWVGVSMQFIPAEIPRSAFECREQVVSEQTLVQSNICLYIDKRSKNLLGSRDLQSSVTLDLALDPGRLSPRATFQETKNRSLSRVRVLGLKAHCENFNLLLPSCVEDSVTPITLRLNFTLVGKPLLAFRNLRPMLAADAQRYFTASLPFEKNCGADHICQDNLGISFSFPGLKSLLVGSNLELNAEVMVWNDGEDSYGTTITFSHPAGLSYRYVAEGQKQGQLRSLHLTCDSAPVGSQGTWSTSCRINHLIFRGGAQITFLATFDVSPKAVLGDRLLLTANVSSENNTPRTSKTTFQLELPVKYAVYTVVSSHEQFTKYLNFSESEEKESHVAMHRYQVNNLGQRDLPVSINFWVPVELNQEAVWMDVEVSHPQNPSLRCSSEKIAPPASDFLAHIQKNPVLDCSIAGCLRFRCDVPSFSVQEELDFTLKGNLSFGWVRQILQKKVSVVSVAEITFDTSVYSQLPGQEAFMRAQTTTVLEKYKVHNPTP

SEQ ID NO: 1482 - protein, 708 aa, synthetic construct
  REGION 1..708: note = ITGB1 (P05556) ECD
QTDENRCLKANAKSCGECIQAGPNCGWCTNSTFLQEGMPTSARCDDLEALKKKGCPPDDIENPRGSKDIKKNKNVTNRSKGTAEKLKPEDITQIQPQQLVLRLRSGEPQTFTLKFKRAEDYPIDLYYLMDLSYSMKDDLENVKSLGTDLMNEMRRITSDFRIGFGSFVEKTVMPYISTTPAKLRNPCTSEQNCTSPFSYKNVLSLTNKGEVFNELVGKQRISGNLDSPEGGFDAIMQVAVCGSLIGWRNVTRLLVFSTDAGFHFAGDGKLGGIVLPNDGQCHLENNMYTMSHYYDYPSIAHLVQKLSENNIQTIFAVTEEFQPVYKELKNLIPKSAVGTLSANSSNVIQLIIDAYNSLSSEVILENGKLSEGVTISYKSYCKNGVNGTGENGRKCSNISIGDEVQFEISITSNKCPKKDSDSFKIRPLGFTEEVEVILQYICECECQSEGIPESPKCHEGNGTFECGACRCNEGRVGRHCECSTDEVNSEDMDAYCRKENSSEICSNNGECVCGQCVCRKRDNTNEIYSGKFCECDNFNCDRSNGLICGGNGVCKCRVCECNPNYTGSACDCSLDTSTCEASNGQICNGRGICECGVCKCTDPKFQGQTCEMCQTCLGVCAEHKECVQCRAFNKGEKKDTCTQECSYFNITKVESRDKLPQPVQPDPVSHCKEKDVDDCWFYFTYSVNGNNEVMVHVVENPECPTGPD

SEQ ID NO: 1483 - protein, 678 aa, synthetic construct
  REGION 1..678: note = ITGB2 (P05107) ECD
QECTKFKVSSCRECIESGPGCTWCQKLNFTGPGDPDSIRCDTRPQLLMRGCAADDIMDPTSLAETQEDHNGGQKQLSPQKVTLYLRPGQAAAFNVTFRRAKGYPIDLYYLMDLSYSMLDDLRNVKKLGGDLLRALNEITESGRIGFGSFVDKTVLPFVNTHPDKLRNPCPNKEKECQPPFAFRHVLKLTNNSNQFQTEVGKQLISGNLDAPEGGLDAMMQVAACPEEIGWRNVTRLLVFATDDGFHFAGDGKLGAILTPNDGRCHLEDNLYKRSNEFDYPSVGQLAHKLAENNIQPIFAVTSRMVKTYEKLTEIIPKSAVGELSEDSSNVVQLIKNAYNKLSSRVFLDHNALPDTLKVTYDSFCSNGVTHRNQPRGDCDGVQINVPITFQVKVTATECIQEQSFVIRALGFTDIVTVQVLPQCECRCRDQSRDRSLCHGKGFLECGICRCDTGYIGKNCECQTQGRSSQELEGSCRKDNNSIICSGLGDCVCGQCLCHTSDVPGKLIYGQYCECDTINCERYNGQVCGGPGRGLCFCGKCRCHPGFEGSACQCERTTEGCLNPRRVECSGRGRCRCNVCECHSGYQLPLCQECPGCPSPCGKYISCAECLKFEKGPFGKNCSAACPGLQLSNNPVKGRTCKERDSEGCWVAYTLEQQDGMDRYLIYVDESRECVAGPN

SEQ ID NO: 1484 - protein, 692 aa, synthetic construct
  REGION 1..692: note = ITGB3 (P05106) ECD
GPNICTTRGVSSCQQCLAVSPMCAWCSDEALPLGSPRCDLKENLLKDNCAPESIEFPVSEARVLEDRPLSDKGSGDSSQVTQVSPQRIALRLRPDDSKNFSIQVRQVEDYPVDIYYLMDLSYSMKDDLWSIQNLGTKLATQMRKLTSNLRIGFGAFVDKPVSPYMYISPPEALENPCYDMKTTCLPMFGYKHVLTLTDQVTRFNEEVKKQSVSRNRDAPEGGFDAIMQATVCDEKIGWRNDASHLLVFTTDAKTHIALDGRLAGIVQPNDGQCHVGSDNHYSASTTMDYPSLGLMTEKLSQKNINLIFAVTENVVNLYQNYSELIPGTTVGVLSMDSSNVLQLIVDAYGKIRSKVELEVRDLPEELSLSFNATCLNNEVIPGLKSCMGLKIGDTVSFSIEAKVRGCPQEKEKSFTIKPVGFKDSLIVQVTFDCDCACQAQAEPNSHRCNNGNGTFECGVCRCGPGWLGSQCECSEEDYRPSQQDECSPREGQPVCSQRGECLCGQCVCHSSDFGKITGKYCECDDFSCVRYKGEMCSGHGQCSCGDCLCDSDWTGYYCNCTTRTDTCMSSNGLLCSGRGKCECGSCVCIQPGSYGDTCEKCPTCPDACTFKKECVECKKFDRGALHDENTCNRYCRDEIESVKELKDTGKDAVNCTYKNEDDCVVRFQYYEDSSGKSILYVVEEPECPKGPD

SEQ ID NO: 1485 - protein, 683 aa, synthetic construct
  REGION 1..683: note = ITGB4 (P16144) ECD
NRCKKAPVKSCTECVRVDKDCAYCTDEMFRDRRCNTQAELLAAGCQRESIVVMESSFQITEETQIDTTLRRSQMSPQGLRVRLRPGEERHFELEVFEPLESPVDLYILMDFSNSMSDDLDNLKKMGQNLARVLSQLTSDYTIGFGKFVDKVSVPQTDMRPEKLKEPWPNSDPPFSFKNVISLTEDVDEFRNKLQGERISGNLDAPEGGFDAILQTAVCTRDIGWRPDSTHLLVFSTESAFHYEADGANVLAGIMSRNDERCHLDTTGTYTQYRTQDYPSVPTLVRLLAKHNIIPIFAVTNYSYSYYEKLHTYFPVSSLGVLQEDSSNIVELLEEAFNRIRSNLDIRALDSPRGLRTEVTSKMFQKTRTGSFHIRRGEVGIYQVQLRALEHVDGTHVCQLPEDQKGNIHLKPSFSDGLKMDAGIICDVCTCELQKEVRSARCSFNGDFVCGQCVCSEGWSGQTCNCSTGSLSDIQPCLREGEDKPCSGRGECQCGHCVCYGEGRYEGQFCEYDNFQCPRTSGFLCNDRGRCSMGQCVCEPGWTGPSCDCPLSNATCIDSNGGICNGRGHCECGRCHCHQQSLYTDTICEINYSAIHPGLCEDLRSCVQCQAWGTGEKKGRTCEECNFKVKMVDELKRAEEVVVRCSFRDEDDDCTYSYTMEGDGAPGPNSTVLVHKKKDCPPGS

SEQ ID NO: 1486 - protein, 696 aa, synthetic construct
  REGION 1..696: note = ITGB5 (P18084) ECD
GLNICTSGSATSCEECLLIHPKCAWCSKEDFGSPRSITSRCDLRANLVKNGCGGEIESPASSFHVLRSLPLSSKGSGSAGWDVIQMTPQEIAVNLRPGDKTTFQLQVRQVEDYPVDLYYLMDLSLSMKDDLDNIRSLGTKLAEEMRKLTSNFRLGFGSFVDKDISPFSYTAPRYQTNPCIGYKLFPNCVPSFGFRHLLPLTDRVDSFNEEVRKQRVSRNRDAPEGGFDAVLQAAVCKEKIGWRKDALHLLVFTTDDVPHIALDGKLGGLVQPHDGQCHLNEANEYTASNQMDYPSLALLGEKLAENNINLIFAVTKNHYMLYKNFTALIPGTTVEILDGDSKNIIQLIINAYNSIRSKVELSVWDQPEDLNLFFTATCQDGVSYPGQRKCEGLKIGDTASFEVSLEARSCPSRHTEHVFALRPVGFRDSLEVGVTYNCTCGCSVGLEPNSARCNGSGTYVCGLCECSPGYLGTRCECQDGENQSVYQNLCREAEGKPLCSGRGDCSCNQCSCFESEFGKIYGPFCECDNFSCARNKGVLCSGHGECHCGECKCHAGYIGDNCNCSTDISTCRGRDGQICSERGHCLCGQCQCTEPGAFGEMCEKCPTCPDACSTKRDCVECLLLHSGKPDNQTCHSLCRDEVITWVDTIVKDDQEAVLCFYKTAKDCVMMFTYVELPSGKSNLTVLREPECGNTPN

SEQ ID NO: 1487 - protein, 688 aa, synthetic construct
  REGION 1..688: note = ITGB6 (P18564) ECD
GCALGGAETCEDCLLIGPQCAWCAQENFTHPSGVGERCDTPANLLAKGCQLNFIENPVSQVEILKNKPLSVGRQKNSSDIVQIAPQSLILKLRPGGAQTLQVHVRQTEDYPVDLYYLMDLSASMDDDLNTIKELGSRLSKEMSKLTSNFRLGFGSFVEKPVSPFVKTTPEEIANPCSSIPYFCLPTFGFKHILPLTNDAERFNEIVKNQKISANIDTPEGGFDAIMQAAVCKEKIGWRNDSLHLLVFVSDADSHFGMDSKLAGIVIPNDGLCHLDSKNEYSMSTVLEYPTIGQLIDKLVQNNVLLIFAVTQEQVHLYENYAKLIPGATVGLLQKDSGNILQLIISAYEELRSEVELEVLGDTEGLNLSFTAICNNGTLFQHQKKCSHMKVGDTASFSVTVNIPHCERRSRHIIIKPVGLGDALELLVSPECNCDCQKEVEVNSSKCHHGNGSFQCGVCACHPGHMGPRCECGEDMLSTDSCKEAPDHPSCSGRGDCYCGQCICHLSPYGNIYGPYCQCDNFSCVRHKGLLCGGNGDCDCGECVCRSGWTGEYCNCTTSTDSCVSEDGVLCSGRGDCVCGKCVCTNPGASGPTCERCPTCGDPCNSKRSCIECHLSAAGQAREECVDKCKLAGATISEEEDFSKDGSVSCSLQGENECLITFLITTDNEGKTIIHSINEKDCPKPPNIP

SEQ ID NO: 1488 - protein, 704 aa, synthetic construct
  REGION 1..704: note = ITGB7 (P26010) ECD
ELDAKIPSTGDATEWRNPHLSMLGSCQPAPSCQKCILSHPSCAWCKQLNFTASGEAEARRCARREELLARGCPLEELEEPRGQQEVLQDQPLSQGARGEGATQLAPQRVRVTLRPGEPQQLQVRFLRAEGYPVDLYYLMDLSYSMKDDLERVRQLGHALLVRLQEVTHSVRIGFGSFVDKTVLPFVSTVPSKLRHPCPTRLERCQSPFSFHHVLSLTGDAQAFEREVGRQSVSGNLDSPEGGFDAILQAALCQEQIGWRNVSRLLVFTSDDTFHTAGDGKLGGIFMPSDGHCHLDSNGLYSRSTEFDYPSVGQVAQALSAANIQPIFAVTSAALPVYQELSKLIPKSAVGELSEDSSNVVQLIMDAYNSLSSTVTLEHSSLPPGVHISYESQCEGPEKREGKAEDRGQCNHVRINQTVTFWVSLQATHCLPEPHLLRLRALGFSEELIVELHTLCDCNCSDTQPQAPHCSDGQGHLQCGVCSCAPGRLGRLCECSVAELSSPDLESGCRAPNGTGPLCSGKGHCQCGRCSCSGQSSGHLCECDDASCERHEGILCGGFGRCQCGVCHCHANRTGRACECSGDMDSCISPEGGLCSGHGRCKCNRCQCLDGYYGALCDQCPGCKTPCERHRDCAECGAFRTGPLATNCSTACAHTNVTLALAPILDDGWCKERTLDNQLFFFLVEDDARGTVVLRVRPQEKGADH

SEQ ID NO: 1489 - protein, 642 aa, synthetic construct
  REGION 1..642: note = ITGB8 (P26012) ECD
EDNRCASSNAASCARCLALGPECGWCVQEDFISGGSRSERCDIVSNLISKGCSVDSIEYPSVHVIIPTENEINTQVTPGEVSIQLRPGAEANFMLKVHPLKKYPVDLYYLVDVSASMHNNIEKLNSVGNDLSRKMAFFSRDFRLGFGSYVDKTVSPYISIHPERIHNQCSDYNLDCMPPHGYIHVLSLTENITEFEKAVHRQKISGNIDTPEGGFDAMLQAAVCESHIGWRKEAKRLLLVMTDQTSHLALDSKLAGIVVPNDGNCHLKNNVYVKSTTMEHPSLGQLSEKLIDNNINVIFAVQGKQFHWYKDLLPLLPGTIAGEIESKAANLNNLVVEAYQKLISEVKVQVENQVQGIYFNITAICPDGSRKPGMEGCRNVTSNDEVLFNVTVTMKKCDVTGGKNYAIIKPIGFNETAKIHIHRNCSCQCEDNRGPKGKCVDETFLDSKCFQCDENKCHFDEDQFSSESCKSHKDQPVCSGRGVCVCGKCSCHKIKLGKVYGKYCEKDDFSCPYHHGNLCAGHGECEAGRCQCFSGWEGDRCQCPSAAAQHCVNSKGQVCSGRGTCVCGRCECTDPRSIGRFCEHCPTCYTACKENWNCMQCLHPHNLSQAILDQCKTSCALMEQQHYVDQTSECFSSPSYLR

SEQ ID NO: 1490 - protein, 271 aa, synthetic construct
  REGION 1..271: note = IZUMO1 (Q8IYV9) ECD
CVICDPSVVLALKSLEKDYLPGHLDAKHHKAMMERVENAVKDFQELSLNEDAYMGVVDEATLQKGSWSLLKDLKRITDSDVKGDLFVKELFWMLHLQKETFATYVARFQKEAYCPNKCGVMLQTLIWCKNCKKEVHACRKSYDCGERNVEVPQMEDMILDCELNWHQASEGLTDYSFYRVWGNNTETLVSKGKEATLTKPMVGPEDAGSYRCELGSVNSSPATIINFHVTVLPKMIKEEKPSPNIVTPGEATTESSISLQPLQPEKMLASR

SEQ ID NO: 1491 - protein, 154 aa, synthetic construct
  REGION 1..154: note = IZUMO3 (Q5VZ72) ECD
CLECDPKFIEDVGSLLGNLIPSEVPGRTQLLERQIKEMIHLSFKVSHSDKRLRVLAVQQVVKLRTWLKNEFYKLGNETWKGVFIYQGKLLDVCQNLESKLKELLKNFSEIACSEDCIVVEGPILDCWTCLRMTNRCFKGEYCGDEDPRKAENRE

SEQ ID NO: 1492 - protein, 1034 aa, synthetic construct
  REGION 1..1034: note = JAG1 (P78504) ECD
QFELEILSMQNVNGELQNGNCCGGARNPGDRKCTRDECDTYFKVCLKEYQSRVTAGGPCSFGSGSTPVIGGNTFNLKASRGNDRNRIVLPFSFAWPRSYTLLVEAWDSSNDTVQPDSIIEKASHSGMINPSRQWQTLKQNTGVAHFEYQIRVTCDDYYYGFGCNKFCRPRDDFFGHYACDQNGNKTCMEGWMGPECNRAICRQGCSPKHGSCKLPGDCRCQYGWQGLYCDKCIPHPGCVHGICNEPWQCLCETNWGGQLCDKDLNYCGTHQPCLNGGTCSNTGPDKYQCSCPEGYSGPNCEIAEHACLSDPCHNRGSCKETSLGFECECSPGWTGPTCSTNIDDCSPNNCSHGGTCQDLVNGFKCVCPPQWTGKTCQLDANECEAKPCVNAKSCKNLIASYYCDCLPGWMGQNCDININDCLGQCQNDASCRDLVNGYRCICPPGYAGDHCERDIDECASNPCLNGGHCQNEINRFQCLCPTGFSGNLCQLDIDYCEPNPCQNGAQCYNRASDYFCKCPEDYEGKNCSHLKDHCRTTPCEVIDSCTVAMASNDTPEGVRYISSNVCGPHGKCKSQSGGKFTCDCNKGFTGTYCHENINDCESNPCRNGGTCIDGVNSYKCICSDGWEGAYCETNINDCSQNPCHNGGTCRDLVNDFYCDCKNGWKGKTCHSRDSQCDEATCNNGGTCYDEGDAFKCMCPGGWEGTTCNIARNSSCLPNPCHNGGTCVVNGESFTCVCKEGWEGPICAQNTNDCSPHPCYNSGTCVDGDNWYRCECAPGFAGPDCRININECQSSPCAFGATCVDEINGYRCVCPPGHSGAKCQEVSGRPCITMGSVIPDGAKWDDDCNTCQCLNGRIACSKVWCGPRPCLLHKGHSECPSGQSCIPILDDQCFVHPCTGVGECRSSSLQPVKTKCTSDSYYQDNCANITFTFNKEMMSPGLTTEHICSELRNLNILKNVSAEYSIYIACEPSPSANNEIHVAISAEDIRDDGNPIKEITDKIIDLVSKRDGNSSLIAAVAEVRVQRRPLKNRTD

SEQ ID NO: 1493 - protein, 1054 aa, synthetic construct
  REGION 1..1054: note = JAG2 (Q9Y219) ECD
MGYFELQLSALRNVNGELLSGACCDGDGRTTRAGGCGHDECDTYVRVCLKEYQAKVTPTGPCSYGHGATPVLGGNSFYLPPAGAAGDRARARARAGGDQDPGLVVIPFQFAWPRSFTLIVEAWDWDNDTTPNEELLIERVSHAGMINPEDRWKSLHFSGHVAHLELQIRVRCDENYYSATCNKFCRPRNDFFGHYTCDQYGNKACMDGWMGKECKEAVCKQGCNLLHGGCTVPGECRCSYGWQGRFCDECVPYPGCVHGSCVEPWQCNCETNWGGLLCDKDLNYCGSHHPCTNGGTCINAEPDQYRCTCPDGYSGRNCEKAEHACTSNPCANGGSCHEVPSGFECHCPSGWSGPTCALDIDECASNPCAAGGTCVDQVDGFECICPEQWVGATCQLDANECEGKPCLNAFSCKNLIGGYYCDCIPGWKGINCHINVNDCRGQCQHGGTCKDLVNGYQCVCPRGFGGRHCELERDECASSPCHSGGLCEDLADGFHCHCPQGFSGPLCEVDVDLCEPSPCRNGARCYNLEGDYYCACPDDFGGKNCSVPREPCPGGACRVIDGCGSDAGPGMPGTAASGVCGPHGRCVSQPGGNFSCICDSGFTGTYCHENIDDCLGQPCRNGGTCIDEVDAFRCFCPSGWEGELCDTNPNDCLPDPCHSRGRCYDLVNDFYCACDDGWKGKTCHSREFQCDAYTCSNGGTCYDSGDTFRCACPPGWKGSTCAVAKNSSCLPNPCVNGGTCVGSGASFSCICRDGWEGRTCTHNTNDCNPLPCYNGGICVDGVNWFRCECAPGFAGPDCRINIDECQSSPCAYGATCVDEINGYRCSCPPGRAGPRCQEVIGFGRSCWSRGTPFPHGSSWVEDCNSCRCLDGRRDCSKVWCGWKPCLLAGQPEALSAQCPLGQRCLEKAPGQCLRPPCEAWGECGAEEPPSTPCLPRSGHLDNNCARLTLHFNRDHVPQGTTVGAICSGIRSLPATRAVARDRLLVLLCDRASSGASAVEVAVSFSPARDLPDSSLIQGAAHAIVAAITQRGNSSLLLAVTEVKVETVVTGGSST

SEQ ID NO: 1494 - protein, 210 aa, synthetic construct
  REGION 1..210: note = JAM2 (P57087) ECD
FSAPKDQQVVTAVEYQEAILACKTPKKTVSSRLEWKKLGRSVSFVYYQQTLQGDFKNRAEMIDFNIRIKNVTRSDAGKYRCEVSAPSEQGQNLEEDTVTLEVLVAPAVPSCEVPSSALSGTVVELRCQDKEGNPAPEYTWFKDGIRLLENPRLGSQSTNSSYTMNTKTGTLQFNTVSKLDTGEYSCEARNSVGYRRCPGKRMQVDDLNIS

SEQ ID NO: 1495 - protein, 210 aa, synthetic construct
  REGION 1..210: note = JAM3 (Q9BX67) ECD
VNLKSSNRTPVVQEFESVELSCIITDSQTSDPRIEWKKIQDEQTTYVFFDNKIQGDLAGRAEILGKTSLKIWNVTRRDSALYRCEVVARNDRKEIDEIVIELTVQVKPVTPVCRVPKAVPVGKMATLHCQESEGHPRPHYSWYRNDVPLPTDSRANPRFRNSSFHLNSETGTLVFTAVHKDDSGQYYCIASNDAGSARCEEQEMEVYDLN

SEQ ID NO: 1496 - protein, 147 aa, synthetic construct
  REGION 1..147: note = KCT2 (Q8NC54) ECD
RTDSPSPTVLNSHISTPNVNALTHENQTKPSISQISTTLPPTTSTKKSGGASVVPHPSPTPLSQEEADNNEDPSIEEEDLLMLNSSPSTAKDTLDNGDYGEPDYDWTTGPRDDDESDDTLEENRGYMEIEQSVKSFKMPSSNIEEED

SEQ ID NO: 1497 - protein, 745 aa, synthetic construct
  REGION 1..745: note = KDR (P35968) ECD
ASVGLPSVSLDLPRLSIQKDILTIKANTTLQITCRGQRDLDWLWPNNQSGSEQRVEVTECSDGLFCKTLTIPKVIGNDTGAYKCFYRETDLASVIYVYVQDYRSPFIASVSDQHGVVYITENKNKTVVIPCLGSISNLNVSLCARYPEKRFVPDGNRISWDSKKGFTIPSYMISYAGMVFCEAKINDESYQSIMYIVVVVGYRIYDVVLSPSHGIELSVGEKLVLNCTARTELNVGIDFNWEYPSSKHQHKKLVNRDLKTQSGSEMKKFLSTLTIDGVTRSDQGLYTCAASSGLMTKKNSTFVRVHEKPFVAFGSGMESLVEATVGERVRIPAKYLGYPPPEIKWYKNGIPLESNHTIKAGHVLTIMEVSERDTGNYTVILTNPISKEKQSHVVSLVVYVPPQIGEKSLISPVDSYQYGTTQTLTCTVYAIPPPHHIHWYWQLEEECANEPSQAVSVTNPYPCEEWRSVEDFQGGNKIEVNKNQFALIEGKNKTVSTLVIQAANVSALYKCEAVNKVGRGERVISFHVTRGPEITLQPDMQPTEQESVSLWCTADRSTFENLTWYKLGPQPLPIHVGELPTPVCKNLDTLWKLNATMFSNSTNDILIMELKNASLQDQGDYVCLAQDRKTKKRHCVVRQLTVLERVAPTITGNLENQTTSIGESIEVSCTASGNPPPQIMWFKDNETLVEDSGIVLKDGNRNLTIRRVRKEDEGLYTCQACSVLGCAKVEAFFIIEGAQEKTNLE

SEQ ID NO: 1498 - protein, 81 aa, synthetic construct
  REGION 1..81: note = KIAA0247 (Q92537) ECD
SVCPLPPEPENGGYICHPRPCRDPLTAGSVIEYLCAEGYMLKGDYKYLTCKNGEWKPAMEISCRLNEDKDTHTSLGVPTLS

SEQ ID NO: 1499 - protein, 935 aa, synthetic construct
  REGION 1..935: note = KIAA0319 (Q5VV43) ECD
ARKQCSEGRTYSNAVISPNLETTRIMRVSHTFPVVDCTAACCDLSSCDLAWWFEGRCYLVSCPHKENCEPKKMGPIRSYLTFVLRPVQRPAQLLDYGDMMLNRGSPSGIWGDSPEDIRKDLTFLGKDWGLEEMSEYSDDYRELEKDLLQPSGKQEPRGSAEYTDWGLLPGSEGAFNSSVGDSPAVPAETQQDPELHYLNESASTPAPKLPERSVLLPLPTTPSSGEVLEKEKASQLQEQSSNSSGKEVLMPSHSLPPASLELSSVTVEKSPVLTVTPGSTEHSIPTPPTSAAPSESTPSELPISPTTAPRTVKELTVSAGDNLIITLPDNEVELKAFVAPAPPVETTYNYEWNLISHPTDYQGEIKQGHKQTLNLSQLSVGLYVFKVTVSSENAFGEGFVNVTVKPARRVNLPPVAVVSPQLQELTLPLTSALIDGSQSTDDTEIVSYHWEEINGPFIEEKTSVDSPVLRLSNLDPGNYSFRLTVTDSDGATNSTTAALIVNNAVDYPPVANAGPNHTITLPQNSITLNGNQSSDDHQIVLYEWSLGPGSEGKHVVMQGVQTPYLHLSAMQEGDYTFQLKVTDSSRQQSTAVVTVIVQPENNRPPVAVAGPDKELIFPVESATLDGSSSSDDHGIVFYHWEHVRGPSAVEMENIDKAIATVTGLQVGTYHFRLTVKDQQGLSSTSTLTVAVKKENNSPPRARAGGRHVLVLPNNSITLDGSRSTDDQRIVSYLWIRDGQSPAAGDVIDGSDHSVALQLTNLVEGVYTFHLRVTDSQGASDTDTATVEVQPDPRKSGLVELTLQVGVGQLTEQRKDTLVRQLAVLLNVLDSDIKVQKIRAHSDLSTVIVFYVQSRPPFKVLKAAEVARNLHMRLSKEKADFLLFKVLRVDTAGCLLKCSGHGHCDPLTKRCICSHLWMENLIQRYIWDGESNCEWS

SEQ ID NO: 1500 - protein, 829 aa, synthetic construct
  REGION 1..829: note = KIAA0922 (A2VDJ0) ECD
QAIEPLPNVVELWQAEEGELLLPTQGDSEEGLEEPSQEQSFSDKLFSGKGLHFQPSVLDFGIQFLGHPVAKILHAYNPSRDSEVVVNSVFAAAGHFHVPPVPCRVIPAMGKTSFRIIFLPTEEGSIESSLFINTSSYGVLSYHVSGIGTRRISTEGSAKQLPNAYFLLPKVQSIQLSQMQAETTNTSLLQVQLECSLHNKVCQQLKGCYLESDDVLRLQMSIMVTMENFSKEFEENTQHLLDHLSIVYVATDESETSDDSAVNMYILHSGNSLIWIQDIRHFSQRDALSLQFEPVLLPTSTTNFTKIASFTCKATSCDSGIIEDVKKTTHTPTLKACLFSSVAQGYFRMDSSATQFHIETHENTSGLWSIWYRNHFDRSVVLNDVFLSKETKHMLKILNFTGPLFLPPGCWNIFSLKLAVKDIAINLFTNVFLTTNIGAIFAIPLQIYSAPTKEGSLGFEVIAHCGMHYFMGKSKAGNPNWNGSLSLDQSTWNVDSELANKLYERWKKYKNGDVCKRNVLGTTRFAHLKKSKESESFVFFLPRLIAEPGLMLNFSATALRSRMIKYFVVQNPSSWPVSLQLLPLSLYPKPEALVHLLHRWFGTDMQMINFTTGEFQLTEACPYLGTHSEESRFGILHLHLQPLEMKRVGVVFTPADYGKVTSLILIRNNLTVIDMIGVEGFGARELLKVGGRLPGAGGSLRFKVPESTLMDCRRQLKDSKQILSITKNFKVENIGPLPITVSSLKINGYNCQGYGFEVLDCHQFSLDPNTSRDISIVFTPDFTSSWVIRDLSLVTAADLEFRFTLNVTLPHHLLPLCADVVPGPSWEES

SEQ ID NO: 1501 - protein, 869 aa, synthetic construct
  REGION 1..869: note = KIAA1324 (Q6UXG2) ECD
TGPELHACKESEYHYEYTACDSTGSRWRVAVPHTPGLCTSLPDPIKGTECSFSCNAGEFLDMKDQSCKPCAEGRYSLGTGIRFDEWDELPHGFASLSANMELDDSAAESTGNCTSSKWVPRGDYIASNTDECTATLMYAVNLKQSGTVNFEYYYPDSSIIFEFFVQNDQCQPNADDSRWMKTTEKGWEFHSVELNRGNNVLYWRTTAFSVWTKVPKPVLVRNIAITGVAYTSECFPCKPGTYADKQGSSFCKLCPANSYSNKGETSCHQCDPDKYSEKGSSSCNVRPACTDKDYFYTHTACDANGETQLMYKWAKPKICSEDLEGAVKLPASGVKTHCPPCNPGFFKTNNSTCQPCPYGSYSNGSDCTRCPAGTEPAVGFEYKWWNTLPTNMETTVLSGINFEYKGMTGWEVAGDHIYTAAGASDNDFMILTLVVPGFRPPQSVMADTENKEVARITFVFETLCSVNCELYFMVGVNSRTNTPVETWKGSKGKQSYTYIIEENTTTSFTWAFQRTTFHEASRKYTNDVAKIYSINVTNVMNGVASYCRPCALEASDVGSSCTSCPAGYYIDRDSGTCHSCPTNTILKAHQPYGVQACVPCGPGTKNNKIHSLCYNDCTFSRNTPTRTFNYNFSALANTVTLAGGPSFTSKGLKYFHHFTLSLCGNQGRKMSVCTDNVTDLRIPEGESGFSKSITAYVCQAVIIPPEVTGYKAGVSSQPVSLADRLIGVTTDMTLDGITSPAELFHLESLGIPDVIFFYRSNDVTQSCSSGRSTTIRVRCSPQKTVPGSLLLPGTCSDGTCDGCNFHFLWESAAACPLCSVADYHAIVSSCVAGIQKTTYVWREPKLCSGGISLPEQRVTICKTIDFWLK

SEQ ID NO: 1502 - protein, 882 aa, synthetic construct
  REGION 1..882: note = KIAA1324L (A8MWY0) ECD
GDLPSSSSRPLPPCQEKDYHFEYTECDSSGSRWRVAIPNSAVDCSGLPDPVRGKECTFSCASGEYLEMKNQVCSKCGEGTYSLGSGIKFDEWDELPAGFSNIATFMDTVVGPSDSRPDGCNNSSWIPRGNYIESNRDDCTVSLIYAVHLKKSGYVFFEYQYVDNNIFFEFFIQNDQCQEMDTTTDKWVKLTDNGEWGSHSVMLKSGTNILYWRTTGILMGSKAVKPVLVKNITIEGVAYTSECFPCKPGTFSNKPGSFNCQVCPRNTYSEKGAKECIRCKDDSQFSEEGSSECTERPPCTTKDYFQIHTPCDEEGKTQIMYKWIEPKICREDLTDAIRLPPSGEKKDCPPCNPGFYNNGSSSCHPCPPGTFSDGTKECRPCPAGTEPALGFEYKWWNVLPGNMKTSCFNVGNSKCDGMNGWEVAGDHIQSGAGGSDNDYLILNLHIPGFKPPTSMTGATGSELGRITFVFETLCSADCVLYFMVDINRKSTNVVESWGGTKEKQAYTHIIFKNATFTFTWAFQRTNQGQDNRRFINDMVKIYSITATNAVDGVASSCRACALGSEQSGSSCVPCPPGHYIEKETNQCKECPPDTYLSIHQVYGKEACIPCGPGSKNNQDHSVCYSDCFFYHEKENQSLHYDFSNLSSVGSLMNGPSFTSKGTKYFHFFNISLCGHEGKKMALCTNNITDFTVKEIVAGSDDYTNLVGAFVCQSTIIPSESKGFRAALSSQSIILADTFIGVTVETTLKNINIKEDMFPVPTSQIPDVHFFYKSSTATTSCINGRSTAVKMRCNPTKSGAGVISVPSKCPAGTCDGCTFYFLWESAEACPLCTEHDFHEIEGACKRGFQETLYVWNEPKWCIKGISLPEKKLATCETVDFWLK

SEQ ID NO: 1503 - protein, 72 aa, synthetic construct
  REGION 1..72: note = KIAA1644 (Q3SXP7) ECD
AHFRVCEPYTDHKGRYHFGFHCPRLSDNKTFILCCHHNNTVFKYCCNETEFQAVMQANLTASSEGYMHNNYT

SEQ ID NO: 1504 - protein, 224 aa, synthetic construct
  REGION 1..224: note = KIR2DL1 (P43626) ECD
HEGVHRKPSLLAHPGPLVKSEETVILQCWSDVMFEHFLLHREGMFNDTLRLIGEHHDGVSKANFSISRMTQDLAGTYRCYGSVTHSPYQVSAPSDPLDIVIIGLYEKPSLSAQPGPTVLAGENVTLSCSSRSSYDMYHLSREGEAHERRLPAGPKVNGTFQADFPLGPATHGGTYRCFGSFHDSPYEWSKSSDPLLVSVTGNPSNSWPSPTEPSSKTGNPRHLH

SEQ ID NO: 1505 - protein, 224 aa, synthetic construct
  REGION 1..224: note = KIR2DL2 (P43627) ECD
HEGVHRKPSLLAHPGRLVKSEETVILQCWSDVRFEHFLLHREGKFKDTLHLIGEHHDGVSKANFSIGPMMQDLAGTYRCYGSVTHSPYQLSAPSDPLDIVITGLYEKPSLSAQPGPTVLAGESVTLSCSSRSSYDMYHLSREGEAHECRFSAGPKVNGTFQADFPLGPATHGGTYRCFGSFRDSPYEWSNSSDPLLVSVIGNPSNSWPSPTEPSSKTGNPRHLH

SEQ ID NO: 1506 - protein, 224 aa, synthetic construct
  REGION 1..224: note = KIR2DL3 (P43628) ECD
HEGVHRKPSLLAHPGPLVKSEETVILQCWSDVRFQHFLLHREGKFKDTLHLIGEHHDGVSKANFSIGPMMQDLAGTYRCYGSVTHSPYQLSAPSDPLDIVITGLYEKPSLSAQPGPTVLAGESVTLSCSSRSSYDMYHLSREGEAHERRFSAGPKVNGTFQADFPLGPATHGGTYRCFGSFRDSPYEWSNSSDPLLVSVTGNPSNSWPSPTEPSSETGNPRHLH

SEQ ID NO: 1507 - protein, 221 aa, synthetic construct
  REGION 1..221: note = KIR2DL4 (Q99706) ECD
WAHVGGQDKPFCSAWPSAVVPQGGHVTLRCHYRRGFNIFTLYKKDGVPVPELYNRIFWNSFLISPVTPAHAGTYRCRGFHPHSPTEWSAPSNPLVIMVTGLYEKPSLTARPGPTVRAGENVTLSCSSQSSFDIYHLSREGEAHELRLPAVPSINGTFQADFPLGPATHGETYRCFGSFHGSPYEWSDPSDPLPVSVTGNPSSSWPSPTEPSFKTGIARHLH

SEQ ID NO: 1508 - protein, 217 aa, synthetic construct
  REGION 1..217: note = KIR2DL5A (Q8N109) ECD
HEGGQDKPLLSAWPSAVVPRGGHVTLLCRSRLGFTIFSLYKEDGVPVPELYNKIFWKSILMGPVTPAHAGTYRCRGSHPRSPIEWSAPSNPLVIVVTGLFGKPSLSAQPGPTVRTGENVTLSCSSRSSFDMYHLSREGRAHEPRLPAVPSVNGTFQADFPLGPATHGGTYTCFGSLHDSPYEWSDPSDPLLVSVTGNSSSSSSSPTEPSSKTGIRRH

SEQ ID NO: 1509 - protein, 217 aa, synthetic construct
  REGION 1..217: note = KIR2DL5B (Q8NHK3) ECD
HEGGQDKPLLSAWPSAVVPRGGHVTLLCRSRLGFTIFSLYKEDGVPVPELYNKIFWKSILMGPVTPAHAGTYRCRGSHPRSPIEWSAPSNPLVIVVTGLFGKPSLSAQPGPTVRTGENVTLSCSSRSSFDMYHLSREGRAHEPRLPAVPSVDGTFQADFPLGPATHGGTYTCFSSLHDSPYEWSDPSDPLLVSVTGNSSSSSSSPTEPSSKTGIRRH

SEQ ID NO: 1510 - protein, 224 aa, synthetic construct
  REGION 1..224: note = KIR2DS1 (Q14954) ECD
HEGVHRKPSLLAHPGRLVKSEETVILQCWSDVMFEHFLLHREGMFNDTLRLIGEHHDGVSKANFSISRMKQDLAGTYRCYGSVTHSPYQLSAPSDPLDIVIIGLYEKPSLSAQPGPTVLAGENVTLSCSSRSSYDMYHLSREGEAHERRLPAGTKVNGTFQANFPLGPATHGGTYRCFGSFRDSPYEWSKSSDPLLVSVTGNPSNSWPSPTEPSSETGNPRHLH

SEQ ID NO: 1511 - protein, 224 aa, synthetic construct
  REGION 1..224: note = KIR2DS2 (P43631) ECD
HEGVHRKPSLLAHPGPLVKSEETVILQCWSDVRFEHFLLHREGKYKDTLHLIGEHHDGVSKANFSIGPMMQDLAGTYRCYGSVTHSPYQLSAPSDPLDIVITGLYEKPSLSAQPGPTVLAGESVTLSCSSRSSYDMYHLSREGEAHERRFSAGPKVNGTFQADFPLGPATHGGTYRCFGSFRDSPYEWSNSSDPLLVSVTGNPSNSWPSPTEPSSKTGNPRHLH

SEQ ID NO: 1512 - protein, 224 aa, synthetic construct
  REGION 1..224: note = KIR2DS3 (Q14952) ECD
HEGFRRKPSLLAHPGRLVKSEETVILQCWSDVMFEHFLLHREGTFNDTLRLIGEHIDGVSKANFSIGRMRQDLAGTYRCYGSVPHSPYQFSAPSDPLDIVITGLYEKPSLSAQPGPTVLAGESVTLSCSSWSSYDMYHLSTEGEAHERRFSAGPKVNGTFQADFPLGPATQGGTYRCFGSFHDSPYEWSKSSDPLLVSVTGNPSNSWPSPTEPSSKTGNPRHLH

SEQ ID NO: 1513 - protein, 224 aa, synthetic construct
  REGION 1..224: note = KIR2DS4 (P43632) ECD
QEGVHRKPSFLALPGHLVKSEETVILQCWSDVMFEHFLLHREGKFNNTLHLIGEHHDGVSKANFSIGPMMPVLAGTYRCYGSVPHSPYQLSAPSDPLDMVIIGLYEKPSLSAQPGPTVQAGENVTLSCSSRSSYDMYHLSREGEAHERRLPAVRSINGTFQADFPLGPATHGGTYRCFGSFRDAPYEWSNSSDPLLVSVTGNPSNSWPSPTEPSSKTGNPRHLH

SEQ ID NO: 1514 - protein, 224 aa, synthetic construct
  REGION 1..224: note = KIR2DS5 (Q14953) ECD
HEGFRRKPSLLAHPGPLVKSEETVILQCWSDVMFEHFLLHREGTFNHTLRLIGEHIDGVSKGNFSIGRMTQDLAGTYRCYGSVTHSPYQLSAPSDPLDIVITGLYEKPSLSAQPGPTVLAGESVTLSCSSRSSYDMYHLSREGEAHERRLPAGPKVNRTFQADFPLDPATHGGTYRCFGSFRDSPYEWSKSSDPLLVSVTGNSSNSWPSPTEPSSETGNPRHLH

SEQ ID NO: 1515 - protein, 319 aa, synthetic construct
  REGION 1..319: note = KIR3DL1 (P43629) ECD
HMGGQDKPFLSAWPSAVVPRGGHVTLRCHYRHRFNNFMLYKEDRIHIPIFHGRIFQESFNMSPVTTAHAGNYTCRGSHPHSPTGWSAPSNPVVIMVTGNHRKPSLLAHPGPLVKSGERVILQCWSDIMFEHFFLHKEGISKDPSRLVGQIHDGVSKANFSIGPMMLALAGTYRCYGSVTHTPYQLSAPSDPLDIVVTGPYEKPSLSAQPGPKVQAGESVTLSCSSRSSYDMYHLSREGGAHERRLPAVRKVNRTFQADFPLGPATHGGTYRCFGSFRHSPYEWSDPSDPLLVSVTGNPSSSWPSPTEPSSKSGNPRHLH

SEQ ID NO: 1516 - protein, 319 aa, synthetic construct
  REGION 1..319: note = KIR3DL2 (P43630) ECD
LMGGQDKPFLSARPSTVVPRGGHVALQCHYRRGFNNFMLYKEDRSHVPIFHGRIFQESFIMGPVTPAHAGTYRCRGSRPHSLTGWSAPSNPLVIMVTGNHRKPSLLAHPGPLLKSGETVILQCWSDVMFEHFFLHREGISEDPSRLVGQIHDGVSKANFSIGPLMPVLAGTYRCYGSVPHSPYQLSAPSDPLDIVITGLYEKPSLSAQPGPTVQAGENVTLSCSSWSSYDIYHLSREGEAHERRLRAVPKVNRTFQADFPLGPATHGGTYRCFGSFRALPCVWSNSSDPLLVSVTGNPSSSWPSPTEPSSKSGICRHLH

SEQ ID NO: 1517 - protein, 297 aa, synthetic construct
  REGION 1..297: note = KIR3DL3 (Q8N743) ECD
QDKPFLSAWPGTVVSEGQHVTLQCRSRLGFNEFSLSKEDGMPVPELYNRIFRNSFLMGPVTPAHAGTYRCCSSHPHSPTGWSAPSNPVVIMVTGVHRKPSLLAHPGPLVKSGETVILQCWSDVRFERFLLHREGITEDPLRLVGQLHDAGSQVNYSMGPMTPALAGTYRCFGSVTHLPYELSAPSDPLDIVVVGLYGKPSLSAQPGPTVQAGENVTLSCSSRSLFDIYHLSREAEAGELRLTAVLRVNGTFQANFPLGPVTHGGNYRCFGSFRALPHAWSDPSDPLPVSVTGNSRHL

SEQ ID NO: 1518 - protein, 319 aa, synthetic construct
  REGION 1..319: note = KIR3DS1 (Q14943) ECD
HMGGQDKPFLSAWPSAVVPRGGHVTLRCHYRHRFNNFMLYKEDRIHVPIFHGRIFQEGFNMSPVTTAHAGNYTCRGSHPHSPTGWSAPSNPMVIMVTGNHRKPSLLAHPGPLVKSGERVILQCWSDIMFEHFFLHREWISKDPSRLVGQIHDGVSKANFSIGSMMRALAGTYRCYGSVTHTPYQLSAPSDPLDIVVTGLYEKPSLSAQPGPKVQAGESVTLSCSSRSSYDMYHLSREGGAHERRLPAVRKVNRTFQADFPLGPATHGGTYRCFGSFRHSPYEWSDPSDPLLVSVTGNPSSSWPSPTEPSSKSGNLRHLH

SEQ ID NO: 1519 - protein, 483 aa, synthetic construct
  REGION 1..483: note = KIRREL (Q96J84) ECD
QGTQTRFSQEPADQTVVAGQRAVLPCVLLNYSGIVQWTKDGLALGMGQGLKAWPRYRVVGSADAGQYNLEITDAELSDDASYECQATEAALRSRRAKLTVLIPPEDTRIDGGPVILLQAGTPHNLTCRAFNAKPAATIIWFRDGTQQEGAVASTELLKDGKRETTVSQLLINPTDLDIGRVFTCRSMNEAIPSGKETSIELDVHHPPTVTLSIEPQTVQEGERVVFTCQATANPEILGYRWAKGGFLIEDAHESRYETNVDYSFFTEPVSCEVHNKVGSTNVSTLVNVHFAPRIVVDPKPTTTDIGSDVTLTCVWVGNPPLTLTWTKKDSNMVLSNSNQLLLKSVTQADAGTYTCRAIVPRIGVAEREVPLYVNGPPIISSEAVQYAVRGDGGKVECFIGSTPPPDRIAWAWKENFLEVGTLERYTVERTNSGSGVLSTLTINNVMEADFQTHYNCTAWNSFGPGTAIIQLEEREVLPVGIIA

SEQ ID NO: 1520 - protein, 490 aa, synthetic construct
  REGION 1..490: note = KIRREL2 (Q6UWL6) ECD
GPSPHFLQQPEDLVVLLGEEARLPCALGAYWGLVQWTKSGLALGGQRDLPGWSRYWISGNAANGQHDLHIRPVELEDEASYECQATQAGLRSRPAQLHVLVPPEAPQVLGGPSVSLVAGVPANLTCRSRGDARPTPELLWFRDGVLLDGATFHQTLLKEGTPGSVESTLTLTPFSHDDGATFVCRARSQALPTGRDTAITLSLQYPPEVTLSASPHTVQEGEKVIFLCQATAQPPVTGYRWAKGGSPVLGARGPRLEVVADASFLTEPVSCEVSNAVGSANRSTALDVLFGPILQAKPEPVSVDVGEDASFSCAWRGNPLPRVTWTRRGGAQVLGSGATLRLPSVGPEDAGDYVCRAEAGLSGLRGGAAEARLTVNAPPVVTALHSAPAFLRGPARLQCLVFASPAPDAVVWSWDEGFLEAGSQGRFLVETFPAPESRGGLGPGLISVLHISGTQESDFSRSFNCSARNRLGEGGAQASLGRRDLLPTVR

SEQ ID NO: 1521 - protein, 514 aa, synthetic construct
  REGION 1..514: note = KIRREL3 (Q8IZU9) ECD
LQKRGCCLVLGYMAKDKFRRMNEGQVYSFSQQPQDQVVVSGQPVTLLCAIPEYDGFVLWIKDGLALGVGRDLSSYPQYLVVGNHLSGEHHLKILRAELQDDAVYECQAIQAAIRSRPARLTVLVPPDDPVILGGPVISLRAGDPLNLTCHADNAKPAASIIWLRKGEVINGATYSKTLLRDGKRESIVSTLFISPGDVENGQSIVCRATNKAIPGGKETSVTIDIQHPPLVNLSVEPQPVLEDNVVTFHCSAKANPAVTQYRWAKRGQIIKEASGEVYRTTVDYTYFSEPVSCEVTNALGSTNLSRTVDVYFGPRMTTEPQSLLVDLGSDAIFSCAWTGNPSLTIVWMKRGSGVVLSNEKTLTLKSVRQEDAGKYVCRAVVPRVGAGEREVTLTVNGPPIISSTQTQHALHGEKGQIKCFIRSTPPPDRIAWSWKENVLESGTSGRYTVETISTEEGVISTLTISNIVRADFQTIYNCTAWNSFGSDTEIIRLKEQGSEMKSGAGLEAESVPMA

SEQ ID NO: 1522 - protein, 499 aa, synthetic construct
  REGION 1..499: note = KIT (P10721) ECD
QPSVSPGEPSPPSIHPGKSDLIVRVGDEIRLLCTDPGFVKWTFEILDETNENKQNEWITEKAEATNTGKYTCTNKHGLSNSIYVFVRDPAKLFLVDRSLYGKEDNDTLVRCPLTDPEVTNYSLKGCQGKPLPKDLRFIPDPKAGIMIKSVKRAYHRLCLHCSVDQEGKSVLSEKFILKVRPAFKAVPVVSVSKASYLLREGEEFTVTCTIKDVSSSVYSTWKRENSQTKLQEKYNSWHHGDFNYERQATLTISSARVNDSGVFMCYANNTFGSANVTTTLEVVDKGFINIFPMINTTVFVNDGENVDLIVEYEAFPKPEHQQWIYMNRTFTDKWEDYPKSENESNIRYVSELHLTRLKGTEGGTYTFLVSNSDVNAAIAFNVYVNTKPEILTYDRLVNGMLQCVAAGFPEPTIDWYFCPGTEQRCSASVLPVDVQTLNSSGPPFGKLVVQSSIDSSAFKHNGTVECKAYNDVGKTSAYFNFAFKGNNKEQIHPHTLFTP

SEQ ID NO: 1523 - protein, 189 aa, synthetic construct
  REGION 1..189: note = KITLG (P21583) ECD
EGICRNRVTNNVKDVTKLVANLPKDYMITLKYVPGMDVLPSHCWISEMVVQLSDSLTDLLDKFSNISEGLSNYSIIDKLVNIVDDLVECVKENSSKDLKKSFKSPEPRLFTPEEFFRIFNRSIDAFKDFVVASETSDCVVSSTLSPEKDSRVSVTKPFMLPPVAASSLRNDSSSSNRKAKNPPGDSSLH

SEQ ID NO: 1524 - protein, 948 aa, synthetic construct
  REGION 1..948: note = KL (Q9UEF7) ECD
EPGDGAQTWARFSRPPAPEAAGLFQGTFPDGFLWAVGSAAYQTEGGWQQHGKGASIWDTFTHHPLAPPGDSRNASLPLGAPSPLQPATGDVASDSYNNVFRDTEALRELGVTHYRFSISWARVLPNGSAGVPNREGLRYYRRLLERLRELGVQPVVTLYHWDLPQRLQDAYGGWANRALADHFRDYAELCFRHFGGQVKYWITIDNPYVVAWHGYATGRLAPGIRGSPRLGYLVAHNLLLAHAKVWHLYNTSFRPTQGGQVSIALSSHWINPRRMTDHSIKECQKSLDFVLGWFAKPVFIDGDYPESMKNNLSSILPDFTESEKKFIKGTADFFALCFGPTLSFQLLDPHMKFRQLESPNLRQLLSWIDLEFNHPQIFIVENGWFVSGTTKRDDAKYMYYLKKFIMETLKAIKLDGVDVIGYTAWSLMDGFEWHRGYSIRRGLFYVDFLSQDKMLLPKSSALFYQKLIEKNGFPPLPENQPLEGTFPCDFAWGVVDNYIQVDTTLSQFTDLNVYLWDVHHSKRLIKVDGVVTKKRKSYCVDFAAIQPQIALLQEMHVTHFRFSLDWALILPLGNQSQVNHTILQYYRCMASELVRVNITPVVALWQPMAPNQGLPRLLARQGAWENPYTALAFAEYARLCFQELGHHVKLWITMNEPYTRNMTYSAGHNLLKAHALAWHVYNEKFRHAQNGKISIALQADWIEPACPFSQKDKEVAERVLEFDIGWLAEPIFGSGDYPWVMRDWLNQRNNFLLPYFTEDEKKLIQGTFDFLALSHYTTILVDSEKEDPIKYNDYLEVQEMTDITWLNSPSQVAVVPWGLRKVLNWLKFKYGDLPMYIISNGIDDGLHAEDDQLRVYYMQNYINEALKAHILDGINLCGYFAYSFNDRTAPRFGLYRYAADQFEPKASMKHYRKIIDSNGFPGPETLERFCPEEFTVCTECSFFHTRKS

SEQ ID NO: 1525 - protein, 372 aa, synthetic construct
  REGION 1..372: note = KREMEN1 (Q96MU8) ECD
RPAPSPGLGPECFTANGADYRGTQNWTALQGGKPCLFWNETFQHPYNTLKYPNGEGGLGEHNYCRNPDGDVSPWCYVAEHEDGVYWKYCEIPACQMPGNLGCYKDHGNPPPLTGTSKTSNKLTIQTCISFCRSQRFKFAGMESGYACFCGNNPDYWKYGEAASTECNSVCFGDHTQPCGGDGRIILFDTLVGACGGNYSAMSSVVYSPDFPDTYATGRVCYWTIRVPGASHIHFSFPLFDIRDSADMVELLDGYTHRVLARFHGRSRPPLSFNVSLDFVILYFFSDRINQAQGFAVLYQAVKEELPQERPAVNQTVAEVITEQANLSVSAARSSKVLYVITTSPSHPPQTVPGSNSWAPPMGAGSHRVEGWT

SEQ ID NO: 1526 - protein, 339 aa, synthetic construct
  REGION 1..339: note = KREMEN2 (Q8NCW0) ECD
GSLHSPGLSECFQVNGADYRGHQNRTGPRGAGRPCLFWDQTQQHSYSSASDPHGRWGLGAHNFCRNPDGDVQPWCYVAETEEGIYWRYCDIPSCHMPGYLGCFVDSGAPPALSGPSGTSTKLTVQVCLRFCRMKGYQLAGVEAGYACFCGSESDLARGRLAPATDCDQICFGHPGQLCGGDGRLGVYEVSVGSCQGNWTAPQGVIYSPDFPDEYGPDRNCSWALGPPGAALELTFRLFELADPRDRLELRDAASGSLLRAFDGARPPPSGPLRLGTAALLLTFRSDARGHAQGFALTYRGLQDAAEDPEAPEGSAQTPAAPLDGANVSCSPRPGAPPAA

SEQ ID NO: 1527 - protein, 1101 aa, synthetic construct
  REGION 1..1101: note = L1CAM (P32004) ECD
IQIPEEYEGHHVMEPPVITEQSPRRLVVFPTDDISLKCEASGKPEVQFRWTRDGVHFKPKEELGVTVYQSPHSGSFTITGNNSNFAQRFQGIYRCFASNKLGTAMSHEIRLMAEGAPKWPKETVKPVEVEEGESVVLPCNPPPSAEPLRIYWMNSKILHIKQDERVTMGQNGNLYFANVLTSDNHSDYICHAHFPGTRTIIQKEPIDLRVKATNSMIDRKPRLLFPTNSSSHLVALQGQPLVLECIAEGFPTPTIKWLRPSGPMPADRVTYQNHNKTLQLLKVGEEDDGEYRCLAENSLGSARHAYYVTVEAAPYWLHKPQSHLYGPGETARLDCQVQGRPQPEVTWRINGIPVEELAKDQKYRIQRGALILSNVQPSDTMVTQCEARNRHGLLLANAYIYVVQLPAKILTADNQTYMAVQGSTAYLLCKAFGAPVPSVQWLDEDGTTVLQDERFFPYANGTLGIRDLQANDTGRYFCLAANDQNNVTIMANLKVKDATQITQGPRSTIEKKGSRVTFTCQASFDPSLQPSITWRGDGRDLQELGDSDKYFIEDGRLVIHSLDYSDQGNYSCVASTELDVVESRAQLLVVGSPGPVPRLVLSDLHLLTQSQVRVSWSPAEDHNAPIEKYDIEFEDKEMAPEKWYSLGKVPGNQTSTTLKLSPYVHYTFRVTAINKYGPGEPSPVSETVVTPEAAPEKNPVDVKGEGNETTNMVITWKPLRWMDWNAPQVQYRVQWRPQGTRGPWQEQIVSDPFLVVSNTSTFVPYEIKVQAVNSQGKGPEPQVTIGYSGEDYPQAIPELEGIEILNSSAVLVKWRPVDLAQVKGHLRGYNVTYWREGSQRKHSKRHIHKDHVVVPANTTSVILSGLRPYSSYHLEVQAFNGRGSGPASEFTFSTPEGVPGHPEALHLECQSNTSLLLRWQPPLSHNGVLTGYVLSYHPLDEGGKGQLSFNLRDPELRTHNLTDLSPHLRYRFQLQATTKEGPGEAIVREGGTMALSGISDFGNISATAGENYSVVSWVPKEGQCNFRFHILFKALGEEKGGASLSPQYVSYNQSSYTQWDLQPDTDYEIHLFKERMFRHQMAVKTNGTGRVRLPPAGFATE

SEQ ID NO: 1528 - protein, 428 aa, synthetic construct
  REGION 1..428: note = LAG3 (P18627) ECD
LQPGAEVPVVWAQEGAPAQLPCSPTIPLQDLSLLRRAGVTWQHQPDSGPPAAAPGHPLAPGPHPAAPSSWGPRPRRYTVLSVGPGGLRSGRLPLQPRVQLDERGRQRGDFSLWLRPARRADAGEYRAAVHLRDRALSCRLRLRLGQASMTASPPGSLRASDWVILNCSFSRPDRPASVHWFRNRGQGRVPVRESPHHHLAESFLFLPQVSPMDSGPWGCILTYRDGFNVSIMYNLTVLGLEPPTPLTVYAGAGSRVGLPCRLPAGVGTRSFLTAKWTPPGGGPDLLVTGDNGDFTLRLEDVSQAQAGTYTCHIHLQEQQLNATVTLAIITVTPKSFGSPGSLGKLLCEVTPVSGQERFVWSSLDTPSQRSFSGPWLEAQEAQLLSQPWQCQLYQGERLLGAAVYFTELSSPGAQRSGRAPGALPAGHL

SEQ ID NO: 1529 - protein, 144 aa, synthetic construct
  REGION 1..144: note = LAIR1 (Q6GTX8) ECD
QEEDLPRPSISAEPGTVIPLGSHVTFVCRGPVGVQTFRLERESRSTYNDTEDVSQASPSESEARFRIDSVSEGNAGPYRCIYYKPPKWSEQSDYLELLVKETSGGPDSPDTEPGSSAGPTQRPSDNSHNEHAPASQGLKAEHLY

SEQ ID NO: 1530 - protein, 354 aa, synthetic construct
  REGION 1..354: note = LAMP1 (P11279) ECD
AMFMVKNGNGTACIMANFSAAFSVNYDTKSGPKNMTFDLPSDATVVLNRSSCGKENTSDPSLVIAFGRGHTLTLNFTRNATRYSVQLMSFVYNLSDTHLFPNASSKEIKTVESITDIRADIDKKYRCVSGTQVHMNNVTVTLHDATIQAYLSNSSFSRGETRCEQDRPSPTTAPPAPPSPSPSPVPKSPSVDKYNVSGTNGTCLLASMGLQLNLTYERKDNTTVTRLLNINPNKTSASGSCGAHLVTLELHSEGTTVLLFQFGMNASSSRFFLQGIQLNTILPDARDPAFKAANGSLRALQATVGNSYKCNAEEHVRVTKAFSVNIFKVWVQAFKVEGGQFGSVEECLLDENSM

SEQ ID NO: 1531 - protein, 347 aa, synthetic construct
  REGION 1..347: note = LAMP2 (P13473) ECD
LELNLTDSENATCLYAKWQMNFTVRYETTNKTYKTVTISDHGTVTYNGSICGDDQNGPKIAVQFGPGFSWIANFTKAASTYSIDSVSFSYNTGDNTTFPDAEDKGILTVDELLAIRIPLNDLFRCNSLSTLEKNDVVQHYWDVLVQAFVQNGTVSTNEFLCDKDKTSTVAPTIHTTVPSPTTTPTPKEKPEAGTYSVNNGNDTCLLATMGLQLNITQDKVASVININPNTTHSTGSCRSHTALLRLNSSTIKYLDFVFAVKNENRFYLKEVNISMYLVNGSVFSIANNNLSYWDAPLGSSYMCNKEQTVSVSGAFQINTFDLRVQPFNVTQGKYSTAQDCSADDDNF

SEQ ID NO: 1532 - protein, 354 aa, synthetic construct
  REGION 1..354: note = LAMP3 (Q9UQV4) ECD
KAFPETRDYSQPTAAATVQDIKKPVQQPAKQAPHQTLAARFMDGHITFQTAATVKIPTTTPATTKNTATTSPITYTLVTTQATPNNSHTAPPVTEVTVGPSLAPYSLPPTITPPAHTTGTSSSTVSHTTGNTTQPSNQTTLPATLSIALHKSTTGQKPVQPTHAPGTTAAAHNTTRTAAPASTVPGPTLAPQPSSVKTGIYQVLNGSRLCIKAEMGIQLIVQDKESVFSPRRYFNIDPNATQASGNCGTRKSNLLLNFQGGFVNLTFTKDEESYYISEVGAYLTVSDPETIYQGIKHAVVMFQTAVGHSFKCVSEQSLQLSAHLQVKTTDVQLQAFDFEDDHFGNVDECSSDYT

SEQ ID NO: 1533 - protein, 206 aa, synthetic construct
  REGION 1..206: note = LAMP5 (Q9UJQ1) ECD
EQEVENLSGLSTNPEKDIFVVRENGTTCLMAEFAAKFIVPYDVWASNYVDLITEQADIALTRGAEVKGRCGHSQSELQVFWVDRAYALKMLFVKESHNMSKGPEATWRLSKVQFVYDSSEKTHFKDAVSAGKHTANSHHLSALVTPAGKSYECQAQQTISLASSDPQKTVTMILSAVHIQPFDIISDFVFSEEHKCPVDEREQLEE

SEQ ID NO: 1534 - protein, 214 aa, synthetic construct
  REGION 1..214: note = LAYN (Q6UX15) ECD
ATGRLLSASDLDLRGGQPVCRGGTQRPCYKVIYFHDTSRRLNFEEAKEACRRDGGQLVSIESEDEQKLIEKFIENLLPSDGDFWIGLRRREEKQSNSTACQDLYAWTDGSISQFRNWYVDEPSCGSEVCVVMYHQPSAPAGIGGPYMFQWNDDRCNMKNNFICKYSDEKPAVPSREAEGEETELTTPVLPEETQEEDAKKTFKESREAALNLAY

SEQ ID NO: 1535 - protein, 1863 aa, synthetic construct
  REGION 1..1863: note = LCT (P09848) ECD
SDWESDRNFISTAGPLTNDLLHNLSGLLGDQSSNFVAGDKDMYVCHQPLPTFLPEYFSSLHASQITHYKVFLSWAQLLPAGSTQNPDEKTVQCYRRLLKALKTARLQPMVILHHQTLPASTLRRTEAFADLFADYATFAFHSFGDLVGIWFTFSDLEEVIKELPHQESRASQLQTLSDAHRKAYEIYHESYAFQGGKLSVVLRAEDIPELLLEPPISALAQDTVDFLSLDLSYECQNEASLRQKLSKLQTIEPKVKVFIFNLKLPDCPSTMKNPASLLFSLFEAINKDQVLTIGFDINEFLSCSSSSKKSMSCSLTGSLALQPDQQQDHETTDSSPASAYQRIWEAFANQSRAERDAFLQDTFPEGFLWGASTGAFNVEGGWAEGGRGVSIWDPRRPLNTTEGQATLEVASDSYHKVASDVALLCGLRAQVYKFSISWSRIFPMGHGSSPSLPGVAYYNKLIDRLQDAGIEPMATLFHWDLPQALQDHGGWQNESVVDAFLDYAAFCFSTFGDRVKLWVTFHEPWVMSYAGYGTGQHPPGISDPGVASFKVAHLVLKAHARTWHHYNSHHRPQQQGHVGIVLNSDWAEPLSPERPEDLRASERFLHFMLGWFAHPVFVDGDYPATLRTQIQQMNRQCSHPVAQLPEFTEAEKQLLKGSADFLGLSHYTSRLISNAPQNTCIPSYDTIGGFSQHVNHVWPQTSSSWIRVVPWGIRRLLQFVSLEYTRGKVPIYLAGNGMPIGESENLFDDSLRVDYFNQYINEVLKAIKEDSVDVRSYIARSLIDGFEGPSGYSQRFGLHHVNFSDSSKSRTPRKSAYFFTSIIEKNGFLTKGAKRLLPPNTVNLPSKVRAFTFPSEVPSKAKVVWEKFSSQPKFERDLFYHGTFRDDFLWGVSSSAYQIEGAWDADGKGPSIWDNFTHTPGSNVKDNATGDIACDSYHQLDADLNMLRALKVKAYRFSISWSRIFPTGRNSSINSHGVDYYNRLINGLVASNIFPMVTLFHWDLPQALQDIGGWENPALIDLFDSYADFCFQTFGDRVKFWMTFNEPMYLAWLGYGSGEFPPGVKDPGWAPYRIAHAVIKAHARVYHTYDEKYRQEQKGVISLSLSTHWAEPKSPGVPRDVEAADRMLQFSLGWFAHPIFRNGDYPDTMKWKVGNRSELQHLATSRLPSFTEEEKRFIRATADVFCLNTYYSRIVQHKTPRLNPPSYEDDQEMAEEEDPSWPSTAMNRAAPWGTRRLLNWIKEEYGDIPIYITENGVGLTNPNTEDTDRIFYHKTYINEALKAYRLDGIDLRGYVAWSLMDNFEWLNGYTVKFGLYHVDFNNTNRPRTARASARYYTEVITNNGMPLAREDEFLYGRFPEGFIWSAASAAYQIEGAWRADGKGLSIWDTFSHTPLRVENDAIGDVACDSYHKIAEDLVTLQNLGVSHYRFSISWSRILPDGTTRYINEAGLNYYVRLIDTLLAASIQPQVTIYHWDLPQTLQDVGGWENETIVQRFKEYADVLFQRLGDKVKFWITLNEPFVIAYQGYGYGTAAPGVSNRPGTAPYIVGHNLIKAHAEAWHLYNDVYRASQGGVISITISSDWAEPRDPSNQEDVEAARRYVQFMGGWFAHPIFKNGDYNEVMKTRIRDRSLAAGLNKSRLPEFTESEKRRINGTYDFFGFNHYTTVLAYNLNYATAISSFDADRGVASIADRSWPDSGSFWLKMTPFGFRRILNWLKEEYNDPPIYVTENGVSQREETDLNDTARIYYLRTYINEALKAVQDKVDLRGYTVWSAMDNFEWATGFSERFGLHFVNYSDPSLPRIPKASAKFYASVVRCNGFPDPATGPHACLHQPDAGPTISPVRQEEVQFLGLMLGTTEAQT

SEQ ID NO: 1536 - protein, 767 aa, synthetic construct
  REGION 1..767: note = LDLR (P01130) ECD
AVGDRCERNEFQCQDGKCISYKWVCDGSAECQDGSDESQETCLSVTCKSGDFSCGGRVNRCIPQFWRCDGQVDCDNGSDEQGCPPKTCSQDEFRCHDGKCISRQFVCDSDRDCLDGSDEASCPVLTCGPASFQCNSSTCIPQLWACDNDPDCEDGSDEWPQRCRGLYVFQGDSSPCSAFEFHCLSGECIHSSWRCDGGPDCKDKSDEENCAVATCRPDEFQCSDGNCIHGSRQCDREYDCKDMSDEVGCVNVTLCEGPNKFKCHSGECITLDKVCNMARDCRDWSDEPIKECGTNECLDNNGGCSHVCNDLKIGYECLCPDGFQLVAQRRCEDIDECQDPDTCSQLCVNLEGGYKCQCEEGFQLDPHTKACKAVGSIAYLFFTNRHEVRKMTLDRSEYTSLIPNLRNVVALDTEVASNRIYWSDLSQRMICSTQLDRAHGVSSYDTVISRDIQAPDGLAVDWIHSNIYWTDSVLGTVSVADTKGVKRKTLFRENGSKPRAIVVDPVHGFMYWTDWGTPAKIKKGGLNGVDIYSLVTENIQWPNGITLDLLSGRLYWVDSKLHSISSIDVNGGNRKTILEDEKRLAHPFSLAVFEDKVFWTDIINEAIFSANRLTGSDVNLLAENLLSPEDMVLFHNLTQPRGVNWCERTTLSNGGCQYLCLPAPQINPHSPKFTCACPDGMLLARDMRSCLTEAEAAVATQETSTVRLKVSSTAVRTQHTTTRPVPDTSRLPGATPGLTTVEIVTMSHQALGDVAGRGNEKKPSSVR

SEQ ID NO: 1537 - protein, 156 aa, synthetic construct
  REGION 1..156: note = LDLRAD3 (Q86YD5) ECD
QLLPGNNFTNECNIPGNFMCSNGRCIPGAWQCDGLPDCFDKSDEKECPKAKSKCGPTFFPCASGIHCIIGRFRCNGFEDCPDGSDEENCTANPLLCSTARYHCKNGLCIDKSFICDGQNNCQDNSDEESCESSQEPGSGQVFVTSENQLVYYPSIT

SEQ ID NO: 1538 - protein, 818 aa, synthetic construct
  REGION 1..818: note = LEPR (P48357) ECD
FNLSYPITPWRFKLSCMPPNSTYDYFLLPAGLSKNTSNSNGHYETAVEPKFNSSGTHFSNLSKTTFHCCFRSEQDRNCSLCADNIEGKTFVSTVNSLVFQQIDANWNIQCWLKGDLKLFICYVESLFKNLFRNYNYKVHLLYVLPEVLEDSPLVPQKGSFQMVHCNCSVHECCECLVPVPTAKLNDTLLMCLKITSGGVIFQSPLMSVQPINMVKPDPPLGLHMEITDDGNLKISWSSPPLVPFPLQYQVKYSENSTTVIREADKIVSATSLLVDSILPGSSYEVQVRGKRLDGPGIWSDWSTPRVFTTQDVIYFPPKILTSVGSNVSFHCIYKKENKIVPSKEIVWWMNLAEKIPQSQYDVVSDHVSKVTFFNLNETKPRGKFTYDAVYCCNEHECHHRYAELYVIDVNINISCETDGYLTKMTCRWSTSTIQSLAESTLQLRYHRSSLYCSDIPSIHPISEPKDCYLQSDGFYECIFQPIFLLSGYTMWIRINHSLGSLDSPPTCVLPDSVVKPLPPSSVKAEITINIGLLKISWEKPVFPENNLQFQIRYGLSGKEVQWKMYEVYDAKSKSVSLPVPDLCAVYAVQVRCKRLDGLGYWSNWSNPAYTVVMDIKVPMRGPEFWRIINGDTMKKEKNVTLLWKPLMKNDSLCSVQRYVINHHTSCNGTWSEDVGNHTKFTFLWTEQAHTVTVLAINSIGASVANFNLTFSWPMSKVNIVQSLSAYPLNSSCVIVSWILSPSDYKLMYFIIEWKNLNEDGEIKWLRISSSVKKYYIHDHFIPIEKYQFSLYPIFMEGVGKPKIINSFTQDDIEKHQSD

SEQ ID NO: 1539 - protein, 789 aa, synthetic construct
  REGION 1..789: note = LIFR (P42702) ECD
QKKGAPHDLKCVTNNLQVWNCSWKAPSGTGRGTDYEVCIENRSRSCYQLEKTSIKIPALSHGDYEITINSLHDFGSSTSKFTLNEQNVSLIPDTPEILNLSADFSTSTLYLKWNDRGSVFPHRSNVIWEIKVLRKESMELVKLVTHNTTLNGKDTLHHWSWASDMPLECAIHFVEIRCYIDNLHFSGLEEWSDWSPVKNISWIPDSQTKVFPQDKVILVGSDITFCCVSQEKVLSALIGHTNCPLIHLDGENVAIKIRNISVSASSGTNVVFTTEDNIFGTVIFAGYPPDTPQQLNCETHDLKEIICSWNPGRVTALVGPRATSYTLVESFSGKYVRLKRAEAPTNESYQLLFQMLPNQEIYNFTLNAHNPLGRSQSTILVNITEKVYPHTPTSFKVKDINSTAVKLSWHLPGNFAKINFLCEIEIKKSNSVQEQRNVTIKGVENSSYLVALDKLNPYTLYTFRIRCSTETFWKWSKWSNKKQHLTTEASPSKGPDTWREWSSDGKNLIIYWKPLPINEANGKILSYNVSCSSDEETQSLSEIPDPQHKAEIRLDKNDYIISVVAKNSVGSSPPSKIASMEIPNDDLKIEQVVGMGKGILLTWHYDPNMTCDYVIKWCNSSRSEPCLMDWRKVPSNSTETVIESDEFRPGIRYNFFLYGCRNQGYQLLRSMIGYIEELAPIVAPNFTVEDTSADSILVKWEDIPVEELRGFLRGYLFYFGKGERDTSKMRVLESGRSDIKVKNITDISQKTLRIADLQGKTSYHLVLRAYTDGGVGPEKSMYVVTKENS

SEQ ID NO: 1540 - protein, 445 aa, synthetic construct
  REGION 1..445: note = LILRA1 (O75019) ECD
PRTHVQAGTLPKPTLWAEPGSVITQGSPVTLWCQGILETQEYRLYREKKTAPWITRIPQEIVKKGQFPIPSITWEHTGRYRCFYGSHTAGWSEPSDPLELVVTGAYIKPTLSALPSPVVTSGGNVTLHCVSQVAFGSFILCKEGEDEHPQCLNSQPRTHGWSRAIFSVGPVSPSRRWSYRCYAYDSNSPHVWSLPSDLLELLVLGVSKKPSLSVQPGPIVAPGESLTLQCVSDVSYDRFVLYKEGERDFLQLPGPQPQAGLSQANFTLGPVSRSYGGQYRCSGAYNLSSEWSAPSDPLDILIAGQFRGRPFISVHPGPTVASGENVTLLCQSWGPFHTFLLTKAGAADAPLRLRSIHEYPKYQAEFPMSPVTSAHSGTYRCYGSLSSNPYLLSHPSDSLELMVSGAAETLSPPQNKSDSKAGAANTLSPSQNKTASHPQDYTVEN

SEQ ID NO: 1541 - protein, 426 aa, synthetic construct
  REGION 1..426: note = LILRA2 (Q8N149) ECD
GHLPKPTLWAEPGSVIIQGSPVTLRCQGSLQAEEYHLYRENKSASWVRRIQEPGKNGQFPIPSITWEHAGRYHCQYYSHNHSSEYSDPLELVVTGAYSKPTLSALPSPVVTLGGNVTLQCVSQVAFDGFILCKEGEDEHPQRLNSHSHARGWSWAIFSVGPVSPSRRWSYRCYAYDSNSPYVWSLPSDLLELLVPGVSKKPSLSVQPGPMVAPGESLTLQCVSDVGYDRFVLYKEGERDFLQRPGWQPQAGLSQANFTLGPVSPSHGGQYRCYSAHNLSSEWSAPSDPLDILITGQFYDRPSLSVQPVPTVAPGKNVTLLCQSRGQFHTFLLTKEGAGHPPLHLRSEHQAQQNQAEFRMGPVTSAHVGTYRCYSSLSSNPYLLSLPSDPLELVVSEAAETLSPSQNKTDSTTTSLGQHPQDYTVEN

SEQ ID NO: 1542 - protein, 423 aa, synthetic construct
  REGION 1..423: note = LILRA4 (P59901) ECD
ENLPKPILWAEPGPVITWHNPVTIWCQGTLEAQGYRLDKEGNSMSRHILKTLESENKVKLSIPSMMWEHAGRYHCYYQSPAGWSEPSDPLELVVTAYSRPTLSALPSPVVTSGVNVTLRCASRLGLGRFTLIEEGDHRLSWTLNSHQHNHGKFQALFPMGPLTFSNRGTFRCYGYENNTPYVWSEPSDPLQLLVSGVSRKPSLLTLQGPVVTPGENLTLQCGSDVGYIRYTLYKEGADGLPQRPGRQPQAGLSQANFTLSPVSRSYGGQYRCYGAHNVSSEWSAPSDPLDILIAGQISDRPSLSVQPGPTVTSGEKVTLLCQSWDPMFTFLLTKEGAAHPPLRLRSMYGAHKYQAEFPMSPVTSAHAGTYRCYGSRSSNPYLLSHPSEPLELVVSGATETLNPAQKKSDSKTAPHLQDYTVEN

SEQ ID NO: 1543 - protein, 227 aa, synthetic construct
  REGION 1..227: note = LILRA5 (A6NI73) ECD
GNLSKATLWAEPGSVISRGNSVTIRCQGTLEAQEYRLVKEGSPEPWDTQNPLEPKNKARFSIPSMTEHHAGRYRCYYYSPAGWSEPSDPLELVVTGFYNKPTLSALPSPVVTSGENVTLQCGSRLRFDRFILTEEGDHKLSWTLDSQLTPSGQFQALFPVGPVTPSHRWMLRCYGSRRHILQVWSEPSDLLEIPVSGAADNLSPSQNKSDSGTASHLQDYAVENLIR

SEQ ID NO: 1544 - protein, 424 aa, synthetic construct
  REGION 1..424: note = LILRA6 (Q6PI73) ECD
GPFPKPTLWAEPGSVISWGSPVTIWCQGSLEAQEYQLDKEGSPEPLDRNNPLEPKNKARFSIPSMTQHHAGRYRCHYYSSAGWSEPSDPLELVMTGFYNKPTLSALPSPVVASGGNMTLRCGSQKGYHHFVLMKEGEHQLPRTLDSQQLHSGGFQALFPVGPVTPSHRWRFTCYYYYTNTPRVWSHPSDPLEILPSGVSRKPSLLTLQGPVLAPGQSLTLQCGSDVGYDRFVLYKEGERDFLQRPGQQPQAGLSQANFTLGPVSPSHGGQYRCYGAHNLSSEWSAPSDPLNILMAGQIYDTVSLSAQPGPTVASGENVTLLCQSRGYFDTFLLTKEGAAHPPLRLRSMYGAHKYQAEFPMSPVTSAHAGTYRCYGSYSSNPHLLSFPSEPLELMVSGHSGGSSLPPTGPPSTPASHAKDYTVEN

SEQ ID NO: 1545 - protein, 438 aa, synthetic construct
  REGION 1..438: note = LILRB1 (Q8NHL6) ECD
GHLPKPTLWAEPGSVITQGSPVTLRCQGGQETQEYRLYREKKTALWITRIPQELVKKGQFPIPSITWEHAGRYRCYYGSDTAGRSESSDPLELVVTGAYIKPTLSAQPSPVVNSGGNVILQCDSQVAFDGFSLCKEGEDEHPQCLNSQPHARGSSRAIFSVGPVSPSRRWWYRCYAYDSNSPYEWSLPSDLLELLVLGVSKKPSLSVQPGPIVAPEETLTLQCGSDAGYNRFVLYKDGERDFLQLAGAQPQAGLSQANFTLGPVSRSYGGQYRCYGAHNLSSEWSAPSDPLDILIAGQFYDRVSLSVQPGPTVASGENVTLLCQSQGWMQTFLLTKEGAADDPWRLRSTYQSQKYQAEFPMGPVTSAHAGTYRCYGSQSSKPYLLTHPSDPLELVVSGPSGGPSSPTTGPTSTSGPEDQPLTPTGSDPQSGLGRHLGV

SEQ ID NO: 1546 - protein, 440 aa, synthetic construct
  REGION 1..440: note = LILRB2 (Q8N423) ECD
QTGTIPKPTLWAEPDSVITQGSPVTLSCQGSLEAQEYRLYREKKSASWITRIRPELVKNGQFHIPSITWEHTGRYGCQYYSRARWSELSDPLVLVMTGAYPKPTLSAQPSPVVTSGGRVTLQCESQVAFGGFILCKEGEEEHPQCLNSQPHARGSSRAIFSVGPVSPNRRWSHRCYGYDLNSPYVWSSPSDLLELLVPGVSKKPSLSVQPGPVVAPGESLTLQCVSDVGYDRFVLYKEGERDLRQLPGRQPQAGLSQANFTLGPVSRSYGGQYRCYGAHNLSSECSAPSDPLDILITGQIRGTPFISVQPGPTVASGENVTLLCQSWRQFHTFLLTKAGAADAPLRLRSIHEYPKYQAEFPMSPVTSAHAGTYRCYGSLNSDPYLLSHPSEPLELVVSGPSMGSSPPPTGPISTPAGPEDQPLTPTGSDPQSGLGRHLGV

SEQ ID NO: 1547 - protein, 420 aa, synthetic construct
  REGION 1..420: note = LILRB3 (O75022) ECD
GPFPKPTLWAEPGSVISWGSPVTIWCQGSQEAQEYRLHKEGSPEPLDRNNPLEPKNKARFSIPSMTEHHAGRYRCHYYSSAGWSEPSDPLEMVMTGAYSKPTLSALPSPVVASGGNMTLRCGSQKGYHHFVLMKEGEHQLPRTLDSQQLHSRGFQALFPVGPVTPSHRWRFTCYYYYTNTPWVWSHPSDPLEILPSGVSRKPSLLTLQGPVLAPGQSLTLQCGSDVGYNRFVLYKEGERDFLQRPGQQPQAGLSQANFTLGPVSPSNGGQYRCYGAHNLSSEWSAPSDPLNILMAGQIYDTVSLSAQPGPTVASGENVTLLCQSWWQFDTFLLTKEGAAHPPLRLRSMYGAHKYQAEFPMSPVTSAHAGTYRCYGSYSSNPHLLSHPSEPLELVVSGHSGGSSLPPTGPPSTPGLGRYLE

SEQ ID NO: 1548 - protein, 435 aa, synthetic construct
  REGION 1..435: note = LILRB5 (O75023) ECD
GTLPKPTLWAEPASVIARGKPVTLWCQGPLETEEYRLDKEGLPWARKRQNPLEPGAKAKFHIPSTVYDSAGRYRCYYETPAGWSEPSDPLELVATGFYAEPTLLALPSPVVASGGNVTLQCDTLDGLLTFVLVEEEQKLPRTLYSQKLPKGPSQALFPVGPVTPSCRWRFRCYYYYRKNPQVWSNPSDLLEILVPGVSRKPSLLIPQGSVVARGGSLTLQCRSDVGYDIFVLYKEGEHDLVQGSGQQPQAGLSQANFTLGPVSRSHGGQYRCYGAHNLSPRWSAPSDPLDILIAGLIPDIPALSVQPGPKVASGENVTLLCQSWHQIDTFFLTKEGAAHPPLCLKSKYQSYRHQAEFSMSPVTSAQGGTYRCYSAIRSYPYLLSSPSYPQELVVSGPSGDPSLSPTGSTPTPGPEDQPLTPTGLDPQSGLGRHLG

SEQ ID NO: 1549 - protein, 520 aa, synthetic construct
  REGION 1..520: note = LINGO1 (Q96FE5) ECD
CPPRCECSAQDRAVLCHRKRFVAVPEGIPTETRLLDLGKNRIKTLNQDEFASFPHLEELELNENIVSAVEPGAFNNLFNLRTLGLRSNRLKLIPLGVFTGLSNLTKLDISENKIVILLDYMFQDLYNLKSLEVGDNDLVYISHRAFSGLNSLEQLTLEKCNLTSIPTEALSHLHGLIVLRLRHLNINAIRDYSFKRLYRLKVLEISHWPYLDTMTPNCLYGLNLTSLSITHCNLTAVPYLAVRHLVYLRFLNLSYNPISTIEGSMLHELLRLQEIQLVGGQLAVVEPYAFRGLNYLRVLNVSGNQLTTLEESVFHSVGNLETLILDSNPLACDCRLLWVFRRRWRLNFNRQQPTCATPEFVQGKEFKDFPDVLLPNYFTCRRARIRDRKAQQVFVDEGHTVQFVCRADGDPPPAILWLSPRKHLVSAKSNGRLTVFPDGTLEVRYAQVQDNGTYLCIAANAGGNDSMPAHLHVRSYSPDWPHQPNKTFAFISNQPGEGEANSTRATVPFPFDIKTLIIAT

SEQ ID NO: 1550 - protein, 518 aa, synthetic construct
  REGION 1..518: note = LINGO2 (Q7L985) ECD
CPARCECSAQNKSVSCHRRRLIAIPEGIPIETKILDLSKNRLKSVNPEEFISYPLLEEIDLSDNIIANVEPGAFNNLFNLRSLRLKGNRLKLVPLGVFTGLSNLTKLDISENKIVILLDYMFQDLHNLKSLEVGDNDLVYISHRAFSGLLSLEQLTLEKCNLTAVPTEALSHLRSLISLHLKHLNINNMPVYAFKRLFHLKHLEIDYWPLLDMMPANSLYGLNLTSLSVTNTNLSTVPFLAFKHLVYLTHLNLSYNPISTIEAGMFSDLIRLQELHIVGAQLRTIEPHSFQGLRFLRVLNVSQNLLETLEENVFSSPRALEVLSINNNPLACDCRLLWILQRQPTLQFGGQQPMCAGPDTIRERSFKDFHSTALSFYFTCKKPKIREKKLQHLLVDEGQTVQLECSADGDPQPVISWVTPRRRFITTKSNGRATVLGDGTLEIRFAQDQDSGMYVCIASNAAGNDTFTASLTVKGFASDRFLYANRTPMYMTDSNDTISNGTNANTFSLDLKTILVST

SEQ ID NO: 1551 - protein, 507 aa, synthetic construct
  REGION 1..507: note = LINGO3 (P0C6S8) ECD
CPARCECTVQTRAVACTRRRLTAVPDGIPAETRLLELSRNRIRCLNPGDLAALPALEELDLSENAIAHVEPGAFANLPRLRVLRLRGNQLKLIPPGVFTRLDNLTLLDLSENKLVILLDYTFQDLHSLRRLEVGDNDLVFVSRRAFAGLLALEELTLERCNLTALSGESLGHLRSLGALRLRHLAIASLEDQNFRRLPGLLHLEIDNWPLLEEVAAGSLRGLNLTSLSVTHTNITAVPAAALRHQAHLTCLNLSHNPISTVPRGSFRDLVRLRELHLAGALLAVVEPQAFLGLRQIRLLNLSNNLLSTLEESTFHSVNTLETLRVDGNPLACDCRLLWIVQRRKTLNFDGRLPACATPAEVRGDALRNLPDSVLFEYFVCRKPKIRERRLQRVTATAGEDVRFLCRAEGEPAPTVAWVTPQHRPVTATSAGRARVLPGGTLEIQDARPQDSGTYTCVASNAGGNDTYFATLTVRPEPAANRTPGEAHNETLAALRAPLDLTTILVST

SEQ ID NO: 1552 - protein, 505 aa, synthetic construct
  REGION 1..505: note = LINGO4 (Q6UY18) ECD
GSCPAVCDCTSQPQAVLCGHRQLEAVPGGLPLDTELLDLSGNRLWGLQQGMLSRLSLLQELDLSYNQLSTLEPGAFHGLQSLLTLRLQGNRLRIMGPGVFSGLSALTLLDLRLNQIVLFLDGAFGELGSLQKLEVGDNHLVFVAPGAFAGLAKLSTLTLERCNLSTVPGLALARLPALVALRLRELDIGRLPAGALRGLGQLKELEIHLWPSLEALDPGSLVGLNLSSLAITRCNLSSVPFQALYHLSFLRVLDLSQNPISAIPARRLSPLVRLQELRLSGACLTSIAAHAFHGLTAFHLLDVADNALQTLEETAFPSPDKLVTLRLSGNPLTCDCRLLWLLRLRRHLDFGMSPPACAGPHHVQGKSLKEFSDILPPGHFTCKPALIRKSGPRWVIAEEGGHAVFSCSGDGDPAPTVSWMRPHGAWLGRAGRVRVLEDGTLEIRSVQLRDRGAYVCVVSNVAGNDSLRTWLEVIQVEPPNGTLSDPNITVPGIPGPFFLDSRGVA

SEQ ID NO: 1553 - protein, 278 aa, synthetic construct
  REGION 1..278: note = LMAN2 (Q12907) ECD
DITDGNSEHLKREHSLIKPYQGVGSSSMPLWDFQGSTMLTSQYVRLTPDERSKEGSIWNHQPCFLKDWEMHVHFKVHGTGKKNLHGDGIALWYTRDRLVPGPVFGSKDNFHGLAIFLDTYPNDETTERVFPYISVMVNNGSLSYDHSKDGRWTELAGCTADFRNRDHDTFLAVRYSRGRLTVMTDLEDKNEWKNCIDITGVRLPTGYYFGASAGTGDLSDNHDIISMKLFQLMVEHTPDEESIDWTKIEPSVNFLKSPKDNVDDPTGNFRSGPLTGWR

SEQ ID NO: 1554 - protein, 269 aa, synthetic construct
  REGION 1..269: note = LMAN2L (Q9H0V9) ECD
GQTFEYLKREHSLSKPYQGVGTGSSSLWNLMGNAMVMTQYIRLTPDMQSKQGALWNRVPCFLRDWELQVHFKIHGQGKKNLHGDGLAIWYTKDRMQPGPVFGNMDKFVGLGVFVDTYPNEEKQQERVFPYISAMVNNGSLSYDHERDGRPTELGGCTAIVRNLHYDTFLVIRYVKRHLTIMMDIDGKHEWRDCIEVPGVRLPRGYYFGTSSITGDLSDNHDVISLKLFELTVERTPEEEKLHRDVFLPSVDNMKLPEMTAPLPPLSGLA

SEQ ID NO: 1555 - protein, 505 aa, synthetic construct
  REGION 1..505: note = LRFN1 (Q9P244) ECD
QPCPGRCICQNVAPTLTMLCAKTGLLFVPPAIDRRVVELRLTDNFIAAVRRRDFANMTSLVHLTLSRNTIGQVAAGAFADLRALRALHLDSNRLAEVRGDQLRGLGNLRHLILGNNQIRRVESAAFDAFLSTVEDLDLSYNNLEALPWEAVGQMVNLNTLTLDHNLIDHIAEGTFVQLHKLVRLDMTSNRLHKLPPDGLFLRSQGTGPKPPTPLTVSFGGNPLHCNCELLWLRRLTREDDLETCATPEHLTDRYFWSIPEEEFLCEPPLITRQAGGRALVVEGQAVSLRCRAVGDPEPVVHWVAPDGRLLGNSSRTRVRGDGTLDVTITTLRDSGTFTCIASNAAGEATAPVEVCVVPLPLMAPPPAAPPPLTEPGSSDIATPGRPGANDSAAERRLVAAELTSNSVLIRWPAQRPVPGIRMYQVQYNSSVDDSLVYRMIPSTSQTFLVNDLAAGRAYDLCVLAVYDDGATALPATRVVGCVQFTTAGDPAPCRPLRAHFLGGTM

SEQ ID NO: 1556 - protein, 514 aa, synthetic construct
  REGION 1..514: note = LRFN2 (Q9ULH4) ECD
CPKYCVCQNLSESLGTLCPSKGLLFVPPDIDRRTVELRLGGNFIIHISRQDFANMTGLVDLTLSRNTISHIQPFSFLDLESLRSLHLDSNRLPSLGEDTLRGLVNLQHLIVNNNQLGGIADEAFEDFLLTLEDLDLSYNNLHGLPWDSVRRMVNLHQLSLDHNLLDHIAEGTFADLQKLARLDLTSNRLQKLPPDPIFARSQASALTATPFAPPLSFSFGGNPLHCNCELLWLRRLERDDDLETCGSPGGLKGRYFWHVREEEFVCEPPLITQHTHKLLVLEGQAATLKCKAIGDPSPLIHWVAPDDRLVGNSSRTAVYDNGTLDIFITTSQDSGAFTCIAANAAGEATAMVEVSIVQLPHLSNSTSRTAPPKSRLSDITGSSKTSRGGGGSGGGEPPKSPPERAVLVSEVTTTSALVKWSVSKSAPRVKMYQLQYNCSDDEVLIYRMIPASNKAFVVNNLVSGTGYDLCVLAMWDDTATTLTATNIVGCAQFFTKADYPQCQSMHSQILGGTM

SEQ ID NO: 1557 - protein, 523 aa, synthetic construct
  REGION 1..523: note = LRFN3 (Q9BTN0) ECD
SSPPQSATPSPCPRRCRCQTQSLPLSVLCPGAGLLFVPPSLDRRAAELRLADNFIASVRRRDLANMTGLLHLSLSRNTIRHVAAGAFADLRALRALHLDGNRLTSLGEGQLRGLVNLRHLILSNNQLAALAAGALDDCAETLEDLDLSYNNLEQLPWEALGRLGNVNTLGLDHNLLASVPAGAFSRLHKLARLDMTSNRLTTIPPDPLFSRLPLLARPRGSPASALVLAFGGNPLHCNCELVWLRRLAREDDLEACASPPALGGRYFWAVGEEEFVCEPPVVTHRSPPLAVPAGRPAALRCRAVGDPEPRVRWVSPQGRLLGNSSRARAFPNGTLELLVTEPGDGGIFTCIAANAAGEATAAVELTVGPPPPPQLANSTSCDPPRDGDPDALTPPSAASASAKVADTGPPTDRGVQVTEHGATAALVQWPDQRPIPGIRMYQIQYNSSADDILVYRMIPAESRSFLLTDLASGRTYDLCVLAVYEDSATGLTATRPVGCARFSTEPALRPCGAPHAPFLGGTM

SEQ ID NO: 1558 - protein, 502 aa, synthetic construct
  REGION 1..502: note = LRFN4 (Q6PJG9) ECD
CPLPCVCQNLSESLSTLCAHRGLLFVPPNVDRRTVELRLADNFIQALGPPDFRNMTGLVDLTLSRNAITRIGARAFGDLESLRSLHLDGNRLVELGTGSLRGPVNLQHLILSGNQLGRIAPGAFDDFLESLEDLDLSYNNLRQVPWAGIGAMPALHTLNLDHNLIDALPPGAFAQLGQLSRLDLTSNRLATLAPDPLFSRGRDAEASPAPLVLSFSGNPLHCNCELLWLRRLARPDDLETCASPPGLAGRYFWAVPEGEFSCEPPLIARHTQRLWVLEGQRATLRCRALGDPAPTMHWVGPDDRLVGNSSRARAFPNGTLEIGVTGAGDAGGYTCIATNPAGEATARVELRVLALPHGGNSSAEGGRPGPSDIAASARTAAEGEGTLESEPAVQVTEVTATSGLVSWGPGRPADPVWMFQIQYNSSEDETLIYRIVPASSHHFLLKHLVPGADYDLCLLALSPAAGPSDLTATRLLGCAHFSTLPASPLCHALQAHVLGGTL

SEQ ID NO: 1559 - protein, 512 aa, synthetic construct
  REGION 1..512: note = LRFN5 (Q96NI6) ECD
QICPKRCVCQILSPNLATLCAKKGLLFVPPNIDRRTVELRLADNFVTNIKRKDFANMTSLVDLTLSRNTISFITPHAFADLRNLRALHLNSNRLTKITNDMFSGLSNLHHLILNNNQLTLISSTAFDDVFALEELDLSYNNLETIPWDAVEKMVSLHTLSLDHNMIDNIPKGTFSHLHKMTRLDVTSNKLQKLPPDPLFQRAQVLATSGIISPSTFALSFGGNPLHCNCELLWLRRLSREDDLETCASPPLLTGRYFWSIPEEEFLCEPPLITRHTHEMRVLEGQRATLRCKARGDPEPAIHWISPEGKLISNATRSLVYDNGTLDILITTVKDTGAFTCIASNPAGEATQIVDLHIIKLPHLLNSTNHIHEPDPGSSDISTSTKSGSNTSSSNGDTKLSQDKIVVAEATSSTALLKFNFQRNIPGIRMFQIQYNGTYDDTLVYRMIPPTSKTFLVNNLAAGTMYDLCVLAIYDDGITSLTATRVVGCIQFTTEQDYVRCHFMQSQFLGGTM

SEQ ID NO: 1560 - protein, 760 aa, synthetic construct
  REGION 1..760: note = LRIG1 (Q96JA1) ECD
AGPRAPCAAACTCAGDSLDCGGRGLAALPGDLPSWTRSLNLSYNKLSEIDPAGFEDLPNLQEVYLNNNELTAVPSLGAASSHVVSLFLQHNKIRSVEGSQLKAYLSLEVLDLSLNNITEVRNTCFPHGPPIKELNLAGNRIGTLELGAFDGLSRSLLTLRLSKNRITQLPVRAFKLPRLTQLDLNRNRIRLIEGLTFQGLNSLEVLKLQRNNISKLTDGAFWGLSKMHVLHLEYNSLVEVNSGSLYGLTALHQLHLSNNSIARIHRKGWSFCQKLHELVLSFNNLTRLDEESLAELSSLSVLRLSHNSISHIAEGAFKGLRSLRVLDLDHNEISGTIEDTSGAFSGLDSLSKLTLFGNKIKSVAKRAFSGLEGLEHLNLGGNAIRSVQFDAFVKMKNLKELHISSDSFLCDCQLKWLPPWLIGRMLQAFVTATCAHPESLKGQSIFSVPPESFVCDDFLKPQIITQPETTMAMVGKDIRFTCSAASSSSSPMTFAWKKDNEVLTNADMENFVHVHAQDGEVMEYTTILHLRQVTFGHEGRYQCVITNHFGSTYSHKARLTVNVLPSFTKTPHDITIRTTTMARLECAATGHPNPQIAWQKDGGTDFPAARERRMHVMPDDDVFFITDVKIDDAGVYSCTAQNSAGSISANATLTVLETPSLVVPLEDRVVSVGETVALQCKATGNPPPRITWFKGDRPLSLTERHHLTPDNQLLVVQNVVAEDAGRYTCEMSNTLGTERAHSQLSVLPAAGCRKDGTTVG

SEQ ID NO: 1561 - protein, 767 aa, synthetic construct
  REGION 1..767: note = LRIG2 (O94898) ECD
GLCPAPCSCRIPLLDCSRRKLPAPSWRALSGLLPPDTAILDFSHNRLSNWNISLESQTLQEVKMNYNELTEIPYFGEPTSNITLLSLVHNIIPEINAQALQFYPALESLDLSSNIISEIKTSSFPRMQLKYLNLSNNRITTLEAGCFDNLSSSLLVVKLNRNRMSMIPPKIFKLPHLQFLELKRNRIKIVEGLTFQGLDSLRSLKMQRNGISKLKDGAFFGLNNMEELELEHNNLTRVNKGWLYGLRMLQQLYVSQNAIERISPDAWEFCQRLSELDLSYNQLTRLDESAFVGLSLLERLNLGDNRVTHIADGVFRFLSNLQTLDLRNNEISWAIEDASEAFAGLTSLTKLILQGNQIKSITKKAFIGLESLEHLDLNNNAIMSIQENAFSQTHLKELILNTSSLLCDCHLKWLLQWLVDNNFQHSVNVSCAHPEWLAGQSILNVDLKDFVCDDFLKPQIRTHPETIIALRGMNVTLTCTAVSSSDSPMSTVWRKDSEILYDVDTENFVRYWQQAGEALEYTSILHLFNVNFTDEGKYQCIVTNHFGSNYSQKAKLTVNEMPSFLKTPMDLTIRTGAMARLECAAEGHPAPQISWQKDGGTDFPAARERRMHVMPEDDVFFIANVKIEDMGIYSCMAQNTAGGLSANASLTVLETPSFIRPLEDKTVTRGETAVLQCIAGGSPAPRLNWTKDDGPLLVTERHFFAAANQLLIIVDAGLEDAGKYTCIMSNTLGTERGHIYLNVISSPNCDSSQSSIGHEDDGWTTVG

SEQ ID NO: 1562 - protein, 785 aa, synthetic construct
  REGION 1..785: note = LRIG3 (Q6UXM1) ECD
GRSDSGGRGELGQPSGVAAERPCPTTCRCLGDLLDCSRKRLARLPEPLPSWVARLDLSHNRLSFIKASSMSHLQSLREVKLNNNELETIPNLGPVSANITLLSLAGNRIVEILPEHLKEFQSLETLDLSSNNISELQTAFPALQLKYLYLNSNRVTSMEPGYFDNLANTLLVLKLNRNRISAIPPKMFKLPQLQHLELNRNKIKNVDGLTFQGLGALKSLKMQRNGVTKLMDGAFWGLSNMEILQLDHNNLTEITKGWLYGLLMLQELHLSQNAINRISPDAWEFCQKLSELDLTFNHLSRLDDSSFLGLSLLNTLHIGNNRVSYIADCAFRGLSSLKTLDLKNNEISWTIEDMNGAFSGLDKLRRLILQGNRIRSITKKAFTGLDALEHLDLSDNAIMSLQGNAFSQMKKLQQLHLNTSSLLCDCQLKWLPQWVAENNFQSFVNASCAHPQLLKGRSIFAVSPDGFVCDDFPKPQITVQPETQSAIKGSNLSFICSAASSSDSPMTFAWKKDNELLHDAEMENYAHLRAQGGEVMEYTTILRLREVEFASEGKYQCVISNHFGSSYSVKAKLTVNMLPSFTKTPMDLTIRAGAMARLECAAVGHPAPQIAWQKDGGTDFPAARERRMHVMPEDDVFFIVDVKIEDIGVYSCTAQNSAGSISANATLTVLETPSFLRPLLDRTVTKGETAVLQCIAGGSPPPKLNWTKDDSPLVVTERHFFAAGNQLLIIVDSDVSDAGKYTCEMSNTLGTERGNVRLSVIPTPTCDSPQMTAPSLDDDGWATVG

SEQ ID NO: 1563 - protein, 505 aa, synthetic construct
  REGION 1..505: note = LRIT1 (Q9P2V4) ECD
FCPSQCSCSLHIMGDGSKARTVVCNDPDMTLPPASIPPDTSRLRLERTAIRRVPGEAFRPLGRLEQLWLPYNALSELNALMLRGLRRLRELRLPGNRLAAFPWAALRDAPKLRLLDLQANRLSAVPAEAARFLENLTFLDLSSNQLMRLPQELIVSWAHLETGIFPPGHHPRRVLGLQDNPWACDCRLYDLVHLLDGWAPNLAFIETELRCASPRSLAGVAFSQLELRKCQGPELHPGVASIRSLLGGTALLRCGATGVPGPEMSWRRANGRPLNGTVHQEVSSDGTSWTLLGLPAVSHLDSGDYICQAKNFLGASETVISLIVTEPPTSTEHSGSPGALWARTGGGGEAAAYNNKLVARHVPQIPKPAVLATGPSVPSTKEELTLEHFQMDALGELSDGRAGPSEARMVRSVKVVGDTYHSVSLVWKAPQAKNTTAFSVLYAVFGQHSMRRVIVQPGKTRVTITGLLPKTKYVACVCVQGLVPRKEQCVIFSTNEVVDAENTQQ

SEQ ID NO: 1564 - protein, 446 aa, synthetic construct
  REGION 1..446: note = LRIT2 (A6NDA9) ECD
AQPFCLPGCTCSEESFGRTLQCTSVSLGKIPGNLSEEFKQVRIENSPLFEMPQGSFINMSTLEYLWLNFNNISVIHLGALEHLPELRELRLEGNKLCSVPWTAFRATPLLRVLDLKRNKIDALPELALQFLVSLTYLDLSSNRLTVVSKSVFLNWPAYQKCRQPDCGAEILSSLVVALHDNPWVCDCRLRGLVQFVKSITLPVILVNSYLICQGPLSKAGQLFHETELSACMKPQISTPSANITIRAGQNVTLRCLAQASPSPSIAWTYPLSMWREFDVLTSSTGEDTALSELAIPAAHLVDSGNYTCMASNSIGKSNLVISLHVQPAQALHAPDSLSIPSEGNAYIDLRVVKQTVHGILLEWLAVADTSKEEWFTLYIASDEAFRKEVVHIGPGINTYAVDDLLPGTKYEACLSLEGQPPHQGQCVAFVTGRDAGGLEAREHLLH

SEQ ID NO: 1565 - protein, 563 aa, synthetic construct
  REGION 1..563: note = LRIT3 (Q3SXY7) ECD
LCPSQCTCDYHGRNDGSGSRLVLCNDMDMNELPTNLPVDTVKLRIEKTVIRRISAEAFYYLVELQYLWVTYNSVASIDPSSFYNLKQLHELRLDGNSLAAFPWASLLDMPLLRTLDLHNNKITSVPNEALRYLKNLAYLDLSSNRLTTLPPDFLESWTHLVSTPSGVLDLSPSRIILGLQDNPWFCDCHISKMIELSKVVDPAIVLLDPLMTCSEPERLTGILFQRAELEHCLKPSVMTSATKIMSALGSNVLLRCDATGFPTPQITWTRSDSSPVNYTVIQESPEEGVRWSIMSLTGISSKDAGDYKCKAKNLAGMSEAVVTVTVLGITTTPIPPDTSERTGDHPEWDVQPGSGRSTSVSSASSYLWSSSFSPTSSFSASTLSPPSTASFSLSPFSSSTVSSTTTLSTSISASTTMANKRSFQLHQGGKRNLKVAKNGSKLPPASTSKKEELALLDQTMLTETNAAIENLRVVSETKESVTLTWNMINTTHNSAVTVLYSKYGGKDLLLLNADSSKNQVTIDGLEPGGQYMACVCPKGVPPQKDQCITFSTERVEGDDSQWS

SEQ ID NO: 1566 - protein, 4400 aa, synthetic construct
  REGION 1..4400: note = LRP1 (Q07954) ECD
AIDAPKTCSPKQFACRDQITCISKGWRCDGERDCPDGSDEAPEICPQSKAQRCQPNEHNCLGTELCVPMSRLCNGVQDCMDGSDEGPHCRELQGNCSRLGCQHHCVPTLDGPTCYCNSSFQLQADGKTCKDFDECSVYGTCSQLCTNTDGSFICGCVEGYLLQPDNRSCKAKNEPVDRPPVLLIANSQNILATYLSGAQVSTITPTSTRQTTAMDFSYANETVCWVHVGDSAAQTQLKCARMPGLKGFVDEHTINISLSLHHVEQMAIDWLTGNFYFVDDIDDRIFVCNRNGDTCVTLLDLELYNPKGIALDPAMGKVFFTDYGQIPKVERCDMDGQNRTKLVDSKIVFPHGITLDLVSRLVYWADAYLDYIEVVDYEGKGRQTIIQGILIEHLYGLTVFENYLYATNSDNANAQQKTSVIRVNRFNSTEYQVVTRVDKGGALHIYHQRRQPRVRSHACENDQYGKPGGCSDICLLANSHKARTCRCRSGFSLGSDGKSCKKPEHELFLVYGKGRPGIIRGMDMGAKVPDEHMIPIENLMNPRALDFHAETGFIYFADTTSYLIGRQKIDGTERETILKDGIHNVEGVAVDWMGDNLYWTDDGPKKTISVARLEKAAQTRKTLIEGKMTHPRAIVVDPLNGWMYWTDWEEDPKDSRRGRLERAWMDGSHRDIFVTSKTVLWPNGLSLDIPAGRLYWVDAFYDRIETILLNGTDRKIVYEGPELNHAFGLCHHGNYLFWTEYRSGSVYRLERGVGGAPPTVTLLRSERPPIFEIRMYDAQQQQVGTNKCRVNNGGCSSLCLATPGSRQCACAEDQVLDADGVTCLANPSYVPPPQCQPGEFACANSRCIQERWKCDGDNDCLDNSDEAPALCHQHTCPSDRFKCENNRCIPNRWLCDGDNDCGNSEDESNATCSARTCPPNQFSCASGRCIPISWTCDLDDDCGDRSDESASCAYPTCFPLTQFTCNNGRCININWRCDNDNDCGDNSDEAGCSHSCSSTQFKCNSGRCIPEHWTCDGDNDCGDYSDETHANCTNQATRPPGGCHTDEFQCRLDGLCIPLRWRCDGDTDCMDSSDEKSCEGVTHVCDPSVKFGCKDSARCISKAWVCDGDNDCEDNSDEENCESLACRPPSHPCANNTSVCLPPDKLCDGNDDCGDGSDEGELCDQCSLNNGGCSHNCSVAPGEGIVCSCPLGMELGPDNHTCQIQSYCAKHLKCSQKCDQNKFSVKCSCYEGWVLEPDGESCRSLDPFKPFIIFSNRHEIRRIDLHKGDYSVLVPGLRNTIALDFHLSQSALYWTDVVEDKIYRGKLLDNGALTSFEVVIQYGLATPEGLAVDWIAGNIYWVESNLDQIEVAKLDGTLRTTLLAGDIEHPRAIALDPRDGILFWTDWDASLPRIEAASMSGAGRRTVHRETGSGGWPNGLTVDYLEKRILWIDARSDAIYSARYDGSGHMEVLRGHEFLSHPFAVTLYGGEVYWTDWRTNTLAKANKWTGHNVTVVQRTNTQPFDLQVYHPSRQPMAPNPCEANGGQGPCSHLCLINYNRTVSCACPHLMKLHKDNTTCYEFKKFLLYARQMEIRGVDLDAPYYNYIISFTVPDIDNVTVLDYDAREQRVYWSDVRTQAIKRAFINGTGVETVVSADLPNAHGLAVDWVSRNLFWTSYDTNKKQINVARLDGSFKNAVVQGLEQPHGLVVHPLRGKLYWTDGDNISMANMDGSNRTLLFSGQKGPVGLAIDFPESKLYWISSGNHTINRCNLDGSGLEVIDAMRSQLGKATALAIMGDKLWWADQVSEKMGTCSKADGSGSVVLRNSTTLVMHMKVYDESIQLDHKGTNPCSVNNGDCSQLCLPTSETTRSCMCTAGYSLRSGQQACEGVGSFLLYSVHEGIRGIPLDPNDKSDALVPVSGTSLAVGIDFHAENDTIYWVDMGLSTISRAKRDQTWREDVVTNGIGRVEGIAVDWIAGNIYWTDQGFDVIEVARLNGSFRYVVISQGLDKPRAITVHPEKGYLFWTEWGQYPRIERSRLDGTERVVLVNVSISWPNGISVDYQDGKLYWCDARTDKIERIDLETGENREVVLSSNNMDMFSVSVFEDFIYWSDRTHANGSIKRGSKDNATDSVPLRTGIGVQLKDIKVFNRDRQKGTNVCAVANGGCQQLCLYRGRGQRACACAHGMLAEDGASCREYAGYLLYSERTILKSIHLSDERNLNAPVQPFEDPEHMKNVIALAFDYRAGTSPGTPNRIFFSDIHFGNIQQINDDGSRRITIVENVGSVEGLAYHRGWDTLYWTSYTTSTITRHTVDQTRPGAFERETVITMSGDDHPRAFVLDECQNLMFWTNWNEQHPSIMRAALSGANVLTLIEKDIRTPNGLAIDHRAEKLYFSDATLDKIERCEYDGSHRYVILKSEPVHPFGLAVYGEHIFWTDWVRRAVQRANKHVGSNMKLLRVDIPQQPMGIIAVANDTNSCELSPCRINNGGCQDLCLLTHQGHVNCSCRGGRILQDDLTCRAVNSSCRAQDEFECANGECINFSLTCDGVPHCKDKSDEKPSYCNSRRCKKTFRQCSNGRCVSNMLWCNGADDCGDGSDEIPCNKTACGVGEFRCRDGTCIGNSSRCNQFVDCEDASDEMNCSATDCSSYFRLGVKGVLFQPCERTSLCYAPSWVCDGANDCGDYSDERDCPGVKRPRCPLNYFACPSGRCIPMSWTCDKEDDCEHGEDETHCNKFCSEAQFECQNHRCISKQWLCDGSDDCGDGSDEAAHCEGKTCGPSSFSCPGTHVCVPERWLCDGDKDCADGADESIAAGCLYNSTCDDREFMCQNRQCIPKHFVCDHDRDCADGSDESPECEYPTCGPSEFRCANGRCLSSRQWECDGENDCHDQSDEAPKNPHCTSQEHKCNASSQFLCSSGRCVAEALLCNGQDDCGDSSDERGCHINECLSRKLSGCSQDCEDLKIGFKCRCRPGFRLKDDGRTCADVDECSTTFPCSQRCINTHGSYKCLCVEGYAPRGGDPHSCKAVTDEEPFLIFANRYYLRKLNLDGSNYTLLKQGLNNAVALDFDYREQMIYWTDVTTQGSMIRRMHLNGSNVQVLHRTGLSNPDGLAVDWVGGNLYWCDKGRDTIEVSKLNGAYRTVLVSSGLREPRALVVDVQNGYLYWTDWGDHSLIGRIGMDGSSRSVIVDTKITWPNGLTLDYVTERIYWADAREDYIEFASLDGSNRHVVLSQDIPHIFALTLFEDYVYWTDWETKSINRAHKTTGTNKTLLISTLHRPMDLHVFHALRQPDVPNHPCKVNNGGCSNLCLLSPGGGHKCACPTNFYLGSDGRTCVSNCTASQFVCKNDKCIPFWWKCDTEDDCGDHSDEPPDCPEFKCRPGQFQCSTGICTNPAFICDGDNDCQDNSDEANCDIHVCLPSQFKCTNTNRCIPGIFRCNGQDNCGDGEDERDCPEVTCAPNQFQCSITKRCIPRVWVCDRDNDCVDGSDEPANCTQMTCGVDEFRCKDSGRCIPARWKCDGEDDCGDGSDEPKEECDERTCEPYQFRCKNNRCVPGRWQCDYDNDCGDNSDEESCTPRPCSESEFSCANGRCIAGRWKCDGDHDCADGSDEKDCTPRCDMDQFQCKSGHCIPLRWRCDADADCMDGSDEEACGTGVRTCPLDEFQCNNTLCKPLAWKCDGEDDCGDNSDENPEECARFVCPPNRPFRCKNDRVCLWIGRQCDGTDNCGDGTDEEDCEPPTAHTTHCKDKKEFLCRNQRCLSSSLRCNMFDDCGDGSDEEDCSIDPKLTSCATNASICGDEARCVRTEKAAYCACRSGFHTVPGQPGCQDINECLRFGTCSQLCNNTKGGHLCSCARNFMKTHNTCKAEGSEYQVLYIADDNEIRSLFPGHPHSAYEQAFQGDESVRIDAMDVHVKAGRVYWTNWHTGTISYRSLPPAAPPTTSNRHRRQIDRGVTHLNISGLKMPRGIAIDWVAGNVYWTDSGRDVIEVAQMKGENRKTLISGMIDEPHAIVVDPLRGTMYWSDWGNHPKIETAAMDGTLRETLVQDNIQWPTGLAVDYHNERLYWADAKLSVIGSIRLNGTDPIVAADSKRGLSHPFSIDVFEDYIYGVTYINNRVFKIHKFGHSPLVNLTGGLSHASDVVLYHQHKQPEVTNPCDRKKCEWLCLLSPSGPVCTCPNGKRLDNGTCVPVPSPTPPPDAPRPGTCNLQCFNGGSCFLNARRQPKCRCQPRYTGDKCELDQCWEHCRNGGTCAASPSGMPTCRCPTGFTGPKCTQQVCAGYCANNSTCTVNQGNQPQCRCLPGFLGDRCQYRQCSGYCENFGTCQMAADGSRQCRCTAYFEGSRCEVNKCSRCLEGACVVNKQSGDVTCNCTDGRVAPSCLTCVGHCSNGGSCTMNSKMMPECQCPPHMTGPRCEEHVFSQQQPG

SEQ ID NO: 1567 - protein, 424 aa, synthetic construct
  REGION 1..424: note = LRP10 (Q7Z4F1) ECD
HPDRIIFPNHACEDPPAVLLEVQGTLQRPLVRDSRTSPANCTWLILGSKEQTVTIRFQKLHLACGSERLTLRSPLQPLISLCEAPPSPLQLPGGNVTITYSYAGARAPMGQGFLLSYSQDWLMCLQEEFQCLNHRCVSAVQRCDGVDACGDGSDEAGCSSDPFPGLTPRPVPSLPCNVTLEDFYGVFSSPGYTHLASVSHPQSCHWLLDPHDGRRLAVRFTALDLGFGDAVHVYDGPGPPESSRLLRSLTHFSNGKAVTVETLSGQAVVSYHTVAWSNGRGFNATYHVRGYCLPWDRPCGLGSGLGAGEGLGERCYSEAQRCDGSWDCADGTDEEDCPGCPPGHFPCGAAGTSGATACYLPADRCNYQTFCADGADERRCRHCQPGNFRCRDEKCVYETWVCDGQPDCADGSDEWDCSYVLPRK

SEQ ID NO: 1568 - protein, 413 aa, synthetic construct
  REGION 1..413: note = LRP11 (Q86VZ4) ECD
ALPPAAPLSELHAQLSGVEQLLEEFRRQLQQERPQEELELELRAGGGPQEDCPGPGSGGYSAMPDAIIRTKDSLAAGASFLRAPAAVRGWRQCVAACCSEPRCSVAVVELPRRPAPPAAVLGCYLFNCTARGRNVCKFALHSGYSSYSLSRAPDGAALATARASPRQEKDAPPLSKAGQDVVLHLPTDGVVLDGRESTDDHAIVQYEWALLQGDPSVDMKVPQSGTLKLSHLQEGTYTFQLTVTDTAGQRSSDNVSVTVLRAAYSTGGCLHTCSRYHFFCDDGCCIDITLACDGVQQCPDGSDEDFCQNLGLDRKMVTHTAASPALPRTTGPSEDAGGDSLVEKSQKATAPNKPPALSNTEKRNHSAFWGPESQIIPVMPDSSSSGKNRKEESYIFESKGDGGGGEHPAPETG

SEQ ID NO: 1569 - protein, 460 aa, synthetic construct
  REGION 1..460: note = LRP12 (Q9Y561) ECD
EHSENVHISGVSTACGETPEQIRAPSGIITSPGWPSEYPAKINCSWFIRANPGEIITISFQDFDIQGSRRCNLDWLTIETYKNIESYRACGSTIPPPYISSQDHIWIRFHSDDNISRKGFRLAYFSGKSEEPNCACDQFRCGNGKCIPEAWKCNNMDECGDSSDEEICAKEANPPTAAAFQPCAYNQFQCLSRFTKVYTCLPESLKCDGNIDCLDLGDEIDCDVPTCGQWLKYFYGTFNSPNYPDFYPPGSNCTWLIDTGDHRKVILRFTDFKLDGTGYGDYVKIYDGLEENPHKLLRVLTAFDSHAPLTVVSSSGQIRVHFCADKVNAARGFNATYQVDGFCLPWEIPCGGNWGCYTEQQRCDGYWHCPNGRDETNCTMCQKEEFPCSRNGVCYPRSDRCNYQNHCPNGSDEKNCFFCQPGNFHCKNNRCVFESWVCDSQDDCGDGSDEENCPVIVPTR

SEQ ID NO: 1570 - protein, 4420 aa, synthetic construct
  REGION 1..4420: note = LRP1B (Q9NZR2) ECD
ADRDQQLCDPGEFLCHDHVTCVSQSWLCDGDPDCPDDSDESLDTCPEEVEIKCPLNHIACLGTNKCVHLSQLCNGVLDCPDGYDEGVHCQELLSNCQQLNCQYKCTMVRNSTRCYCEDGFEITEDGRSCKDQDECAVYGTCSQTCRNTHGSYTCSCVEGYLMQPDNRSCKAKIEPTDRPPILLIANFETIEVFYLNGSKMATLSSVNGNEIHTLDFIYNEDMICWIESRESSNQLKCIQITKAGGLTDEWTINILQSFHNVQQMAIDWLTRNLYFVDHVGDRIFVCNSNGSVCVTLIDLELHNPKAIAVDPIAGKLFFTDYGNVAKVERCDMDGMNRTRIIDSKTEQPAALALDLVNKLVYWVDLYLDYVGVVDYQGKNRHTVIQGRQVRHLYGITVFEDYLYATNSDNYNIVRINRFNGTDIHSLIKIENAWGIRIYQKRTQPTVRSHACEVDPYGMPGGCSHICLLSSSYKTRTCRCRTGFNLGSDGRSCKRPKNELFLFYGKGRPGIVRGMDLNTKIADEYMIPIENLVNPRALDFHAETNYIYFADTTSFLIGRQKIDGTERETILKDDLDNVEGIAVDWIGNNLYWTNDGHRKTINVARLEKASQSRKTLLEGEMSHPRGIVVDPVNGWMYWTDWEEDEIDDSVGRIEKAWMDGFNRQIFVTSKMLWPNGLTLDFHTNTLYWCDAYYDHIEKVFLNGTHRKIVYSGRELNHPFGLSHHGNYVFWTDYMNGSIFQLDLITSEVTLLRHERPPLFGLQIYDPRKQQGDNMCRVNNGGCSTLCLAIPGGRVCACADNQLLDENGTTCTFNPGEALPHICKAGEFRCKNRHCIQARWKCDGDDDCLDGSDEDSVNCFNHSCPDDQFKCQNNRCIPKRWLCDGANDCGSNEDESNQTCTARTCQVDQFSCGNGRCIPRAWLCDREDDCGDQTDEMASCEFPTCEPLTQFVCKSGRCISSKWHCDSDDDCGDGSDEVGCVHSCFDNQFRCSSGRCIPGHWACDGDNDCGDFSDEAQINCTKEEIHSPAGCNGNEFQCHPDGNCVPDLWRCDGEKDCEDGSDEKGCNGTIRLCDHKTKFSCWSTGRCINKAWVCDGDIDCEDQSDEDDCDSFLCGPPKHPCANDTSVCLQPEKLCNGKKDCPDGSDEGYLCDECSLNNGGCSNHCSVVPGRGIVCSCPEGLQLNKDNKTCEIVDYCSNHLKCSQVCEQHKHTVKCSCYEGWKLDVDGESCTSVDPFEAFIIFSIRHEIRRIDLHKRDYSLLVPGLRNTIALDFHFNQSLLYWTDVVEDRIYRGKLSESGGVSAIEVVVEHGLATPEGLTVDWIAGNIYWIDSNLDQIEVAKLDGSLRTTLIAGAMEHPRAIALDPRYGILFWTDWDANFPRIESASMSGAGRKTIYKDMKTGAWPNGLTVDHFEKRIVWTDARSDAIYSALYDGTNMIEIIRGHEYLSHPFAVSLYGSEVYWTDWRTNTLSKANKWTGQNVSVIQKTSAQPFDLQIYHPSRQPQAPNPCAANDGKGPCSHMCLINHNRSAACACPHLMKLSSDKKTCYEMKKFLLYARRSEIRGVDIDNPYFNFITAFTVPDIDDVTVIDFDASEERLYWTDIKTQTIKRAFINGTGLETVISRDIQSIRGLAVDWVSRNLYWISSEFDETQINVARLDGSLKTSIIHGIDKPQCLAAHPVRGKLYWTDGNTINMANMDGSNSKILFQNQKEPVGLSIDYVENKLYWISSGNGTINRCNLDGGNLEVIESMKEELTKATALTIMDKKLWWADQNLAQLGTCSKRDGRNPTILRNKTSGVVHMKVYDKEAQQGSNSCQLNNGGCSQLCLPTSETTRTCMCTVGYYLQKNRMSCQGIESFLMYSVHEGIRGIPLEPSDKMDALMPISGTSFAVGIDFHAENDTIYWTDMGFNKISRAKRDQTWKEDIITNGLGRVEGIAVDWIAGNIYWTDHGFNLIEVARLNGSFRYVIISQGLDQPRSIAVHPEKGLLFWTEWGQMPCIGKARLDGSEKVVLVSMGIAWPNGISIDYEENKLYWCDARTDKIERIDLETGGNREMVLSGSNVDMFSVAVFGAYIYWSDRAHANGSVRRGHKNDATETITMRTGLGVNLKEVKIFNRVREKGTNVCARDNGGCKQLCLYRGNSRRTCACAHGYLAEDGVTCLRHEGYLLYSGRTILKSIHLSDETNLNSPIRPYENPRYFKNVIALAFDYNQRRKGTNRIFYSDAHFGNIQLIKDNWEDRQVIVENVGSVEGLAYHRAWDTLYWTSSTTSSITRHTVDQTRPGAFDREAVITMSEDDHPHVLALDECQNLMFWTNWNEQHPSIMRSTLTGKNAQVVVSTDILTPNGLTIDYRAEKLYFSDGSLGKIERCEYDGSQRHVIVKSGPGTFLSLAVYDNYIFWSDWGRRAILRSNKYTGGDTKILRSDIPHQPMGIIAVANDTNSCELSPCALLNGGCHDLCLLTPNGRVNCSCRGDRILLEDNRCVTKNSSCNAYSEFECGNGECIDYQLTCDGIPHCKDKSDEKLLYCENRSCRRGFKPCYNRRCIPHGKLCDGENDCGDNSDELDCKVSTCATVEFRCADGTCIPRSARCNQNIDCADASDEKNCNNTDCTHFYKLGVKTTGFIRCNSTSLCVLPTWICDGSNDCGDYSDELKCPVQNKHKCEENYFSCPSGRCILNTWICDGQKDCEDGRDEFHCDSSCSWNQFACSAQKCISKHWICDGEDDCGDGLDESDSICGAITCAADMFSCQGSRACVPRHWLCDGERDCPDGSDELSTAGCAPNNTCDENAFMCHNKVCIPKQFVCDHDDDCGDGSDESPQCGYRQCGTEEFSCADGRCLLNTQWQCDGDFDCPDHSDEAPLNPKCKSAEQSCNSSFFMCKNGRCIPSGGLCDNKDDCGDGSDERNCHINECLSKKVSGCSQDCQDLPVSYKCKCWPGFQLKDDGKTCVDIDECSSGFPCSQQCINTYGTYKCLCTDGYEIQPDNPNGCKSLSDEEPFLILADHHEIRKISTDGSNYTLLKQGLNNVIAIDFDYREEFIYWIDSSRPNGSRINRMCLNGSDIKVVHNTAVPNALAVDWIGKNLYWSDTEKRIIEVSKLNGLYPTILVSKRLKFPRDLSLDPQAGYLYWIDCCEYPHIGRVGMDGTNQSVVIETKISRPMALTIDYVNRRLYWADENHIEFSNMDGSHRHKVPNQDIPGVIALTLFEDYIYWTDGKTKSLSRAHKTSGADRLSLIYSWHAITDIQVYHSYRQPDVSKHLCMINNGGCSHLCLLAPGKTHTCACPTNFYLAADNRTCLSNCTASQFRCKTDKCIPFWWKCDTVDDCGDGSDEPDDCPEFRCQPGRFQCGTGLCALPAFICDGENDCGDNSDELNCDTHVCLSGQFKCTKNQKCIPVNLRCNGQDDCGDEEDERDCPENSCSPDYFQCKTTKHCISKLWVCDEDPDCADASDEANCDKKTCGPHEFQCKNNNCIPDHWRCDSQNDCSDNSDEENCKPQTCTLKDFLCANGDCVSSRFWCDGDFDCADGSDERNCETSCSKDQFRCSNGQCIPAKWKCDGHEDCKYGEDEKSCEPASPTCSSREYICASDGCISASLKCNGEYDCADGSDEMDCVTECKEDQFRCKNKAHCIPIRWLCDGIHDCVDGSDEENCERGGNICRADEFLCNNSLCKLHFWVCDGEDDCGDNSDEAPDMCVKFLCPSTRPHRCRNNRICLQSEQMCNGIDECGDNSDEDHCGGKLTYKARPCKKDEFACSNKKCIPMDLQCDRLDDCGDGSDEQGCRIAPTEYTCEDNVNPCGDDAYCNQIKTSVFCRCKPGFQRNMKNRQCEDLNECLVFGTCSHQCINVEGSYKCVCDQNFQERNNTCIAEGSEDQVLYIANDTDILGFIYPFNYSGDHQQISHIEHNSRITGMDVYYQRDMIIWSTQFNPGGIFYKRIHGREKRQANSGLICPEFKRPRDIAVDWVAGNIYWTDHSRMHWFSYYTTHWTSLRYSINVGQLNGPNCTRLLTNMAGEPYAIAVNPKRGMMYWTVVGDHSHIEEAAMDGTLRRILVQKNLQRPTGLAVDYFSERIYWADFELSIIGSVLYDGSNSVVSVSSKQGLLHPHRIDIFEDYIYGAGPKNGVFRVQKFGHGSVEYLALNIDKTKGVLISHRYKQLDLPNPCLDLACEFLCLLNPSGATCVCPEGKYLINGTCNDDSLLDDSCKLTCENGGRCILNEKGDLRCHCWPSYSGERCEVNHCSNYCQNGGTCVPSVLGRPTCSCALGFTGPNCGKTVCEDFCQNGGTCIVTAGNQPYCHCQPEYTGDRCQYYVCHHYCVNSESCTIGDDGSVECVCPTRYEGPKCEVDKCVRCHGGHCIINKDSEDIFCNCTNGKIASSCQLCDGYCYNGGTCQLDPETNVPVCLCSTNWSGTQCERPAPKSSKSDHISTRSI

SEQ ID NO: 1571 - protein, 4398 aa, synthetic construct
  REGION 1..4398: note = LRP2 (P98164) ECD
QECDSAHFRCGSGHCIPADWRCDGTKDCSDDADEIGCAVVTCQQGYFKCQSEGQCIPNSWVCDQDQDCDDGSDERQDCSQSTCSSHQITCSNGQCIPSEYRCDHVRDCPDGADENDCQYPTCEQLTCDNGACYNTSQKCDWKVDCRDSSDEINCTEICLHNEFSCGNGECIPRAYVCDHDNDCQDGSDEHACNYPTCGGYQFTCPSGRCIYQNWVCDGEDDCKDNGDEDGCESGPHDVHKCSPREWSCPESGRCISIYKVCDGILDCPGREDENNTSTGKYCSMTLCSALNCQYQCHETPYGGACFCPPGYIINHNDSRTCVEFDDCQIWGICDQKCESRPGRHLCHCEEGYILERGQYCKANDSFGEASIIFSNGRDLLIGDIHGRSFRILVESQNRGVAVGVAFHYHLQRVFWTDTVQNKVFSVDINGLNIQEVLNVSVETPENLAVDWVNNKIYLVETKVNRIDMVNLDGSYRVTLITENLGHPRGIAVDPTVGYLFFSDWESLSGEPKLERAFMDGSNRKDLVKTKLGWPAGVTLDMISKRVYWVDSRFDYIETVTYDGIQRKTVVHGGSLIPHPFGVSLFEGQVFFTDWTKMAVLKANKFTETNPQVYYQASLRPYGVTVYHSLRQPYATNPCKDNNGGCEQVCVLSHRTDNDGLGFRCKCTFGFQLDTDERHCIAVQNFLIFSSQVAIRGIPFTLSTQEDVMVPVSGNPSFFVGIDFDAQDSTIFFSDMSKHMIFKQKIDGTGREILAANRVENVESLAFDWISKNLYWTDSHYKSISVMRLADKTRRTVVQYLNNPRSVVVHPFAGYLFFTDWFRPAKIMRAWSDGSHLLPVINTTLGWPNGLAIDWAASRLYWVDAYFDKIEHSTFDGLDRRRLGHIEQMTHPFGLAIFGEHLFFTDWRLGAIIRVRKADGGEMTVIRSGIAYILHLKSYDVNIQTGSNACNQPTHPNGDCSHFCFPVPNFQRVCGCPYGMRLASNHLTCEGDPTNEPPTEQCGLFSFPCKNGRCVPNYYLCDGVDDCHDNSDEQLCGTLNNTCSSSAFTCGHGECIPAHWRCDKRNDCVDGSDEHNCPTHAPASCLDTQYTCDNHQCISKNWVCDTDNDCGDGSDEKNCNSTETCQPSQFNCPNHRCIDLSFVCDGDKDCVDGSDEVGCVLNCTASQFKCASGDKCIGVTNRCDGVFDCSDNSDEAGCPTRPPGMCHSDEFQCQEDGICIPNFWECDGHPDCLYGSDEHNACVPKTCPSSYFHCDNGNCIHRAWLCDRDNDCGDMSDEKDCPTQPFRCPSWQWQCLGHNICVNLSVVCDGIFDCPNGTDESPLCNGNSCSDFNGGCTHECVQEPFGAKCLCPLGFLLANDSKTCEDIDECDILGSCSQHCYNMRGSFRCSCDTGYMLESDGRTCKVTASESLLLLVASQNKIIADSVTSQVHNIYSLVENGSYIVAVDFDSISGRIFWSDATQGKTWSAFQNGTDRRVVFDSSIILTETIAIDWVGRNLYWTDYALETIEVSKIDGSHRTVLISKNLTNPRGLALDPRMNEHLLFWSDWGHHPRIERASMDGSMRTVIVQDKIFWPCGLTIDYPNRLLYFMDSYLDYMDFCDYNGHHRRQVIASDLIIRHPYALTLFEDSVYWTDRATRRVMRANKWHGGNQSVVMYNIQWPLGIVAVHPSKQPNSVNPCAFSRCSHLCLLSSQGPHFYSCVCPSGWSLSPDLLNCLRDDQPFLITVRQHIIFGISLNPEVKSNDAMVPIAGIQNGLDVEFDDAEQYIYWVENPGEIHRVKTDGTNRTVFASISMVGPSMNLALDWISRNLYSTNPRTQSIEVLTLHGDIRYRKTLIANDGTALGVGFPIGITVDPARGKLYWSDQGTDSGVPAKIASANMDGTSVKTLFTGNLEHLECVTLDIEEQKLYWAVTGRGVIERGNVDGTDRMILVHQLSHPWGIAVHDSFLYYTDEQYEVIERVDKATGANKIVLRDNVPNLRGLQVYHRRNAAESSNGCSNNMNACQQICLPVPGGLFSCACATGFKLNPDNRSCSPYNSFIVVSMLSAIRGFSLELSDHSETMVPVAGQGRNALHVDVDVSSGFIYWCDFSSSVASDNAIRRIKPDGSSLMNIVTHGIGENGVRGIAVDWVAGNLYFTNAFVSETLIEVLRINTTYRRVLLKVTVDMPRHIVVDPKNRYLFWADYGQRPKIERSFLDCTNRTVLVSEGIVTPRGLAVDRSDGYVYWVDDSLDIIARIRINGENSEVIRYGSRYPTPYGITVFENSIIWVDRNLKKIFQASKEPENTEPPTVIRDNINWLRDVTIFDKQVQPRSPAEVNNNPCLENNGGCSHLCFALPGLHTPKCDCAFGTLQSDGKNCAISTENFLIFALSNSLRSLHLDPENHSPPFQTINVERTVMSLDYDSVSDRIYFTQNLASGVGQISYATLSSGIHTPTVIASGIGTADGIAFDWITRRIYYSDYLNQMINSMAEDGSNRTVIARVPKPRAIVLDPCQGYLYWADWDTHAKIERATLGGNFRVPIVNSSLVMPSGLTLDYEEDLLYWVDASLQRIERSTLTGVDREVIVNAAVHAFGLTLYGQYIYWTDLYTQRIYRANKYDGSGQIAMTTNLLSQPRGINTVVKNQKQQCNNPCEQFNGGCSHICAPGPNGAECQCPHEGNWYLANNRKHCIVDNGERCGASSFTCSNGRCISEEWKCDNDNDCGDGSDEMESVCALHTCSPTAFTCANGRCVQYSYRCDYYNDCGDGSDEAGCLFRDCNATTEFMCNNRRCIPREFICNGVDNCHDNNTSDEKNCPDRTCQSGYTKCHNSNICIPRVYLCDGDNDCGDNSDENPTYCTTHTCSSSEFQCASGRCIPQHWYCDQETDCFDASDEPASCGHSERTCLADEFKCDGGRCIPSEWICDGDNDCGDMSDEDKRHQCQNQNCSDSEFLCVNDRPPDRRCIPQSWVCDGDVDCTDGYDENQNCTRRTCSENEFTCGYGLCIPKIFRCDRHNDCGDYSDERGCLYQTCQQNQFTCQNGRCISKTFVCDEDNDCGDGSDELMHLCHTPEPTCPPHEFKCDNGRCIEMMKLCNHLDDCLDNSDEKGCGINECHDPSISGCDHNCTDTLTSFYCSCRPGYKLMSDKRTCVDIDECTEMPFVCSQKCENVIGSYICKCAPGYLREPDGKTCRQNSNIEPYLIFSNRYYLRNLTIDGYFYSLILEGLDNVVALDFDRVEKRLYWIDTQRQVIERMFLNKTNKETIINHRLPAAESLAVDWVSRKLYWLDARLDGLFVSDLNGGHRRMLAQHCVDANNTFCFDNPRGLALHPQYGYLYWADWGHRAYIGRVGMDGTNKSVIISTKLEWPNGITIDYTNDLLYWADAHLGYIEYSDLEGHHRHTVYDGALPHPFAITIFEDTIYWTDWNTRTVEKGNKYDGSNRQTLVNTTHRPFDIHVYHPYRQPIVSNPCGTNNGGCSHLCLIKPGGKGFTCECPDDFRTLQLSGSTYCMPMCSSTQFLCANNEKCIPIWWKCDGQKDCSDGSDELALCPQRFCRLGQFQCSDGNCTSPQTLCNAHQNCPDGSDEDRLLCENHHCDSNEWQCANKRCIPESWQCDTFNDCEDNSDEDSSHCASRTCRPGQFRCANGRCIPQAWKCDVDNDCGDHSDEPIEECMSSAHLCDNFTEFSCKTNYRCIPKWAVCNGVDDCRDNSDEQGCEERTCHPVGDFRCKNHHCIPLRWQCDGQNDCGDNSDEENCAPRECTESEFRCVNQQCIPSRWICDHYNDCGDNSDERDCEMRTCHPEYFQCTSGHCVHSELKCDGSADCLDASDEADCPTRFPDGAYCQATMFECKNHVCIPPYWKCDGDDDCGDGSDEELHLCLDVPCNSPNRFRCDNNRCIYSHEVCNGVDDCGDGTDETEEHCRKPTPKPCTEYEYKCGNGHCIPHDNVCDDADDCGDWSDELGCNKGKERTCAENICEQNCTQLNEGGFICSCTAGFETNVFDRTSCLDINECEQFGTCPQHCRNTKGSYECVCADGFTSMSDRPGKRCAAEGSSPLLLLPDNVRIRKYNLSSERFSEYLQDEEYIQAVDYDWDPKDIGLSVVYYTVRGEGSRFGAIKRAYIPNFESGRNNLVQEVDLKLKYVMQPDGIAVDWVGRHIYWSDVKNKRIEVAKLDGRYRKWLISTDLDQPAAIAVNPKLGLMFWTDWGKEPKIESAWMNGEDRNILVFEDLGWPTGLSIDYLNNDRIYWSDFKEDVIETIKYDGTDRRVIAKEAMNPYSLDIFEDQLYWISKEKGEVWKQNKFGQGKKEKTLVVNPWLTQVRIFHQLRYNKSVPNLCKQICSHLCLLRPGGYSCACPQGSSFIEGSTTECDAAIELPINLPPPCRCMHGGNCYFDETDLPKCKCPSGYTGKYCEMAFSKGISPGTT

SEQ ID NO: 1572 - protein, 460 aa, synthetic construct
  REGION 1..460: note = LRP3 (O75074) ECD
VPALAACSGKLEQHTERRGVIYSPAWPLNYPPGTNCSWYIQGDRGDMITISFRNFDVEESHQCSLDWLLLGPAAPPRQEAFRLCGSAIPPAFISARDHVWIFFHSDASSSGQAQGFRLSYIRGKLGQASCQADEFRCDNGKCLPGPWQCNTVDECGDGSDEGNCSAPASEPPGSLCPGGTFPCSGARSTRCLPVERRCDGLQDCGDGSDEAGCPDLACGRRLGSFYGSFASPDLFGAARGPSDLHCTWLVDTQDSRRVLLQLELRLGYDDYVQVYEGLGERGDRLLQTLSYRSNHRPVSLEAAQGRLTVAYHARARSAGHGFNATYQVKGYCLPWEQPCGSSSDSDGGSLGDQGCFSEPQRCDGWWHCASGRDEQGCPACPPDQYPCEGGSGLCYTPADRCNNQKSCPDGADEKNCFSCQPGTFHCGTNLCIFETWRCDGQEDCQDGSDEHGCLAAVPRK

SEQ ID NO: 1573 - protein, 1705 aa, synthetic construct
  REGION 1..1705: note = LRP4 (O75096) ECD
SSPECACGRSHFTCAVSALGECTCIPAQWQCDGDNDCGDHSDEDGCILPTCSPLDFHCDNGKCIRRSWVCDGDNDCEDDSDEQDCPPRECEEDEFPCQNGYCIRSLWHCDGDNDCGDNSDEQCDMRKCSDKEFRCSDGSCIAEHWYCDGDTDCKDGSDEENCPSAVPAPPCNLEEFQCAYGRCILDIYHCDGDDDCGDWSDESDCSSHQPCRSGEFMCDSGLCINAGWRCDGDADCDDQSDERNCTTSMCTAEQFRCHSGRCVRLSWRCDGEDDCADNSDEENCENTGSPQCALDQFLCWNGRCIGQRKLCNGVNDCGDNSDESPQQNCRPRTGEENCNVNNGGCAQKCQMVRGAVQCTCHTGYRLTEDGHTCQDVNECAEEGYCSQGCTNSEGAFQCWCETGYELRPDRRSCKALGPEPVLLFANRIDIRQVLPHRSEYTLLLNNLENAIALDFHHRRELVFWSDVTLDRILRANLNGSNVEEVVSTGLESPGGLAVDWVHDKLYWTDSGTSRIEVANLDGAHRKVLLWQNLEKPRAIALHPMEGTIYWTDWGNTPRIEASSMDGSGRRIIADTHLFWPNGLTIDYAGRRMYWVDAKHHVIERANLDGSHRKAVISQGLPHPFAITVFEDSLYWTDWHTKSINSANKFTGKNQEIIRNKLHFPMDIHTLHPQRQPAGKNRCGDNNGGCTHLCLPSGQNYTCACPTGFRKISSHACAQSLDKFLLFARRMDIRRISFDTEDLSDDVIPLADVRSAVALDWDSRDDHVYWTDVSTDTISRAKWDGTGQEVVVDTSLESPAGLAIDWVTNKLYWTDAGTDRIEVANTDGSMRTVLIWENLDRPRDIVVEPMGGYMYWTDWGASPKIERAGMDASGRQVIISSNLTWPNGLAIDYGSQRLYWADAGMKTIEFAGLDGSKRKVLIGSQLPHPFGLTLYGERIYWTDWQTKSIQSADRLTGLDRETLQENLENLMDIHVFHRRRPPVSTPCAMENGGCSHLCLRSPNPSGFSCTCPTGINLLSDGKTCSPGMNSFLIFARRIDIRMVSLDIPYFADVVVPINITMKNTIAIGVDPQEGKVYWSDSTLHRISRANLDGSQHEDIITTGLQTTDGLAVDAIGRKVYWTDTGTNRIEVGNLDGSMRKVLVWQNLDSPRAIVLYHEMGFMYWTDWGENAKLERSGMDGSDRAVLINNNLGWPNGLTVDKASSQLLWADAHTERIEAADLNGANRHTLVSPVQHPYGLTLLDSYIYWTDWQTRSIHRADKGTGSNVILVRSNLPGLMDMQAVDRAQPLGFNKCGSRNGGCSHLCLPRPSGFSCACPTGIQLKGDGKTCDPSPETYLLFSSRGSIRRISLDTSDHTDVHVPVPELNNVISLDYDSVDGKVYYTDVFLDVIRRADLNGSNMETVIGRGLKTTDGLAVDWVARNLYWTDTGRNTIEASRLDGSCRKVLINNSLDEPRAIAVFPRKGYLFWTDWGHIAKIERANLDGSERKVLINTDLGWPNGLTLDYDTRRIYWVDAHLDRIESADLNGKLRQVLVSHVSHPFALTQQDRWIYWTDWQTKSIQRVDKYSGRNKETVLANVEGLMDIIVVSPQRQTGTNACGVNNGGCTHLCFARASDFVCACPDEPDSRPCSLVPGLVPPAPRATGMSEKSPVLPNTPPTTLYSSTTRTRTSLEEVEGRCSERDARLGLCARSNDAVPAAPGEGLHIS

SEQ ID NO: 1574 - protein, 1353 aa, synthetic construct
  REGION 1..1353: note = LRP5 (O75197) ECD
SPLLLFANRRDVRLVDAGGVKLESTIVVSGLEDAAAVDFQFSKGAVYWTDVSEEAIKQTYLNQTGAAVQNVVISGLVSPDGLACDWVGKKLYWTDSETNRIEVANLNGTSRKVLFWQDLDQPRAIALDPAHGYMYWTDWGETPRIERAGMDGSTRKIIVDSDIYWPNGLTIDLEEQKLYWADAKLSFIHRANLDGSFRQKVVEGSLTHPFALTLSGDTLYWTDWQTRSIHACNKRTGGKRKEILSALYSPMDIQVLSQERQPFFHTRCEEDNGGCSHLCLLSPSEPFYTCACPTGVQLQDNGRTCKAGAEEVLLLARRTDLRRISLDTPDFTDIVLQVDDIRHAIAIDYDPLEGYVYWTDDEVRAIRRAYLDGSGAQTLVNTEINDPDGIAVDWVARNLYWTDTGTDRIEVTRLNGTSRKILVSEDLDEPRAIALHPVMGLMYWTDWGENPKIECANLDGQERRVLVNASLGWPNGLALDLQEGKLYWGDAKTDKIEVINVDGTKRRTLLEDKLPHIFGFTLLGDFIYWTDWQRRSIERVHKVKASRDVIIDQLPDLMGLKAVNVAKVVGTNPCADRNGGCSHLCFFTPHATRCGCPIGLELLSDMKTCIVPEAFLVFTSRAAIHRISLETNNNDVAIPLTGVKEASALDFDVSNNHIYWTDVSLKTISRAFMNGSSVEHVVEFGLDYPEGMAVDWMGKNLYWADTGTNRIEVARLDGQFRQVLVWRDLDNPRSLALDPTKGYIYWTEWGGKPRIVRAFMDGTNCMTLVDKVGRANDLTIDYADQRLYWTDLDTNMIESSNMLGQERVVIADDLPHPFGLTQYSDYIYWTDWNLHSIERADKTSGRNRTLIQGHLDFVMDILVFHSSRQDGLNDCMHNNGQCGQLCLAIPGGHRCGCASHYTLDPSSRNCSPPTTFLLFSQKSAISRMIPDDQHSPDLILPLHGLRNVKAIDYDPLDKFIYWVDGRQNIKRAKDDGTQPFVLTSLSQGQNPDRQPHDLSIDIYSRTLFWTCEATNTINVHRLSGEAMGVVLRGDRDKPRAIVVNAERGYLYFTNMQDRAAKIERAALDGTEREVLFTTGLIRPVALVVDNTLGKLFWVDADLKRIESCDLSGANRLTLEDANIVQPLGLTILGKHLYWIDRQQQMIERVEKTTGDKRTRIQGRVAHLTGIHAVEEVSLEEFSAHPCARDNGGCSHICIAKGDGTPRCSCPVHLVLLQNLLTCGEPPTCSPDQFACATGEIDCIPGAWRCDGFPECDDQSDEEGCPVCSAAQFPCARGQCVDLRLRCDGEADCQDRSDEADCDAICLPNQFRCASGQCVLIKQQCDSFPDCIDGSDELMCEITKPPSDDSPAHS

SEQ ID NO: 1575 - protein, 1351 aa, synthetic construct
  REGION 1..1351: note = LRP6 (O75581) ECD
APLLLYANRRDLRLVDATNGKENATIVVGGLEDAAAVDFVFSHGLIYWSDVSEEAIKRTEFNKTESVQNVVVSGLLSPDGLACDWLGEKLYWTDSETNRIEVSNLDGSLRKVLFWQELDQPRAIALDPSSGFMYWTDWGEVPKIERAGMDGSSRFIIINSEIYWPNGLTLDYEEQKLYWADAKLNFIHKSNLDGTNRQAVVKGSLPHPFALTLFEDILYWTDWSTHSILACNKYTGEGLREIHSDIFSPMDIHAFSQQRQPNATNPCGIDNGGCSHLCLMSPVKPFYQCACPTGVKLLENGKTCKDGATELLLLARRTDLRRISLDTPDFTDIVLQLEDIRHAIAIDYDPVEGYIYWTDDEVRAIRRSFIDGSGSQFVVTAQIAHPDGIAVDWVARNLYWTDTGTDRIEVTRLNGTMRKILISEDLEEPRAIVLDPMVGYMYWTDWGEIPKIERAALDGSDRVVLVNTSLGWPNGLALDYDEGKIYWGDAKTDKIEVMNTDGTGRRVLVEDKIPHIFGFTLLGDYVYWTDWQRRSIERVHKRSAEREVIIDQLPDLMGLKATNVHRVIGSNPCAEENGGCSHLCLYRPQGLRCACPIGFELISDMKTCIVPEAFLLFSRRADIRRISLETNNNNVAIPLTGVKEASALDFDVTDNRIYWTDISLKTISRAFMNGSALEHVVEFGLDYPEGMAVDWLGKNLYWADTGTNRIEVSKLDGQHRQVLVWKDLDSPRALALDPAEGFMYWTEWGGKPKIDRAAMDGSERTTLVPNVGRANGLTIDYAKRRLYWTDLDTNLIESSNMLGLNREVIADDLPHPFGLTQYQDYIYWTDWSRRSIERANKTSGQNRTIIQGHLDYVMDILVFHSSRQSGWNECASSNGHCSHLCLAVPVGGFVCGCPAHYSLNADNRTCSAPTTFLLFSQKSAINRMVIDEQQSPDIILPIHSLRNVRAIDYDPLDKQLYWIDSRQNMIRKAQEDGSQGFTVVVSSVPSQNLEIQPYDLSIDIYSRYIYWTCEATNVINVTRLDGRSVGVVLKGEQDRPRAVVVNPEKGYMYFTNLQERSPKIERAALDGTEREVLFFSGLSKPIALALDSRLGKLFWADSDLRRIESSDLSGANRIVLEDSNILQPVGLTVFENWLYWIDKQQQMIEKIDMTGREGRTKVQARIAQLSDIHAVKELNLQEYRQHPCAQDNGGCSHICLVKGDGTTRCSCPMHLVLLQDELSCGEPPTCSPQQFTCFTGEIDCIPVAWRCDGFTECEDHSDELNCPVCSESQFQCASGQCIDGALRCNGDANCQDKSDEKNCEVLCLIDQFRCANGQCIGKHKKCDHNVDCSDKSDELDCYPTEEPAPQA

SEQ ID NO: 1576 - protein, 785 aa, synthetic construct
  REGION 1..785: note = LRP8 (Q14114) ECD
GPAKDCEKDQFQCRNERCIPSVWRCDEDDDCLDHSDEDDCPKKTCADSDFTCDNGHCIHERWKCDGEEECPDGSDESEATCTKQVCPAEKLSCGPTSHKCVPASWRCDGEKDCEGGADEAGCATLCAPHEFQCGNRSCLAAVFVCDGDDDCGDGSDERGCADPACGPREFRCGGDGGGACIPERWVCDRQFDCEDRSDEAAELCGRPGPGATSAPAACATASQFACRSGECVHLGWRCDGDRDCKDKSDEADCPLGTCRGDEFQCGDGTCVLAIKHCNQEQDCPDGSDEAGCLQGLNECLHNNGGCSHICTDLKIGFECTCPAGFQLLDQKTCGDIDECKDPDACSQICVNYKGYFKCECYPGYEMDLLTKNCKAAAGKSPSLIFTNRHEVRRIDLVKRNYSRLIPMLKNVVALDVEVATNRIYWCDLSYRKIYSAYMDKASDPKEQEVLIDEQLHSPEGLAVDWVHKHIYWTDSGNKTISVATVDGGRRRTLFSRNLSEPRAIAVDPLRGFMYWSDWGDQAKIEKSGLNGVDRQTLVSDNIEWPNGITLDLLSQRLYWVDSKLHQLSSIDFSGGNRKTLISSTDFLSHPFGIAVFEDKVFWTDLENEAIFSANRLNGLEISILAENLNNPHDIVIFHELKQPRAPDACELSVQPNGGCEYLCLPAPQISSHSPKYTCACPDTMWLGPDMKRCYRAPQSTSTTTLASTMTRTVPATTRAPGTTVHRSTYQNHSTETPSLTAAVPSSVSVPRAPSISPSTLSPATSNHSQHYANEDSKMGSTVTAA

SEQ ID NO: 1577 - protein, 517 aa, synthetic construct
  REGION 1..517: note = LRRC15 (Q8TF66) ECD
YHGCPSECTCSRASQVECTGARIVAVPTPLPWNAMSLQILNTHITELNESPFLNISALIALRIEKNELSRITPGAFRNLGSLRYLSLANNKLQVLPIGLFQGLDSLESLLLSSNQLLQIQPAHFSQCSNLKELQLHGNHLEYIPDGAFDHLVGLTKLNLGKNSLTHISPRVFQHLGNLQVLRLYENRLTDIPMGTFDGLVNLQELALQQNQIGLLSPGLFHNNHNLQRLYLSNNHISQLPPSVFMQLPQLNRLTLFGNSLKELSPGIFGPMPNLRELWLYDNHISSLPDNVFSNLRQLQVLILSRNQISFISPGAFNGLTELRELSLHTNALQDLDGNVFRMLANLQNISLQNNRLRQLPGNIFANVNGLMAIQLQNNQLENLPLGIFDHLGKLCELRLYDNPWRCDSDILPLRNWLLLNQPRLGTDTVPVCFSPANVRGQSLIIINVNVAVPSVHVPEVPSYPETPWYPDTPSYPDTTSVSSTTELTSPVEDYTDLTTIQVTDDRSVWGMTQAQSG

SEQ ID NO: 1578 - protein, 246 aa, synthetic construct
  REGION 1..246: note = LRRC19 (Q9H756) ECD
SKREVQCNFTEKNYTLIPADIKKDVTILDLSYNQITLNGTDTRVLQTYFLLTELYLIENKVTILHNNGFGNLSSLEILNICRNSIYVIQQGAFLGLNKLKQLYLCQNKIEQLNADVFVPLRSLKLLNLQGNLISYLDVPPLFHLELITLYGNLWNCSCSLFNLQNWLNTSNVTLENENITMCSYPNSLQSYNIKTVPHKAECHSKFPSSVTEDLYIHFQPISNSIFNSSSNNLTRNSEHEPLGKSW

SEQ ID NO: 1579 - protein, 385 aa, synthetic construct
  REGION 1..385: note = LRRC24 (Q50LG9) ECD
AGCPAACRCYSATVECGALRLRVVPLGIPPGTQTLFLQDNNIARLEPGALAPLAALRRLYLHNNSLRALEAGAFRAQPRLLELALTSNRLRGLRSGAFVGLAQLRVLYLAGNQLARLLDFTFLHLPRLQELHLQENSIELLEDQALAGLSSLALLDLSRNQLGTISREALQPLASLQVLRLTENPWRCDCALHWLGAWIKEGGQRLLTSRDRKIMCAEPPRLALQSLLDVSHSSLICIPPSVHVQPLELTANLGEDLRVACQASGYPQPLVTWRKVPQPREGRPRAQAQLEGGLLGLGGHSASDTGSGMLFLSNITLAHAGKYECEASNAGGAARVPFRLLVNASRQQPQQPAQPPPPAARPAGSEPRPEAGSMAFRALGVATQT

SEQ ID NO: 1580 - protein, 145 aa, synthetic construct
  REGION 1..145: note = LRRC25 (Q8N386) ECD
LEPSCTVSSADVDWNAEFSATCLNFSGLSLSLPHNQSLRASNVILLDLSGNGLRELPVTFFAHLQKLEVLNVLRNPLSRVDGALAARCDLDLQADCNCALESWHDIRRDNCSGQKPLLCWDTTSSQHNLSAFLEVSCAPGLASAT

SEQ ID NO: 1581 - protein, 608 aa, synthetic construct
  REGION 1..608: note = LRRC32 (Q14392) ECD
HQDKVPCKMVDKKVSCQVLGLLQVPSVLPPDTETLDLSGNQLRSILASPLGFYTALRHLDLSTNEISFLQPGAFQALTHLEHLSLAHNRLAMATALSAGGLGPLPRVTSLDLSGNSLYSGLLERLLGEAPSLHTLSLAENSLTRLTRHTFRDMPALEQLDLHSNVLMDIEDGAFEGLPRLTHLNLSRNSLTCISDFSLQQLRVLDLSCNSIEAFQTASQPQAEFQLTWLDLRENKLLHFPDLAALPRLIYLNLSNNLIRLPTGPPQDSKGIHAPSEGWSALPLSAPSGNASGRPLSQLLNLDLSYNEIELIPDSFLEHLTSLCFLNLSRNCLRTFEARRLGSLPCLMLLDLSHNALETLELGARALGSLRTLLLQGNALRDLPPYTFANLASLQRLNLQGNRVSPCGGPDEPGPSGCVAFSGITSLRSLSLVDNEIELLRAGAFLHTPLTELDLSSNPGLEVATGALGGLEASLEVLALQGNGLMVLQVDLPCFICLKRLNLAENRLSHLPAWTQAVSLEVLDLRNNSFSLLPGSAMGGLETSLRRLYLQGNPLSCCGNGWLAAQLHQGRVDVDATQDLICRFSSQEEVSLSHVRPEDCEKGGLKNIN

SEQ ID NO: 1582 - protein, 1547 aa, synthetic construct
  REGION 1..1547: note = LRRC37A (A6NMS7) ECD
EAQPLEWVKDPLQLTSNPLGPPESWSSHSSHFPRESPHAPTLPADPWDFDHLGPSASSEMPAPPQESTENLVPFLDTWDSAGEQPLEPEQFLASQQDLKDKLSPQERLPVSPKKLKKDPAQRWSLAEIIGITRQLSTPQSQKQTLQNEYSSTDTPYPGSLPPELRVKSDEPPGPSEQVGPSQFHLEPETQNPETLEDIQSSSLQQEAPAQLPQLLEEEPSSMQQEAPALPPESSMESLTLPNHEVSVQPPGEDQAYYHLPNITVKPADVEVTITSEPTNETESSQAQQETPIQFPEEVEPSATQQEAPIEPPVPPMEHELSISEQQQPVQPSESPREVESSPTQQETPGQPPEHHEVTVSPPGHHQTHHLASPSVSVKPPDVQLTIAAEPSAEVGTSLVHQEATTRLSGSGNDVEPPAIQHGGPPLLPESSEEAGPLAVQQETSFQSPEPINNENPSPTQQEAAAEHPQTAEEGESSLTHQEAPAQTPEFPNVVVAQPPEHSHLTQATVQPLDLGFTITPESKTEVELSPTMKETPTQPPKKVVPQLRVYQGVTNPTPGQDQAQHPVSPSVTVQLLDLGLTITPEPTTEVGHSTPPKRTIVSPKHPEVTLPHPDQVQTQHSHLTRATVQPLDLGFTITPKSMTEVEPSTALMTTAPPPGHPEVTLPPSDKGQAQHSHLTQATVQPLDLELTITTKPTTEVKPSPTTEETSTQPPDLGLAIIPEPTTETGHSTALEKTTAPRPDRVQTLHRSLTEVTGPPTELEPAQDSLVQSESYTQNKALTAPEEHKASTSTNICELCTCGDEMLSCIDLNPEQRLRQVPVPEPNTHNGTFTILNFQGNYISYIDGNVWKAYSWTEKLILRENNLTELHKDSFEGLLSLQYLDLSCNKIQSIERHTFEPLPFLKFINLSCNVITELSFGTFQAWHGMQFLHKLILNHNPLTTVEDPYLFKLPALKYLDMGTTLVPLTTLKNILMMTVELEKLILPSHMACCLCQFKNSIEAVCKTVKLHCNSACLTNTTHCPEEASVGNPEGAFMKVLQARKNYTSTELIVEPEEPSDSSGINLSGFGSEQLDTNDESDFISTLSYILPYFSAVNLDVKSLLLPFIKLPTTGNSLAKIQTVGQNRQRVKRVLMGPRSIQKRHFKEVGRQSIRREQGAQASVENAAEEKRLTSPAPREVEQPHTQQGPEKLAGNAVYTKPSFTQEHKAAVSVLKPFSKGTPSTSSPAKALPQVRDRSKDLTHAISILESAKARVTNTKTSKPIVHARKKYRFHKTRSHVTHRTTKVKKSPKVRKKSYLSRLMLANRLPFSAAKSLINSPSQGAFSSLGDLSPQENPFLEVSALSEHFIEKNNTKHTTARNAFEENDFMENTNMPEGTISENTNYNHPPEADSAGTAFNLGPTVKQTETKWEYNNVGTDLSPEPKSFNYPLLSSPGDQFEIQLTQQLQSLIPNNNVRRLIAHVIRTLKMDCSGAHVQVTCAKLISRTGHLMKLLSGQQEVKASKIEWDTDQWKIENYINESTEAQSEQKEKSLELKKEVPGYGYTDKL

SEQ ID NO: 1583 - protein, 1547 aa, synthetic construct
  REGION 1..1547: note = LRRC37A2 (A6NM11) ECD
EAQPLEWVKDPLQLTSNPLGPPDSWSSHSSHFPRESPHAPTLPADPWDFDHLGPSASSEMPAPPQESTENLVPFLDTWDSAGEQPLEPEQFLASQQDLKDKLSPQERLPVSPKKLKKDPAQRWSLAEIIGITRQLSTPQSQKQTLQNEYSSTDTPYPGSLPPELRVKSDEPPGPSEQVGPSQFHLEPETQNPETLEDIQSSSLQQEAPAQLPQLLEEEPSSMQQEAPALPPESSMESLTLPNHEVSVQPPGEDQAYYHLPNITVKPADVEVTITSEPTNETESSQAQQETPIQFPEEVEPSATQQEAPIEPPVPPMEHELSISEQQQPVQPSESPREVESSPTQQETPGQPPEHHEVTVSPPGHHQTHHLASPSVSVKPPDVQLTIAAEPSAEVGTSLVHQEATTRLSGSGNDVEPPAIQHGGPPLLPESSEEAGPLAVQQETSFQSPEPINNENPSPTQQEAAAEHPQTAEEGESSLTHQEAPAQTPEFPNVVVAQPPEHSHLTQATVQPLDLGFTITPESKTEVELSPTMKETPTQPPKKVVPQLRVYQGVTNPTPGQDQAQHPVSPSVTVQLLDLGLTITPEPTTEVGHSTPPKRTIVSPKHPEVTLPHPDQVQTQHSHLTRATVQPLDLGFTITPKSMTEVEPSTALMTTAPPPGHPEVTLPPSDKGQAQHSHLTQATVQPLDLELTITTKPTTEVKPSPTTEETSTQPPDLGLAIIPEPTTETRHSTALEKTTAPRPDRVQTLHRSLTEVTGPPTELEPAQDSLVQSESYTQNKALTAPEEHKASTSTNICELCTCGDEMLSCIDLNPEQRLRQVPVPEPNTHNGTFTILNFQGNYISYIDGNVWKAYSWTEKLILRENNLTELHKDSFEGLLSLQYLDLSCNKIQSIERHTFEPLPFLKFINLSCNVITELSFGTFQAWHGMQFLHKLILNHNPLTTVEDPYLFKLPALKYLDMGTTLVPLTTLKNILMMTVELEKLILPSHMACCLCQFKNSIEAVCKTVKLHCNSACLTNTTHCPEEASVGNPEGAFMKVLQARKNYTSTELIVEPEEPSDSSGINLSGFGSEQLDTNDESDFISTLSYILPYFSAVNLDVKSLLLPFIKLPTTGNSLAKIQTVGQNRQRVKRVLMGPRSIQKRHFKEVGRQSIRREQGAQASVENAAEEKRLGSPAPREVEQPHTQQGPEKLAGNAVYTKPSFTQEHKAAVSVLKPFSKGAPSTSSPAKALPQVRDRWKDLTHAISILESAKARVTNTKTSKPIVHARKKYRFHKTRSHVTHRTPKVKKSPKVRKKSYLSRLMLANRLPFSAAKSLINSPSQGAFSSLGDLSPQENPFLEVSAPSEHFIENNNTKHTTARNAFEENDFMENTNMPEGTISENTNYNHPHEADSAGTAFNLGPTVKQTETKWEYNNVGTDLSPEPKSFNYPLLSSPGDQFEIQLTQQLQSLIPNNNVRRLIAHVIRTLKMDCSGAHVQVTCAKLISRTGHLMKLLSGQQEVKASKIEWDTDQWKIENYINESTEAQSEQKEKSLELKKEVPGYGYTDKL

SEQ ID NO: 1584 - protein, 1546 aa, synthetic construct
  REGION 1..1546: note = LRRC37A3 (O60309) ECD
EAQPLEWVKDPLQLTSNPLGPPEPWSSHSSHFPRESPHAPTLPADPWDFDHLGPSASSEMPAPPQESTENLVPFLDTWDSAGELPLEPEQFLASQQDLKDKLSPQERLPVSPKKLKKDPAQRWSLAEIIGIIHQLSTPQSQKQTLQNEYSSTDTPYPGSLPPELRVKSDEPPGPSEQVGPSQFHLEPETQNPETLEDIQSSSLQQEAPAQLPQLLEEEPSSMQQEAPALPPESSMESLTLPNHEVSVQPPGEDQAYYHLPNITVKPADVEVTITSEPTNETESSQAQQETPIQFPEEVEPSATQQEAPIEPPVPPMEHELSISEQQQPVQPSESSREVESSPTQQETPGQPPEHHEVTVSPPGHHQTHHLASPSVSVKPPDVQLTIAAEPSAEVGTSLVHQEATTRLSGSGNDVEPPAIQHGGPPLLPESSEEAGPLAVQQETSFQSPEPINNENPSPTQQEAAAEHPQTAEEGESSLTHQEAPAQTPEFPNVVVAQPPEHSHLTQATVQPLDLGFTITPESMTEVELSPTMKETPTQPPKKVVPQLRVYQGVTNPTPGQDQAQHPVSPSVTVQLLDLGLTITPEPTTEVGHSTPPKRTIVSPKHPEVTLPHPDQVQTQHSHLTRATVQPLDLGFTITPKSMTEVEPSTALMTTAPPPGHPEVTLPPSDKGQAQHSHLTQATVQPLDLELTITTKPTTEVKPSPTTEETSTQLPDLGLAIIPEPTTETGHSTALEKTTAPRPDRVQTLHRSLTEVTGPPTELEPAQDSLVQSESYTQNKALTAPEEHKASTSTNICELCTCGDEMLSCIDLNPEQRLRQVPVPEPNTHNGTFTILNFQGNYISYIDGNVWKAYSWTEKLILRENNLTELHKDSFEGLLSLQYLDLSCNKIQSIERHTFEPLPFLKFINLSCNVITELSFGTFQAWHGMQFLHKLILNHNPLTTVEDPYLFKLPALKYLDMGTTLVPLTTLKNILMMTVELEKLIVPSHMACCLCQFKNSIEAVCKTVKLHCNSACLTNTTHCPEEASVGNPEGAFMKVLQARKNYTSTELIIEPEEPSDSSGINLSGFGSEQLDTNDESDVTSTLSYILPYFSAVNLDVKSLLLPFIKLPTTGNSLAKIQTVGKNRQRLNRVLMGPRSIQKRHFKEVGRQSIRREQGAQASVENTAEEKRLGSPAPRELKQPHTQQGPEKLAGNAVYTKPSFTQEHKAAVSVLKPFSKGAPSTSSPAKALPQVRDRWKDLTHAISILESAKARVTNMKTSKPIVHSRKKYRFHKTRSRMTHRTPKVKKSPKVRKKSYLSRLMLSNRLPFSAAKSLINSPSQGAFSSLRDLSPQENPFLEVSAPSEHFIENNNTKDTTARNAFEENVFMENTNMPEGTISENTNYNHPPEADSAGTAFNLGPTVKQTETKWEYNNVGTDLSPEPKSFNYPLLSSPGDQFEIQLTQQLQSVIPNNNVRRLIAHVIRTLKMDCSGAHVQVTCAKLVSRTGHLMKLLSGQQEVKASKIEWDTDQWKTENYINESTEAQSEQKEKSLEFTKELPGYGYTKK

SEQ ID NO: 1585 - protein, 878 aa, synthetic construct
  REGION 1..878: note = LRRC37B (Q96QE4) ECD
LVWVKDPLQLTSNPLGPPEPWSSRSSHLPWESPHAPAPPAAPGDFDYLGPSASSQMSALPQEPTENLAPFLKELDSAGELPLGPEPFLAAHQDLNDKRTPEERLPEVVPLLNRDQNQALVQLPRLKWVQTTDLDRAAGHQADEILVPLDSKVSRPTKFVVSPKNLKKDLAERWSLPEIVGIPHQLSKPQRQKQTLPDDYLSMDTLYPGSLPPELRVNADEPPGPPEQVGLSQFHLEPKSQNPETLEDIQSSSLQEEAPAQLLQLPQEVEPSTQQEAPALPPESSMESLAQTPLNHEVTVQPPGEDQAHYNLPKFTVKPADVEVTMTSEPKNETESTQAQQEAPIQPPEEAEPSSTALRTTDPPPEHPEVTLPPSDKGQAQHSHLTEATVQPLDLELSITTEPTTEVKPSPTTEETSAQPPDPGLAITPEPTTEIGHSTALEKTRAPHPDQVQTLHRSLTEVTGPPTKLESSQDSLVQSETAPEEQKASTSTNICELCTCGDETLSCVGLSPKQRLRQVPVPEPDTYNGIFTTLNFQGNYISYLDGNVWKAYSWTEKLILSENYLTELPKDSFEGLLYLQYLDLSCNKIRYIERQTFESLPFLQYINLGCNLITKLSLGTFQAWHGMQFLHNLILNRNPLTTVEDPYLFELPALKYLDMGTTHITLTTLKNILTMTVELEKLILPSHMACCLCQFKNSIEAVCKTVKLHCNTACLTNSIHCPEEASVGNPEGAFMKMLQARKQHMSTQLTIESEAPSDSSGINLSGFGGDQLEIQLTEQLRSLIPNEDVRKFMSHVIRTLKMECSETHVQGSCAKLMLRTGLLMKLLSEQQEAKALNVEWDTDQQKTNYINENMEQNEQKEQKSSELMKEVPGDDYKNK

SEQ ID NO: 1586 - protein, 222 aa, synthetic construct
  REGION 1..222: note = LRRC38 (Q5VT99) ECD
CPAGCACTDPHTVDCRDRGLPSVPDPFPLDVRKLLVAGNRIQRIPEDFFIFYGDLVYLDFRNNSLRSLEEGTFSGSAKLVFLDLSYNNLTQLGAGAFRSAGRLVKLSLANNNLVGVHEDAFETLESLQVLELNDNNLRSLSVAALAALPALRSLRLDGNPWLCDCDFAHLFSWIQENASKLPKGLDEIQCSLPMESRRISLRELSEASFSECRFSLSLTDLC

SEQ ID NO: 1587 - protein, 171 aa, synthetic construct
  REGION 1..171: note = LRRC3B (Q96PB8) ECD
CPKGCLCSSSGGLNVTCSNANLKEIPRDLPPETVLLYLDSNQITSIPNEIFKDLHQLRVLNLSKNGIEFIDEHAFKGVAETLQTLDLSDNRIQSVHKNAFNNLKARARIANNPWHCDCTLQQVLRSMASNHETAHNVICKTSVLDEHAGRPFLNAANDADLCNLPKKTTDY

SEQ ID NO: 1588 - protein, 489 aa, synthetic construct
  REGION 1..489: note = LRRC4 (Q9HBW1) ECD
ASAGPQNCPSVCSCSNQFSKVVCTRRGLSEVPQGIPSNTRYLNLMENNIQMIQADTFRHLHHLEVLQLGRNSIRQIEVGAFNGLASLNTLELFDNWLTVIPSGAFEYLSKLRELWLRNNPIESIPSYAFNRVPSLMRLDLGELKKLEYISEGAFEGLFNLKYLNLGMCNIKDMPNLTPLVGLEELEMSGNHFPEIRPGSFHGLSSLKKLWVMNSQVSLIERNAFDGLASLVELNLAHNNLSSLPHDLFTPLRYLVELHLHHNPWNCDCDILWLAWWLREYIPTNSTCCGRCHAPMHMRGRYLVEVDQASFQCSAPFIMDAPRDLNISEGRMAELKCRTPPMSSVKWLLPNGTVLSHASRHPRISVLNDGTLNFSHVLLSDTGVYTCMVTNVAGNSNASAYLNVSTAELNTSNYSFFTTVTVETTEISPEDTTRKYKPVPTTSTGYQPAYTTSTTVLIQTTRVPKQVAVPATDTTDKMQTSLDEVMKTTK

SEQ ID NO: 1589 - protein, 541 aa, synthetic construct
  REGION 1..541: note = LRRC4B (Q9NT99) ECD
AGGGGVAVTSAAGGGSPPATSCPVACSCSNQASRVICTRRDLAEVPASIPVNTRYLNLQENGIQVIRTDTFKHLRHLEILQLSKNLVRKIEVGAFNGLPSLNTLELFDNRLTTVPTQAFEYLSKLRELWLRNNPIESIPSYAFNRVPSLRRLDLGELKRLEYISEAAFEGLVNLRYLNLGMCNLKDIPNLTALVRLEELELSGNRLDLIRPGSFQGLTSLRKLWLMHAQVATIERNAFDDLKSLEELNLSHNNLMSLPHDLFTPLHRLERVHLNHNPWHCNCDVLWLSWWLKETVPSNTTCCARCHAPAGLKGRYIGELDQSHFTCYAPVIVEPPTDLNVTEGMAAELKCRTGTSMTSVNWLTPNGTLMTHGSYRVRISVLHDGTLNFTNVTVQDTGQYTCMVTNSAGNTTASATLNVSAVDPVAAGGTGSGGGGPGGSGGVGGGSGGYTYFTTVTVETLETQPGEEALQPRGTEKEPPGPTTDGVWGGGRPGDAAGPASSSTTAPAPRSSRPTEKAFTVPITDVTENALKDLDDVMKTTK

SEQ ID NO: 1590 - protein, 483 aa, synthetic construct
  REGION 1..483: note = LRRC4C (Q9HCJ2) ECD
QTCPSVCSCSNQFSKVICVRKNLREVPDGISTNTRLLNLHENQIQIIKVNSFKHLRHLEILQLSRNHIRTIEIGAFNGLANLNTLELFDNRLTTIPNGAFVYLSKLKELWLRNNPIESIPSYAFNRIPSLRRLDLGELKRLSYISEGAFEGLSNLRYLNLAMCNLREIPNLTPLIKLDELDLSGNHLSAIRPGSFQGLMHLQKLWMIQSQIQVIERNAFDNLQSLVEINLAHNNLTLLPHDLFTPLHHLERIHLHHNPWNCNCDILWLSWWIKDMAPSNTACCARCNTPPNLKGRYIGELDQNYFTCYAPVIVEPPADLNVTEGMAAELKCRASTSLTSVSWITPNGTVMTHGAYKVRIAVLSDGTLNFTNVTVQDTGMYTCMVSNSVGNTTASATLNVTAATTTPFSYFSTVTVETMEPSQDEARTTDNNVGPTPVVDWETTNVTTSLTPQSTRSTEKTFTIPVTDINSGIPGIDEVMKTTK

SEQ ID NO: 1591 - protein, 221 aa, synthetic construct
  REGION 1..221: note = LRRC52 (Q8N7C0) ECD
SKCPNNCLCQAQEVICTGKQLTEYPLDIPLNTRRLFLNENRITSLPAMHLGLLSDLVYLDCQNNRIREVMDYTFIGVFKLIYLDLSSNNLTSISPFTFSVLSNLVQLNIANNPHLLSLHKFTFANTTSLRYLDLRNTGLQTLDSAALYHLTTLETLFLSGNPWKCNCSFLDFAIFLIVFHMDPSDDLNATCVEPTELTGWPITRVGNPLRYMCITHLDHKD

SEQ ID NO: 1592 - protein, 606 aa, synthetic construct
  REGION 1..606: note = LRRN1 (Q6UXK5) ECD
SIQNSECPQLCVCEIRPWFTPQSTYREATTVDCNDLRLTRIPSNLSSDTQVLLLQSNNIAKTVDELQQLFNLTELDFSQNNFTNIKEVGLANLTQLTTLHLEENQITEMTDYCLQDLSNLQELYINHNQISTISAHAFAGLKNLLRLHLNSNKLKVIDSRWFDSTPNLEILMIGENPVIGILDMNFKPLANLRSLVLAGMYLTDIPGNALVGLDSLESLSFYDNKLVKVPQLALQKVPNLKFLDLNKNPIHKIQEGDFKNMLRLKELGINNMGELVSVDRYALDNLPELTKLEATNNPKLSYIHRLAFRSVPALESLMLNNNALNAIYQKTVESLPNLREISIHSNPLRCDCVIHWINSNKTNIRFMEPLSMFCAMPPEYKGHQVKEVLIQDSSEQCLPMISHDSFPNRLNVDIGTTVFLDCRAMAEPEPEIYWVTPIGNKITVETLSDKYKLSSEGTLEISNIQIEDSGRYTCVAQNVQGADTRVATIKVNGTLLDGTQVLKIYVKQTESHSILVSWKVNSNVMTSNLKWSSATMKIDNPHITYTARVPVDVHEYNLTHLQPSTDYEVCLTVSNIHQQTQKSCVNVTTKNAAFAVDISDQETSTA

SEQ ID NO: 1593 - protein, 612 aa, synthetic construct
  REGION 1..612: note = LRRN2 (O75325) ECD
AVPVVPWHVPCPPQCACQIRPWYTPRSSYREATTVDCNDLFLTAVPPALPAGTQTLLLQSNSIVRVDQSELGYLANLTELDLSQNSFSDARDCDFHALPQLLSLHLEENQLTRLEDHSFAGLASLQELYLNHNQLYRIAPRAFSGLSNLLRLHLNSNLLRAIDSRWFEMLPNLEILMIGGNKVDAILDMNFRPLANLRSLVLAGMNLREISDYALEGLQSLESLSFYDNQLARVPRRALEQVPGLKFLDLNKNPLQRVGPGDFANMLHLKELGLNNMEELVSIDKFALVNLPELTKLDITNNPRLSFIHPRAFHHLPQMETLMLNNNALSALHQQTVESLPNLQEVGLHGNPIRCDCVIRWANATGTRVRFIEPQSTLCAEPPDLQRLPVREVPFREMTDHCLPLISPRSFPPSLQVASGESMVLHCRALAEPEPEIYWVTPAGLRLTPAHAGRRYRVYPEGTLELRRVTAEEAGLYTCVAQNLVGADTKTVSVVVGRALLQPGRDEGQGLELRVQETHPYHILLSWVTPPNTVSTNLTWSSASSLRGQGATALARLPRGTHSYNITRLLQATEYWACLQVAFADAHTQLACVWARTKEATSCHRALGDRPG

SEQ ID NO: 1594 - protein, 606 aa, synthetic construct
  REGION 1..606: note = LRRN3 (Q9H3W5) ECD
VDKKVDCPRLCTCEIRPWFTPRSIYMEASTVDCNDLGLLTFPARLPANTQILLLQTNNIAKIEYSTDFPVNLTGLDLSQNNLSSVTNINVKKMPQLLSVYLEENKLTELPEKCLSELSNLQELYINHNLLSTISPGAFIGLHNLLRLHLNSNRLQMINSKWFDALPNLEILMIGENPIIRIKDMNFKPLINLRSLVIAGINLTEIPDNALVGLENLESISFYDNRLIKVPHVALQKVVNLKFLDLNKNPINRIRRGDFSNMLHLKELGINNMPELISIDSLAVDNLPDLRKIEATNNPRLSYIHPNAFFRLPKLESLMLNSNALSALYHGTIESLPNLKEISIHSNPIRCDCVIRWMNMNKTNIRFMEPDSLFCVDPPEFQGQNVRQVHFRDMMEICLPLIAPESFPSNLNVEAGSYVSFHCRATAEPQPEIYWITPSGQKLLPNTLTDKFYVHSEGTLDINGVTPKEGGLYTCIATNLVGADLKSVMIKVDGSFPQDNNGSLNIKIRDIQANSVLVSWKASSKILKSSVKWTAFVKTENSHAAQSARIPSDVKVYNLTHLNPSTEYKICIDIPTIYQKNRKKCVNVTTKGLHPDQKEYEKNNTTT

SEQ ID NO: 1595 - protein, 661 aa, synthetic construct
  REGION 1..661: note = LRRN4 (Q8WUT4) ECD
DPPQEKVPLFRVTQQGPWGSSGSNATDSPCEGLPAADATALTLANRNLERLPGCLPRTLRSLDASHNLLRALSTSELGHLEQLQVLTLRHNRIAALRWGPGGPAGLHTLDLSYNQLAALPPCTGPALSSLRALALAGNPLRALQPRAFACFPALQLLNLSCTALGRGAQGGIAEAAFAGEDGAPLVTLEVLDLSGTFLERVESGWIRDLPKLTSLYLRKMPRLTTLEGDIFKMTPNLQQLDCQDSPALASVATHIFQDTPHLQVLLFQNCNLSSFPPWTLDSSQVLSINLFGNPLTCSCDLSWLLTDAKRTVLSRAADTMCAPAAGSSGPFSASLSLSQLPGVCQSDQSTTLGASHPPCFNRSTYAQGTTVAPSAAPATRPAGDQQSVSKAPNVGSRTIAAWPHSDAREGTAPSTTNSVAGHSNSSVFPRAASTTRTQHRGEHAPELVLEPDISAASTPLASKLLGPFPTSWDRSISSPQPGQRTHATPQAPNPSLSEGEIPVLLLDDYSEEEEGRKEEVGTPHQDVPCDYHPCKHLQTPCAELQRRWRCRCPGLSGEDTIPDPPRLQGVTETTDTSALVHWCAPNSVVHGYQIRYSAEGWAGNQSVVGVIYATARQHPLYGLSPGTTYRVCVLAANRAGLSQPRSSGWRSPCAAFTTKPS

SEQ ID NO: 1596 - protein, 172 aa, synthetic construct
  REGION 1..172: note = LRRN4CL (Q8ND94) ECD
LAPQDFEEEEADETETAWPPLPAVPCDYDHCRHLQVPCKELQRVGPAACLCPGLSSPAQPPDPPRMGEVRIAAEEGRAVVHWCAPFSPVLHYWLLLWDGSEAAQKGPPLNATVRRAELKGLKPGGIYVVCVVAANEAGASRVPQAGGEGLEGADIPAFGPCSRLAVPPNPRT

SEQ ID NO: 1597 - protein, 389 aa, synthetic construct
  REGION 1..389: note = LRRTM2 (O43300) ECD
CPPKCRCEKLLFYCDSQGFHSVPNATDKGSLGLSLRHNHITELERDQFASFSQLTWLHLDHNQISTVKEDAFQGLYKLKELILSSNKIFYLPNTTFTQLINLQNLDLSFNQLSSLHPELFYGLRKLQTLHLRSNSLRTIPVRLFWDCRSLEFLDLSTNRLRSLARNGFAGLIKLRELHLEHNQLTKINFAHFLRLSSLHTLFLQWNKISNLTCGMEWTWGTLEKLDLTGNEIKAIDLTVFETMPNLKILLMDNNKLNSLDSKILNSLRSLTTVGLSGNLWECSARICALASWLGSFQGRWEHSILCHSPDHTQGEDILDAVHGFQLCWNLSTTVTVMATTYRDPTTEYTKRISSSSYHVGDKEIPTTAGIAVTTEEHFPEPDNAIFTQR

SEQ ID NO: 1598 - protein, 389 aa, synthetic construct
  REGION 1..389: note = LRRTM3 (Q86VH5) ECD
ERGCPKGCRCEGKMVYCESQKLQEIPSSISAGCLGLSLRYNSLQKLKYNQFKGLNQLTWLYLDHNHISNIDENAFNGIRRLKELILSSNRISYFLNNTFRPVTNLRNLDLSYNQLHSLGSEQFRGLRKLLSLHLRSNSLRTIPVRIFQDCRNLELLDLGYNRIRSLARNVFAGMIRLKELHLEHNQFSKLNLALFPRLVSLQNLYLQWNKISVIGQTMSWTWSSLQRLDLSGNEIEAFSGPSVFQCVPNLQRLNLDSNKLTFIGQEILDSWISLNDISLAGNIWECSRNICSLVNWLKSFKGLRENTIICASPKELQGVNVIDAVKNYSICGKSTTERFDLARALPKPTFKPKLPRPKHESKPPLPPTVGATEPGPETDADAEHISFHK

SEQ ID NO: 1599 - protein, 394 aa, synthetic construct
  REGION 1..394: note = LRRTM4 (Q86VH4) ECD
QRACPKNCRCDGKIVYCESHAFADIPENISGGSQGLSLRFNSIQKLKSNQFAGLNQLIWLYLDHNYISSVDEDAFQGIRRLKELILSSNKITYLHNKTFHPVPNLRNLDLSYNKLQTLQSEQFKGLRKLIILHLRSNSLKTVPIRVFQDCRNLDFLDLGYNRLRSLSRNAFAGLLKLKELHLEHNQFSKINFAHFPRLFNLRSIYLQWNRIRSISQGLTWTWSSLHNLDLSGNDIQGIEPGTFKCLPNLQKLNLDSNKLTNISQETVNAWISLISITLSGNMWECSRSICPLFYWLKNFKGNKESTMICAGPKHIQGEKVSDAVETYNICSEVQVVNTERSHLVPQTPQKPLIIPRPTIFKPDVTQSTFETPSPSPGFQIPGAEQEYEHVSFHK

SEQ ID NO: 1600 - protein, 261 aa, synthetic construct
  REGION 1..261: note = LRTM1 (Q9HBL6) ECD
QSSTNFVDCSQQGLAEIPSHLPPQTRTLHLQDNQIHHLPAFAFRSVPWLMTLNLSNNSLSNLAPGAFHGLQHLQVLNLTQNSLLSLESRLFHSLPQLRELDLSSNNISHLPTSLGETWENLTILAVQQNQLQQLDRALLESMPSVRLLLLKDNLWKCNCHLLGLKLWLEKFVYKGGLTDGIICESPDTWKGKDLLRIPHELYQPCPLPAPDPVSSQAQWPGSAHGVVLRPPENHNAGERELLECELKPKPRPANLRHAIAT

SEQ ID NO: 1601 - protein, 275 aa, synthetic construct
  REGION 1..275: note = LRTM2 (Q8N967) ECD
LPTCPFSCKCDSRSLEVDCSGLGLTTVPPDVPAATRTLLLLNNKLSALPSWAFANLSSLQRLDLSNNFLDRLPRSIFGDLTNLTELQLRNNSIRTLDRDLLRHSPLLRHLDLSINGLAQLPPGLFDGLLALRSLSLRSNRLQNLDRLTFEPLANLQLLQVGDNPWECDCNLREFKHWMEWFSYRGGRLDQLACTLPKELRGKDMRMVPMEMFNYCSQLEDENSSAGLDIPGPPCTKASPEPAKPKPGAEPEPEPSTACPQKQRHRPASVRRAMGT

SEQ ID NO: 1602 - protein, 197 aa, synthetic construct
  REGION 1..197: note = LTBR (P36941) ECD
QAVPPYASENQTCRDQEKEYYEPQHRICCSRCPPGTYVSAKCSRIRDTVCATCAENSYNEHWNYLTICQLCRPCDPVMGLEEIAPCTSKRKTQCRCQPGMFCAAWALECTHCELLSDCPPGTEAELKDEVGKGNNHCVPCKAGHFQNTSSPSARCQPHTRCENQGLVEAAPGTAQSDTTCKNPLEPLPPEMSGTMLM

SEQ ID NO: 1603 - protein, 408 aa, synthetic construct
  REGION 1..408: note = LTK (P29376) ECD
ILCSSPGSQETFLRSSPLPLASPSPRDPKVSAPPSILEPASPLNSPGTEGSWLFSTCGASGRHGPTQTQCDGAYAGTSVVVTVGAAGQLRGVQLWRVPGPGQYLISAYGAAGGKGAKNHLSRAHGVFVSAIFSLGLGESLYILVGQQGEDACPGGSPESQLVCLGESRAVEEHAAMDGSEGVPGSRRWAGGGGGGGGATYVFRVRAGELEPLLVAAGGGGRAYLRPRDRGRTQASPEKLENRSEAPGSGGRGGAAGGGGGWTSRAPSPQAGRSLQEGAEGGQGCSEAWATLGWAAAGGFGGGGGACTAGGGGGGYRGGDASETDNLWADGEDGVSFIHPSSELFLQPLAVTENHGEVEIRRHLNCSHCPLRDCQWQAELQLAECLCPEGMELAVDNVTCMDLHKPPGP

SEQ ID NO: 1604 - protein, 219 aa, synthetic construct
  REGION 1..219: note = LY6G6F (Q5SQ64) ECD
ADNMQAIYVALGEAVELPCPSPPTLHGDEHLSWFCSPAAGSFTTLVAQVQVGRPAPDPGKPGRESRLRLLGNYSLWLEGSKEEDAGRYWCAVLGQHHNYQNWRVYDVLVLKGSQLSARAADGSPCNVLLCSVVPSRRMDSVTWQEGKGPVRGRVQSFWGSEAALLLVCPGEGLSEPRSRRPRIIRCLMTHNKGVSFSLAASIDASPALCAPSTGWDMPW

SEQ ID NO: 1605 - protein, 1639 aa, synthetic construct
  REGION 1..1639: note = LY75 (O60449) ECD
SGRAANDPFTIVHGNTGKCIKPVYGWIVADDCDETEDKLWKWVSQHRLFHLHSQKCLGLDITKSVNELRMFSCDSSAMLWWKCEHHSLYGAARYRLALKDGHGTAISNASDVWKKGGSEESLCDQPYHEIYTRDGNSYGRPCEFPFLIDGTWHHDCILDEDHSGPWCATTLNYEYDRKWGICLKPENGCEDNWEKNEQFGSCYQFNTQTALSWKEAYVSCQNQGADLLSINSAAELTYLKEKEGIAKIFWIGLNQLYSARGWEWSDHKPLNFLNWDPDRPSAPTIGGSSCARMDAESGLWQSFSCEAQLPYVCRKPLNNTVELTDVWTYSDTRCDAGWLPNNGFCYLLVNESNSWDKAHAKCKAFSSDLISIHSLADVEVVVTKLHNEDIKEEVWIGLKNINIPTLFQWSDGTEVTLTYWDENEPNVPYNKTPNCVSYLGELGQWKVQSCEEKLKYVCKRKGEKLNDASSDKMCPPDEGWKRHGETCYKIYEDEVPFGTNCNLTITSRFEQEYLNDLMKKYDKSLRKYFWTGLRDVDSCGEYNWATVGGRRRAVTFSNWNFLEPASPGGCVAMSTGKSVGKWEVKDCRSFKALSICKKMSGPLGPEEASPKPDDPCPEGWQSFPASLSCYKVFHAERIVRKRNWEEAERFCQALGAHLSSFSHVDEIKEFLHFLTDQFSGQHWLWIGLNKRSPDLQGSWQWSDRTPVSTIIMPNEFQQDYDIRDCAAVKVFHRPWRRGWHFYDDREFIYLRPFACDTKLEWVCQIPKGRTPKTPDWYNPDRAGIHGPPLIIEGSEYWFVADLHLNYEEAVLYCASNHSFLATITSFVGLKAIKNKIANISGDGQKWWIRISEWPIDDHFTYSRYPWHRFPVTFGEECLYMSAKTWLIDLGKPTDCSTKLPFICEKYNVSSLEKYSPDSAAKVQCSEQWIPFQNKCFLKIKPVSLTFSQASDTCHSYGGTLPSVLSQIEQDFITSLLPDMEATLWIGLRWTAYEKINKWTDNRELTYSNFHPLLVSGRLRIPENFFEEESRYHCALILNLQKSPFTGTWNFTSCSERHFVSLCQKYSEVKSRQTLQNASETVKYLNNLYKIIPKTLTWHSAKRECLKSNMQLVSITDPYQQAFLSVQALLHNSSLWIGLFSQDDELNFGWSDGKRLHFSRWAETNGQLEDCVVLDTDGFWKTVDCNDNQPGAICYYSGNETEKEVKPVDSVKCPSPVLNTPWIPFQNCCYNFIITKNRHMATTQDEVHTKCQKLNPKSHILSIRDEKENNFVLEQLLYFNYMASWVMLGITYRNKSLMWFDKTPLSYTHWRAGRPTIKNEKFLAGLSTDGFWDIQTFKVIEEAVYFHQHSILACKIEMVDYKEEYNTTLPQFMPYEDGIYSVIQKKVTWYEALNMCSQSGGHLASVHNQNGQLFLEDIVKRDGFPLWVGLSSHDGSESSFEWSDGSTFDYIPWKGQTSPGNCVLLDPKGTWKHEKCNSVKDGAICYKPTKSKKLSRLTYSSRCPAAKENGSRWIQYKGHCYKSDQALHSFSEAKKLCSKHDHSATIVSIKDEDENKFVSRLMRENNNITMRVWLGLSQHSVDQSWSWLDGSEVTFVKWENKSKSGVGRCSMLIASNETWKKVECEHGFGRVVCKVPLGPD

SEQ ID NO: 1606 - protein, 407 aa, synthetic construct
  REGION 1..407: note = LY9 (Q9HBG7) ECD
KDSAPTVVSGILGGSVTLPLNISVDTEIENVIWIGPKNALAFARPKENVTIMVKSYLGRLDITKWSYSLCISNLTLNDAGSYKAQINQRNFEVTTEEEFTLFVYEQLQEPQVTMKSVKVSENFSCNITLMCSVKGAEKSVLYSWTPREPHASESNGGSILTVSRTPCDPDLPYICTAQNPVSQRSSLPVHVGQFCTDPGASRGGTTGETVVGVLGEPVTLPLALPACRDTEKVVWLFNTSIISKEREEAATADPLIKSRDPYKNRVWVSSQDCSLKISQLKIEDAGPYHAYVCSEASSVTSMTHVTLLIYRRLRKPKITWSLRHSEDGICRISLTCSVEDGGNTVMYTWTPLQKEAVVSQGESHLNVSWRSSENHPNLTCTASNPVSRSSHQFLSENICSGPERNTK

SEQ ID NO: 1607 - protein, 219 aa, synthetic construct
  REGION 1..219: note = LYVE1 (Q9Y5Y7) ECD
LVQGSLRAEELSIQVSCRIMGITLVSKKANQQLNFTEAKEACRLLGLSLAGKDQVETALKASFETCSYGWVGDGFVVISRISPNPKCGKNGVGVLIWKVPVSRQFAAYCYNSSDTWTNSCIPEIITTKDPIFNTQTATQTTEFIVSDSTYSVASPYSTIPAPTTTPPAPASTSIPRRKKLICVTEVFMETSTMSTETEPFVENKAAFKNEAAGFGGVPT

SEQ ID NO: 1608 - protein, 159 aa, synthetic construct
  REGION 1..159: note = M6PR (P20645) ECD
TEEKTCDLVGEKGKESEKELALVKRLKPLFNKSFESTVGQGSDTYIYIFRVCREAGNHTSGAGLVQINKSNGKETVVGRLNETHIFNGSNWIMLIYKGGDEYDNHCGKEQRRAVVMISCNRHTLADNFNPVSEERGKVQDCFYLFEMDSSLACSPEISH

SEQ ID NO: 1609 - protein, 497 aa, synthetic construct
  REGION 1..497: note = MAG (P20916) ECD
GHWGAWMPSSISAFEGTCVSIPCRFDFPDELRPAVVHGVWYFNSPYPKNYPPVVFKSRTQVVHESFQGRSRLLGDLGLRNCTLLLSNVSPELGGKYYFRGDLGGYNQYTFSEHSVLDIVNTPNIVVPPEVVAGTEVEVSCMVPDNCPELRPELSWLGHEGLGEPAVLGRLREDEGTWVQVSLLHFVPTREANGHRLGCQASFPNTTLQFEGYASMDVKYPPVIVEMNSSVEAIEGSHVSLLCGADSNPPPLLTWMRDGTVLREAVAESLLLELEEVTPAEDGVYACLAENAYGQDNRTVGLSVMYAPWKPTVNGTMVAVEGETVSILCSTQSNPDPILTIFKEKQILSTVIYESELQLELPAVSPEDDGEYWCVAENQYGQRATAFNLSVEFAPVLLLESHCAAARDTVQCLCVVKSNPEPSVAFELPSRNVTVNESEREFVYSERSGLVLTSILTLRGQAQAPPRVICTARNLYGAKSLELPFQGAHRLMWAKIGP

SEQ ID NO: 1610 - protein, 1129 aa, synthetic construct
  REGION 1..1129: note = MAMDC4 (Q6UXC1) ECD
WVPNHCRSPGQAVCNFVCDCRDCSDEAQCGYHGASPTLGAPFACDFEQDPCGWRDISTSGYSWLRDRAGAALEGPGPHSDHTLGTDLGWYMAVGTHRGKEASTAALRSPTLREAASSCKLRLWYHAASGDVAELRVELTHGAETLTLWQSTGPWGPGWQELAVTTGRIRGDFRVTFSATRNATHRGAVALDDLEFWDCGLPTPQANCPPGHHHCQNKVCVEPQQLCDGEDNCGDLSDENPLTCGRHIATDFETGLGPWNRSEGWSRNHRAGGPERPSWPRRDHSRNSAQGSFLVSVAEPGTPAILSSPEFQASGTSNCSLVFYQYLSGSEAGCLQLFLQTLGPGAPRAPVLLRRRRGELGTAWVRDRVDIQSAYPFQILLAGQTGPGGVVGLDDLILSDHCRPVSEVSTLQPLPPGPRAPAPQPLPPSSRLQDSCKQGHLACGDLCVPPEQLCDFEEQCAGGEDEQACGTTDFESPEAGGWEDASVGRLQWRRVSAQESQGSSAAAAGHFLSLQRAWGQLGAEARVLTPLLGPSGPSCELHLAYYLQSQPRGFLALVVVDNGSRELAWQALSSSAGIWKVDKVLLGARRRPFRLEFVGLVDLDGPDQQGAGVDNVTLRDCSPTVTTERDREVSCNFERDTCSWYPGHLSDTHWRWVESRGPDHDHTTGQGHFVLLDPTDPLAWGHSAHLLSRPQVPAAPTECLSFWYHLHGPQIGTLRLAMRREGEETHLWSRSGTQGNRWHEAWATLSHQPGSHAQYQLLFEGLRDGYHGTMALDDVAVRPGPCWAPNYCSFEDSDCGFSPGGQGLWRRQANASGHAAWGPPTDHTTETAQGHYMVVDTSPDALPRGQTASLTSKEHRPLAQPACLTFWYHGSLRSPGTLRVYLEERGRHQVLSLSAHGGLAWRLGSMDVQAERAWRVVFEAVAAGVAHSYVALDDLLLQDGPCPQPGSCDFESGLCGWSHLAWPGLGGYSWDWGGGATPSRYPQPPVDHTLGTEAGHFAFFETGVLGPGGRAAWLRSEPLPATPASCLRFWYHMGFPEHFYKGELKVLLHSAQGQLAVWGAGGHRRHQWLEAQVEVASAKEFQIVFEATLGGQPALGPIALDDVEYLAGQHCQQPAPSPGNTAAPGS

SEQ ID NO: 1611 - protein, 359 aa, synthetic construct
  REGION 1..359: note = MANSC1 (Q9H8J5) ECD
QNCLKKSLEDVVIDIQSSLSKGIRGNEPVYTSTQEDCINSCCSTKNISGDKACNLMIFDTRKTARQPNCYLFFCPNEEACPLKPAKGLMSYRIITDFPSLTRNLPSQELPQEDSLLHGQFSQAVTPLAHHHTDYSKPTDISWRDTLSQKFGSSDHLEKLFKMDEASAQLLAYKEKGHSQSSQFSSDQEIAHLLPENVSALPATVAVASPHTTSATPKPATLLPTNASVTPSGTSQPQLATTAPPVTTVTSQPPTTLISTVFTRAAATLQAMATTAVLTTTFQAPTDSKGSLETIPFTEISNLTLNTGNVYNPTALSMSNVESSTMNKTASWEGREASPGSSSQGSVPENQYGLPFEKWL

SEQ ID NO: 1612 - protein, 260 aa, synthetic construct
  REGION 1..260: note = MANSC4 (A6NHS7) ECD
SPTIFYRDCWIRRFPGLLINLEESQKLGAQFLKYYSESTGQKCSRSCCLRKDVSCNLAVFYHSPIHDNINCLHVHCPTLESCILEPGTSAILYNITDGIDPDLLVFEQSPTYLNTRSSSNRWDRLRILKAMNLDKQTTTINGMLPSTEAPSSTTHQDLVVNTNSTSYSKELTTDFWARFTSLNESITTKINKVSPSTDFISNPDNKTISPFFEPIDTKLSHMPVPPGLNSSKQLLNKTKGYNSRNHTSANEDEVSVTSKT

SEQ ID NO: 1613 - protein, 536 aa, synthetic construct
  REGION 1..536: note = MCAM (P43121) ECD
VPGEAEQPAPELVEVEVGSTALLKCGLSQSQGNLSHVDWFSVHKEKRTLIFRVRQGQGQSEPGEYEQRLSLQDRGATLALTQVTPQDERIFLCQGKRPRSQEYRIQLRVYKAPEEPNIQVNPLGIPVNSKEPEEVATCVGRNGYPIPQVIWYKNGRPLKEEKNRVHIQSSQTVESSGLYTLQSILKAQLVKEDKDAQFYCELNYRLPSGNHMKESREVTVPVFYPTEKVWLEVEPVGMLKEGDRVEIRCLADGNPPPHFSISKQNPSTREAEEETTNDNGVLVLEPARKEHSGRYECQGLDLDTMISLLSEPQELLVNYVSDVRVSPAAPERQEGSSLTLTCEAESSQDLEFQWLREETGQVLERGPVLQLHDLKREAGGGYRCVASVPSIPGLNRTQLVNVAIFGPPWMAFKERKVWVKENMVLNLSCEASGHPRPTISWNVNGTASEQDQDPQRVLSTLNVLVTPELLETGVECTASNDLGKNTSILFLELVNLTTLTPDSNTTTGLSTSTASPHTRANSTSTERKLPEPESRG

SEQ ID NO: 1614 - protein, 832 aa, synthetic construct
  REGION 1..832: note = MEGF10 (Q96KG7) ECD
LNLEDPNVCSHWESYSVTVQESYPHPFDQIYYTSCTDILNWFKCTRHRVSYRTAYRHGEKTMYRRKSQCCPGFYESGEMCVPHCADKCVHGRCIAPNTCQCEPGWGGTNCSSACDGDHWGPHCTSRCQCKNGALCNPITGACHCAAGFRGWRCEDRCEQGTYGNDCHQRCQCQNGATCDHVTGECRCPPGYTGAFCEDLCPPGKHGPQCEQRCPCQNGGVCHHVTGECSCPSGWMGTVCGQPCPEGRFGKNCSQECQCHNGGTCDAATGQCHCSPGYTGERCQDECPVGTYGVLCAETCQCVNGGKCYHVSGACLCEAGFAGERCEARLCPEGLYGIKCDKRCPCHLENTHSCHPMSGECACKPGWSGLYCNETCSPGFYGEACQQICSCQNGADCDSVTGKCTCAPGFKGIDCSTPCPLGTYGINCSSRCGCKNDAVCSPVDGSCTCKAGWHGVDCSIRCPSGTWGFGCNLTCQCLNGGACNTLDGTCTCAPGWRGEKCELPCQDGTYGLNCAERCDCSHADGCHPTTGHCRCLPGWSGVHCDSVCAEGRWGPNCSLPCYCKNGASCSPDDGICECAPGFRGTTCQRICSPGFYGHRCSQTCPQCVHSSGPCHHITGLCDCLPGFTGALCNEVCPSGRFGKNCAGICTCTNNGTCNPIDRSCQCYPGWIGSDCSQPCPPAHWGPNCIHTCNCHNGAFCSAYDGECKCTPGWTGLYCTQRCPLGFYGKDCALICQCQNGADCDHISGQCTCRTGFMGRHCEQKCPSGTYGYGCRQICDCLNNSTCDHITGTCYCSPGWKGARCDQAGVIIVGNLNSLSRTSTALPADSYQIG

SEQ ID NO: 1615 - protein, 829 aa, synthetic construct
  REGION 1..829: note = MEGF11 (A6BM72) ECD
LNPEDPNVCSHWESYAVTVQESYAHPFDQIYYTRCTDILNWFKCTRHRISYKTAYRRGLRTMYRRRSQCCPGYYESGDFCIPLCTEECVHGRCVSPDTCHCEPGWGGPDCSSGCDSDHWGPHCSNRCQCQNGALCNPITGACVCAAGFRGWRCEELCAPGTHGKGCQLPCQCRHGASCDPRAGECLCAPGYTGVYCEELCPPGSHGAHCELRCPCQNGGTCHHITGECACPPGWTGAVCAQPCPPGTFGQNCSQDCPCHHGGQCDHVTGQCHCTAGYMGDRCQEECPFGSFGFQCSQHCDCHNGGQCSPTTGACECEPGYKGPRCQERLCPEGLHGPGCTLPCPCDADNTISCHPVTGACTCQPGWSGHHCNESCPVGYYGDGCQLPCTCQNGADCHSITGGCTCAPGFMGEVCAVSCAAGTYGPNCSSICSCNNGGTCSPVDGSCTCKEGWQGLDCTLPCPSGTWGLNCNESCTCANGAACSPIDGSCSCTPGWLGDTCELPCPDGTFGLNCSEHCDCSHADGCDPVTGHCCCLAGWTGIRCDSTCPPGRWGPNCSVSCSCENGGSCSPEDGSCECAPGFRGPLCQRICPPGFYGHGCAQPCPLCVHSSRPCHHISGICECLPGFSGALCNQVCAGGYFGQDCAQLCSCANNGTCSPIDGSCQCFPGWIGKDCSQACPPGFWGPACFHACSCHNGASCSAEDGACHCTPGWTGLFCTQRCPAAFFGKDCGRVCQCQNGASCDHISGKCTCRTGFTGQHCEQRCAPGTFGYGCQQLCECMNNSTCDHVTGTCYCSPGFKGIRCDQAALMMEELNPYTKISPALGAERHS

SEQ ID NO: 1616 - protein, 2620 aa, synthetic construct
  REGION 1..2620: note = MEGF8 (Q7Z7M0) ECD
GDCKGQRQVLREAPGFVTDGAGNYSVNGNCEWLIEAPSPQHRILLDFLFLDTECTYDYLFVYDGDSPRGPLLASLSGSTRPPPIEASSGKMLLHLFSDANYNLLGFNASFRFSLCPGGCQSHGQCQPPGVCACEPGWGGPDCGLQECSAYCGSHGTCASPLGPCRCEPGFLGRACDLHLWENQGAGWWHNVSARDPAFSARIGAAGAFLSPPGLLAVFGGQDLNNALGDLVLYNFSANTWESWDLSPAPAARHSHVAVAWAGSLVLMGGELADGSLTNDVWAFSPLGRGHWELLAPPASSSSGPPGLAGHAAALVDDVWLYVSGGRTPHDLFSSGLFRFRLDSTSGGYWEQVIPAGGRPPAATGHSMVFHAPSRALLVHGGHRPSTARFSVRVNSTELFHVDRHVWTTLKGRDGLQGPRERAFHTASVLGNYMVVYGGNVHTHYQEEKCYEDGIFFYHLGCHQWVSGAELAPPGTPEGRAAPPSGRYSHVAAVLGGSVLLVAGGYSGRPRGDLMAYKVPPFVFQAPAPDYHLDYCSMYTDHSVCSRDPECSWCQGACQAAPPPGTPLGACPAASCLGLGRLLGDCQACLAFSSPTAPPRGPGTLGWCVHNESCLPRPEQARCRGEQISGTVGWWGPAPVFVTSLEACVTQSFLPGLHLLTFQQPPNTSQPDKVSIVRSTTITLTPSAETDVSLVYRGFIYPMLPGGPGGPGAEDVAVWTRAQRLHVLARMARGPDTENMEEVGRWVAHQEKETRRLQRPGSARLFPLPGRDHKYAVEIQGQLNGSAGPGHSELTLLWDRTGVPGGSEISFFFLEPYRSSSCTSYSSCLGCLADQGCGWCLTSATCHLRQGGAHCGDDGAGGSLLVLVPTLCPLCEEHRDCHACTQDPFCEWHQSTSRKGDAACSRRGRGRGALKSPEECPPLCSQRLTCEDCLANSSQCAWCQSTHTCFLFAAYLARYPHGGCRGWDDSVHSEPRCRSCDGFLTCHECLQSHECGWCGNEDNPTLGRCLQGDFSGPLGGGNCSLWVGEGLGLPVALPARWAYARCPDVDECRLGLARCHPRATCLNTPLSYECHCQRGYQGDGISHCNRTCLEDCGHGVCSGPPDFTCVCDLGWTSDLPPPTPAPGPPAPRCSRDCGCSFHSHCRKRGPGFCDECQDWTWGEHCERCRPGSFGNATGSRGCRPCQCNGHGDPRRGHCDNLSGLCFCQDHTEGAHCQLCSPGYYGDPRAGGSCFRECGGRALLTNVSSVALGSRRVGGLLPPGGGAARAGPGLSYCVWVVSATEELQPCAPGTLCPPLTLTFSPDSSTPCTLSYVLAFDGFPRFLDTGVVQSDRSLIAAFCGQRRDRPLTVQALSGLLVLHWEANGSSSWGFNASVGSARCGSGGPGSCPVPQECVPQDGAAGAGLCRCPQGWAGPHCRMALCPENCNAHTGAGTCNQSLGVCICAEGFGGPDCATKLDGGQLVWETLMDSRLSADTASRFLHRLGHTMVDGPDATLWMFGGLGLPQGLLGNLYRYSVSERRWTQMLAGAEDGGPGPSPRSFHAAAYVPAGRGAMYLLGGLTAGGVTRDFWVLNLTTLQWRQEKAPQTVELPAVAGHTLTARRGLSLLLVGGYSPENGFNQQLLEYQLATGTWVSGAQSGTPPTGLYGHSAVYHEATDSLYVFGGFRFHVELAAPSPELYSLHCPDRTWSLLAPSQGAKRDRMRNVRGSSRGLGQVPGEQPGSWGFREVRKKMALWAALAGTGGFLEEISPHLKEPRPRLFHASALLGDTMVVLGGRSDPDEFSSDVLLYQVNCNAWLLPDLTRSASVGPPMEESVAHAVAAVGSRLYISGGFGGVALGRLLALTLPPDPCRLLSSPEACNQSGACTWCHGACLSGDQAHRLGCGGSPCSPMPRSPEECRRLRTCSECLARHPRTLQPGDGEASTPRCKWCTNCPEGACIGRNGSCTSENDCRINQREVFWAGNCSEAACGAADCEQCTREGKCMWTRQFKRTGETRRILSVQPTYDWTCFSHSLLNVSPMPVESSPPLPCPTPCHLLPNCTSCLDSKGADGGWQHCVWSSSLQQCLSPSYLPLRCMAGGCGRLLRGPESCSLGCAQATQCALCLRRPHCGWCAWGGQDGGGRCMEGGLSGPRDGLTCGRPGASWAFLSCPPEDECANGHHDCNETQNCHDQPHGYECSCKTGYTMDNMTGLCRPVCAQGCVNGSCVEPDHCRCHFGFVGRNCSTECRCNRHSECAGVGARDHCLLCRNHTKGSHCEQCLPLFVGSAVGGGTCRPCHAFCRGNSHICISRKELQMSKGEPKKYSLDPEEIENWVTEGPSEDEAVCVNCQNNSYGEKCESCLQGYFLLDGKCTKCQCNGHADTCNEQDGTGCPCQNNTETGTCQGSSPSDRRDCYKYQCAKCRESFHGSPLGGQQCYRLISVEQECCLDPTSQTNCFHEPKRRALGPGRTVLFGVQPKFTNVDIRLTLDVTFGAVDLYVSTSYDTFVVRVAPDTGVHTVHIQPPPAPPPPPPPADGGPRGAGDPGGAGASSGPGAPAEPRVREVWPRGLITYVTVTEPSAVLVVRGVRDRLVITYPHEHHALKSSRFYLLLLGVGDPSGPGANGSADSQGLLFFRQDQAHID

SEQ ID NO: 1617 - protein, 484 aa, synthetic construct
  REGION 1..484: note = MEGF9 (Q9H1U4) ECD
AVASAASAGNVTGGGGAAGQVDASPGPGLRGEPSHPFPRATAPTAQAPRTGPPRATVHRPLAATSPAQSPETTPLWATAGPSSTTFQAPLGPSPTTPPAAERTSTTSQAPTRPAPTTLSTTTGPAPTTPVATTVPAPTTPRTPTPDLPSSSNSSVLPTPPATEAPSSPPPEYVCNCSVVGSLNVNRCNQTTGQCECRPGYQGLHCETCKEGFYLNYTSGLCQPCDCSPHGALSIPCNSSGKCQCKVGVIGSICDRCQDGYYGFSKNGCLPCQCNNRSASCDALTGACLNCQENSKGNHCEECKEGFYQSPDATKECLRCPCSAVTSTGSCSIKSSELEPECDQCKDGYIGPNCNKCENGYYNFDSICRKCQCHGHVDPVKTPKICKPESGECINCLHNTTGFWCENCLEGYVHDLEGNCIKKEVILPTPEGSTILVSNASLTTSVPTPVINSTFTPTTLQTIFSVSTSENSTSALADVSWTQFN

SEQ ID NO: 1618 - protein, 647 aa, synthetic construct
  REGION 1..647: note = MEP1A (Q16819) ECD
NGLRDPNTRWTFPIPYILADNLGLNAKGAILYAFEMFRLKSCVDFKPYEGESSYIIFQQFDGCWSEVGDQHVGQNISIGQGCAYKAIIEHEILHALGFYHEQSRTDRDDYVNIWWDQILSGYQHNFDTYDDSLITDLNTPYDYESLMHYQPFSFNKNASVPTITAKIPEFNSIIGQRLDFSAIDLERLNRMYNCTTTHTLLDHCTFEKANICGMIQGTRDDTDWAHQDSAQAGEVDHTLLGQCTGAGYFMQFSTSSGSAEEAALLESRILYPKRKQQCLQFFYKMTGSPSDRLVVWVRRDDSTGNVRKLVKVQTFQGDDDHNWKIAHVVLKEEQKFRYLFQGTKGDPQNSTGGIYLDDITLTETPCPTGVWTVRNFSQVLENTSKGDKLQSPRFYNSEGYGFGVTLYPNSRESSGYLRLAFHVCSGENDAILEWPVENRQVIITILDQEPDVRNRMSSSMVFTTSKSHTSPAINDTVIWDRPSRVGTYHTDCNCFRSIDLGWSGFISHQMLKRRSFLKNDDLIIFVDFEDITHLSQTEVPTKGKRLSPQGLILQGQEQQVSEEGSGKAMLEEALPVSLSQGQPSRQKRSVENTGPLEDHNWPQYFRDPCDPNPCQNDGICVNVKGMASCRCISGHAFFYTGERCQAV

SEQ ID NO: 1619 - protein, 630 aa, synthetic construct
  REGION 1..630: note = MEP1B (Q16820) ECD
TPENFDVDGGMDQDIFDINEGLGLDLFEGDIRLDRAQIRNSIIGEKYRWPHTIPYVLEDSLEMNAKGVILNAFERYRLKTCIDFKPWAGETNYISVFKGSGCWSSVGNRRVGKQELSIGANCDRIATVQHEFLHALGFWHEQSRSDRDDYVRIMWDRILSGREHNFNTYSDDISDSLNVPYDYTSVMHYSKTAFQNGTEPTIVTRISDFEDVIGQRMDFSDSDLLKLNQLYNCSSSLSFMDSCSFELENVCGMIQSSGDNADWQRVSQVPRGPESDHSNMGQCQGSGFFMHFDSSSVNVGATAVLESRTLYPKRGFQCLQFYLYNSGSESDQLNIYIREYSADNVDGNLTLVEEIKEIPTGSWQLYHVTLKVTKKFRVVFEGRKGSGASLGGLSIDDINLSETRCPHHIWHIRNFTQFIGSPNGTLYSPPFYSSKGYAFQIYLNLAHVTNAGIYFHLISGANDDQLQWPCPWQQATMTLLDQNPDIRQRMSNQRSITTDPFMTTDNGNYFWDRPSKVGTVALFSNGTQFRRGGGYGTSAFITHERLKSRDFIKGDDVYILLTVEDISHLNSTQIQLTPAPSVQDLCSKTTCKNDGVCTVRDGKAECRCQSGEDWWYMGERCEKRGSTRDT

SEQ ID NO: 1620 - protein, 485 aa, synthetic construct
  REGION 1..485: note = MERTK (Q12866) ECD
AITEAREEAKPYPLFPGPFPGSLQTDHTPLLSLPHASGYQPALMFSPTQPGRPHTGNVAIPQVTSVESKPLPPLAFKHTVGHIILSEHKGVKFNCSISVPNIYQDTTISWWKDGKELLGAHHAITQFYPDDEVTAIIASFSITSVQRSDNGSYICKMKINNEEIVSDPIYIEVQGLPHFTKQPESMNVTRNTAFNLTCQAVGPPEPVNIFWVQNSSRVNEQPEKSPSVLTVPGLTEMAVFSCEAHNDKGLTVSKGVQINIKAIPSPPTEVSIRNSTAHSILISWVPGFDGYSPFRNCSIQVKEADPLSNGSVMIFNTSALPHLYQIKQLQALANYSIGVSCMNEIGWSAVSPWILASTTEGAPSVAPLNVTVFLNESSDNVDIRWMKPPTKQQDGELVGYRISHVWQSAGISKELLEEVGQNGSRARISVQVHNATCTVRIAAVTRGGVGPFSDPVKIFIPAHGWVDYAPSSTPAPGNADPVLII

SEQ ID NO: 1621 - protein, 908 aa, synthetic construct
  REGION 1..908: note = MET (P08581) ECD
ECKEALAKSEMNVNMKYQLPNFTAETPIQNVILHEHHIFLGATNYIYVLNEEDLQKVAEYKTGPVLEHPDCFPCQDCSSKANLSGGVWKDNINMALVVDTYYDDQLISCGSVNRGTCQRHVFPHNHTADIQSEVHCIFSPQIEEPSQCPDCVVSALGAKVLSSVKDRFINFFVGNTINSSYFPDHPLHSISVRRLKETKDGFMFLTDQSYIDVLPEFRDSYPIKYVHAFESNNFIYFLTVQRETLDAQTFHTRIIRFCSINSGLHSYMEMPLECILTEKRKKRSTKKEVFNILQAAYVSKPGAQLARQIGASLNDDILFGVFAQSKPDSAEPMDRSAMCAFPIKYVNDFFNKIVNKNNVRCLQHFYGPNHEHCFNRTLLRNSSGCEARRDEYRTEFTTALQRVDLFMGQFSEVLLTSISTFIKGDLTIANLGTSEGRFMQVVVSRSGPSTPHVNFLLDSHPVSPEVIVEHTLNQNGYTLVITGKKITKIPLNGLGCRHFQSCSQCLSAPPFVQCGWCHDKCVRSEECLSGTWTQQICLPAIYKVFPNSAPLEGGTRLTICGWDFGFRRNNKFDLKKTRVLLGNESCTLTLSESTMNTLKCTVGPAMNKHFNMSIIISNGHGTTQYSTFSYVDPVITSISPKYGPMAGGTLLTLTGNYLNSGNSRHISIGGKTCTLKSVSNSILECYTPAQTISTEFAVKLKIDLANRETSIFSYREDPIVYEIHPTKSFISGGSTITGVGKNLNSVSVPRMVINVHEAGRNFTVACQHRSNSEIICCTTPSLQQLNLQLPLKTKAFFMLDGILSKYFDLIYVHNPVFKPFEKPVMISMGNENVLEIKGNDIDPEAVKGEVLKVGNKSCENIHLHSEAVLCTVPNDLLKLNSELNIEWKQAISSTVLGKVIVQPDQNFT

SEQ ID NO: 1622 - protein, 129 aa, synthetic construct
  REGION 1..129: note = MFAP3 (P55082) ECD
AFVLEDVDFDQMVSLEANRSSYNASFPSSFELSASSHSDDDVIIAKEGTSVSIECLLTASHYEDVHWHNSKGQQLDGRSRGGKWLVSDNFLNITNVAFDDRGLYTCFVTSPIRASYSVTLRVIFTSGDM

SEQ ID NO: 1623 - protein, 121 aa, synthetic construct
  REGION 1..121: note = MFAP3L (O75121) ECD
KSVTNSTLNGTNVVLGSVPVIIARTDHIIVKEGNSALINCSVYGIPDPQFKWYNSIGKLLKEEEDEKERGGGKWQMHDSGLLNITKVSFSDRGKYTCVASNIYGTVNNTVTLRVIFTSGDM

SEQ ID NO: 1624 - protein, 284 aa, synthetic construct
  REGION 1..284: note = MICA (Q29983) ECD
EPHSLRYNLTVLSWDGSVQSGFLTEVHLDGQPFLRCDRQKCRAKPQGQWAEDVLGNKTWDRETRDLTGNGKDLRMTLAHIKDQKEGLHSLQEIRVCEIHEDNSTRSSQHFYYDGELFLSQNLETKEWTMPQSSRAQTLAMNVRNFLKEDAMKTKTHYHAMHADCLQELRRYLKSGVVLRRTVPPMVNVTRSEASEGNITVTCRASGFYPWNITLSWRQDGVSLSHDTQQWGDVLPDGNGTYQTWVATRICQGEEQRFTCYMEHSGNHSTHPVPSGKVLVLQSHW

SEQ ID NO: 1625 - protein, 287 aa, synthetic construct
  REGION 1..287: note = MICB (Q29980) ECD
AEPHSLRYNLMVLSQDESVQSGFLAEGHLDGQPFLRYDRQKRRAKPQGQWAEDVLGAKTWDTETEDLTENGQDLRRTLTHIKDQKGGLHSLQEIRVCEIHEDSSTRGSRHFYYDGELFLSQNLETQESTVPQSSRAQTLAMNVTNFWKEDAMKTKTHYRAMQADCLQKLQRYLKSGVAIRRTVPPMVNVTCSEVSEGNITVTCRASSFYPRNITLTWRQDGVSLSHNTQQWGDVLPDGNGTYQTWVATRIRQGEEQRFTCYMEHSGNHGTHPVPSGKVLVLQSQRTD

SEQ ID NO: 1626 - protein, 208 aa, synthetic construct
  REGION 1..208: note = MILR1 (Q7Z6M3) ECD
RKAVLDCEAMKTNEFPSPCLDSKTKVVMKGQNVSMFCSHKNKSLQITYSLFRRKTHLGTQDGKGEPAIFNLSITEAHESGPYKCKAQVTSCSKYSRDFSFTIVDPVTSPVLNIMVIQTETDRHITLHCLSVNGSLPINYTFFENHVAISPAISKYDREPAEFNLTKKNPGEEEEYRCEAKNRLPNYATYSHPVTMPSTGGDSCPFCLK

SEQ ID NO: 1627 - protein, 430 aa, synthetic construct
  REGION 1..430: note = MMP14 (P50281) ECD
YAIQGLKWQHNEITFCIQNYTPKVGEYATYEAIRKAFRVWESATPLRFREVPYAYIREGHEKQADIMIFFAEGFHGDSTPFDGEGGFLAHAYFPGPNIGGDTHFDSAEPWTVRNEDLNGNDIFLVAVHELGHALGLEHSSDPSAIMAPFYQWMDTENFVLPDDDRRGIQQLYGGESGFPTKMPPQPRTTSRPSVPDKPKNPTYGPNICDGNFDTVAMLRGEMFVFKERWFWRVRNNQVMDGYPMPIGQFWRGLPASINTAYERKDGKFVFFKGDKHWVFDEASLEPGYPKHIKELGRGLPTDKIDAALFWMPNGKTYFFRGNKYYRFNEELRAVDSEYPKNIKVWEGIPESPRGSFMGSDEVFTYFYKGNKYWKFNNQKLKVEPGYPKSALRDWMGCPSGGRPDEGTEEETEVIIIEVDEEGGGAVSAAA

SEQ ID NO: 1628 - protein, 445 aa, synthetic construct
  REGION 1..445: note = MMP16 (P51512) ECD
YALTGQKWQHKHITYSIKNVTPKVGDPETRKAIRRAFDVWQNVTPLTFEEVPYSELENGKRDVDITIIFASGFHGDSSPFDGEGGFLAHAYFPGPGIGGDTHFDSDEPWTLGNPNHDGNDLFLVAVHELGHALGLEHSNDPTAIMAPFYQYMETDNFKLPNDDLQGIQKIYGPPDKIPPPTRPLPTVPPHRSIPPADPRKNDRPKPPRPPTGRPSYPGAKPNICDGNFNTLAILRREMFVFKDQWFWRVRNNRVMDGYPMQITYFWRGLPPSIDAVYENSDGNFVFFKGNKYWVFKDTTLQPGYPHDLITLGSGIPPHGIDSAIWWEDVGKTYFFKGDRYWRYSEEMKTMDPGYPKPITVWKGIPESPQGAFVHKENGFTYFYKGKEYWKFNNQILKVEPGYPRSILKDFMGCDGPTDRVKEGHSPPDDVDIVIKLDNTASTVKA

SEQ ID NO: 1629 - protein, 638 aa, synthetic construct
  REGION 1..638: note = MPEG1 (Q2M385) ECD
KSGKPSGEMDEVGVQKCKNALKLPVLEVLPGGGWDNLRNVDMGRVMELTYSNCRTTEDGQYIIPDEIFTIPQKQSNLEMNSEILESWANYQSSTSYSINTELSLFSKVNGKFSTEFQRMKTLQVKDQAITTRVQVRNLVYTVKINPTLELSSGFRKELLDISDRLENNQTRMATYLAELLVLNYGTHVTTSVDAGAALIQEDHLRASFLQDSQSSRSAVTASAGLAFQNTVNFKFEENYTSQNVLTKSYLSNRTNSRVQSIGGVPFYPGITLQAWQQGITNHLVAIDRSGLPLHFFINPNMLPDLPGPLVKKVSKTVETAVKRYYTFNTYPGCTDLNSPNFNFQANTDDGSCEGKMTNFSFGGVYQECTQLSGNRDVLLCQKLEQKNPLTGDFSCPSGYSPVHLLSQIHEEGYNHLECHRKCTLLVFCKTVCEDVFQVAKAEFRAFWCVASSQVPENSGLLFGGLFSSKSINPMTNAQSCPAGYFPLRLFENLKVCVSQDYELGSRFAVPFGGFFSCTVGNPLVDPAISRDLGAPSLKKCPGGFSQHPALISDGCQVSYCVKSGLFTGGSLPPARLPPFTRPPLMSQAATNTVIVTNSENARSWIKDSQTHQWRLGEPIELRRAMNVIHGDGGGLSGG

SEQ ID NO: 1630 - protein, 466 aa, synthetic construct
  REGION 1..466: note = MPL (P40238) ECD
QDVSLLASDSEPLKCFSRTFEDLTCFWDEEEAAPSGTYQLLYAYPREKPRACPLSSQSMPHFGTRYVCQFPDQEEVRLFFPLHLWVKNVFLNQTRTQRVLFVDSVGLPAPPSIIKAMGGSQPGELQISWEEPAPEISDFLRYELRYGPRDPKNSTGPTVIQLIATETCCPALQRPHSASALDQSPCAQPTMPWQDGPKQTSPSREASALTAEGGSCLISGLQPGNSYWLQLRSEPDGISLGGSWGSWSLPVTVDLPGDAVALGLQCFTLDLKNVTCQWQQQDHASSQGFFYHSRARCCPRDRYPIWENCEEEEKTNPGLQTPQFSRCHFKSRNDSIIHILVEVTTAPGTVHSYLGSPFWIHQAVRLPTPNLHWREISSGHLELEWQHPSSWAAQETCYQLRYTGEGHQDWKVLEPPLGARGGTLELRPRSRYRLQLRARLNGPTYQGPWSSWSDPTRVETATETAW

SEQ ID NO: 1631 - protein, 124 aa, synthetic construct
  REGION 1..124: note = MPZ (P25189) ECD
IVVYTDREVHGAVGSRVTLHCSFWSSEWVSDDISFTWRYQPEGGRDAISIFHYAKGQPYIDEVGTFKERIQWVGDPRWKDGSIVIHNLDYSDNGTFTCDVKNPPDIVGKTSQVTLYVFEKVPTR

SEQ ID NO: 1632 - protein, 127 aa, synthetic construct
  REGION 1..127: note = MPZL1 (O95297) ECD
SALEVYTPKEIFVANGTQGKLTCKFKSTSTTGGLTSVSWSFQPEGADTTVSFFHYSQGQVYLGNYPPFKDRISWAGDLDKKDASINIENMQFIHNGTYICDVKNPPDIVVQPGHIRLYVVEKENLPV

SEQ ID NO: 1633 - protein, 128 aa, synthetic construct
  REGION 1..128: note = MPZL2 (O60487) ECD
VEIYTSRVLEAVNGTDARLKCTFSSFAPVGDALTVTWNFRPLDGGPEQFVFYYHIDPFQPMSGRFKDRVSWDGNPERYDASILLWKLQFDDNGTYTCQVKNPPDVDGVIGEIRLSVVHTVRFSEIHFL

SEQ ID NO: 1634 - protein, 127 aa, synthetic construct
  REGION 1..127: note = MPZL3 (Q6UWV2) ECD
LEIRADAHVRGYVGEKIKLKCTFKSTSDVTDKLTIDWTYRPPSSSHTVSIFHYQSFQYPTTAGTFRDRISWVGNVYKGDASISISNPTIKDNGTFSCAVKNPPDVHHNIPMTELTVTERGFGTMLSS

SEQ ID NO: 1635 - protein, 280 aa, synthetic construct
  REGION 1..280: note = MR1 (Q95460) ECD
RTHSLRYFRLGVSDPIHGVPEFISVGYVDSHPITTYDSVTRQKEPRAPWMAENLAPDHWERYTQLLRGWQQMFKVELKRLQRHYNHSGSHTYQRMIGCELLEDGSTTGFLQYAYDGQDFLIFNKDTLSWLAVDNVAHTIKQAWEANQHELLYQKNWLEEECIAWLKRFLEYGKDTLQRTEPPLVRVNRKETFPGVTALFCKAHGFYPPEIYMTWMKNGEEIVQEIDYGDILPSGDGTYQAWASIELDPQSSNLYSCHVEHCGVHMVLQVPQESETIPLVM

SEQ ID NO: 1636 - protein, 1371 aa, synthetic construct
  REGION 1..1371: note = MRC1 (P22897) ECD
LLDTRQFLIYNEDHKRCVDAVSPSAVQTAACNQDAESQKFRWVSESQIMSVAFKLCLGVPSKTDWVAITLYACDSKSEFQKWECKNDTLLGIKGEDLFFNYGNRQEKNIMLYKGSGLWSRWKIYGTTDNLCSRGYEAMYTLLGNANGATCAFPFKFENKWYADCTSAGRSDGWLWCGTTTDYDTDKLFGYCPLKFEGSESLWNKDPLTSVSYQINSKSALTWHQARKSCQQQNAELLSITEIHEQTYLTGLTSSLTSGLWIGLNSLSFNSGWQWSDRSPFRYLNWLPGSPSAEPGKSCVSLNPGKNAKWENLECVQKLGYICKKGNTTLNSFVIPSESDVPTHCPSQWWPYAGHCYKIHRDEKKIQRDALTTCRKEGGDLTSIHTIEELDFIISQLGYEPNDELWIGLNDIKIQMYFEWSDGTPVTFTKWLRGEPSHENNRQEDCVVMKGKDGYWADRGCEWPLGYICKMKSRSQGPEIVEVEKGCRKGWKKHHFYCYMIGHTLSTFAEANQTCNNENAYLTTIEDRYEQAFLTSFVGLRPEKYFWTGLSDIQTKGTFQWTIEEEVRFTHWNSDMPGRKPGCVAMRTGIAGGLWDVLKCDEKAKFVCKHWAEGVTHPPKPTTTPEPKCPEDWGASSRTSLCFKLYAKGKHEKKTWFESRDFCRALGGDLASINNKEEQQTIWRLITASGSYHKLFWLGLTYGSPSEGFTWSDGSPVSYENWAYGEPNNYQNVEYCGELKGDPTMSWNDINCEHLNNWICQIQKGQTPKPEPTPAPQDNPPVTEDGWVIYKDYQYYFSKEKETMDNARAFCKRNFGDLVSIQSESEKKFLWKYVNRNDAQSAYFIGLLISLDKKFAWMDGSKVDYVSWATGEPNFANEDENCVTMYSNSGFWNDINCGYPNAFICQRHNSSINATTVMPTMPSVPSGCKEGWNFYSNKCFKIFGFMEEERKNWQEARKACIGFGGNLVSIQNEKEQAFLTYHMKDSTFSAWTGLNDVNSEHTFLWTDGRGVHYTNWGKGYPGGRRSSLSYEDADCVVIIGGASNEAGKWMDDTCDSKRGYICQTRSDPSLTNPPATIQTDGFVKYGKSSYSLMRQKFQWHEAETYCKLHNSLIASILDPYSNAFAWLQMETSNERVWIALNSNLTDNQYTWTDKWRVRYTNWAADEPKLKSACVYLDLDGYWKTAHCNESFYFLCKRSDEIPATEPPQLPGRCPESDHTAWIPFHGHCYYIESSYTRNWGQASLECLRMGSSLVSIESAAESSFLSYRVEPLKSKTNFWIGLFRNVEGTWLWINNSPVSFVNWNTGDPSGERNDCVALHASSGFWSNIHCSSYKGYICKRPKIIDAKPTHELLTTKADTRKMDPSKPSSNVA

SEQ ID NO: 1637 - protein, 1384 aa, synthetic construct
  REGION 1..1384: note = MRC2 (Q9UBG0) ECD
GAPGDAALPEPNVFLIFSHGLQGCLEAQGGQVRVTPACNTSLPAQRWKWVSRNRLFNLGTMQCLGTGWPGTNTTASLGMYECDREALNLRWHCRTLGDQLSLLLGARTSNISKPGTLERGDQTRSGQWRIYGSEEDLCALPYHEVYTIQGNSHGKPCTIPFKYDNQWFHGCTSTGREDGHLWCATTQDYGKDERWGFCPIKSNDCETFWDKDQLTDSCYQFNFQSTLSWREAWASCEQQGADLLSITEIHEQTYINGLLTGYSSTLWIGLNDLDTSGGWQWSDNSPLKYLNWESDQPDNPSEENCGVIRTESSGGWQNRDCSIALPYVCKKKPNATAEPTPPDRWANVKVECEPSWQPFQGHCYRLQAEKRSWQESKKACLRGGGDLVSIHSMAELEFITKQIKQEVEELWIGLNDLKLQMNFEWSDGSLVSFTHWHPFEPNNFRDSLEDCVTIWGPEGRWNDSPCNQSLPSICKKAGQLSQGAAEEDHGCRKGWTWHSPSCYWLGEDQVTYSEARRLCTDHGSQLVTITNRFEQAFVSSLIYNWEGEYFWTALQDLNSTGSFFWLSGDEVMYTHWNRDQPGYSRGGCVALATGSAMGLWEVKNCTSFRARYICRQSLGTPVTPELPGPDPTPSLTGSCPQGWASDTKLRYCYKVFSSERLQDKKSWVQAQGACQELGAQLLSLASYEEEHFVANMLNKIFGESEPEIHEQHWFWIGLNRRDPRGGQSWRWSDGVGFSYHNFDRSRHDDDDIRGCAVLDLASLQWVAMQCDTQLDWICKIPRGTDVREPDDSPQGRREWLRFQEAEYKFFEHHSTWAQAQRICTWFQAELTSVHSQAELDFLSHNLQKFSRAQEQHWWIGLHTSESDGRFRWTDGSIINFISWAPGKPRPVGKDKKCVYMTASREDWGDQRCLTALPYICKRSNVTKETQPPDLPTTALGGCPSDWIQFLNKCFQVQGQEPQSRVKWSEAQFSCEQQEAQLVTITNPLEQAFITASLPNVTFDLWIGLHASQRDFQWVEQEPLMYANWAPGEPSGPSPAPSGNKPTSCAVVLHSPSAHFTGRWDDRSCTEETHGFICQKGTDPSLSPSPAALPPAPGTELSYLNGTFRLLQKPLRWHDALLLCESRNASLAYVPDPYTQAFLTQAARGLRTPLWIGLAGEEGSRRYSWVSEEPLNYVGWQDGEPQQPGGCTYVDVDGAWRTTSCDTKLQGAVCGVSSGPPPPRRISYHGSCPQGLADSAWIPFREHCYSFHMELLLGHKEARQRCQRAGGAVLSILDEMENVFVWEHLQSYEGQSRGAWLGMNFNPKGGTLVWQDNTAVNYSNWGPPGLGPSMLSHNSCYWIQSNSGLWRPGACTNITMGVVCKLPRAEQSSFSPSALPENPAA

SEQ ID NO: 1638 - protein, 843 aa, synthetic construct
  REGION 1..843: note = MRVI1 (Q9Y6F6) ECD
MGMDLTCPFGISPACGAQASWSIFGADAAEVPGTRGHSQQEAAMPHIPEDEEPPGEPQAAQSPAGQGPPAAGVSCSPTPTIVLTGDATSPEGETDKNLANRVHSPHKRLSHRHLKVSTASLTSVDPAGHIIDLVNDQLPDISISEEDKKKNLALLEEAKLVSERFLTRRGRKSRSSPGDSPSAVSPNLSPSASPTSSRSNSLTVPTPPGLDVCSGPPSPLPGAPPQQKGDEADVSSPHPGEPNVPKGLADRKQNDQRKVSQGRLAPRPPPVEKSKEIAIEQKENFDPLQYPETTPKGLAPVTNSSGKMALNSPQPGPVESELGKQLLKTGWEGSPLPRSPTQDAAGVGPPASQGRGPAGEPMGPEAGSKAELPPTVSRPPLLRGLSWDSGPEEPGPRLQKVLAKLPLAEEEKRFAGKAGGKLAKAPGLKDFQIQVQPVRMQKLTKLREEHILMRNQNLVGLKLPDLSEAAEQEKGLPSELSPAIEEEESKSGLDVMPNISDVLLRKLRVHRSLPGSAPPLTEKEVENVFVQLSLAFRNDSYTLESRINQAERERNLTEENTEKELENFKASITSSASLWHHCEHRETYQKLLEDIAVLHRLAARLSSRAEVVGAVRQEKRMSKATEVMMQYVENLKRTYEKDHAELMEFKKLANQNSSRSCGPSEDGVPRTARSMSLTLGKNMPRRRVSVAVVPKFNALNLPGQTPSSSSIPSLPALSESPNGKGSLPVTSALPALLENGKTNGDPDCEASAPALTLSCLEELSQETKARMEEEAYSKGFQEGLKKTKELQDLKEEEEEQKSESPEEPEEVEETEEEEKGPRSSKLEELVHFLQVMYPKLCQH

SEQ ID NO: 1639 - protein, 603 aa, synthetic construct
  REGION 1..603: note = MSLNL (Q96KJ4) ECD
KVLSPGGLDASGANLWASANCSLLQGFWCQPASQLPRDQLSALIQRLALLQVPLQAWQLSCLANLASRCGLQDDFTLHPPNLLLFYNLSQVREADCRAFIRRAAQGDVELLSHLPDQRVALWRAAVACLVGAGLRLSASDQQLLGALVCDMDASSIGAADPHMLENLRRCPRLTAAQRIALNSLLAGGKTSLGPPGSWTLEGLQALGPLATYISPHLWAQVQEAVGLGFFRSVVASCQVGRLGQREARCFVTSFLESKTKPVSSRPRLSTGNITAATLRDDLFLVHYDCAELESCLDGCILRTNLDTLLQHLLPTECQHVVKAKLAQIYPQGLPEDQLRLITSLVYLYSRTEIGQWSITSQDTVMALLASDVALENQTEAVLQKFLEHNGTVSGALLLAIGGTRLCWMSPHQIQTIHPQELRLAGALDLSSCPQSRKDVLYTKAHETFGSSGTLAAYYRLMRPYLGGSPGGAQPPSPVPPGGAPVEELRHLAHANISMDIDTFTSLNPLELQSLDVGNVTALLGHNVGDLQKARSHPTVRAWLRSLNSSTLGQLGLDASPTSPTGPAHGTRGPPSTTHQVLHLVHTSGLPTNDAQASTSGSLW

SEQ ID NO: 1640 - protein, 933 aa, synthetic construct
  REGION 1..933: note = MST1R (Q04912) ECD
EDWQCPRTPYAASRDFDVKYVVPSFSAGGLVQAMVTYEGDRNESAVFVAIRNRLHVLGPDLKSVQSLATGPAGDPGCQTCAACGPGPHGPPGDTDTKVLVLDPALPALVSCGSSLQGRCFLHDLEPQGTAVHLAAPACLFSAHHNRPDDCPDCVASPLGTRVTVVEQGQASYFYVASSLDAAVAASFSPRSVSIRRLKADASGFAPGFVALSVLPKHLVSYSIEYVHSFHTGAFVYFLTVQPASVTDDPSALHTRLARLSATEPELGDYRELVLDCRFAPKRRRRGAPEGGQPYPVLRVAHSAPVGAQLATELSIAEGQEVLFGVFVTGKDGGPGVGPNSVVCAFPIDLLDTLIDEGVERCCESPVHPGLRRGLDFFQSPSFCPNPPGLEALSPNTSCRHFPLLVSSSFSRVDLFNGLLGPVQVTALYVTRLDNVTVAHMGTMDGRILQVELVRSLNYLLYVSNFSLGDSGQPVQRDVSRLGDHLLFASGDQVFQVPIQGPGCRHFLTCGRCLRAWHFMGCGWCGNMCGQQKECPGSWQQDHCPPKLTEFHPHSGPLRGSTRLTLCGSNFYLHPSGLVPEGTHQVTVGQSPCRPLPKDSSKLRPVPRKDFVEEFECELEPLGTQAVGPTNVSLTVTNMPPGKHFRVDGTSVLRGFSFMEPVLIAVQPLFGPRAGGTCLTLEGQSLSVGTSRAVLVNGTECLLARVSEGQLLCATPPGATVASVPLSLQVGGAQVPGSWTFQYREDPVVLSISPNCGYINSHITICGQHLTSAWHLVLSFHDGLRAVESRCERQLPEQQLCRLPEYVVRDPQGWVAGNLSARGDGAAGFTLPGFRFLPPPHPPSANLVPLKPEEHAIKFEYIGLGAVADCVGINVTVGGESCQHEFRGDMVVCPLPPSLQLGQDGAPLQVCVDGECHILGRVVRPGPDGVPQST

SEQ ID NO: 1641 - protein, 1135 aa, synthetic construct
  REGION 1..1135: note = MUC1 (P15941) ECD
SGHASSTPGGEKETSATQRSSVPSSTEKNAVSMTSSVLSSHSPGSGSSTTQGQDVTLAPATEPASGSAATWGQDVTSVPVTRPALGSTTPPAHDVTSAPDNKPAPGSTAPPAHGVTSAPDTRPAPGSTAPPAHGVTSAPDTRPAPGSTAPPAHGVTSAPDTRPAPGSTAPPAHGVTSAPDTRPAPGSTAPPAHGVTSAPDTRPAPGSTAPPAHGVTSAPDTRPAPGSTAPPAHGVTSAPDTRPAPGSTAPPAHGVTSAPDTRPAPGSTAPPAHGVTSAPDTRPAPGSTAPPAHGVTSAPDTRPAPGSTAPPAHGVTSAPDTRPAPGSTAPPAHGVTSAPDTRPAPGSTAPPAHGVTSAPDTRPAPGSTAPPAHGVTSAPDTRPAPGSTAPPAHGVTSAPDTRPAPGSTAPPAHGVTSAPDTRPAPGSTAPPAHGVTSAPDTRPAPGSTAPPAHGVTSAPDTRPAPGSTAPPAHGVTSAPDTRPAPGSTAPPAHGVTSAPDTRPAPGSTAPPAHGVTSAPDTRPAPGSTAPPAHGVTSAPDTRPAPGSTAPPAHGVTSAPDTRPAPGSTAPPAHGVTSAPDTRPAPGSTAPPAHGVTSAPDTRPAPGSTAPPAHGVTSAPDTRPAPGSTAPPAHGVTSAPDTRPAPGSTAPPAHGVTSAPDTRPAPGSTAPPAHGVTSAPDTRPAPGSTAPPAHGVTSAPDTRPAPGSTAPPAHGVTSAPDTRPAPGSTAPPAHGVTSAPDTRPAPGSTAPPAHGVTSAPDTRPAPGSTAPPAHGVTSAPDTRPAPGSTAPPAHGVTSAPDTRPAPGSTAPPAHGVTSAPDTRPAPGSTAPPAHGVTSAPDTRPAPGSTAPPAHGVTSAPDTRPAPGSTAPPAHGVTSAPDTRPAPGSTAPPAHGVTSAPDTRPAPGSTAPPAHGVTSAPDNRPALGSTAPPVHNVTSASGSASGSASTLVHNGTSARATTTPASKSTPFSIPSHHSDTPTTLASHSTKTDASSTHHSSVPPLTSSNHSTSPQLSTGVSFFFLSFHISNLQFNSSLEDPSTDYYQELQRDISEMFLQIYKQGGFLGLSNIKFRPGSVVVQLTLAFREGTINVHDVETQFNQYKTEAASRYNLTISDVSVSDVPFPFSAQSGAGVPG

SEQ ID NO: 1642 - protein, 5364 aa, synthetic construct
  REGION 1..5364: note = MUC12 (Q9UKN1) ECD
VTTVTPEGSAVHKAISQQGTLWTGEVLEKQTVEQGKSTLRRQKNHFHRSAGELRCRNALKDEGASAGWSVMFAGESVVVLVHLWMTGARVKNLGLVEFASPGDDGDGRAEGFSLGLPLSEQARAAGAREKERQETVINHSTFSGFSQITGSTVNTSIGGNTTSASTPSSSDPFTTFSDYGVSVTFITGSTATKHFLDSSTNSGHSEESTVSHSGPGATGTTLFPSHSATSVFVGEPKTSPITSASMETTALPGSTTTAGLSEKSTTFYSSPRSPDRTLSPARTTSSGVSEKSTTSHSRPGPTHTIAFPDSTTMPGVSQESTASHSIPGSTDTTLSPGTTTPSSLGPESTTFHSSPGYTKTTRLPDNTTTSGLLEASTPVHSSTGSPHTTLSPSSSTTHEGEPTTFQSWPSSKDTSPAPSGTTSAFVKLSTTYHSSPSSTPTTHFSASSTTLGHSEESTPVHSSPVATATTPPPARSATSGHVEESTAYHRSPGSTQTMHFPESSTTSGHSEESATFHGSTTHTKSSTPSTTAALAHTSYHSSLGSTETTHFRDSSTISGRSEESKASHSSPDAMATTVLPAGSTPSVLVGDSTPSPISSGSMETTALPGSTTKPGLSEKSTTFYSSPRSPDTTHLPASMTSSGVSEESTTSHSRPGSTHTTAFPGSTTMPGLSQESTASHSSPGPTDTTLSPGSTTASSLGPEYTTFHSRPGSTETTLLPDNTTASGLLEASMPVHSSTRSPHTTLSPAGSTTRQGESTTFHSWPSSKDTRPAPPTTTSAFVEPSTTSHGSPSSIPTTHISARSTTSGLVEESTTYHSSPGSTQTMHFPESDTTSGRGEESTTSHSSTTHTISSAPSTTSALVEEPTSYHSSPGSTATTHFPDSSTTSGRSEESTASHSSQDATGTIVLPARSTTSVLLGESTTSPISSGSMETTALPGSTTTPGLSERSTTFHSSPRSPATTLSPASTTSSGVSEESTTSRSRPGSTHTTAFPDSTTTPGLSRHSTTSHSSPGSTDTTLLPASTTTSGPSQESTTSHSSSGSTDTALSPGSTTALSFGQESTTFHSNPGSTHTTLFPDSTTSSGIVEASTRVHSSTGSPRTTLSPASSTSPGLQGESTAFQTHPASTHTTPSPPSTATAPVEESTTYHRSPGSTPTTHFPASSTTSGHSEKSTIFHSSPDASGTTPSSAHSTTSGRGESTTSRISPGSTEITTLPGSTTTPGLSEASTTFYSSPRSPTTTLSPASMTSLGVGEESTTSRSQPGSTHSTVSPASTTTPGLSEESTTVYSSSRGSTETTVFPHSTTTSVHGEEPTTFHSRPASTHTTLFTEDSTTSGLTEESTAFPGSPASTQTGLPATLTTADLGEESTTFPSSSGSTGTKLSPARSTTSGLVGESTPSRLSPSSTETTTLPGSPTTPSLSEKSTTFYTSPRSPDATLSPATTTSSGVSEESSTSHSQPGSTHTTAFPDSTTTSDLSQEPTTSHSSQGSTEATLSPGSTTASSLGQQSTTFHSSPGDTETTLLPDDTITSGLVEASTPTHSSTGSLHTTLTPASSTSAGLQEESTTFQSWPSSSDTTPSPPGTTAAPVEVSTTYHSRPSSTPTTHFSASSTTLGRSEESTTVHSSPGATGTALFPTRSATSVLVGEPTTSPISSGSTETTALPGSTTTAGLSEKSTTFYSSPRSPDTTLSPASTTSSGVSEESTTSHSRPGSTHTTAFPGSTTMPGVSQESTASHSSPGSTDTTLSPGSTTASSLGPESTTFHSSPGSTETTLLPDNTTASGLLEASTPVHSSTGSPHTTLSPAGSTTRQGESTTFQSWPSSKDTMPAPPTTTSAFVELSTTSHGSPSSTPTTHFSASSTTLGRSEESTTVHSSPVATATTPSPARSTTSGLVEESTAYHSSPGSTQTMHFPESSTASGRSEESRTSHSSTTHTISSPPSTTSALVEEPTSYHSSPGSTATTHFPDSSTTSGRSEESTASHSSQDATGTIVLPARSTTSVLLGESTTSPISSGSMETTALPGSTTTPGLSEKSTTFHSSPRSPATTLSPASTTSSGVSEESTTSHSRPGSTHTTAFPDSTTTPGLSRHSTTSHSSPGSTDTTLLPASTTTSGPSQESTTSHSSPGSTDTALSPGSTTALSFGQESTTFHSSPGSTHTTLFPDSTTSSGIVEASTRVHSSTGSPRTTLSPASSTSPGLQGESTAFQTHPASTHTTPSPPSTATAPVEESTTYHRSPGSTPTTHFPASSTTSGHSEKSTIFHSSPDASGTTPSSAHSTTSGRGESTTSRISPGSTEITTLPGSTTTPGLSEASTTFYSSPRSPTTTLSPASMTSLGVGEESTTSRSQPGSTHSTVSPASTTTPGLSEESTTVYSSSPGSTETTVFPRTPTTSVRGEEPTTFHSRPASTHTTLFTEDSTTSGLTEESTAFPGSPASTQTGLPATLTTADLGEESTTFPSSSGSTGTTLSPARSTTSGLVGESTPSRLSPSSTETTTLPGSPTTPSLSEKSTTFYTSPRSPDATLSPATTTSSGVSEESSTSHSQPGSTHTTAFPDSTTTPGLSRHSTTSHSSPGSTDTTLLPASTTTSGPSQESTTSHSSPGSTDTALSPGSTTALSFGQESTTFHSSPGSTHTTLFPDSTTSSGIVEASTRVHSSTGSPRTTLSPASSTSPGLQGESTTFQTHPASTHTTPSPPSTATAPVEESTTYHRSPGSTPTTHFPASSTTSGHSEKSTIFHSSPDASGTTPSSAHSTTSGRGESTTSRISPGSTEITTLPGSTTTPGLSEASTTFYSSPRSPTTTLSPASMTSLGVGEESTTSRSQPGSTHSTVSPASTTTPGLSEESTTVYSSSPGSTETTVFPRSTTTSVRGEEPTTFHSRPASTHTTLFTEDSTTSGLTEESTAFPGSPASTQTGLPATLTTADLGEESTTFPSSSGSTGTTLSPARSTTSGLVGESTPSRLSPSSTETTTLPGSPTTPSLSEKSTTFYTSPRSPDATLSPATTTSSGVSEESSTSHSQPGSTHTTAFPDSTTTSGLSQEPTASHSSQGSTEATLSPGSTTASSLGQQSTTFHSSPGDTETTLLPDDTITSGLVEASTPTHSSTGSLHTTLTPASSTSAGLQEESTTFQSWPSSSDTTPSPPGTTAAPVEVSTTYHSRPSSTPTTHFSASSTTLGRSEESTTVHSSPGATGTALFPTRSATSVLVGEPTTSPISSGSTETTALPGSTTTAGLSEKSTTFYSSPRSPDTTLSPASTTSSGVSEESTTSHSRPGSTHTTAFPGSTTMPGVSQESTASHSSPGSTDTTLSPGSTTASSLGPESTTFHSGPGSTETTLLPDNTTASGLLEASTPVHSSTGSPHTTLSPAGSTTRQGESTTFQSWPNSKDTTPAPPTTTSAFVELSTTSHGSPSSTPTTHFSASSTTLGRSEESTTVHSSPVATATTPSPARSTTSGLVEESTTYHSSPGSTQTMHFPESDTTSGRGEESTTSHSSTTHTISSAPSTTSALVEEPTSYHSSPGSTATTHFPDSSTTSGRSEESTASHSSQDATGTIVLPARSTTSVLLGESTTSPISSGSMETTALPGSTTTPGLSEKSTTFHSSPRSPATTLSPASTTSSGVSEESTTSHSRPGSTHTTAFPDSTTTPGLSRHSTTSHSSPGSTDTTLLPASTTTSGSSQESTTSHSSSGSTDTALSPGSTTALSFGQESTTFHSSPGSTHTTLFPDSTTSSGIVEASTRVHSSTGSPRTTLSPASSTSPGLQGESTAFQTHPASTHTTPSPPSTATAPVEESTTYHRSPGSTPTTHFPASSTTSGHSEKSTIFHSSPDASGTTPSSAHSTTSGRGESTTSRISPGSTEITTLPGSTTTPGLSEASTTFYSSPRSPTTTLSPASMTSLGVGEESTTSRSQPGSTHSTVSPASTTTPGLSEESTTVYSSSPGSTETTVFPRSTTTSVRREEPTTFHSRPASTHTTLFTEDSTTSGLTEESTAFPGSPASTQTGLPATLTTADLGEESTTFPSSSGSTGTKLSPARSTTSGLVGESTPSRLSPSSTETTTLPGSPTTPSLSEKSTTFYTSPRSPDATLSPATTTSSGVSEESSTSHSQPGSTHTTAFPDSTTTSGLSQEPTTSHSSQGSTEATLSPGSTTASSLGQQSTTFHSSPGDTETTLLPDDTITSGLVEASTPTHSSTGSLHTTLTPASSTSTGLQEESTTFQSWPSSSDTTPSPPSTTAVPVEVSTTYHSRPSSTPTTHFSASSTTLGRSEESTTVHSSPGATGTALFPTRSATSVLVGEPTTSPISSGSTETTALPGSTTTAGLSEKSTTFYSSPRSPDTTLSPASTTSSGVSEESTTSHSRPGSMHTTAFPSSTTMPGVSQESTASHSSPGSTDTTLSPGSTTASSLGPESTTFHSSPGSTETTLLPDNTTASGLLEASTPVHSSTGSPHTTLSPAGSTTRQGESTTFQSWPNSKDTTPAPPTTTSAFVELSTTSHGSPSSTPTTHFSASSTTLGRSEESTTVHSSPVATATTPSPARSTTSGLVEESTTYHSSPGSTQTMHFPESNTTSGRGEESTTSHSSTTHTISSAPSTTSALVEEPTSYHSSPGSTATTHFPDSSTTSGRSEESTASHSSQDATGTIVLPARSTTSVLLGESTTSPISSGSMETTALPGSTTTPGLSEKSTTFHSSPSSTPTTHFSASSTTLGRSEESTTVHSSPVATATTPSPARSTTSGLVEESTAYHSSPGSTQTMHFPESSTASGRSEESRTSHSSTTHTISSPPSTTSALVEEPTSYHSSPGSIATTHFPESSTTSGRSEESTASHSSPDTNGITPLPAHFTTSGRIAESTTFYISPGSMETTLASTATTPGLSAKSTILYSSSRSPDQTLSPASMTSSSISGEPTSLYSQAESTHTTAFPASTTTSGLSQESTTFHSKPGSTETTLSPGSITTSSFAQEFTTPHSQPGSALSTVSPASTTVPGLSEESTTFYSSPGSTETTAFSHSNTMSIHSQQSTPFPDSPGFTHTVLPATLTTTDIGQESTAFHSSSDATGTTPLPARSTASDLVGEPTTFYISPSPTYTTLFPASSSTSGLTEESTTFHTSPSFTSTIVSTESLETLAPGLCQEGQIWNGKQCVCPQGYVGYQCLSPLESFPVETPEKLNATLGMTVKVTYRNFTEKMNDASSQEYQNFSTLFKNRMDVVLKGDNLPQYRGVNIRRLLNGSIVVKNDVILEADYTLEYEELFENLAEIVKAKIMNETRTTLLDPDSCRKAILCYSEEDTFVDSSVTPGFDFQEQCTQKAAEGYTQFYYVDVLDGKLACVNKCTKGTKSQMNCNLGTCQLQRSGPRCLCPNTNTHWYWGETCEFNIAKSLVY

SEQ ID NO: 1643 - protein, 403 aa, synthetic construct
  REGION 1..403: note = MUC13 (Q9H3R2) ECD
TNQGNSADAVTTTETATSGPTVAAADTTETNFPETASTTANTPSFPTATSPAPPIISTHSSSTIPTPAPPIISTHSSSTIPIPTAADSESTTNVNSLATSDIITASSPNDGLITMVPSETQSNNEMSPTTEDNQSSGPPTGTALLETSTLNSTGPSNPCQDDPCADNSLCVKLHNTSFCLCLEGYYYNSSTCKKGKVFPGKISVTVSETFDPEEKHSMAYQDLHSEITSLFKDVFGTSVYGQTVILTVSTSLSPRSEMRADDKFVNVTIVTILAETTSDNEKTVTEKINKAIRSSSSNFLNYDLTLRCDYYGCNQTADDCLNGLACDCKSDLQRPNPQSPFCVASSLKCPDACNAQHKQCLIKKSGGAPECACVPGYQEDANGNCQKCAFGYSGLDCKDKFQL

SEQ ID NO: 1644 - protein, 213 aa, synthetic construct
  REGION 1..213: note = MUC15 (Q8N387) ECD
KENQDINTTQNIAEVFKTMENKPISLESEANLNSDKENITTSNLKASHSPPLNLPNNSHGITDFSSNSSAEHSLGSLKPTSTISTSPPLIHSFVSKVPWNAPIADEDLLPISAHPNATPALSSENFTWSLVNDTVKTPDNSSITVSILSSEPTSPSVTPLIVEPSGWLTTNSDSFTGFTPYQEKTTLQPTLKFTNNSKLFPNTSDPQKENRNT

SEQ ID NO: 1645 - protein, 4368 aa, synthetic construct
  REGION 1..4368: note = MUC17 (Q685J3) ECD
EQDLSVNRAVWDGGGCISQGDVLNRQCQQLSQHVRTGSAANTATGTTSTNVVEPRMYLSCSTNPEMTSIESSVTSDTPGVSSTRMTPTESRTTSESTSDSTTLFPSSTEDTSSPTTPEGTDVPMSTPSEESISSTMAFVSTAPLPSFEAYTSLTYKVDMSTPLTTSTQASSSPTTPESTTIPKSTNSEGSTPLTSMPASTMKVASSEAITLLTTPVEISTPVTISAQASSSPTTAEGPSLSNSAPSGGSTPLTRMPLSVMLVVSSEASTLSTTPAATNIPVITSTEASSSPTTAEGTSIPTSTYTEGSTPLTSTPASTMPVATSEMSTLSITPVDTSTLVTTSTEPSSLPTTAEATSMLTSTLSEGSTPLTNMPVSTILVASSEASTTSTIPVDSKTFVTTASEASSSPTTAEDTSIATSTPSEGSTPLTSMPVSTTPVASSEASNLSTTPVDSKTQVTTSTEASSSPPTAEVNSMPTSTPSEGSTPLTSMSVSTMPVASSEASTLSTTPVDTSTPVTTSSEASSSSTTPEGTSIPTSTPSEGSTPLTNMPVSTRLVVSSEASTTSTTPADSNTFVTTSSEASSSSTTAEGTSMPTSTYSERGTTITSMSVSTTLVASSEASTLSTTPVDSNTPVTTSTEATSSSTTAEGTSMPTSTYTEGSTPLTSMPVNTTLVASSEASTLSTTPVDTSTPVTTSTEASSSPTTADGASMPTSTPSEGSTPLTSMPVSKTLLTSSEASTLSTTPLDTSTHITTSTEASCSPTTTEGTSMPISTPSEGSPLLTSIPVSITPVTSPEASTLSTTPVDSNSPVTTSTEVSSSPTPAEGTSMPTSTYSEGRTPLTSMPVSTTLVATSAISTLSTTPVDTSTPVTNSTEARSSPTTSEGTSMPTSTPGEGSTPLTSMPDSTTPVVSSEARTLSATPVDTSTPVTTSTEATSSPTTAEGTSIPTSTPSEGTTPLTSTPVSHTLVANSEASTLSTTPVDSNTPLTTSTEASSPPPTAEGTSMPTSTPSEGSTPLTRMPVSTTMVASSETSTLSTTPADTSTPVTTYSQASSSSTTADGTSMPTSTYSEGSTPLTSVPVSTRLVVSSEASTLSTTPVDTSIPVTTSTEASSSPTTAEGTSIPTSPPSEGTTPLASMPVSTTLVVSSEANTLSTTPVDSKTQVATSTEASSPPPTAEVTSMPTSTPGERSTPLTSMPVRHTPVASSEASTLSTSPVDTSTPVTTSAETSSSPTTAEGTSLPTSTTSEGSTLLTSIPVSTTLVTSPEASTLLTTPVDTKGPVVTSNEVSSSPTPAEGTSMPTSTYSEGRTPLTSIPVNTTLVASSAISILSTTPVDNSTPVTTSTEACSSPTTSEGTSMPNSNPSEGTTPLTSIPVSTTPVVSSEASTLSATPVDTSTPGTTSAEATSSPTTAEGISIPTSTPSEGKTPLKSIPVSNTPVANSEASTLSTTPVDSNSPVVTSTAVSSSPTPAEGTSIAISTPSEGSTALTSIPVSTTTVASSEINSLSTTPAVTSTPVTTYSQASSSPTTADGTSMQTSTYSEGSTPLTSLPVSTMLVVSSEANTLSTTPIDSKTQVTASTEASSSTTAEGSSMTISTPSEGSPLLTSIPVSTTPVASPEASTLSTTPVDSNSPVITSTEVSSSPTPAEGTSMPTSTYTEGRTPLTSITVRTTPVASSAISTLSTTPVDNSTPVTTSTEARSSPTTSEGTSMPNSTPSEGTTPLTSIPVSTTPVLSSEASTLSATPIDTSTPVTTSTEATSSPTTAEGTSIPTSTLSEGMTPLTSTPVSHTLVANSEASTLSTTPVDSNSPVVTSTAVSSSPTPAEGTSIATSTPSEGSTALTSIPVSTTTVASSETNTLSTTPAVTSTPVTTYAQVSSSPTTADGSSMPTSTPREGRPPLTSIPVSTTTVASSEINTLSTTLADTRTPVTTYSQASSSPTTADGTSMPTPAYSEGSTPLTSMPLSTTLVVSSEASTLSTTPVDTSTPATTSTEGSSSPTTAGGTSIQTSTPSERTTPLAGMPVSTTLVVSSEGNTLSTTPVDSKTQVTNSTEASSSATAEGSSMTISAPSEGSPLLTSIPLSTTPVASPEASTLSTTPVDSNSPVITSTEVSSSPIPTEGTSMQTSTYSDRRTPLTSMPVSTTVVASSAISTLSTTPVDTSTPVTNSTEARSSPTTSEGTSMPTSTPSEGSTPFTSMPVSTMPVVTSEASTLSATPVDTSTPVTTSTEATSSPTTAEGTSIPTSTLSEGTTPLTSIPVSHTLVANSEVSTLSTTPVDSNTPFTTSTEASSPPPTAEGTSMPTSTSSEGNTPLTRMPVSTTMVASFETSTLSTTPADTSTPVTTYSQAGSSPTTADDTSMPTSTYSEGSTPLTSVPVSTMPVVSSEASTHSTTPVDTSTPVTTSTEASSSPTTAEGTSIPTSPPSEGTTPLASMPVSTTPVVSSEAGTLSTTPVDTSTPMTTSTEASSSPTTAEDIVVPISTASEGSTLLTSIPVSTTPVASPEASTLSTTPVDSNSPVVTSTEISSSATSAEGTSMPTSTYSEGSTPLRSMPVSTKPLASSEASTLSTTPVDTSIPVTTSTETSSSPTTAKDTSMPISTPSEVSTSLTSILVSTMPVASSEASTLSTTPVDTRTLVTTSTGTSSSPTTAEGSSMPTSTPGERSTPLTNILVSTTLLANSEASTLSTTPVDTSTPVTTSAEASSSPTTAEGTSMRISTPSDGSTPLTSILVSTLPVASSEASTVSTTAVDTSIPVTTSTEASSSPTTAEVTSMPTSTPSETSTPLTSMPVNHTPVASSEAGTLSTTPVDTSTPVTTSTKASSSPTTAEGIVVPISTASEGSTLLTSIPVSTTPVASSEASTLSTTPVDTSIPVTTSTEGSSSPTTAEGTSMPISTPSEVSTPLTSILVSTVPVAGSEASTLSTTPVDTRTPVTTSAEASSSPTTAEGTSMPISTPGERRTPLTSMSVSTMPVASSEASTLSRTPADTSTPVTTSTEASSSPTTAEGTGIPISTPSEGSTPLTSIPVSTTPVAIPEASTLSTTPVDSNSPVVTSTEVSSSPTPAEGTSMPISTYSEGSTPLTGVPVSTTPVTSSAISTLSTTPVDTSTPVTTSTEAHSSPTTSEGTSMPTSTPSEGSTPLTYMPVSTMLVVSSEDSTLSATPVDTSTPVTTSTEATSSTTAEGTSIPTSTPSEGMTPLTSVPVSNTPVASSEASILSTTPVDSNTPLTTSTEASSSPPTAEGTSMPTSTPSEGSTPLTSMPVSTTTVASSETSTLSTTPADTSTPVTTYSQASSSPPIADGTSMPTSTYSEGSTPLTNMSFSTTPVVSSEASTLSTTPVDTSTPVTTSTEASLSPTTAEGTSIPTSSPSEGTTPLASMPVSTTPVVSSEVNTLSTTPVDSNTLVTTSTEASSSPTIAEGTSLPTSTTSEGSTPLSIMPLSTTPVASSEASTLSTTPVDTSTPVTTSSPTNSSPTTAEVTSMPTSTAGEGSTPLTNMPVSTTPVASSEASTLSTTPVDSNTFVTSSSQASSSPATLQVTTMRMSTPSEGSSSLTTMLLSSTYVTSSEASTPSTPSVDRSTPVTTSTQSNSTPTPPEVITLPMSTPSEVSTPLTIMPVSTTSVTISEAGTASTLPVDTSTPVITSTQVSSSPVTPEGTTMPIWTPSEGSTPLTTMPVSTTRVTSSEGSTLSTPSVVTSTPVTTSTEAISSSATLDSTTMSVSMPMEISTLGTTILVSTTPVTRFPESSTPSIPSVYTSMSMTTASEGSSSPTTLEGTTTMPMSTTSERSTLLTTVLISPISVMSPSEASTLSTPPGDTSTPLLTSTKAGSFSIPAEVTTIRISITSERSTPLTTLLVSTTLPTSFPGASIASTPPLDTSTTFTPSTDTASTPTIPVATTISVSVITEGSTPGTTIFIPSTPVTSSTADVFPATTGAVSTPVITSTELNTPSTSSSSTTTSFSTTKEFTTPAMTTAAPLTYVTMSTAPSTPRTTSRGCTTSASTLSATSTPHTSTSVTTRPVTPSSESSRPSTITSHTIPPTFPPAHSSTPPTTSASSTTVNPEAVTTMTTRTKPSTRTTSFPTVTTTAVPTNTTIKSNPTSTPTVPRTTTCFGDGCQNTASRCKNGGTWDGLKCQCPNLYYGELCEEVVSSIDIGPPETISAQMELTVTVTSVKFTEELKNHSSQEFQEFKQTFTEQMNIVYSGIPEYVGVNITKLRLGSVVVEHDVLLRTKYTPEYKTVLDNATEVVKEKITKVTTQQIMINDICSDMMCFNTTGTQVQNITVTQYDPEEDCRKMAKEYGDYFVVEYRDQKPYCISPCEPGFSVSKNCNLGKCQMSLSGPQCLCVTTETHWYSGETCNQGTQKSLVYG

SEQ ID NO: 1646 - protein, 455 aa, synthetic construct
  REGION 1..455: note = MUC21 (Q5SSG8) ECD
NETSTSANTGSSVISSGASTATNSGSSVTSSGVSTATISGSSVTSNGVSIVTNSEFHTTSSGISTATNSEFSTVSSGISIATNSESSTTSSGASTATNSESSTPSSGASTATNSDSSTTSSGASTATNSDSSTTSSEASTATNSESSTTSSGASTATNSESSTVSSRASTATNSESSTTSSGASTATNSESRTTSNGAGTATNSESSTTSSGASTATNSESSTPSSGAGTATNSESSTTSSGAGTATNSESSTVSSGISTVTNSESSTPSSGANTATNSESSTTSSGANTATNSDSSTTSSGASTATNSESSTTSSGASTATNSESSTTSSGASTATNSGSSTTSSGTSTATNSESSTVSSGASTATTSESSTTSSGASTATNSESSTVSSGASTATNSESSTTSSGANTATNSGSSVTSAGSGTAALTGMHTTSHSASTAVSEAKPGGSLVPWE

SEQ ID NO: 1647 - protein, 1634 aa, synthetic construct
  REGION 1..1634: note = MUC22 (E2RYF6) ECD
NTTAFTKGSDTTTASITGSETTMASTMASTSALTTGSKITTDSTTGSETTSASTMASTAAFTTGSETNTASTTDSGTTIASTRTFTTGSDTTTGSTAGSETIVASTTVSGTTTTFTIASTTVPETTMASSTTSTAGSEKTMASSIISETTMASTTGSETATVSTTGSETTTTSTASSEATKVSTTGSETTTASTAGSETTTTSTSMAGSEATTTSTADSKVITASSMSSETTVAPAAGSNTTTASTTGSETTTILIKASETTTASTAGSETTTPSPTGSQTTIVSISGSEITTTSTAGSENTTVSSAGSGTTTASMAGSETTVSTAGSETTTVSITGTETTMVSAMGSETTTNSTTSSETTVTSTAGSETTTVSTVGSETTTAYTADSETTAASTTGSEMTTVFTAGSETITPSTAGSETTTVSTAGSETTTVSTTGSETTTASTAHSETTAASTMGSETTKVSTAGSETTVSTAGSETTAASTEDSETNTAFTEDSKTTTASTTGFETTAASTTGSEPTMASTMGSETTMASTIGPETTKVSTASSEVTTVFAAGSETIRASTVGSETTTVSTTGSETTTASIMGSETSTDSTTGSETTTASTEGSETTTASTEGSEATTVSTTGSETTTVSITDSETTTTCTEGSEMTAVSTTVFETTTASTEGSEITIASTSDSETTTASTEGSETTTVTTAGSETKTAYTTGSETTTASNTGLETTTVFTIGSDTTTASTEGSETTAVSATGSEMTTVSTEGSENTTVSTTGSETTTVSTTGLETTTTSTEGSEMTTVSTTGAETTTDSTEGSGTTAASTAGSETTTVSTADSENTTASTADSETTSASTTGSETTTASTTSSETTTASTEGSETTTVSTTDSETTMVSTTGSERTITSTEGSETTTVSATGSETTVSTEGSGTTTVSITGSETTKVSTTGSETTTTSTEGSEITTASITGSETTTASTEGSETTTASTEGSETTSASTTGSETTTASTTSSETTMASIMGSETTMASTIGSETTKVSTASSKMTTVFTENSETTIASTTASETTTVSTAGSETIPASTAGSETTTTTSTEGSETTTASTEGSETTTASTESSETTTATTIGSETTTASTEGSETTTTSTEGSETTTASTEGSEITTVSTTGSETTTASTEGSETTTASTEGSELTTVSTTGSETITVSAEGSETTTVTTMGSETTTASTAGSETTTVSTAGSETTTASIEGSETTTVSSTGSETTTVSTTGTETTITSTEGSETTTVTTAGSETTAVYTTGSETTTTSTEGSETTTVSTTGSETTTASTADLETTTVSTSGSGTTTASTAGSETTTVYITGSKTTTASTEGSEATTVSTTSSETTTASTTGSEMTTVFTTVSETTTVSTIGSEATTSSAAGSEATTTSTEGSETTTASTAGSETTTASTAGSETTTASTSGSETNTACTTGSETSTPSSAGSETNTAFIIGSESTIASTASLEPTATSLTGSETTTVSITASGATAASTTVSSTTFVLTKATDVSIQPITNTPMSGTRTTGTRLTASSSVTMAPGMDFTASAASHTVPGIVLNTSGLGTSTMGASSTTSAHGVRTTTGSTREPTSSTFQETGPVSMGTNTVSMSHTPTNVIKPSGYLQP

SEQ ID NO: 1648 - protein, 3211 aa, synthetic construct
  REGION 1..3211: note = MUC3A (Q02505) ECD
SPWATGTLSTATSISQVPFPRAEAASAVLSNSPHSRDLAGWPLGVPQLASPAPGHRENAPMTLTTSPHDTLISETLLNSPVSSNTSTTPTSKFAFKVETTPPTVLVYSATTECVYPTSFIITISHPTSICVTTTQVAFTSSYTSTPVTQKPVTTVTSTYSMTTTEKGTSAMTSSPSTTTARETPIVTVTPSSVSATDTTFHTTISSTTRTTERTPLPTGSIHTTTSPTPVFTTLKTAVTSTSPITSSITSTNTVTSMTTTASQPTATNTLSSPTRTILSSTPVLSTETITSGITNTTPLSTLVTTLPTTISRSTPTSETTYTTSPTSTVTDSTTKIAYSTSMTGTLSTETSLPPTSSSLPTTETATTPMTNLVTTTTEISSHSTPSFSSSTIYSTVSTSTTAISSLPPTSGTMVTSTTMTPSSLSTDIPFTTPTTITHHSVGSTGFLTTATDLTSTFTVSSSSAMSTSVIPSSPSIQNTETSSLVSMTSATTPNVRPTFVSTLSTPTSSLLTTFPATYSFSSSMSASSAGTTHTESISSPPASTSTLHTTAESTLAPTTTTSFTTSTTMEPPSTTAATTGTGQTTFTSSTATFPETTTPTPTTDMSTESLTTAMTSPPITSSVTSTNTVTSMTTTTSPPTTTNSFTSLTSMPLSSTPVPSTEVVTSGTINTIPPSILVTTLPTPNASSMTTSETTYPNSPTGPGTNSTTEITYPTTMTETSSTATSLPPTSPLVSTAKTAKTPTTNLVTTTTKTTSHSTTSFTSSTVYSTASTYTTAITSVPTTLGTMVTSTSMISSTVSTGIPTSQPTTITPSSVGISGSLPMMTDLTSVYTVSNMSARPTTVIPSSPTVQNTEISISVSMTSATTPSGGPTFTSTENTPTRSLLTSFPMTHSFSSSMSESSAGTTHTESISSPRGTTSTLHTTVESTPSPTTTTSFTTSTMMEPPSSTVSTTGRGQTTFPSSTATFPETTTLTPTTDISTVSLTTAMTSPPPVSSSITPTNTMTSMRTTTYWPTATNTLSPLTSSILSSTPVPSTEMITSHTTNTTPLSTLVTTLLTTITRSTPTSETTYPTSPTSIVSDSTTEITYSTSITGTLSTATTLPPTSSSLPTTETATMTPTTTLITTTPNTTSLSTPSFTSSTIYSTVSTSTTAISSASPTSGTMVTSTTMTPSSLSTDTPSTTPTTITYPSVGSTGFLTTATDLTSTFTVSSSSAMSTSVIPSSPSIQNTETSSLVSMTSATTPSLRPTITSTDSTLTSSLLTTFPSTYSFSSSMSASSAGTTHTETISSLPASTNTIHTTAESALAPTTTTSFTTSPTMEPPSTTVATTGTGQTTFPSSTATFLETTTLTPTTDFSTESLTTAMTSTPPITSSITPTDTMTSMRTTTSWPTATNTLSPLTSSILSSTPVPSTEVTTSHTTNTNPVSTLVTTLPITITRSTLTSETAYPSSPTSTVTESTTEITYPTTMTETSSTATSLPPTSSLVSTAETAKTPTTNLVTTTTKTTSHSTTSFTSSTIYSTASTPTTAITSVPTTLGTMVTSTSMIPSTVSTGIPTSQPTTITPSSVGISGSLPMMTDLTSVYTVSSMSARPTSVIPSSPTVQNTETSIFVSMMSATTPSGGPTFTSTENTPTRSLLTSFPVTHSFSSSMSASSVGTTHTQSISSPPAITSTLHTTAESTPSPTTTMSFTTFTKMETPSSTVATTGTGQTTFTSSTATSPKTTTLTPTSDISTGSFKTAVSSTPPITSSITSTYTVTSMTTTTPLGPTATNTLPSFTSSVSSSTPVPSTEAITSGTTNTTPLSTLVTTFSNSDTSSTPTSETTYPTSLTSALTDSTTRTTYSTNMTGTLSTVTSLRPTSSSLLTTVTATVPTTNLVTTTTKITSHSTPSFTSSIATTETPSHSTPRFTSSITTTETPSHSTPRFTSSITNTKTTSHSSPSFTSSITTTETTSHNTPSLTSSITTTKTTSHSTPSYTSLITTTTTTSHSTPSFTSSITTTETTSHNTPSLTSSITTTETTSHSTPSFTSSITTETTSHSTPSFTSLITITEITSHSTLSYTTSITTTETPSHSTLSFTSSITTTETTSHSTPSFTSSITTSEMPSHSTPSFTSSITTTENATHSTPNFTSSITTTETTSHSTPSFTSLITTTETTSHRWGTTETTSYSTPSFTSSNTITETTSHSTPSYITSITTTETPSSSTPSFSSSITTTETTSHSTPGFTSSITTTETTSHSTPSFTSSITTTETTSHDTPSFTSSITTSETPSHSTPSSTSLITTTKTTSHSTPSFTSSITTTETTSHSAHSFTSSITTTETTSHNTRSFTSSITTTETNSHSTTSFTSSITTTETTSHSTPSFSSSITTTETPLHSTPGLTSWVTTTKTTSHITPGLTSSITTTETTSHSTPGFTSSITTTETTSESTPSLSSSTIYSTVSTSTTAITSHFTTSETAVTPTPVTPSSLSTDIPTTSLRTLTPSSVGTSTSLTTTTDFPSIPTDISTLPTRTHIISSSPSIQSTETSSLVGTTSPTMSTVRMTLRITENTPISSFSTSIVVIPETPTQTPPVLTSATGTQTSPAPTTVTFGSTDSSTSTLHTLTPSTALSTIVSTSQVPIPSTHSSTLQTTPSTPSLQTSLTSTSEFTTESFTRGSTSTNAILTSFSTIIWSSTPTIIMSSSPSSASITPVFSTTIHSVPSSPYIFSTENVGSASITGFPSLSSSATTSTSSTSSSLTTALTEITPFSYISLPSTTPCPGTITITIVPASPTDPCVEMDPSTEATSPPTTPLTVFPFTTEMVTCPTSISIQTTLTTYMDTSSMMPESESSISPNASSSTGTGTVPTNTVFTSTRLPTSETWLSNSSVIPLPLPGVSTIPLTMKPSSSLPTILRTSSKSTHPSPPTTRTSETPVATTQTPTTLTSRRTTRITSQMTTQSTLTTTAGTCDNGGTWEQGQCACLPGFSGDRCQLQTRCQNGGQWDGLKCQCPSTFYGSSCEFAVEQVDLDVVETEVGMEVSVDQQFSPDLNDNTSQAYRDFNKTFWNQMQKIFADMQGFTFKGVEILSLRNGSIVVDYLVLLEMPFSPQLESEYEQVKTTLKEGLQNASQDVNSCQDSQTLCFKPDSIKVNNNSKTELTPAAICRRAAPTGYEEFYFPLVEATRLRCVTKCTSGVDNAIDCHQGQCVLETSGPTCRCYSTDTHWFSGPRCEVAVHWRA

SEQ ID NO: 1649 - protein, 1119 aa, synthetic construct
  REGION 1..1119: note = MUC3B (Q9H195) ECD
TLSTATSTSHVTFPRAEATRTALSNSPHSRYLAEWPQGVPQLASPAPGHRENAPMTLTTSPHDTLISETLLSSLVSSNTSTTPTSKFAFKVETTPPTVLVYSATTECVYPTSFIITISHSTSICVTTTQVTFTSSYTPTPVTQKPVTTVTRTYPMTTTEKGTSAMISSPSTTTARETPIVTVTPSSSVSATDTTFHTTISSTTRTTERTPLPTGSIHTTMSPTPVFTTLKTAVTSTSPITSTITSTNTVTSMTTTTSRPTATNTLSSLTSSILSSTPAPNTEVITSHTTTTTPPSTLVTTLPTAIARSTPTSETTPSFMSSIITTETTSHSTPSFSSSTIHSTVSSSTTAITSPFTTAETGVTSTPSSPSSLSTDIPTTSLRTLTPLSLSTSTSLTTTTDLPSIPTDISSLPTPIHIISSSPSIQSTETSSLVGTTSPTMSTVRATLRSTENTPISSFSTSIVVTPETPTTQAPPVLMSATGTQTSPVPTTVTFGSMDSSTSTLHTLTPSTALSKIMSTSQFPIPSTHSSTLQTTPSIPSLQTSLTSTSEFTTESFTRGSTSTNAILTSFSTIIWSSTPTIIMSSSPSSASITPVFATTIHSVPSSPYIFSTENVGSASITAFPSLSSSSTTSTSPTSSSLTTALTEITPFSYISLPSTTPCPGTITITIVPASPTDPCVEMDPSTEATSPPTTPLTVFPFTTEMVTCPSSISMQTTLATHMDTSSMTPESESSIIPNASSSTGTGTVPTNTVFTSTRLPTSETWLSNNSVIPTPLPGVSTIPLTMKPSSSLPTILRTSSKSTHPSPPTARTSQTSVATTQTPTTLTTCRTTPITSWMTTQSTLTTTAGTCDNGGTWEQGQCACLPGFSGDRCQLQTRCQNGGQWDGLKCQCPSTFYGSSCEFAVEQVDLDVVETEVGMEVSVDQQFSPDLNDNTSQAYRDFNKTFWNQMQKIFADMQGFTFKGVEILSLRNGSIVVDYLVLLEMPFSPQLESEYEQVKTTLKEGLQNASQDANSCQDSQALCFKPDSIKVNNNSKTELTPEAICRRAAPTGYEEFYFPLVEATRLRCVTKCTSGLDNAIDCHQGQCVLETSGPACRCYSTDTHWFSGPRCEVTVHWRA

SEQ ID NO: 1650 - protein, 2097 aa, synthetic construct
  REGION 1..2097: note = MUC4 (Q99102) ECD
TTEDTLITGSKTAAPVTSTGSTTATLEGQSTAASSRTSNQDISASSQNHQTKSTETTSKAQTDTLTQMMTSTLFSSPSVHNVMETVTQETAPPDEMTTSFPSSVTNTLMMTSKTITMTTSTDSTLGNTEETSTAGTESSTPVTSAVSITAGQEGQSRTTSWRTSIQDTSASSQNHWTRSTQTTRESQTSTLTHRTTSTPSFSPSVHNVTGTVSQKTSPSGETATSSLCSVTNTSMMTSEKITVTTSTGSTLGNPGETSSVPVTGSLMPVTSAALVTVDPEGQSPATFSRTSTQDTTAFSKNHQTQSVETTRVSQINTLNTLTPVTTSTVLSSPSGFNPSGTVSQETFPSGETTISSPSSVSNTFLVTSKVFRMPISRDSTLGNTEETSLSVSGTISAITSKVSTIWWSDTLSTALSPSSLPPKISTAFHTQQSEGAETTGRPHERSSFSPGVSQEIFTLHETTTWPSSFSSKGHTTWSQTELPSTSTGAATRLVTGNPSTRAAGTIPRVPSKVSAIGEPGEPTTYSSHSTTLPKTTGAGAQTQWTQETGTTGEALLSSPSYSVIQMIKTATSPSSSPMLDRHTSQQITTAPSTNHSTIHSTSTSPQESPAVSQRGHTRAPQTTQESQTTRSVSPMTDTKTVTTPGSSFTASGHSPSEIVPQDAPTISAATTFAPAPTGNGHTTQAPTTALQAAPSSHDATLGPSGGTSLSKTGALTLANSVVSTPGGPEGQWTSASASTSPDTAAAMTHTHQAESTEASGQTQTSEPASSGSRTTSAGTATPSSSGASGTTPSGSEGISTSGETTRFSSNPSRDSHTTQSTTELLSASASHGAIPVSTGMASSIVPGTFHPTLSEASTAGRPTGQSSPTSPSASPQETAAISRMAQTQRTGTSRGSDTISLASQATDTFSTVPPTPPSITSSGLTSPQTQTHTLSPSGSGKTFTTALISNATPLPVTSTSSASTGHATPLAVSSATSASTVSSDSPLKMETSGMTTPSLKTDGGRRTATSPPPTTSQTIISTIPSTAMHTRSTAAPIPILPERGVSLFPYGAGAGDLEFVRRTVDFTSPLFKPATGFPLGSSLRDSLYFTDNGQIIFPESDYQIFSYPNPLPTGFTGRDPVALVAPFWDDADFSTGRGTTFYQEYETFYGEHSLLVQQAESWIRKMTNNGGYKARWALKVTWVNAHAYPAQWTLGSNTYQAILSTDGSRSYALFLYQSGGMQWDVAQRSGNPVLMGFSSGDGYFENSPLMSQPVWERYRPDRFLNSNSGLQGLQFYRLHREERPNYRLECLQWLKSQPRWPSWGWNQVSCPCSWQQGRRDLRFQPVSIGRWGLGSRQLCSFTSWRGGVCCSYGPWGEFREGWHVQRPWQLAQELEPQSWCCRWNDKPYLCALYQQRRPHVGCATYRPPQPAWMFGDPHITTLDGVSYTFNGLGDFLLVGAQDGNSSFLLQGRTAQTGSAQATNFIAFAAQYRSSSLGPVTVQWLLEPHDAIRVLLDNQTVTFQPDHEDGGGQETFNATGVLLSRNGSEVSASFDGWATVSVIALSNILHASASLPPEYQNRTEGLLGVWNNNPEDDFRMPNGSTIPPGSPEEMLFHFGMTWQINGTGLLGKRNDQLPSNFTPVFYSQLQKNSSWAEHLISNCDGDSSCIYDTLALRNASIGLHTREVSKNYEQANATLNQYPPSINGGRVIEAYKGQTTLIQYTSNAEDANFTLRDSCTDLELFENGTLLWTPKSLEPFTLEILARSAKIGLASALQPRTVVCHCNAESQCLYNQTSRVGNSSLEVAGCKCDGGTFGRYCEGSEDACEEPCFPSVHCVPGKGCEACPPNLTGDGRHCAALGSSFLCQNQSCPVNYCYNQGHCYISQTLGCQPMCTCPPAFTDSRCFLAGNNFSPTVNLELPLRVIQLLLSEEENASMAEVNASVAYRLGTLDMRAFLRNSQVERIDSAAPASGSPIQHWMVISEFQYRPRGPVIDFLNNQLLAAVVEAFLYHVPRRSEEPRNDVVFQPISGEDVRDVTALNVSTLKAYFRCDGYKGYDLVYSPQSGFTCVSPCSRGYCDHGGQCQHLPSGPRCSCVSFSIYTAWGEHCEHLSMKLDA

SEQ ID NO: 1651 - protein, 472 aa, synthetic construct
  REGION 1..472: note = MUSK (O15146) ECD
LPKAPVITTPLETVDALVEEVATFMCAVESYPQPEISWTRNKILIKLFDTRYSIRENGQLLTILSVEDSDDGIYCCTANNGVGGAVESCGALQVKMKPKITRPPINVKIIEGLKAVLPCTTMGNPKPSVSWIKGDSPLRENSRIAVLESGSLRIHNVQKEDAGQYRCVAKNSLGTAYSKVVKLEVEVFARILRAPESHNVTFGSFVTLHCTATGIPVPTITWIENGNAVSSGSIQESVKDRVIDSRLQLFITKPGLYTCIATNKHGEKFSTAKAAATISIAEWSKPQKDNKGYCAQYRGEVCNAVLAKDALVFLNTSYADPEEAQELLVHTAWNELKVVSPVCRPAAEALLCNHIFQECSPGVVPTPIPICREYCLAVKELFCAKEWLVMEEKTHRGLYRSEMHLLSVPECSKLPSMHWDPTACARLPHLDYNKENLKTFPPMTSSKPSVDIPNLPSSSSSSFSVSPTYSMT

SEQ ID NO: 1652 - protein, 322 aa, synthetic construct
  REGION 1..322: note = MXRA8 (Q9BRK3) ECD
VLLHSGSSVPAAAGSSVVSESAVSWEAGARAVLRCQSPRMVWTQDRLHDRQRVLHWDLRGPGGGPARRLLDLYSAGEQRVYEARDRGRLELSASAFDDGNFSLLIRAVEETDAGLYTCNLHHHYCHLYESLAVRLEVTDGPPATPAYWDGEKEVLAVARGAPALLTCVNRGHVWTDRHVEEAQQVVHWDRQPPGVPHDRADRLLDLYASGERRAYGPLFLRDRVAVGADAFERGDFSLRIEPLEVADEGTYSCHLHHHYCGLHERRVFHLTVAEPHAEPPPRGSPGNGSSHSGAPGPDPTLARGHNVINVIVPESRAHFFQQ

SEQ ID NO: 1653 - protein, 399 aa, synthetic construct
  REGION 1..399: note = NAGPA (Q9UK23) ECD
DCTRVRAGNREHESWPPPPATPGAGGLAVRTFVSHFRDRAVAGHLTRAVEPLRTFSVLEPGGPGGCAARRRATVEETARAADCRVAQNGGFFRMNSGECLGNVVSDERRVSSSGGLQNAQFGIRRDGTLVTGYLSEEEVLDTENPFVQLLSGVVWLIRNGSIYINESQATECDETQETGSFSKFVNVISARTAIGHDRKGQLVLFHADGQTEQRGINLWEMAEFLLKQDVVNAINLDGGGSATFVLNGTLASYPSDHCQDNMWRCPRQVSTVVCVHEPRCQPPDCHGHGTCVDGHCQCTGHFWRGPGCDELDCGPSNCSQHGLCTETGCRCDAGWTGSNCSEECPLGWHGPGCQRPCKCEHHCPCDPKTGNCSVSRVKQCLQPPEATLRAGELSFFTRT

SEQ ID NO: 1654 - protein, 699 aa, synthetic construct
  REGION 1..699: note = NCAM1 (P13591) ECD
LQVDIVPSQGEISVGESKFFLCQVAGDAKDKDISWFSPNGEKLTPNQQRISVVWNDDSSSTLTIYNANIDDAGIYKCVVTGEDGSESEATVNVKIFQKLMFKNAPTPQEFREGEDAVIVCDVVSSLPPTIIWKHKGRDVILKKDVRFIVLSNNYLQIRGIKKTDEGTYRCEGRILARGEINFKDIQVIVNVPPTIQARQNIVNATANLGQSVTLVCDAEGFPEPTMSWTKDGEQIEQEEDDEKYIFSDDSSQLTIKKVDKNDEAEYICIAENKAGEQDATIHLKVFAKPKITYVENQTAMELEEQVTLTCEASGDPIPSITWRTSTRNISSEEKASWTRPEKQETLDGHMVVRSHARVSSLTLKSIQYTDAGEYICTASNTIGQDSQSMYLEVQYAPKLQGPVAVYTWEGNQVNITCEVFAYPSATISWFRDGQLLPSSNYSNIKIYNTPSASYLEVTPDSENDFGNYNCTAVNRIGQESLEFILVQADTPSSPSIDQVEPYSSTAQVQFDEPEATGGVPILKYKAEWRAVGEEVWHSKWYDAKEASMEGIVTIVGLKPETTYAVRLAALNGKGLGEISAASEFKTQPVQGEPSAPKLEGQMGEDGNSIKVNLIKQDDGGSPIRHYLVRYRALSSEWKPEIRLPSGSDHVMLKSLDWNAEYEVYVVAENQQGKSKAAHFVFRTSAQPTAIPANGSPTSG

SEQ ID NO: 1655 - protein, 678 aa, synthetic construct
  REGION 1..678: note = NCAM2 (O15394) ECD
LLQVTISLSKVELSVGESKFFTCTAIGEPESIDWYNPQGEKIISTQRVVVQKEGVRSRLTIYNANIEDAGIYRCQATDAKGQTQEATVVLEIYQKLTFREVVSPQEFKQGEDAEVVCRVSSSPAPAVSWLYHNEEVTTISDNRFAMLANNNLQILNINKSDEGIYRCEGRVEARGEIDFRDIIVIVNVPPAISMPQKSFNATAERGEEMTFSCRASGSPEPAISWFRNGKLIEENEKYILKGSNTELTVRNIINSDGGPYVCRATNKAGEDEKQAFLQVFVQPHIIQLKNETTYENGQVTLVCDAEGEPIPEITWKRAVDGFTFTEGDKSLDGRIEVKGQHGSSSLHIKDVKLSDSGRYDCEAASRIGGHQKSMYLDIEYAPKFISNQTIYYSWEGNPINISCDVKSNPPASIHWRRDKLVLPAKNTTNLKTYSTGRKMILEIAPTSDNDFGRYNCTATNHIGTRFQEYILALADVPSSPYGVKIIELSQTTAKVSFNKPDSHGGVPIHHYQVDVKEVASEIWKIVRSHGVQTMVVLNNLEPNTTYEIRVAAVNGKGQGDYSKIEIFQTLPVREPSPPSIHGQPSSGKSFKLSITKQDDGGAPILEYIVKYRSKDKEDQWLEKKVQGNKDHIILEHLQWTMGYEVQITAANRLGYSEPTVYEFSMPPKPNIIKDTLFN

SEQ ID NO: 1656 - protein, 237 aa, synthetic construct
  REGION 1..237: note = NCR1 (O76036) ECD
QQQTLPKPFIWAEPHFMVPKEKQVTICCQGNYGAVEYQLHFEGSLFAVDRPKPPERINKVKFYIPDMNSRMAGQYSCIYRVGELWSEPSNLLDLVVTEMYDTPTLSVHPGPEVISGEKVTFYCRLDTATSMFLLLKEGRSSHVQRGYGKVQAEFPLGPVTTAHRGTYRCFGSYNNHAWSFPSEPVKLLVTGDIENTSLAPEDPTFPADTWGTYLLTTETGLQKDHALWDHTAQNLLR

SEQ ID NO: 1657 - protein, 171 aa, synthetic construct
  REGION 1..171: note = NCR2 (O95944) ECD
QSKAQVLQSVAGQTLTVRCQYPPTGSLYEKKGWCKEASALVCIRLVTSSKPRTMAWTSRFTIWDDPDAGFFTVTMTDLREEDSGHYWCRIYRPSDNSVSKSVRFYLVVSPASASTQTSWTPRDLVSSQTQTQSCVPPTAGARQAPESPSTIPVPSQPQNSTLRPGPAAPIA

SEQ ID NO: 1658 - protein, 117 aa, synthetic construct
  REGION 1..117: note = NCR3 (O14931) ECD
LWVSQPPEIRTLEGSSAFLPCSFNASQGRLAIGSVTWFRDEVVPGKEVRNGTPEFRGRLAPLASSRFLHDHQAELHIRDVRGHDASIYVCRVEVLGLGVGTGNGTRLVVEKEHPQLG

SEQ ID NO: 1659 - protein, 238 aa, synthetic construct
  REGION 1..238: note = NCR3LG1 (Q68D85) ECD
DLKVEMMAGGTQITPLNDNVTIFCNIFYSQPLNITSMGITWFWKSLTFDKEVKVFEFFGDHQEAFRPGAIVSPWRLKSGDASLRLPGIQLEEAGEYRCEVVVTPLKAQGTVQLEVVASPASRLLLDQVGMKENEDKYMCESSGFYPEAINITWEKQTQKFPHPIEISEDVITGPTIKNMDGTFNVTSCLKLNSSQEDPGTVYQCVVRHASLHTPLRSNFTLTAARHSLSETEKTDNFS

SEQ ID NO: 1660 - protein, 636 aa, synthetic construct
  REGION 1..636: note = NCSTN (Q92542) ECD
NSVERKIYIPLNKTAPCVRLLNATHQIGCQSSISGDTGVIHVVEKEEDLQWVLTDGPNPPYMVLLESKHFTRDLMEKLKGRTSRIAGLAVSLTKPSPASGFSPSVQCPNDGFGVYSNSYGPEFAHCREIQWNSLGNGLAYEDFSFPIFLLEDENETKVIKQCYQDHNLSQNGSAPTFPLCAMQLFSHMHAVISTATCMRRSSIQSTFSINPEIVCDPLSDYNVWSMLKPINTTGTLKPDDRVVVAATRLDSRSFFWNVAPGAESAVASFVTQLAAAEALQKAPDVTTLPRNVMFVFFQGETFDYIGSSRMVYDMEKGKFPVQLENVDSFVELGQVALRTSLELWMHTDPVSQKNESVRNQVEDLLATLEKSGAGVPAVILRRPNQSQPLPPSSLQRFLRARNISGVVLADHSGAFHNKYYQSIYDTAENINVSYPEWLSPEEDLNFVTDTAKALADVATVLGRALYELAGGTNFSDTVQADPQTVTRLLYGFLIKANNSWFQSILRQDLRSYLGDGPLQHYIAVSSPTNTTYVVQYALANLTGTVVNLTREQCQDPSKVPSENKDLYEYSWVQGPLHSNETDRLPRCVRSTARLARALSPAFELSQWSSTEYSTWTESRWKDIRARIFLIASKELE

SEQ ID NO: 1661 - protein, 1072 aa, synthetic construct
  REGION 1..1072: note = NEO1 (Q92859) ECD
ARSGSAPQSPGASIRTFTPFYFLVEPVDTLSVRGSSVILNCSAYSEPSPKIEWKKDGTFLNLVSDDRRQLLPDGSLFISNVVHSKHNKPDEGYYQCVATVESLGTIISRTAKLIVAGLPRFTSQPEPSSVYAGNNAILNCEVNADLVPFVRWEQNRQPLLLDDRVIKLPSGMLVISNATEGDGGLYRCVVESGGPPKYSDEVELKVLPDPEVISDLVFLKQPSPLVRVIGQDVVLPCVASGLPTPTIKWMKNEEALDTESSERLVLLAGGSLEISDVTEDDAGTYFCIADNGNETIEAQAELTVQAQPEFLKQPTNIYAHESMDIVFECEVTGKPTPTVKWVKNGDMVIPSDYFKIVKEHNLQVLGLVKSDEGFYQCIAENDVGNAQAGAQLIILEHAPATTGPLPSAPRDVVASLVSTRFIKLTWRTPASDPHGDNLTYSVFYTKEGIARERVENTSHPGEMQVTIQNLMPATVYIFRVMAQNKHGSGESSAPLRVETQPEVQLPGPAPNLRAYAASPTSITVTWETPVSGNGEIQNYKLYYMEKGTDKEQDVDVSSHSYTINGLKKYTEYSFRVVAYNKHGPGVSTPDVAVRTLSDVPSAAPQNLSLEVRNSKSIMIHWQPPAPATQNGQITGYKIRYRKASRKSDVTETLVSGTQLSQLIEGLDRGTEYNFRVAALTINGTGPATDWLSAETFESDLDETRVPEVPSSLHVRPLVTSIVVSWTPPENQNIVVRGYAIGYGIGSPHAQTIKVDYKQRYYTIENLDPSSHYVITLKAFNNVGEGIPLYESAVTRPHTDTSEVDLFVINAPYTPVPDPTPMMPPVGVQASILSHDTIRITWADNSLPKHQKITDSRYYTVRWKTNIPANTKYKNANATTLSYLVTGLKPNTLYEFSVMVTKGRRSSTWSMTAHGTTFELVPTSPPKDVTVVSKEGKPKTIIVNWQPPSEANGKITGYIIYYSTDVNAEIHDWVIEPVVGNRLTHQIQELTLDTPYYFKIQARNSKGMGPMSEAVQFRTPKADSSDKMPNDQASGSGGKGSRLPDLGSDYKPPMSGSNSPHGSPTSPLDSNML

SEQ ID NO: 1662 - protein, 322 aa, synthetic construct
  REGION 1..322: note = NETO1 (Q8TDF5) ECD
TKKGTEKQTTSETQKSVQCGTWTKHAEGGIFTSPNYPSKYPPDRECIYIIEAAPRQCIELYFDEKYSIEPSWECKFDHIEVRDGPFGFSPIIGRFCGQQNPPVIKSSGRFLWIKFFADGELESMGFSARYNFTPDPDFKDLGALKPLPACEFEMGGSEGIVESIQIMKEGKATASEAVDCKWYIRAPPRSKIYLRFLDYEMQNSNECKRNFVAVYDGSSSVEDLKAKFCSTVANDVMLRTGLGVIRMWADEGSRNSRFQMLFTSFQEPPCEGNTFFCHSNMCINNTLVCNGLQNCVYPWDENHCKEKRKTSLLDQLTNTSGT

SEQ ID NO: 1663 - protein, 325 aa, synthetic construct
  REGION 1..325: note = NETO2 (Q8NC67) ECD
IAVAQKTQDGQNIGIKHIPATQCGIWVRTSNGGHFASPNYPDSYPPNKECIYILEAAPRQRIELTFDEHYYIEPSFECRFDHLEVRDGPFGFSPLIDRYCGVKSPPLIRSTGRFMWIKFSSDEELEGLGFRAKYSFIPDPDFTYLGGILNPIPDCQFELSGADGIVRSSQVEQEEKTKPGQAVDCIWTIKATPKAKIYLRFLDYQMEHSNECKRNFVAVYDGSSSIENLKAKFCSTVANDVMLKTGIGVIRMWADEGSRLSRFRMLFTSFVEPPCTSSTFFCHSNMCINNSLVCNGVQNCAYPWDENHCKEKKKAGVFEQITKTH

SEQ ID NO: 1664 - protein, 121 aa, synthetic construct
  REGION 1..121: note = NFAM1 (Q8NET5) ECD
QSVTHTGLPIMASLANTAISFSCRITYPYTPQFKVFTVSYFHEDLQGQRSPKKPTNCHPGLGTENQSHTLDCQVTLVLPGASATGTYYCSVHWPHSTVRGSGTFILVRDAGYREPPQSPQK

SEQ ID NO: 1665 - protein, 1193 aa, synthetic construct
  REGION 1..1193: note = NFASC (O94856) ECD
IEIPMDPSIQNELTQPPTITKQSAKDHIVDPRDNILIECEAKGNPAPSFHWTRNSRFFNIAKDPRVSMRRRSGTLVIDFRSGGRPEEYEGEYQCFARNKFGTALSNRIRLQVSKSPLWPKENLDPVVVQEGAPLTLQCNPPPGLPSPVIFWMSSSMEPITQDKRVSQGHNGDLYFSNVMLQDMQTDYSCNARFHFTHTIQQKNPFTLKVLTTRGVAERTPSFMYPQGTASSQMVLRGMDLLLECIASGVPTPDIAWYKKGGDLPSDKAKFENFNKALRITNVSEEDSGEYFCLASNKMGSIRHTISVRVKAAPYWLDEPKNLILAPGEDGRLVCRANGNPKPTVQWMVNGEPLQSAPPNPNREVAGDTIIFRDTQISSRAVYQCNTSNEHGYLLANAFVSVLDVPPRMLSPRNQLIRVILYNRTRLDCPFFGSPIPTLRWFKNGQGSNLDGGNYHVYENGSLEIKMIRKEDQGIYTCVATNILGKAENQVRLEVKDPTRIYRMPEDQVARRGTTVQLECRVKHDPSLKLTVSWLKDDEPLYIGNRMKKEDDSLTIFGVAERDQGSYTCVASTELDQDLAKAYLTVLADQATPTNRLAALPKGRPDRPRDLELTDLAERSVRLTWIPGDANNSPITDYVVQFEEDQFQPGVWHDHSKYPGSVNSAVLRLSPYVNYQFRVIAINEVGSSHPSLPSERYRTSGAPPESNPGDVKGEGTRKNNMEITWTPMNATSAFGPNLRYIVKWRRRETREAWNNVTVWGSRYVVGQTPVYVPYEIRVQAENDFGKGPEPESVIGYSGEDYPRAAPTEVKVRVMNSTAISLQWNRVYSDTVQGQLREYRAYYWRESSLLKNLWVSQKRQQASFPGDRLRGVVSRLFPYSNYKLEMVVVNGRGDGPRSETKEFTTPEGVPSAPRRFRVRQPNLETINLEWDHPEHPNGIMIGYTLKYVAFNGTKVGKQIVENFSPNQTKFTVQRTDPVSRYRFTLSARTQVGSGEAVTEESPAPPNEATPTAAPPTLPPTTVGATGAVSSTDATAIAATTEATTVPIIPTVAPTTIATTTTVATTTTTTAAATTTTESPPTTTSGTKIHESAPDEQSIWNVTVLPNSKWANITWKHNFGPGTDFVVEYIDSNHTKKTVPVKAQAQPIQLTDLYPGMTYTLRVYSRDNEGISSTVITFMTSTAYTNNQADIATQGW

SEQ ID NO: 1666 - protein, 222 aa, synthetic construct
  REGION 1..222: note = NGFR (P08138) ECD
KEACPTGLYTHSGECCKACNLGEGVAQPCGANQTVCEPCLDSVTFSDVVSATEPCKPCTECVGLQSMSAPCVEADDAVCRCAYGYYQDETTGRCEACRVCEAGSGLVFSCQDKQNTVCEECPDGTYSDEANHVDPCLPCTVCEDTERQLRECTRWADAECEEIPGRWITRSTPPEGSDSTAPSTQEPEAPPEQDLIASTVAGVVTTVMGSSQPVVTRGTTDN

SEQ ID NO: 1667 - protein, 672 aa, synthetic construct
  REGION 1..672: note = NLGN1 (Q8N2Q7) ECD
QKLDDVDPLVATNFGKIRGIKKELNNEILGPVIQFLGVPYAAPPTGERRFQPPEPPSPWSDIRNATQFAPVCPQNIIDGRLPEVMLPVWFTNNLDVVSSYVQDQSEDCLYLNIYVPTEDVKRISKECARKPGKKICRKGGPLTKKQTDDLGDNDGAEDEDIRDSGGPKPVMVYIHGGSYMEGTGNLYDGSVLASYGNVIVITVNYRLGVLGFLSTGDQAAKGNYGLLDLIQALRWTSENIGFFGGDPLRITVFGSGAGGSCVNLLTLSHYSEGNRWSNSTKGLFQRAIAQSGTALSSWAVSFQPAKYARMLATKVGCNVSDTVELVECLQKKPYKELVDQDIQPARYHIAFGPVIDGDVIPDDPQILMEQGEFLNYDIMLGVNQGEGLKFVENIVDSDDGISASDFDFAVSNFVDNLYGYPEGKDVLRETIKFMYTDWADRHNPETRRKTLLALFTDHQWVAPAVATADLHSNFGSPTYFYAFYHHCQTDQVPAWADAAHGDEVPYVLGIPMIGPTELFPCNFSKNDVMLSAVVMTYWTNFAKTGDPNQPVPQDTKFIHTKPNRFEEVAWTRYSQKDQLYLHIGLKPRVKEHYRANKVNLWLELVPHLHNLNDISQYTSTTTKVPSTDITFRPTRKNSVPVTSAFPTAKQDDPKQQPSPFSVDQRDYSTELS

SEQ ID NO: 1668 - protein, 663 aa, synthetic construct
  REGION 1..663: note = NLGN2 (Q8NFZ4) ECD
QRGGGGPGGGAPGGPGLGLGSLGEERFPVVNTAYGRVRGVRRELNNEILGPVVQFLGVPYATPPLGARRFQPPEAPASWPGVRNATTLPPACPQNLHGALPAIMLPVWFTDNLEAAATYVQNQSEDCLYLNLYVPTEDGPLTKKRDEATLNPPDTDIRDPGKKPVMLFLHGGSYMEGTGNMFDGSVLAAYGNVIVATLNYRLGVLGFLSTGDQAAKGNYGLLDQIQALRWLSENIAHFGGDPERITIFGSGAGASCVNLLILSHHSEGLFQKAIAQSGTAISSWSVNYQPLKYTRLLAAKVGCDREDSAEAVECLRRKPSRELVDQDVQPARYHIAFGPVVDGDVVPDDPEILMQQGEFLNYDMLIGVNQGEGLKFVEDSAESEDGVSASAFDFTVSNFVDNLYGYPEGKDVLRETIKFMYTDWADRDNGEMRRKTLLALFTDHQWVAPAVATAKLHADYQSPVYFYTFYHHCQAEGRPEWADAAHGDELPYVFGVPMVGATDLFPCNFSKNDVMLSAVVMTYWTNFAKTGDPNQPVPQDTKFIHTKPNRFEEVVWSKFNSKEKQYLHIGLKPRVRDNYRANKVAFWLELVPHLHNLHTELFTTTTRLPPYATRWPPRPPAGAPGTRRPPPPATLPPEPEPEPGPRAYDRFPGDSRDYSTELS

SEQ ID NO: 1669 - protein, 672 aa, synthetic construct
  REGION 1..672: note = NLGN3 (Q9NZ94) ECD
QAPAPTVNTHFGKLRGARVPLPSEILGPVDQYLGVPYAAPPIGEKRFLPPEPPPSWSGIRNATHFPPVCPQNIHTAVPEVMLPVWFTANLDIVATYIQEPNEDCLYLNVYVPTEDVKRISKECARKPNKKICRKGGSGAKKQGEDLADNDGDEDEDIRDSGAKPVMVYIHGGSYMEGTGNMIDGSILASYGNVIVITLNYRVGVLGFLSTGDQAAKGNYGLLDQIQALRWVSENIAFFGGDPRRITVFGSGIGASCVSLLTLSHHSEGLFQRAIIQSGSALSSWAVNYQPVKYTSLLADKVGCNVLDTVDMVDCLRQKSAKELVEQDIQPARYHVAFGPVIDGDVIPDDPEILMEQGEFLNYDIMLGVNQGEGLKFVEGVVDPEDGVSGTDFDYSVSNFVDNLYGYPEGKDTLRETIKFMYTDWADRDNPETRRKTLVALFTDHQWVEPSVVTADLHARYGSPTYFYAFYHHCQSLMKPAWSDAAHGDEVPYVFGVPMVGPTDLFPCNFSKNDVMLSAVVMTYWTNFAKTGDPNKPVPQDTKFIHTKANRFEEVAWSKYNPRDQLYLHIGLKPRVRDHYRATKVAFWKHLVPHLYNLHDMFHYTSTTTKVPPPDTTHSSHITRRPNGKTWSTKRPAISPAYSNENAQGSWNGDQDAGPLLVENPRDYSTELS

SEQ ID NO: 1670 - protein, 635 aa, synthetic construct
  REGION 1..635: note = NLGN4X (Q8N0W4) ECD
QAQYPVVNTNYGKIRGLRTPLPNEILGPVEQYLGVPYASPPTGERRFQPPEPPSSWTGIRNTTQFAAVCPQHLDERSLLHDMLPIWFTANLDTLMTYVQDQNEDCLYLNIYVPTEDDIHDQNSKKPVMVYIHGGSYMEGTGNMIDGSILASYGNVIVITINYRLGILGFLSTGDQAAKGNYGLLDQIQALRWIEENVGAFGGDPKRVTIFGSGAGASCVSLLTLSHYSEGLFQKAIIQSGTALSSWAVNYQPAKYTRILADKVGCNMLDTTDMVECLRNKNYKELIQQTITPATYHIAFGPVIDGDVIPDDPQILMEQGEFLNYDIMLGVNQGEGLKFVDGIVDNEDGVTPNDFDFSVSNFVDNLYGYPEGKDTLRETIKFMYTDWADKENPETRRKTLVALFTDHQWVAPAVATADLHAQYGSPTYFYAFYHHCQSEMKPSWADSAHGDEVPYVFGIPMIGPTELFSCNFSKNDVMLSAVVMTYWTNFAKTGDPNQPVPQDTKFIHTKPNRFEEVAWSKYNPKDQLYLHIGLKPRVRDHYRATKVAFWLELVPHLHNLNEIFQYVSTTTKVPPPDMTSFPYGTRRSPAKIWPTTKRPAITPANNPKHSKDPHKTGPEDTTVLIETKRDYSTELS

SEQ ID NO: 1671 - protein, 633 aa, synthetic construct
  REGION 1..633: note = NLGN4Y (Q8NFZ3) ECD
QYPVVNTNYGKIQGLRTPLPSEILGPVEQYLGVPYASPPTGERRFQPPESPSSWTGIRNATQFSAVCPQHLDERFLLHDMLPIWFTTSLDTLMTYVQDQNEDCLYLNIYVPMEDDIHEQNSKKPVMVYIHGGSYMEGTGNMIDGSILASYGNVIVITINYRLGILGFLSTGDQAAKGNYGLLDQIQALRWIEENVGAFGGDPKRVTIFGSGAGASCVSLLTLSHYSEGLFQKAIIQSGTALSSWAVNYQPAKYTRILADKVGCNMLDTTDMVECLKNKNYKELIQQTITPATYHIAFGPVIDGDVIPDDPQILMEQGEFLNYDIMLGVNQGEGLKFVDGIVDNEDGVTPNDFDFSVSNFVDNLYGYPEGKDTLRETIKFMYTDWADKENPETRRKTLVALFTDHQWVAPAVATADLHAQYGSPTYFYAFYHHCQSEMKPSWADSAHGDEVPYVFGIPMIGPTELFSCNFSKNDVMLSAVVMTYWTNFAKTGDPNQPVPQDTKFIHTKPNRFEEVAWSKYNPKDQLYLHIGLKPRVRDHYRATKVAFWLELVPHLHNLNEIFQYVSTTTKVPPPDMTSFPYGTRRSPAKIWPTTKRPAITPANNPKHSKDPHKTGPEDTTVLIETKRDYSTELS

SEQ ID NO: 1672 - protein, 1717 aa, synthetic construct
  REGION 1..1717: note = NOTCH1 (P46531) ECD
ARGPRCSQPGETCLNGGKCEAANGTEACVCGGAFVGPRCQDPNPCLSTPCKNAGTCHVVDRRGVADYACSCALGFSGPLCLTPLDNACLTNPCRNGGTCDLLTLTEYKCRCPPGWSGKSCQQADPCASNPCANGGQCLPFEASYICHCPPSFHGPTCRQDVNECGQKPGLCRHGGTCHNEVGSYRCVCRATHTGPNCERPYVPCSPSPCQNGGTCRPTGDVTHECACLPGFTGQNCEENIDDCPGNNCKNGGACVDGVNTYNCRCPPEWTGQYCTEDVDECQLMPNACQNGGTCHNTHGGYNCVCVNGWTGEDCSENIDDCASAACFHGATCHDRVASFYCECPHGRTGLLCHLNDACISNPCNEGSNCDTNPVNGKAICTCPSGYTGPACSQDVDECSLGANPCEHAGKCINTLGSFECQCLQGYTGPRCEIDVNECVSNPCQNDATCLDQIGEFQCICMPGYEGVHCEVNTDECASSPCLHNGRCLDKINEFQCECPTGFTGHLCQYDVDECASTPCKNGAKCLDGPNTYTCVCTEGYTGTHCEVDIDECDPDPCHYGSCKDGVATFTCLCRPGYTGHHCETNINECSSQPCRHGGTCQDRDNAYLCFCLKGTTGPNCEINLDDCASSPCDSGTCLDKIDGYECACEPGYTGSMCNINIDECAGNPCHNGGTCEDGINGFTCRCPEGYHDPTCLSEVNECNSNPCVHGACRDSLNGYKCDCDPGWSGTNCDINNNECESNPCVNGGTCKDMTSGYVCTCREGFSGPNCQTNINECASNPCLNQGTCIDDVAGYKCNCLLPYTGATCEVVLAPCAPSPCRNGGECRQSEDYESFSCVCPTGWQGQTCEVDINECVLSPCRHGASCQNTHGGYRCHCQAGYSGRNCETDIDDCRPNPCHNGGSCTDGINTAFCDCLPGFRGTFCEEDINECASDPCRNGANCTDCVDSYTCTCPAGFSGIHCENNTPDCTESSCFNGGTCVDGINSFTCLCPPGFTGSYCQHDVNECDSQPCLHGGTCQDGCGSYRCTCPQGYTGPNCQNLVHWCDSSPCKNGGKCWQTHTQYRCECPSGWTGLYCDVPSVSCEVAAQRQGVDVARLCQHGGLCVDAGNTHHCRCQAGYTGSYCEDLVDECSPSPCQNGATCTDYLGGYSCKCVAGYHGVNCSEEIDECLSHPCQNGGTCLDLPNTYKCSCPRGTQGVHCEINVDDCNPPVDPVSRSPKCFNNGTCVDQVGGYSCTCPPGFVGERCEGDVNECLSNPCDARGTQNCVQRVNDFHCECRAGHTGRRCESVINGCKGKPCKNGGTCAVASNTARGFICKCPAGFEGATCENDARTCGSLRCLNGGTCISGPRSPTCLCLGPFTGPECQFPASSPCLGGNPCYNQGTCEPTSESPFYRCLCPAKFNGLLCHILDYSFGGGAGRDIPPPLIEEACELPECQEDAGNKVCSLQCNNHACGWDGGDCSLNFNDPWKNCTQSLQCWKYFSDGHCDSQCNSAGCLFDGFDCQRAEGQCNPLYDQYCKDHFSDGHCDQGCNSAECEWDGLDCAEHVPERLAAGTLVVVVLMPPEQLRNSSFHFLRELSRVLHTNVVFKRDAHGQQMIFPYYGREEELRKHPIKRAAEGWAAPDALLGQVKASLLPGGSEGGRRRRELDPMDVRGSIVYLEIDNRQCVQASSQCFQSATDVAAFLGALASLGSLNIPYKIEAVQSETVEPPPPAQLH

SEQ ID NO: 1673 - protein, 1652 aa, synthetic construct
  REGION 1..1652: note = NOTCH2 (Q04721) ECD
LQCRDGYEPCVNEGMCVTYHNGTGYCKCPEGFLGEYCQHRDPCEKNRCQNGGTCVAQAMLGKATCRCASGFTGEDCQYSTSHPCFVSRPCLNGGTCHMLSRDTYECTCQVGFTGKECQWTDACLSHPCANGSTCTTVANQFSCKCLTGFTGQKCETDVNECDIPGHCQHGGTCLNLPGSYQCQCPQGFTGQYCDSLYVPCAPSPCVNGGTCRQTGDFTFECNCLPGFEGSTCERNIDDCPNHRCQNGGVCVDGVNTYNCRCPPQWTGQFCTEDVDECLLQPNACQNGGTCANRNGGYGCVCVNGWSGDDCSENIDDCAFASCTPGSTCIDRVASFSCMCPEGKAGLLCHLDDACISNPCHKGALCDTNPLNGQYICTCPQGYKGADCTEDVDECAMANSNPCEHAGKCVNTDGAFHCECLKGYAGPRCEMDINECHSDPCQNDATCLDKIGGFTCLCMPGFKGVHCELEINECQSNPCVNNGQCVDKVNRFQCLCPPGFTGPVCQIDIDDCSSTPCLNGAKCIDHPNGYECQCATGFTGVLCEENIDNCDPDPCHHGQCQDGIDSYTCICNPGYMGAICSDQIDECYSSPCLNDGRCIDLVNGYQCNCQPGTSGVNCEINFDDCASNPCIHGICMDGINRYSCVCSPGFTGQRCNIDIDECASNPCRKGATCINGVNGFRCICPEGPHHPSCYSQVNECLSNPCIHGNCTGGLSGYKCLCDAGWVGINCEVDKNECLSNPCQNGGTCDNLVNGYRCTCKKGFKGYNCQVNIDECASNPCLNQGTCFDDISGYTCHCVLPYTGKNCQTVLAPCSPNPCENAAVCKESPNFESYTCLCAPGWQGQRCTIDIDECISKPCMNHGLCHNTQGSYMCECPPGFSGMDCEEDIDDCLANPCQNGGSCMDGVNTFSCLCLPGFTGDKCQTDMNECLSEPCKNGGTCSDYVNSYTCKCQAGFDGVHCENNINECTESSCFNGGTCVDGINSFSCLCPVGFTGSFCLHEINECSSHPCLNEGTCVDGLGTYRCSCPLGYTGKNCQTLVNLCSRSPCKNKGTCVQKKAESQCLCPSGWAGAYCDVPNVSCDIAASRRGVLVEHLCQHSGVCINAGNTHYCQCPLGYTGSYCEEQLDECASNPCQHGATCSDFIGGYRCECVPGYQGVNCEYEVDECQNQPCQNGGTCIDLVNHFKCSCPPGTRGLLCEENIDDCARGPHCLNGGQCMDRIGGYSCRCLPGFAGERCEGDINECLSNPCSSEGSLDCIQLTNDYLCVCRSAFTGRHCETFVDVCPQMPCLNGGTCAVASNMPDGFICRCPPGFSGARCQSSCGQVKCRKGEQCVHTASGPRCFCPSPRDCESGCASSPCQHGGSCHPQRQPPYYSCQCAPPFSGSRCELYTAPPSTPPATCLSQYCADKARDGVCDEACNSHACQWDGGDCSLTMENPWANCSSPLPCWDYINNQCDELCNTVECLFDNFECQGNSKTCKYDKYCADHFKDNHCDQGCNSEECGWDGLDCAADQPENLAEGTLVIVVLMPPEQLLQDARSFLRALGTLLHTNLRIKRDSQGELMVYPYYGEKSAAMKKQRMTRRSLPGEQEQEVAGSKVFLEIDNRQCVQDSDHCFKNTDAAAALLASHAIQGTLSYPLVSVVSESLTPERTQ

SEQ ID NO: 1674 - protein, 1604 aa, synthetic construct
  REGION 1..1604: note = NOTCH3 (Q9UM47) ECD
APPCLDGSPCANGGRCTQLPSREAACLCPPGWVGERCQLEDPCHSGPCAGRGVCQSSVVAGTARFSCRCPRGFRGPDCSLPDPCLSSPCAHGARCSVGPDGRFLCSCPPGYQGRSCRSDVDECRVGEPCRHGGTCLNTPGSFRCQCPAGYTGPLCENPAVPCAPSPCRNGGTCRQSGDLTYDCACLPGFEGQNCEVNVDDCPGHRCLNGGTCVDGVNTYNCQCPPEWTGQFCTEDVDECQLQPNACHNGGTCFNTLGGHSCVCVNGWTGESCSQNIDDCATAVCFHGATCHDRVASFYCACPMGKTGLLCHLDDACVSNPCHEDAICDTNPVNGRAICTCPPGFTGGACDQDVDECSIGANPCEHLGRCVNTQGSFLCQCGRGYTGPRCETDVNECLSGPCRNQATCLDRIGQFTCICMAGFTGTYCEVDIDECQSSPCVNGGVCKDRVNGFSCTCPSGFSGSTCQLDVDECASTPCRNGAKCVDQPDGYECRCAEGFEGTLCDRNVDDCSPDPCHHGRCVDGIASFSCACAPGYTGTRCESQVDECRSQPCRHGGKCLDLVDKYLCRCPSGTTGVNCEVNIDDCASNPCTFGVCRDGINRYDCVCQPGFTGPLCNVEINECASSPCGEGGSCVDGENGFRCLCPPGSLPPLCLPPSHPCAHEPCSHGICYDAPGGFRCVCEPGWSGPRCSQSLARDACESQPCRAGGTCSSDGMGFHCTCPPGVQGRQCELLSPCTPNPCEHGGRCESAPGQLPVCSCPQGWQGPRCQQDVDECAGPAPCGPHGICTNLAGSFSCTCHGGYTGPSCDQDINDCDPNPCLNGGSCQDGVGSFSCSCLPGFAGPRCARDVDECLSNPCGPGTCTDHVASFTCTCPPGYGGFHCEQDLPDCSPSSCFNGGTCVDGVNSFSCLCRPGYTGAHCQHEADPCLSRPCLHGGVCSAAHPGFRCTCLESFTGPQCQTLVDWCSRQPCQNGGRCVQTGAYCLCPPGWSGRLCDIRSLPCREAAAQIGVRLEQLCQAGGQCVDEDSSHYCVCPEGRTGSHCEQEVDPCLAQPCQHGGTCRGYMGGYMCECLPGYNGDNCEDDVDECASQPCQHGGSCIDLVARYLCSCPPGTLGVLCEINEDDCGPGPPLDSGPRCLHNGTCVDLVGGFRCTCPPGYTGLRCEADINECRSGACHAAHTRDCLQDPGGGFRCLCHAGFSGPRCQTVLSPCESQPCQHGGQCRPSPGPGGGLTFTCHCAQPFWGPRCERVARSCRELQCPVGVPCQQTPRGPRCACPPGLSGPSCRSFPGSPPGASNASCAAAPCLHGGSCRPAPLAPFFRCACAQGWTGPRCEAPAAAPEVSEEPRCPRAACQAKRGDQRCDRECNSPGCGWDGGDCSLSVGDPWRQCEALQCWRLFNNSRCDPACSSPACLYDNFDCHAGGRERTCNPVYEKYCADHFADGRCDQGCNTEECGWDGLDCASEVPALLARGVLVLTVLLPPEELLRSSADFLQRLSAILRTSLRFRLDAHGQAMVFPYHRPSPGSEPRARRELAPEVIGSVVMLEIDNRLCLQSPENDHCFPDAQSAADYLGALSAVERLDFPYPLRDVRGEPLEPPEPSVPL

SEQ ID NO: 1675 - protein, 1424 aa, synthetic construct
  REGION 1..1424: note = NOTCH4 (Q99466) ECD
RGLLCGSFPEPCANGGTCLSLSLGQGTCQCAPGFLGETCQFPDPCQNAQLCQNGGSCQALLPAPLGLPSSPSPLTPSFLCTCLPGFTGERCQAKLEDPCPPSFCSKRGRCHIQASGRPQCSCMPGWTGEQCQLRDFCSANPCVNGGVCLATYPQIQCHCPPGFEGHACERDVNECFQDPGPCPKGTSCHNTLGSFQCLCPVGQEGPRCELRAGPCPPRGCSNGGTCQLMPEKDSTFHLCLCPPGFIGPDCEVNPDNCVSHQCQNGGTCQDGLDTYTCLCPETWTGWDCSEDVDECETQGPPHCRNGGTCQNSAGSFHCVCVSGWGGTSCEENLDDCIAATCAPGSTCIDRVGSFSCLCPPGRTGLLCHLEDMCLSQPCHGDAQCSTNPLTGSTLCLCQPGYSGPTCHQDLDECLMAQQGPSPCEHGGSCLNTPGSFNCLCPPGYTGSRCEADHNECLSQPCHPGSTCLDLLATFHCLCPPGLEGQLCEVETNECASAPCLNHADCHDLLNGFQCICLPGFSGTRCEEDIDECRSSPCANGGQCQDQPGAFHCKCLPGFEGPRCQTEVDECLSDPCPVGASCLDLPGAFFCLCPSGFTGQLCEVPLCAPNLCQPKQICKDQKDKANCLCPDGSPGCAPPEDNCTCHHGHCQRSSCVCDVGWTGPECEAELGGCISAPCAHGGTCYPQPSGYNCTCPTGYTGPTCSEEMTACHSGPCLNGGSCNPSPGGYYCTCPPSHTGPQCQTSTDYCVSAPCFNGGTCVNRPGTFSCLCAMGFQGPRCEGKLRPSCADSPCRNRATCQDSPQGPRCLCPTGYTGGSCQTLMDLCAQKPCPRNSHCLQTGPSFHCLCLQGWTGPLCNLPLSSCQKAALSQGIDVSSLCHNGGLCVDSGPSYFCHCPPGFQGSLCQDHVNPCESRPCQNGATCMAQPSGYLCQCAPGYDGQNCSKELDACQSQPCHNHGTCTPKPGGFHCACPPGFVGLRCEGDVDECLDQPCHPTGTAACHSLANAFYCQCLPGHTGQWCEVEIDPCHSQPCFHGGTCEATAGSPLGFICHCPKGFEGPTCSHRAPSCGFHHCHHGGLCLPSPKPGFPPRCACLSGYGGPDCLTPPAPKGCGPPSPCLYNGSCSETTGLGGPGFRCSCPHSSPGPRCQKPGAKGCEGRSGDGACDAGCSGPGGNWDGGDCSLGVPDPWKGCPSHSRCWLLFRDGQCHPQCDSEECLFDGYDCETPPACTPAYDQYCHDHFHNGHCEKGCNTAECGWDGGDCRPEDGDPEWGPSLALLVVLSPPALDQQLFALARVLSLTLRVGLWVRKDRDGRDMVYPYPGARAEEKLGGTRDPTYQERAAPQTQPLGKETDSLSAGFVVVMGVDLSRCGPDHPASRCPWDPGLLLRFLAAMAAVGALEPLLPGPLLAVHPHAGTAPPANQLPW

SEQ ID NO: 1676 - protein, 1033 aa, synthetic construct
  REGION 1..1033: note = NPHS1 (O60500) ECD
QLAIPASVPRGFWALPENLTVVEGASVELRCGVSTPGSAVQWAKDGLLLGPDPRIPGFPRYRLEGDPARGEFHLHIEACDLSDDAEYECQVGRSEMGPELVSPRVILSILVPPKLLLLTPEAGTMVTWVAGQEYVVNCVSGDAKPAPDITILLSGQTISDISANVNEGSQQKLFTVEATARVTPRSSDNRQLLVCEASSPALEAPIKASFTVNVLFPPGPPVIEWPGLDEGHVRAGQSLELPCVARGGNPLATLQWLKNGQPVSTAWGTEHTQAVARSVLVMTVRPEDHGAQLSCEAHNSVSAGTQEHGITLQVTFPPSAIIILGSASQTENKNVTLSCVSKSSRPRVLLRWWLGWRQLLPMEETVMDGLHGGHISMSNLTFLARREDNGLTLTCEAFSEAFTKETFKKSLILNVKYPAQKLWIEGPPEGQKLRAGTRVRLVCLAIGGNPEPSLMWYKDSRTVTESRLPQESRRVHLGSVEKSGSTFSRELVLVTGPSDNQAKFTCKAGQLSASTQLAVQFPPTNVTILANASALRPGDALNLTCVSVSSNPPVNLSWDKEGERLEGVAAPPRRAPFKGSAAARSVLLQVSSRDHGQRVTCRAHSAELRETVSSFYRLNVLYRPEFLGEQVLVVTAVEQGEALLPVSVSANPAPEAFNWTFRGYRLSPAGGPRHRILSSGALHLWNVTRADDGLYQLHCQNSEGTAEARLRLDVHYAPTIRALQDPTEVNVGGSVDIVCTVDANPILPGMFNWERLGEDEEDQSLDDMEKISRGPTGRLRIHHAKLAQAGAYQCIVDNGVAPPARRLLRLVVRFAPQVEHPTPLTKVAAAGDSTSSATLHCRARGVPNIVFTWTKNGVPLDLQDPRYTEHTYHQGGVHSSLLTIANVSAAQDYALFTCTATNALGSDQTNIQLVSISRPDPPSGLKVVSLTPHSVGLEWKPGFDGGLPQRFCIRYEALGTPGFHYVDVVPPQATTFTLTGLQPSTRYRVWLLASNALGDSGLADKGTQLPITTPGLHQPSGEPEDQLPTEPPS

SEQ ID NO: 1677 - protein, 441 aa, synthetic construct
  REGION 1..441: note = NPR1 (P16066) ECD
GNLTVAVVLPLANTSYPWSWARVGPAVELALAQVKARPDLLPGWTVRTVLGSSENALGVCSDTAAPLAAVDLKWEHNPAVFLGPGCVYAAAPVGRFTAHWRVPLLTAGAPALGFGVKDEYALTTRAGPSYAKLGDFVAALHRRLGWERQALMLYAYRPGDEEHCFFLVEGLFMRVRDRLNITVDHLEFAEDDLSHYTRLLRTMPRKGRVIYICSSPDAFRTLMLLALEAGLCGEDYVFFHLDIFGQSLQGGQGPAPRRPWERGDGQDVSARQAFQAAKIITYKDPDNPEYLEFLKQLKHLAYEQFNFTMEDGLVNTIPASFHDGLLLYIQAVTETLAHGGTVTDGENITQRMWNRSFQGVTGYLKIDSSGDRETDFSLWDMDPENGAFRVVLNYNGTSQELVAVSGRKLNWPLGYPPPDIPKCGFDNEDPACNQDHLSTLE

SEQ ID NO: 1678 - protein, 436 aa, synthetic construct
  REGION 1..436: note = NPR2 (P20594) ECD
RNLTLAVVLPEHNLSYAWAWPRVGPAVALAVEALGRALPVDLRFVSSELEGACSEYLAPLSAVDLKLYHDPDLLLGPGCVYPAASVARFASHWRLPLLTAGAVASGFSAKNDHYRTLVRTGPSAPKLGEFVVTLHGHFNWTARAALLYLDARTDDRPHYFTIEGVFEALQGSNLSVQHQVYAREPGGPEQATHFIRANGRIVYICGPLEMLHEILLQAQRENLTNGDYVFFYLDVFGESLRAGPTRATGRPWQDNRTREQAQALREAFQTVLVITYREPPNPEYQEFQNRLLIRAREDFGVELGPSLMNLIAGCFYDGILLYAEVLNETIQEGGTREDGLRIVEKMQGRRYHGVTGLVVMDKNNDRETDFVLWAMGDLDSGDFQPAAHYSGAEKQIWWTGRPIPWVKGAPPSDNPPCAFDLDDPSCDKTPLSTLAI

SEQ ID NO: 1679 - protein, 455 aa, synthetic construct
  REGION 1..455: note = NPR3 (P17342) ECD
GGVGGGGGGAGIGGGRQEREALPPQKIEVLVLLPQDDSYLFSLTRVRPAIEYALRSVEGNGTGRRLLPPGTRFQVAYEDSDCGNRALFSLVDRVAAARGAKPDLILGPVCEYAAAPVARLASHWDLPMLSAGALAAGFQHKDSEYSHLTRVAPAYAKMGEMMLALFRHHHWSRAALVYSDDKLERNCYFTLEGVHEVFQEEGLHTSIYSFDETKDLDLEDIVRNIQASERVVIMCASSDTIRSIMLVAHRHGMTSGDYAFFNIELFNSSSYGDGSWKRGDKHDFEAKQAYSSLQTVTLLRTVKPEFEKFSMEVKSSVEKQGLNMEDYVNMFVEGFHDAILLYVLALHEVLRAGYSKKDGGKIIQQTWNRTFEGIAGQVSIDANGDRYGDFSVIAMTDVEAGTQEVIGDYFGKEGRFEMRPNVKYPWGPLKLRIDENRIVEHTNSSPCKSSGGLEE

SEQ ID NO: 1680 - protein, 311 aa, synthetic construct
  REGION 1..311: note = NPTN (Q9Y639) ECD
QNAGFVKSPMSETKLTGDAFELYCDVVGSPTPEIQWWYAEVNRAESFRQLWDGARKRRVTVNTAYGSNGVSVLRITRLTLEDSGTYECRASNDPKRNDLRQNPSITWIRAQATISVLQKPRIVTSEEVIIRDSPVLPVTLQCNLTSSSHTLTYSYWTKNGVELSATRKNASNMEYRINKPRAEDSGEYHCVYHFVSAPKANATIEVKAAPDITGHKRSENKNEGQDATMYCKSVGYPHPDWIWRKKENGMPMDIVNTSGRFFIINKENYTELNIVNLQITEDPGEYECNATNAIGSASVVTVLRVRSHLAP

SEQ ID NO: 1681 - protein, 1143 aa, synthetic construct
  REGION 1..1143: note = NRCAM (Q92823) ECD
QMISALEVPLDPKLLEDLVQPPTITQQSPKDYIIDPRENIVIQCEAKGKPPPSFSWTRNGTHFDIDKDPLVTMKPGTGTLIINIMSEGKAETYEGVYQCTARNERGAAVSNNIVVRPSRSPLWTKEKLEPITLQSGQSLVLPCRPPIGLPPPIIFWMDNSFQRLPQSERVSQGLNGDLYFSNVLPEDTREDYICYARFNHTQTIQQKQPISVKVISVDELNDTIAANLSDTEFYGAKSSRERPPTFLTPEGNASNKEELRGNVLSLECIAEGLPTPIIYWAKEDGMLPKNRTVYKNFEKTLQIIHVSEADSGNYQCIAKNALGAIHHTISVRVKAAPYWITAPQNLVLSPGEDGTLICRANGNPKPRISWLTNGVPIEIAPDDPSRKIDGDTIIFSNVQERSSAVYQCNASNEYGYLLANAFVNVLAEPPRILTPANTLYQVIANRPALLDCAFFGSPLPTIEWFKGAKGSALHEDIYVLHENGTLEIPVAQKDSTGTYTCVARNKLGMAKNEVHLEIKDPTWIVKQPEYAVVQRGSMVSFECKVKHDHTLSLTVLWLKDNRELPSDERFTVDKDHLVVADVSDDDSGTYTCVANTTLDSVSASAVLSVVAPTPTPAPVYDVPNPPFDLELTDQLDKSVQLSWTPGDDNNSPITKFIIEYEDAMHKPGLWHHQTEVSGTQTTAQLKLSPYVNYSFRVMAVNSIGKSLPSEASEQYLTKASEPDKNPTAVEGLGSEPDNLVITWKPLNGFESNGPGLQYKVSWRQKDGDDEWTSVVVANVSKYIVSGTPTFVPYLIKVQALNDMGFAPEPAVVMGHSGEDLPMVAPGNVRVNVVNSTLAEVHWDPVPLKSIRGHLQGYRIYYWKTQSSSKRNRRHIEKKILTFQGSKTHGMLPGLEPFSHYTLNVRVVNGKGEGPASPDRVFNTPEGVPSAPSSLKIVNPTLDSLTLEWDPPSHPNGILTEYTLKYQPINSTHELGPLVDLKIPANKTRWTLKNLNFSTRYKFYFYAQTSAGSGSQITEEAVTTVDEAGILPPDVGAGKVQAVNPRISNLTAAAAETYANISWEYEGPEHVNFYVEYGVAGSKEEWRKEIVNGSRSFFGLKGLMPGTAYKVRVGAVGDSGFVSSEDVFETGPAMASRQVDIATQ

SEQ ID NO: 1682 - protein, 835 aa, synthetic construct
  REGION 1..835: note = NRP1 (O14786) ECD
FRNDKCGDTIKIESPGYLTSPGYPHSYHPSEKCEWLIQAPDPYQRIMINFNPHFDLEDRDCKYDYVEVFDGENENGHFRGKFCGKIAPPPVVSSGPFLFIKFVSDYETHGAGFSIRYEIFKRGPECSQNYTTPSGVIKSPGFPEKYPNSLECTYIVFVPKMSEIILEFESFDLEPDSNPPGGMFCRYDRLEIWDGFPDVGPHIGRYCGQKTPGRIRSSSGILSMVFYTDSAIAKEGFSANYSVLQSSVSEDFKCMEALGMESGEIHSDQITASSQYSTNWSAERSRLNYPENGWTPGEDSYREWIQVDLGLLRFVTAVGTQGAISKETKKKYYVKTYKIDVSSNGEDWITIKEGNKPVLFQGNTNPTDVVVAVFPKPLITRFVRIKPATWETGISMRFEVYGCKITDYPCSGMLGMVSGLISDSQITSSNQGDRNWMPENIRLVTSRSGWALPPAPHSYINEWLQIDLGEEKIVRGIIIQGGKHRENKVFMRKFKIGYSNNGSDWKMIMDDSKRKAKSFEGNNNYDTPELRTFPALSTRFIRIYPERATHGGLGLRMELLGCEVEAPTAGPTTPNGNLVDECDDDQANCHSGTGDDFQLTGGTTVLATEKPTVIDSTIQSEFPTYGFNCEFGWGSHKTFCHWEHDNHVQLKWSVLTSKTGPIQDHTGDGNFIYSQADENQKGKVARLVSPVVYSQNSAHCMTFWYHMSGSHVGTLRVKLRYQKPEEYDQLVWMAIGHQGDHWKEGRVLLHKSLKLYQVIFEGEIGKGNLGGIAVDDISINNHISQEDCAKPADLDKKNPEIKIDETGSTPGYEGEGEGDKNISRKPGNVLKTLDP

SEQ ID NO: 1683 - protein, 844 aa, synthetic construct
  REGION 1..844: note = NRP2 (O60462) ECD
RGQPDPPCGGRLNSKDAGYITSPGYPQDYPSHQNCEWIVYAPEPNQKIVLNFNPHFEIEKHDCKYDFIEIRDGDSESADLLGKHCGNIAPPTIISSGSMLYIKFTSDYARQGAGFSLRYEIFKTGSEDCSKNFTSPNGTIESPGFPEKYPHNLDCTFTILAKPKMEIILQFLIFDLEHDPLQVGEGDCKYDWLDIWDGIPHVGPLIGKYCGTKTPSELRSSTGILSLTFHTDMAVAKDGFSARYYLVHQEPLENFQCNVPLGMESGRIANEQISASSTYSDGRWTPQQSRLHGDDNGWTPNLDSNKEYLQVDLRFLTMLTAIATQGAISRETQNGYYVKSYKLEVSTNGEDWMVYRHGKNHKVFQANNDATEVVLNKLHAPLLTRFVRIRPQTWHSGIALRLELFGCRVTDAPCSNMLGMLSGLIADSQISASSTQEYLWSPSAARLVSSRSGWFPRIPQAQPGEEWLQVDLGTPKTVKGVIIQGARGGDSITAVEARAFVRKFKVSYSLNGKDWEYIQDPRTQQPKLFEGNMHYDTPDIRRFDPIPAQYVRVYPERWSPAGIGMRLEVLGCDWTDSKPTVETLGPTVKSEETTTPYPTEEEATECGENCSFEDDKDLQLPSGFNCNFDFLEEPCGWMYDHAKWLRTTWASSSSPNDRTFPDDRNFLRLQSDSQREGQYARLISPPVHLPRSPVCMEFQYQATGGRGVALQVVREASQESKLLWVIREDQGGEWKHGRIILPSYDMEYQIVFEGVIGKGRSGEIAIDDIRISTDVPLENCMEPISAFAGENFKVDIPEIHEREGYEDEIDDEYEVDWSNSSSATSGSGAPSTDKEKSWLYTLDP

SEQ ID NO: 1684 - protein, 632 aa, synthetic construct
  REGION 1..632: note = NRROS (Q86YC3) ECD
WRNRSGTATAASQGVCKLVGGAADCRGQSLASVPSSLPPHARMLTLDANPLKTLWNHSLQPYPLLESLSLHSCHLERISRGAFQEQGHLRSLVLGDNCLSENYEETAAALHALPGLRRLDLSGNALTEDMAALMLQNLSSLRSVSLAGNTIMRLDDSVFEGLERLRELDLQRNYIFEIEGGAFDGLAELRHLNLAFNNLPCIVDFGLTRLRVLNVSYNVLEWFLATGGEAAFELETLDLSHNQLLFFPLLPQYSKLRTLLLRDNNMGFYRDLYNTSSPREMVAQFLLVDGNVTNITTVSLWEEFSSSDLADLRFLDMSQNQFQYLPDGFLRKMPSLSHLNLHQNCLMTLHIREHEPPGALTELDLSHNQLSELHLAPGLASCLGSLRLFNLSSNQLLGVPPGLFANARNITTLDMSHNQISLCPLPAASDRVGPPSCVDFRNMASLRSLSLEGCGLGALPDCPFQGTSLTYLDLSSNWGVLNGSLAPLQDVAPMLQVLSLRNMGLHSSFMALDFSGFGNLRDLDLSGNCLTTFPRFGGSLALETLDLRRNSLTALPQKAVSEQLSRGLRTIYLSQNPYDCCGVDGWGALQHGQTVADWAMVTCNLSSKIIRVTELPGGVPRDCKWERLDLGL

SEQ ID NO: 1685 - protein, 346 aa, synthetic construct
  REGION 1..346: note = NRXN1 (P58400) ECD
ASSLGAHHIHHFHGSSKHHSVPIAIYRSPASLRGGHAGTTYIFSKGGGQITYKWPPNDRPSTRADRLAIGFSTVQKEAVLVRVDSSSGLGDYLELHIHQGKIGVKFNVGTDDIAIEESNAIINDGKYHVVRFTRSGGNATLQVDSWPVIERYPAGNNDNERLAIARQRIPYRLGRVVDEWLLDKGRQLTIFNSQATIIIGGKEQGQPFQGQLSGLYYNGLKVLNMAAENDANIAIVGNVRLVGEVPSSMTTESTATAMQSEMSTSIMETTTTLATSTARRGKPPTKEPISQTTDDILVASAECPSDDEDIDPCEPSSGGLANPTRAGGREPYPGSAEVIRESSSTT

SEQ ID NO: 1686 - protein, 1371 aa, synthetic construct
  REGION 1..1371: note = NRXN1 (Q9ULB1) ECD
LEFPGAEGQWTRFPKWNACCESEMSFQLKTRSARGLVLYFDDEGFCDFLELILTRGGRLQLSFSIFCAEPATLLADTPVNDGAWHSVRIRRQFRNTTLFIDQVEAKWVEVKSKRRDMTVFSGLFVGGLPPELRAAALKLTLASVREREPFKGWIRDVRVNSSQVLPVDSGEVKLDDEPPNSGGGSPCEAGEEGEGGVCLNGGVCSVVDDQAVCDCSRTGFRGKDCSQEDNNVEGLAHLMMGDQGKSKGKEEYIATFKGSEYFCYDLSQNPIQSSSDEITLSFKTLQRNGLMLHTGKSADYVNLALKNGAVSLVINLGSGAFEALVEPVNGKFNDNAWHDVKVTRNLRQHSGIGHAMVTISVDGILTTTGYTQEDYTMLGSDDFFYVGGSPSTADLPGSPVSNNFMGCLKEVVYKNNDVRLELSRLAKQGDPKMKIHGVVAFKCENVATLDPITFETPESFISLPKWNAKKTGSISFDFRTTEPNGLILFSHGKPRHQKDAKHPQMIKVDFFAIEMLDGHLYLLLDMGSGTIKIKALLKKVNDGEWYHVDFQRDGRSGTISVNTLRTPYTAPGESEILDLDDELYLGGLPENKAGLVFPTEVWTALLNYGYVGCIRDLFIDGQSKDIRQMAEVQSTAGVKPSCSKETAKPCLSNPCKNNGMCRDGWNRYVCDCSGTGYLGRSCEREATVLSYDGSMFMKIQLPVVMHTEAEDVSLRFRSQRAYGILMATTSRDSADTLRLELDAGRVKLTVNLDCIRINCNSSKGPETLFAGYNLNDNEWHTVRVVRRGKSLKLTVDDQQAMTGQMAGDHTRLEFHNIETGIITERRYLSSVPSNFIGHLQSLTFNGMAYIDLCKNGDIDYCELNARFGFRNIIADPVTFKTKSSYVALATLQAYTSMHLFFQFKTTSLDGLILYNSGDGNDFIVVELVKGYLHYVFDLGNGANLIKGSSNKPLNDNQWHNVMISRDTSNLHTVKIDTKITTQITAGARNLDLKSDLYIGGVAKETYKSLPKLVHAKEGFQGCLASVDLNGRLPDLISDALFCNGQIERGCEGPSTTCQEDSCSNQGVCLQQWDGFSCDCSMTSFSGPLCNDPGTTYIFSKGGGQITYKWPPNDRPSTRADRLAIGFSTVQKEAVLVRVDSSSGLGDYLELHIHQGKIGVKFNVGTDDIAIEESNAIINDGKYHVVRFTRSGGNATLQVDSWPVIERYPAGRQLTIFNSQATIIIGGKEQGQPFQGQLSGLYYNGLKVLNMAAENDANIAIVGNVRLVGEVPSSMTTESTATAMQSEMSTSIMETTTTLATSTARRGKPPTKEPISQTTDDILVASAECPSDDEDIDPCEPSSGGLANPTRAGGREPYPGSAEVIRESSSTT

SEQ ID NO: 1687 - protein, 540 aa, synthetic construct
  REGION 1..540: note = NRXN2 (P58401) ECD
ARVSSSLSTTHHVHHFHSKHGTVPIAINRMPFLTRGGHAGTTYIFGKGGALITYTWPPNDRPSTRMDRLAVGFSTHQRSAVLVRVDSASGLGDYLQLHIDQGTVGVIFNVGTDDITIDEPNAIVSDGKYHVVRFTRSGGNATLQVDSWPVNERYPAGNFDNERLAIARQRIPYRLGRVVDEWLLDKGRQLTIFNSQAAIKIGGRDQGRPFQGQVSGLYYNGLKVLALAAESDPNVRTEGHLRLVGEGPSVLLSAETTATTLLADMATTIMETTTTMATTTTRRGRSPTLRDSTTQNTDDLLVASAECPSDDEDLEECEPSTGGELILPIITEDSLDPPPVATRSPFVPPPPTFYPFLTGVGATQDTLPPPAARRPPSGGPCQAERDDSDCEEPIEASGFASGEVFDSSLPPTDDEDFYTTFPLVTDRTTLLSPRKPAPRPNLRTDGATGAPGVLFAPSAPAPNLPAGKMNHRDPLQPLLENPPLGPGAPTSFEPRRPPPLRPGVTSAPGFPHLPTANPTGPGERGPPGAVEVIRESSSTT

SEQ ID NO: 1688 - protein, 1608 aa, synthetic construct
  REGION 1..1608: note = NRXN2 (Q9P2S2) ECD
LEFGGGPGQWARYARWAGAASSGELSFSLRTNATRALLLYLDDGGDCDFLELLLVDGRLRLRFTLSCAEPATLQLDTPVADDRWHMVLLTRDARRTALAVDGEARAAEVRSKRREMQVASDLFVGGIPPDVRLSALTLSTVKYEPPFRGLLANLKLGERPPALLGSQGLRGATADPLCAPARNPCANGGLCTVLAPGEVGCDCSHTGFGGKFCSEEEHPMEGPAHLTLNSEVGSLLFSEGGAGRGGAGDVHQPTKGKEEFVATFKGNEFFCYDLSHNPIQSSTDEITLAFRTLQRNGLMLHTGKSADYVNLSLKSGAVWLVINLGSGAFEALVEPVNGKFNDNAWHDVRVTRNLRQHAGIGHAMVNKLHYLVTISVDGILTTTGYTQEDYTMLGSDDFFYIGGSPNTADLPGSPVSNNFMGCLKDVVYKNNDFKLELSRLAKEGDPKMKLQGDLSFRCEDVAALDPVTFESPEAFVALPRWSAKRTGSISLDFRTTEPNGLLLFSQGRRAGGGAGSHSSAQRADYFAMELLDGHLYLLLDMGSGGIKLRASSRKVNDGEWCHVDFQRDGRKGSISVNSRSTPFLATGDSEILDLESELYLGGLPEGGRVDLPLPPEVWTAALRAGYVGCVRDLFIDGRSRDLRGLAEAQGAVGVAPFCSRETLKQCASAPCRNGGVCREGWNRFICDCIGTGFLGRVCEREATVLSYDGSMYMKIMLPNAMHTEAEDVSLRFMSQRAYGLMMATTSRESADTLRLELDGGQMKLTVNLDCLRVGCAPSKGPETLFAGHKLNDNEWHTVRVVRRGKSLQLSVDNVTVEGQMAGAHMRLEFHNIETGIMTERRFISVVPSNFIGHLSGLVFNGQPYMDQCKDGDITYCELNARFGLRAIVADPVTFKSRSSYLALATLQAYASMHLFFQFKTTAPDGLLLFNSGNGNDFIVIELVKGYIHYVFDLGNGPSLMKGNSDKPVNDNQWHNVVVSRDPGNVHTLKIDSRTVTQHSNGARNLDLKGELYIGGLSKNMFSNLPKLVASRDGFQGCLASVDLNGRLPDLIADALHRIGQVERGCDGPSTTCTEESCANQGVCLQQWDGFTCDCTMTSYGGPVCNDPGTTYIFGKGGALITYTWPPNDRPSTRMDRLAVGFSTHQRSAVLVRVDSASGLGDYLQLHIDQGTVGVIFNVGTDDITIDEPNAIVSDGKYHVVRFTRSGGNATLQVDSWPVNERYPAGNFDNERLAIARQRIPYRLGRVVDEWLLDKGRQLTIFNSQAAIKIGGRDQGRPFQGQVSGLYYNGLKVLALAAESDPNVRTEGHLRLVGEGPSVLLSAETTATTLLADMATTIMETTTTMATTTTRRGRSPTLRDSTTQNTDDLLVASAECPSDDEDLEECEPSTGGELILPIITEDSLDPPPVATRSPFVPPPPTFYPFLTGVGATQDTLPPPAARRPPSGGPCQAERDDSDCEEPIEASGFASGEVFDSSLPPTDDEDFYTTFPLVTDRTTLLSPRKPAPRPNLRTDGATGAPGVLFAPSAPAPNLPAGKMNHRDPLQPLLENPPLGPGAPTSFEPRRPPPLRPGVTSAPGFPHLPTANPTGPGERGPPGAVEVIRESSSTT

SEQ ID NO: 1689 - protein, 527 aa, synthetic construct
  REGION 1..527: note = NRXN3 (Q9HDB5) ECD
SSNVASSSSTSSSPGSHSQHEHHFHGSKHHSVPISIYRSPVSLRGGHAGATYIFGKSGGLILYTWPANDRPSTRSDRLAVGFSTTVKDGILVRIDSAPGLGDFLQLHIEQGKIGVVFNIGTVDISIKEERTPVNDGKYHVVRFTRNGGNATLQVDNWPVNEHYPTGRQLTIFNTQAQIAIGGKDKGRLFQGQLSGLYYDGLKVLNMAAENNPNIKINGSVRLVGEVPSILGTTQTTSMPPEMSTTVMETTTTMATTTTRKNRSTASIQPTSDDLVSSAECSSDDEDFVECEPSTGGELVIPLLVEDPLATPPIATRAPSITLPPTFRPLLTIIETTKDSLSMTSEAGLPCLSDQGSDGCDDDGLVISGYGSGETFDSNLPPTDDEDFYTTFSLVTDKSLSTSIFEGGYKAHAPKWESKDFRPNKVSETSRTTTTSLSPELIRFTASSSSGMVPKLPAGKMNNRDLKPQPDIVLLPLPTAYELDSTKLKSPLITSPMFRNVPTANPTEPGIRRVPGASEVIRESSSTT

SEQ ID NO: 1690 - protein, 1541 aa, synthetic construct
  REGION 1..1541: note = NRXN3 (Q9Y4C0) ECD
LEFMGLPNQWARYLRWDASTRSDLSFQFKTNVSTGLLLYLDDGGVCDFLCLSLVDGRVQLRFSMDCAETAVLSNKQVNDSSWHFLMVSRDRLRTVLMLDGEGQSGELQPQRPYMDVVSDLFLGGVPTDIRPSALTLDGVQAMPGFKGLILDLKYGNSEPRLLGSRGVQMDAEGPCGERPCENGGICFLLDGHPTCDCSTTGYGGKLCSEDVSQDPGLSHLMMSEQAREENVATFRGSEYLCYDLSQNPIQSSSDEITLSFKTWQRNGLILHTGKSADYVNLALKDGAVSLVINLGSGAFEAIVEPVNGKFNDNAWHDVKVTRNLRQVTISVDGILTTTGYTQEDYTMLGSDDFFYVGGSPSTADLPGSPVSNNFMGCLKEVVYKNNDIRLELSRLARIADTKMKIYGEVVFKCENVATLDPINFETPEAYISLPKWNTKRMGSISFDFRTTEPNGLILFTHGKPQERKDARSQKNTKVDFFAVELLDGNLYLLLDMGSGTIKVKATQKKANDGEWYHVDIQRDGRSGTISVNSRRTPFTASGESEILDLEGDMYLGGLPENRAGLILPTELWTAMLNYGYVGCIRDLFIDGRSKNIRQLAEMQNAAGVKSSCSRMSAKQCDSYPCKNNAVCKDGWNRFICDCTGTGYWGRTCEREASILSYDGSMYMKIIMPMVMHTEAEDVSFRFMSQRAYGLLVATTSRDSADTLRLELDGGRVKLMVNLDCIRINCNSSKGPETLYAGQKLNDNEWHTVRVVRRGKSLKLTVDDDVAEGTMVGDHTRLEFHNIETGIMTEKRYISVVPSSFIGHLQSLMFNGLLYIDLCKNGDIDYCELKARFGLRNIIADPVTFKTKSSYLSLATLQAYTSMHLFFQFKTTSPDGFILFNSGDGNDFIAVELVKGYIHYVFDLGNGPNVIKGNSDRPLNDNQWHNVVITRDNSNTHSLKVDTKVVTQVINGAKNLDLKGDLYMAGLAQGMYSNLPKLVASRDGFQGCLASVDLNGRLPDLINDALHRSGQIERGCEGPSTTCQEDSCANQGVCMQQWEGFTCDCSMTSYSGNQCNDPGATYIFGKSGGLILYTWPANDRPSTRSDRLAVGFSTTVKDGILVRIDSAPGLGDFLQLHIEQGKIGVVFNIGTVDISIKEERTPVNDGKYHVVRFTRNGGNATLQVDNWPVNEHYPTGRQLTIFNTQAQIAIGGKDKGRLFQGQLSGLYYDGLKVLNMAAENNPNIKINGSVRLVGEVPSILGTTQTTSMPPEMSTTVMETTTTMATTTTRKNRSTASIQPTSDDLVSSAECSSDDEDFVECEPSTTGGELVIPLLVEDPLATPPIATRAPSITLPPTFRPLLTIIETTKDSLSMTSEAGLPCLSDQGSDGCDDDGLVISGYGSGETFDSNLPPTDDEDFYTTFSLVTDKSLSTSIFEGGYKAHAPKWESKDFRPNKVSETSRTTTTSLSPELIRFTASSSSGMVPKLPAGKMNNRDLKPQPDIVLLPLPTAYELDSTKLKSPLITSPMFRNVPTANPTEPGIRRVPGASEVIRESSSTT

SEQ ID NO: 1691 - protein, 391 aa, synthetic construct
  REGION 1..391: note = NTRK1 (P04629) ECD
AAPCPDACCPHGSSGLRCTRDGALDSLHHLPGAENLTELYIENQQHLQHLELRDLRGLGELRNLTIVKSGLRFVAPDAFHFTPRLSRLNLSFNALESLSWKTVQGLSLQELVLSGNPLHCSCALRWLQRWEEEGLGGVPEQKLQCHGQGPLAHMPNASCGVPTLKVQVPNASVDVGDDVLLRCQVEGRGLEQAGWILTELEQSATVMKSGGLPSLGLTLANVTSDLNRKNVTCWAENDVGRAEVSVQVNVSFPASVQLHTAVEMHHWCIPFSVDGQPAPSLRWLFNGSVLNETSFIFTEFLEPAANETVRHGCLRLNQPTHVNNGNYTLLAANPFGQASASIMAAFMDNPFEFNPEDPIPVSFSPVDTNSTSGDPVEKKDETPFGVSVAVG

SEQ ID NO: 1692 - protein, 399 aa, synthetic construct
  REGION 1..399: note = NTRK2 (Q16620) ECD
CPTSCKCSASRIWCSDPSPGIVAFPRLEPNSVDPENITEIFIANQKRLEIINEDDVEAYVGLRNLTIVDSGLKFVAHKAFLKNSNLQHINFTRNKLTSLSRKHFRHLDLSELILVGNPFTCSCDIMWIKTLQEAKSSPDTQDLYCLNESSKNIPLANLQIPNCGLPSANLAAPNLTVEEGKSITLSCSVAGDPVPNMYWDVGNLVSKHMNETSHTQGSLRITNISSDDSGKQISCVAENLVGEDQDSVNLTVHFAPTITFLESPTSDHHWCIPFTVKGNPKPALQWFYNGAILNESKYICTKIHVTNHTEYHGCLQLDNPTHMNNGDYTLIAKNEYGKDEKQISAHFMGWPGIDDGANPNYPDVIYEDYGTAANDIGDTTNRSNEIPSTDVTDKTGREH

SEQ ID NO: 1693 - protein, 398 aa, synthetic construct
  REGION 1..398: note = NTRK3 (Q16288) ECD
CPANCVCSKTEINCRRPDDGNLFPLLEGQDSGNSNGNASINITDISRNITSIHIENWRSLHTLNAVDMELYTGLQKLTIKNSGLRSIQPRAFAKNPHLRYINLSSNRLTTLSWQLFQTLSLRELQLEQNFFNCSCDIRWMQLWQEQGEAKLNSQNLYCINADGSQLPLFRMNISQCDLPEISVSHVNLTVREGDNAVITCNGSGSPLPDVDWIVTGLQSINTHQTNLNWTNVHAINLTLVNVTSEDNGFTLTCIAENVVGMSNASVALTVYYPPRVVSLEEPELRLEHCIEFVVRGNPPPTLHWLHNGQPLRESKIIHVEYYQEGEISEGCLLFNKPTHYNNGNYTLIAKNPLGTANQTINGHFLKEPFPESTDNFILFDEVSPTPPITVTHKPEEDT

SEQ ID NO: 1694 - protein, 1782 aa, synthetic construct
  REGION 1..1782: note = NUP210 (Q8TEM1) ECD
KLNIPKVLLPFTRATRVNFTLEASEGCYRWLSTRPEVASIEPLGLDEQQCSQKAVVQARLTQPARLTSIIFAEDITTGQVLRCDAIVDLIHDIQIVSTTRELYLEDSPLELKIQALDSEGNTFSTLAGLVFEWTIVKDSEADRFSDSHNALRILTFLESTYIPPSYISEMEKAAKQGDTILVSGMKTGSSKLKARIQEAVYKNVRPAEVRLLILENILLNPAYDVYLMVGTSIHYKVQKIRQGKITELSMPSDQYELQLQNSIPGPEGDPARPVAVLAQDTSMVTALQLGQSSLVLGHRSIRMQGASRLPNSTIYVVEPGYLGFTVHPGDRWVLETGRLYEITIEVFDKFSNKVYVSDNIRIETVLPAEFFEVLSSSQNGSYHRIRALKRGQTAIDAALTSVVDQDGGVHILQVPVWNQQEVEIHIPITLYPSILTFPWQPKTGAYQYTIRAHGGSGNFSWSSSSHLVATVTVKGVMTTGSDIGFSVIQAHDVQNPLHFGEMKVYVIEPHSMEFAPCQVEARVGQALELPLRISGLMPGGASEVVTLSDCSHFDLAVEVENQGVFQPLPGRLPPGSEHCSGIRVKAEAQGSTTLLVSYRHGHVHLSAKITIAAYLPLKAVDPSSVALVTLGSSKEMLFEGGPRPWILEPSKFFQNVTAEDTDSIGLALFAPHSSRNYQQHWILVTCQALGEQVIALSVGNKPSLTNPFPAVEPAVVKFVCAPPSRLTLAPVYTSPQLDMSCPLLQQNKQVVPVSSHRNPRLDLAAYDQEGRRFDNFSSLSIQWESTRPVLASIEPELPMQLVSQDDESGQKKLHGLQAILVHEASGTTAITATATGYQESHLSSARTKQPHDPLVPLSASIELILVEDVRVSPEEVTIYNHPGIQAELRIREGSGYFFLNTSTADVVKVAYQEARGVAMVHPLLPGSSTIMIHDLCLVFPAPAKAVVYVSDIQELYIRVVDKVEIGKTVKAYVRVLDLHKKPFLAKYFPFMDLKLRAASPIITLVALDEALDNYTITFLIRGVAIGQTSLTASVTNKAGQRINSAPQQIEVFPPFRLMPRKVTLLIGATMQVTSEGGPQPQSNILFSISNESVALVSAAGLVQGLAIGNGTVSGLVQAVDAETGKVVIISQDLVQVEVLLLRAVRIRAPIMRMRTGTQMPIYVTGITNHQNPFSFGNAVPGLTFHWSVTKRDVLDLRGRHHEASIRLPSQYNFAMNVLGRVKGRTGLRVVVKAVDPTSGQLYGLARELSDEIQVQVFEKLQLLNPEIEAEQILMSPNSYIKLQTNRDGAASLSYRVLDGPEKVPVVHVDEKGFLASGSMIGTSTIEVIAQEPFGANQTIIVAVKVSPVSYLRVSMSPVLHTQNKEALVAVPLGMTVTFTVHFHDNSGDVFHAHSSVLNFATNRDDFVQIGKGPTNNTCVVRTVSVGLTLLRVWDAEHPGLSDFMPLPVLQAISPELSGAMVVGDVLCLATVLTSLEGLSGTWSSSANSILHIDPKTGVAVARAVGSVTVYYEVAGHLRTYKEVVVSVPQRIMARHLHPIQTSFQEATASKVIVAVGDRSSNLRGECTPTQREVIQALHPETLISCQSQFKPAVFDFPSQDVFTVEPQFDTALGQYFCSITMHRLTDKQRKHLSMKKTALVVSASLSSSHFSTEQVGAEVPFSPGLFADQAEILLSNHYTSSEIRVFGAPEVLENLEVKSGSPAVLAFAKEKSFGWPSFITYTVGVLDPAAGSQGPLSTTLTFSSPVTNQAIAIPVTVAFVVDRRGPGPYGASLFQHFLDSYQ

SEQ ID NO: 1695 - protein, 1777 aa, synthetic construct
  REGION 1..1777: note = NUP210L (Q5VU65) ECD
ANKLNVPQVLLPFGREPGRVPFLLEAQRGCYTWHSTHHDAVTVEPLYENGTLCSQKAVLIAESTQPIRLSSIILAREIVTDHELRCDVKVDVINSIEIVSRARELYVDDSPLELMVRALDAEGNTFSSLAGMMFEWSIAQDNESAREELSSKIRILKYSEAEYAPPIYIAEMEKEEKQGDVILVSGIRTGAAVVKVRIHEPFYKKVAAALIRLLVLENIFLIPSHDIYLLVGTYIKYQVAKMVQGRVTEVKFPLEHYILELQDHRVALNGSHSEKVAILDDKTAMVTASQLGQTNLVFVHKNVHMRSVSGLPNCTIYVVEPGFLGFTVQPGNRWSLEVGQVYVITVDVFDKSSTKVYISDNLRITYDFPKEYFEEQLTTVNGSYHIVKALKDGVVVINASLTSIIYQNKDIQPIKFLIKHQQEVKIYFPIMLTPKFLAFPHHPMGMLYRYKVQVEGGSGNFTWTSSNETVVIVTTKGVVTAGQVRGNSTVLARDVQNPFRYGEIKIHVLKLNKMELLPFHADVEIGQIIEIPIAMYHINKETKEAMAFTDCSHLSLDLNMDKQGVFTLLKEGIQRPGPMHCSSTHIAAKSLGHTLVTVSVNECDKYLESSATFAAYEPLKALNPVEVALVTWQSVKEMVFEGGPRPWILEPSRFFLELNAEKTEKIGIAQVWLPSKRKQNQYIYRIQCLDLGEQVLTFRIGNHPGVLNPSPAVEVLQVRFICAHPASMSVTPVYKVPAGAQPCPLPQHNKWLIPVSRLRDTVLELAVFDQHRRKFDNFSSLMLEWKSSNETLAHFEDYKSVEMVAKDDGSGQTRLHGHQILKVHQIKGTVLIGVNFVGYSEKKSPKEISNLPRSVDVELLLVDDVTVVPENATIYNHPDVKETFSLVEGSGYFLVNSSEQGVVTITYMEAESSVELVPLHPGFFTLEVYDLCLAFLGPATAHLRVSDIQELELDLIDKVEIDKTVLVTVRVLGSSKRPFQNKYFRNMELKLQLASAIVTLTPMEQQDEYSENYILRATTIGQTTLVAIAKDKMGRKYTSTPRHIEVFPPFRLLPEKMTLIPMNMMQVMSEGGPQPQSIVHFSISNQTVAVVNRRGQVTGKIVGTAVVHGTIQTVNEDTGKVIVFSQDEVQIEVVQLRAVRILAAATRLITATKMPVYVMGVTSTQTPFSFSNANPGLTFHWSMSKRDVLDLVPRHSEVFLQLPVEHNFAMVVHTKAAGRTSIKVTVHCMNSSSGQFEGNLLELSDEVQILVFEKLQLFYPECQPEQILMPINSQLKLHTNREGAAFVSSRVLKCFPNSSVIEEDGEGLLKAGSIAGTAVLEVTSIEPFGVNQTTITGVQVAPVTYLRVSSQPKLYTAQGRTLSAFPLGMSLTFTVQFYNSIGEKFHTHNTQLYLALNRDDLLHIGPGNKNYTYMAQAVNRGLTLVGLWDRRHPGMADYIPVAVEHAIEPDTKLTFVGDIICFSTHLVSQHGEPGIWMISANNILQTDIVTGVGVARSPGTAMIFHDIPGVVKTYREVVVNASSRLMLSYDLKTYLTNTLNSTVFKLFITTGRNGVNLKGFCTPNQALAITKVLLPATLMLCHVQFSNTLLDIPASKVFQVHSDFSMEKGVYVCIIKVRPQSEELLQALSVADTSVYGWATLVSERSKNGMQRILIPFIPAFYINQSELVLSHKQDIGEIRVLGVDRVLRKLEVISSSPVLVVAGHSHSPLTPGLAIYSVRVVNFTSFQQMASPVFINISCVLTSQSEAVVVRAMKDKLGADHCEDSAILKRFTGSYQ

SEQ ID NO: 1696 - protein, 713 aa, synthetic construct
  REGION 1..713: note = OSMR (Q99650) ECD
ERLPLTPVSLKVSTNSTRQSLHLQWTVHNLPYHQELKMVFQIQISRIETSNVIWVGNYSTTVKWNQVLHWSWESELPLECATHFVRIKSLVDDAKFPEPNFWSNWSSWEEVSVQDSTGQDILFVFPKDKLVEEGTNVTICYVSRNIQNNVSCYLEGKQIHGEQLDPHVTAFNLNSVPFIRNKGTNIYCEASQGNVSEGMKGIVLFVSKVLEEPKDFSCETEDFKTLHCTWDPGTDTALGWSKQPSQSYTLFESFSGEKKLCTHKNWCNWQITQDSQETYNFTLIAENYLRKRSVNILFNLTHRVYLMNPFSVNFENVNATNAIMTWKVHSIRNNFTYLCQIELHGEGKMMQYNVSIKVNGEYFLSELEPATEYMARVRCADASHFWKWSEWSGQNFTTLEAAPSEAPDVWRIVSLEPGNHTVTLFWKPLSKLHANGKILFYNVVVENLDKPSSSELHSIPAPANSTKLILDRCSYQICVIANNSVGASPASVIVISADPENKEVEEERIAGTEGGFSLSWKPQPGDVIGYVVDWCDHTQDVLGDFQWKNVGPNTTSTVISTDAFRPGVRYDFRIYGLSTKRIACLLEKKTGYSQELAPSDNPHVLVDTLTSHSFTLSWKDYSTESQPGFIQGYHVYLKSKARQCHPRFEKAVLSDGSECCKYKIDNPEEKALIVDNLKPESFYEFFITPFTSAGEGPSATFTKVTTPDEHSSM

SEQ ID NO: 1697 - protein, 253 aa, synthetic construct
  REGION 1..253: note = OSTM1 (Q86WC4) ECD
ALPFGSSPHRVFHDLLSEQQLLEVEDLSLSLLQGGGLGPLSLPPDLPDLDPECRELLLDFANSSAELTGCLVRSARPVRLCQTCYPLFQQVVSKMDNISRAAGNTSESQSCARSLLMADRMQIVVILSEFFNTTWQEANCANCLTNNSEELSNSTVYFLNLFNHTLTCFEHNLQGNAHSLLQTKNYSEVCKNCREAYKTLSSLYSEMQKMNELENKAEPGTHLCIDVEDAMNITRKLWSRTFNCSVPCSDTVP

SEQ ID NO: 1698 - protein, 833 aa, synthetic construct
  REGION 1..833: note = PAM (P19021) ECD
FKETTRPFSNECLGTTRPVVPIDSSDFALDIRMPGVTPKQSDTYFCMSMRIPVDEEAFVIDFKPRASMDTVHHMLLFGCNMPSSTGSYWFCDEGTCTDKANILYAWARNAPPTRLPKGVGFRVGGETGSKYFVLQVHYGDISAFRDNNKDCSGVSLHLTRLPQPLIAGMYLMMSVDTVIPAGEKVVNSDISCHYKNYPMHVFAYRVHTHHLGKVVSGYRVRNGQWTLIGRQSPQLPQAFYPVGHPVDVSFGDLLAARCVFTGEGRTEATHIGGTSSDEMCNLYIMYYMEAKHAVSFMTCTQNVAPDMFRTIPPEANIPIPVKSDMVMMHEHHKETEYKDKIPLLQQPKREEEEVLDQGDFYSLLSKLLGEREDVVHVHKYNPTEKAESESDLVAEIANVVQKKDLGRSDAREGAEHERGNAILVRDRIHKFHRLVSTLRPPESRVFSLQQPPPGEGTWEPEHTGDFHMEEALDWPGVYLLPGQVSGVALDPKNNLVIFHRGDHVWDGNSFDSKFVYQQIGLGPIEEDTILVIDPNNAAVLQSSGKNLFYLPHGLSIDKDGNYWVTDVALHQVFKLDPNNKEGPVLILGRSMQPGSDQNHFCQPTDVAVDPGTGAIYVSDGYCNSRIVQFSPSGKFITQWGEESSGSSPLPGQFTVPHSLALVPLLGQLCVADRENGRIQCFKTDTKEFVREIKHSSFGRNVFAISYIPGLLFAVNGKPHFGDQEPVQGFVMNFSNGEIIDIFKPVRKHFDMPHDIVASEDGTVYIGDAHTNTVWKFTLTEKLEHRSVKKAGIEVQEIKEAEAVVETKMENKPTSSELQKMQEKQKLIKEPGSG

SEQ ID NO: 1699 - protein, 238 aa, synthetic construct
  REGION 1..238: note = PARM1 (Q6UWI2) ECD
LPTSAPLSVSLPTNIVPPTTIWTSSPQNTDADTASPSNGTHNNSVLPVTASAPTSLLPKNISIESREEEITSPGSNWEGTNTDPSPSGFSSTSGGVHLTTTLEEHSSGTPEAGVAATLSQSAAEPPTLISPQAPASSPSSLSTSPPEVFSASVTTNHSSTVTSTQPTGAPTAPESPTEESSSDHTPTSHATAEPVPQEKTPPTTVSGKVMCELIDMETTTTFPRVIMQEVEHALSSGS

SEQ ID NO: 1700 - protein, 795 aa, synthetic construct [sequence omitted]

SEQ ID NO: 1701 - protein, 697 aa, synthetic construct
  REGION 1..697: note = PCDH10 (Q9P2E7) ECD
QLHYTVQEEQEHGTFVGNIAEDLGLDITKLSARGFQTVPNSRTPYLDLNLETGVLYVNEKIDREQICKQSPSCVLHLEVFLENPLELFQVEIEVLDINDNPPSFPEPDLTVEISESATPGTRFPLESAFDPDVGTNSLRDYEITPNSYFSLDVQTQGDGNRFAELVLEKPLDREQQAVHRYVLTAVDGGGGGGVGEGGGGGGGAGLPPQQQRTGTALLTIRVLDSNDNVPAFDQPVYTVSLPENSPPGTLVIQLNATDPDEGQNGEVVYSFSSHISPRARELFGLSPRTGRLEVSGELDYEESPVYQVYVQAKDLGPNAVPAHCKVLVRVLDANDNAPEISFSTVKEAVSEGAAPGTVVALFSVTDRDSEENGQVQCELLGDVPFRLKSSFKNYYTIVTEAPLDREAGDSYTLTVVARDRGEPALSTSKSIQVQVSDVNDNAPRFSQPVYDVYVTENNVPGAYIYAVSATDRDEGANAQLAYSILECQIQGMSVFTYVSINSENGYLYALRSFDYEQLKDFSFQVEARDAGSPQALAGNATVNILIVDQNDNAPAIVAPLPGRNGTPAREVLPRSAEPGYLLTRVAAVDADDGENARLTYSIVRGNEMNLFRMDWRTGELRTARRVPAKRDPQRPYELVIEVRDHGQPPLSSTATLVVQLVDGAVEPQGGGGSGGGGSGEHQRPSRSGGGETSLDLT

SEQ ID NO: 1702 - protein, 789 aa, synthetic construct
  REGION 1..789: note = PCDH11X (Q9BZA7) ECD
QEKNYTIREEMPENVLIGDLLKDLNLSLIPNKSLTTAMQFKLVYKTGDVPLIRIEEDTGEIFTTGARIDREKLCAGIPRDEHCFYEVEVAILPDEIFRLVKIRFLIEDINDNAPLFPATVINISIPENSAINSKYTLPAAVDPDVGINGVQNYELIKSQNIFGLDVIETPEGDKMPQLIVQKELDREEKDTYVMKVKVEDGGFPQRSSTAILQVSVTDTNDNHPVFKETEIEVSIPENAPVGTSVTQLHATDADIGENAKIHFSFSNLVSNIARRLFHLNATTGLITIKEPLDREETPNHKLLVLASDGGLMPARAMVLVNVTDVNDNVPSIDIRYIVNPVNDTVVLSENIPLNTKIALITVTDKDADHNGRVTCFTDHEIPFRLRPVFSNQFLLETAAYLDYESTKEYAIKLLAADAGKPPLNQSAMLFIKVKDENDNAPVFTQSFVTVSIPENNSPGIQLTKVSAMDADSGPNAKINYLLGPDAPPEFSLDCRTGMLTVVKKLDREKEDKYLFTILAKDNGVPPLTSNVTVFVSIIDQNDNSPVFTHNEYNFYVPENLPRHGTVGLITVTDPDYGDNSAVTLSILDENDDFTIDSQTGVIRPNISFDREKQESYTFYVKAEDGGRVSRSSSAKVTINVVDVNDNKPVFIVPPSNCSYELVLPSTNPGTVVFQVIAVDNDTGMNAEVRYSIVGGNTRDLFAIDQETGNITLMEKCDVTDLGLHRVLVKANDLGQPDSLFSVVIVNLFVNESVTNATLINELVRKSTEAPVTPNTEIADVSSPTSDYVK

SEQ ID NO: 1703 - protein, 816 aa, synthetic construct
  REGION 1..816: note = PCDH11Y (Q9BZA8) ECD
TNCHKCLLSGTYIFAVLLVCVVFHSGAQEKNYTIREEIPENVLIGNLLKDLNLSLIPNKSLTTTMQFKLVYKTGDVPLIRIEEDTGEIFTTGARIDREKLCAGIPRDEHCFYEVEVAILPDEIFRLVKIRFLIEDINDNAPLFPATVINISIPENSAINSKYTLPAAVDPDVGINGVQNYELIKSQNIFGLDVIETPEGDKMPQLIVQKELDREEKDTYVMKVKVEDGGFPQRSSTAILQVSVTDTNDNHPVFKETEIEVSIPENAPVGTSVTQLHATDADIGENAKIHFSFSNLVSNIARRLFHLNATTGLITIKEPLDREETPNHKLLVLASDGGLMPARAMVLVNVTDVNDNVPSIDIRYIVNPVNDTVVLSENIPLNTKIALITVTDKDADHNGRVTCFTDHEIPFRLRPVFSNQFLLENAAYLDYESTKEYAIKLLAADAGKPPLNQSAMLFIKVKDENDNAPVFTQSFVTVSIPENNSPGIQLMKVSATDADSGPNAEINYLLGPDAPPEFSLDRRTGMLTVVKKLDREKEDKYLFTILAKDNGVPPLTSNVTVFVSIIDQNDNSPVFTHNEYKFYVPENLPRHGTVGLITVTDPDYGDNSAVTLSILDENDDFTIDSQTGVIRPNISFDREKQESYTFYVKAEDGGRVSRSSSAKVTINVVDVNDNKPVFIVPPYNYSYELVLPSTNPGTVVFQVIAVDNDTGMNAEVRYSIVGGNTRDLFAIDQETGNITLMEKCDVTDLGLHRVLVKANDLGQPDSLFSVVIVNLFVNESVTNATLINELVRKSIEAPVTPNTEIADVSSPTSDYVK

SEQ ID NO: 1704 - protein, 694 aa, synthetic construct
  REGION 1..694: note = PCDH12 (Q9NPG4) ECD
QEVTTLTVKYQVSEEVPSGTVIGKLSQELGREERRRQAGAAFQVLQLPQALPIQVDSEEGLLSTGRRLDREQLCRQWDPCLVSFDVLATGDLALIHVEIQVLDINDHQPRFPKGEQELEISESASLRTRIPLDRALDPDTGPNTLHTYTLSPSEHFALDVIVGPDETKHAELIVVKELDREIHSFFDLVLTAYDNGNPPKSGTSLVKVNVLDSNDNSPAFAESSLALEIQEDAAPGTLLIKLTATDPDQGPNGEVEFFLSKHMPPEVLDTFSIDAKTGQVILRRPLDYEKNPAYEVDVQARDLGPNPIPAHCKVLIKVLDVNDNIPSIHVTWASQPSLVSEALPKDSFIALVMADDLDSGHNGLVHCWLSQELGHFRLKRTNGNTYMLLTNATLDREQWPKYTLTLLAQDQGLQPLSAKKQLSIQISDINDNAPVFEKSRYEVSTRENNLPSLHLITIKAHDADLGINGKVSYRIQDSPVAHLVAIDSNTGEVTAQRSLNYEEMAGFEFQVIAEDSGQPMLASSVSVWVSLLDANDNAPEVVQPVLSDGKASLSVLVNASTGHLLVPIETPNGLGPAGTDTPPLATHSSRPFLLTTIVARDADSGANGEPLYSIRSGNEAHLFILNPHTGQLFVNVTNASSLIGSEWELEIVVEDQGSPPLQTRALLRVMFVTSVDHLRDSARKPGALSMSMLT

SEQ ID NO: 1705 - protein, 1350 aa, synthetic construct
  REGION 1..1350: note = PCDH15 (Q96QU1) ECD
QYDDDCKLARGGPPATIVAIDEESRNGTILVDNMLIKGTAGGPDPTIELSLKDNVDYWVLMDPVKQMLFLNSTGRVLDRDPPMNIHSIVVQVQCINKKVGTIIYHEVRIVVRDRNDNSPTFKHESYYATVNELTPVGTTIFTGFSGDNGATDIDDGPNGQIEYVIQYNPDDPTSNDTFEIPLMLTGNIVLRKRLNYEDKTRYFVIIQANDRAQNLNERRTTTTTLTVDVLDGDDLGPMFLPCVLVPNTRDCRPLTYQAAIPELRTPEELNPIIVTPPIQAIDQDRNIQPPSDRPGILYSILVGTPEDYPRFFHMHPRTAELSLLEPVNRDFHQKFDLVIKAEQDNGHPLPAFAGLHIEILDENNQSPYFTMPSYQGYILESAPVGATISDSLNLTSPLRIVALDKDIEDTKDPELHLFLNDYTSVFTVTQTGITRYLTLLQPVDREEQQTYTFSITAFDGVQESEPVIVNIQVMDANDNTPTFPEISYDVYVYTDMRPGDSVIQLTAVDADEGSNGEITYEILVGAQGDFIINKTTGLITIAPGVEMIVGRTYALTVQAADNAPPAERRNSICTVYIEVLPPNNQSPPRFPQLMYSLEISEAMRVGAVLLNLQATDREGDSITYAIENGDPQRVFNLSETTGILTLGKALDRESTDRYILIITASDGRPDGTSTATVNIVVTDVNDNAPVFDPYLPRNLSVVEEEANAFVGQVKATDPDAGINGQVHYSLGNFNNLFRITSNGSIYTAVKLNREVRDYYELVVVATDGAVHPRHSTLTLAIKVLDIDDNSPVFTNSTYTVLVEENLPAGTTILQIEAKDVDLGANVSYRIRSPEVKHFFALHPFTGELSLLRSLDYEAFPDQEASITFLVEAFDIYGTMPPGIATVTVIVKDMNDYPPVFSKRIYKGMVAPDAVKGTPITTVYAEDADPPGLPASRVRYRVDDVQFPYPASIFEVEEDSGRVITRVNLNEEPTTIFKLVVVAFDDGEPVMSSSATVKILVLHPGEIPRFTQEEYRPPPVSELATKGTMVGVISAAAINQSIVYSIVSGNEEDTFGINNITGVIYVNGPLDYETRTSYVLRVQADSLEVVLANLRVPSKSNTAKVYIEIQDENNHPPVFQKKFYIGGVSEDARMFTSVLRVKATDKDTGNYSVMAYRLIIPPIKEGKEGFVVETYTGLIKTAMLFHNMRRSYFKFQVIATDDYGKGLSGKADVLVSVVNQLDMQVIVSNVPPTLVEKKIEDLTEILDRYVQEQIPGAKVVVESIGARRHGDAFSLEDYTKCDLTVYAIDPQTNRAIDRNELFKFLDGKLLDINKDFQPYYGEGGRILEIRTPEAVTSIKKRGESLGYTEGA

SEQ ID NO: 1706 - protein, 690 aa, synthetic construct
  REGION 1..690: note = PCDH17 (O14917) ECD
LKNLNYSVPEEQGAGTVIGNIGRDARLQPGLPPAERGGGGRSKSGSYRVLENSAPHLLDVDADSGLLYTKQRIDRESLCRHNAKCQLSLEVFANDKEICMIKVEIQDINDNAPSFSSDQIEMDISENAAPGTRFPLTSAHDPDAGENGLRTYLLTRDDHGLFGLDVKSRGDGTKFPELVIQKALDREQQNHHTLVLTALDGGEPPRSATVQINVKVIDSNDNSPVFEAPSYLVELPENAPLGTVVIDLNATDADEGPNGEVLYSFSSYVPDRVRELFSIDPKTGLIRVKGNLDYEENGMLEIDVQARDLGPNPIPAHCKVTVKLIDRNDNAPSIGFVSVRQGALSEAAPPGTVIALVRVTDRDSGKNGQLQCRVLGGGGTGGGGGLGGPGGSVPFKLEENYDNFYTVVTDRPLDRETQDEYNVTIVARDGGSPPLNSTKSFAIKILDENDNPPRFTKGLYVLQVHENNIPGEYLGSVLAQDPDLGQNGTVSYSILPSHIGDVSIYTYVSVNPTNGAIYALRSFNFEQTKAFEFKVLAKDSGAPAHLESNATVRVTVLDVNDNAPVIVLPTLQNDTAELQVPRNAGLGYLVSTVRALDSDFGESGRLTYEIVDGNDDHLFEIDPSSGEIRTLHPFWEDVTPVVELVVKVTDHGKPTLSAVAKLIIRSVSGSLPEGVPRVNGEQHHWDMSLP

SEQ ID NO: 1707 - protein, 672 aa, synthetic construct
  REGION 1..672: note = PCDH18 (Q9HCL0) ECD
KNLKYRIYEEQRVGSVIARLSEDVADVLLKLPNPSTVRFRAMQRGNSPLLVVNEDNGEISIGATIDREQLCQKNLNCSIEFDVITLPTEHLQLFHIEVEVLDINDNSPQFSRSLIPIEISESAAVGTRIPLDSAFDPDVGENSLHTYSLSANDFFNIEVRTRTDGAKYAELIVVRELDRELKSSYELQLTASDMGVPQRSGSSILKISISDSNDNSPAFEQQSYIIQLLENSPVGTLLLDLNATDPDEGANGKIVYSFSSHVSPKIMETFKIDSERGHLTLFKQVDYEITKSYEIDVQAQDLGPNSIPAHCKIIIKVVDVNDNKPEININLMSPGKEEISYIFEGDPIDTFVALVRVQDKDSGLNGEIVCKLHGHGHFKLQKTYENNYLILTNATLDREKRSEYSLTVIAEDRGTPSLSTVKHFTVQINDINDNPPHFQRSRYEFVISENNSPGAYITTVTATDPDLGENGQVTYTILESFILGSSITTYVTIDPSNGAIYALRIFDHEEVSQITFVVEARDGGSPKQLVSNTTVVLTIIDENDNVPVVIGPALRNNTAEITIPKGAESGFHVTRIRAIDRDSGVNAELSCAIVAGNEENIFIIDPRSCDIHTNVSMDSVPYTEWELSVIIQDKGNPQLHTKVLLKCMIFEYAESVTSTAMTSVSQASLDVS

SEQ ID NO: 1708 - protein, 657 aa, synthetic construct
  REGION 1..657: note = PCDH19 (Q8TAB3) ECD
LINLKYSVEEEQRAGTVIANVAKDAREAGFALDPRQASAFRVVSNSAPHLVDINPSSGLLVTKQKIDRDLLCRQSPKCIISLEVMSSSMEICVIKVEIKDLNDNAPSFPAAQIELEISEAASPGTRIPLDSAYDPDSGSFGVQTYELTPNELFGLEIKTRGDGSRFAELVVEKSLDRETQSHYSFRITALDGGDPPRLGTVGLSIKVTDSNDNNPVFSESTYAVSVPENSPPNTPVIRLNASDPDEGTNGQVVYSFYGYVNDRTRELFQIDPHSGLVTVTGALDYEEGHVYELDVQAKDLGPNSIPAHCKVTVSVLDTNDNPPVINLLSVNSELVEVSESAPPGYVIALVRVSDRDSGLNGRVQCRLLGNVPFRLQEYESFSTILVDGRLDREQHDQYNLTIQARDGGVPMLQSAKSFTVLITDENDNHPHFSKPYYQVIVQENNTPGAYLLSVSARDPDLGLNGSVSYQIVPSQVRDMPVFTYVSINPNSGDIYALRSFNHEQTKAFEFKVLAKDGGLPSLQSNATVRVIILDVNDNTPVITAPPLINGTAEVYIPRNSGIGYLVTVVKAEDYDEGENGRVTYDMTEGDRGFFEIDQVNGEVRTTRTFGESSKSSYELIVVAHDHGKTSLSASALVLIYLSPALDAQESMGSVNLS

SEQ ID NO: 1709 - protein, 830 aa, synthetic construct
  REGION 1..830: note = PCDH20 (Q8N6Y1) ECD
SYSRATELLYSLNEGLPAGVLIGSLAEDLRLLPRSAGRPDPQSQLPERTGAEWNPPLSFSLASRGLSGQYVTLDNRSGELHTSAQEIDREALCVEGGGGTAWSGSVSISSSPSDSCLLLLDVLVLPQEYFRFVKVKIAIRDINDNAPQFPVSQISVWVPENAPVNTRLAIEHPAVDPDVGINGVQTYRLLDYHGMFTLDVEENENGERTPYLIVMGALDRETQDQYVSIIIAEDGGSPPLLGSATLTIGISDINDNCPLFTDSQINVTVYGNATVGTPIAAVQAVDKDLGTNAQITYSYSQKVPQASKDLFHLDENTGVIKLFSKIGGSVLESHKLTILANGPGCIPAVITALVSIIKVIFRPPEIVPRYIANEIDGVVYLKELEPVNTPIAFFTIRDPEGKYKVNCYLDGEGPFRLSPYKPYNNEYLLETTKPMDYELQQFYEVAVVAWNSEGFHVKRVIKVQLLDDNDNAPIFLQPLIELTIEENNSPNAFLTKLYATDADSEERGQVSYFLGPDAPSYFSLDSVTGILTVSTQLDREEKEKYRYTVRAVDCGKPPRESVATVALTVLDKNDNSPRFINKDFSFFVPENFPGYGEIGVISVTDADAGRNGWVALSVVNQSDIFVIDTGKGMLRAKVSLDREQQSSYTLWVEAVDGGEPALSSTAKITILLLDINDNPPLVLFPQSNMSYLLVLPSTLPGSPVTEVYAVDKDTGMNAVIAYSIIGRRGPRPESFRIDPKTGNITLEEALLQTDYGLHRLLVKVSDHGYPEPLHSTVMVNLFVNDTVSNESYIESLLRKEPEINIEEKEPQISIEPTHRKVESVSCMPTL

SEQ ID NO: 1710 - protein, 851 aa, synthetic construct
  REGION 1..851: note = PCDH7 (O60245) ECD
AAKQLLRYRLAEEGPADVRIGNVASDLGIVTGSGEVTFSLESGSEYLKIDNLTGELSTSERRIDREKLPQCQMIFDENECFLDFEVSVIGPSQSWVDLFEGQVIVLDINDNTPTFPSPVLTLTVEENRPVGTLYLLPTATDRDFGRNGIERYELLQEPGGGGSGGESRRAGAADSAPYPGGGGNGASGGGSGGSKRRLDASEGGGGTNPGGRSSVFELQVADTPDGEKQPQLIVKGALDREQRDSYELTLRVRDGGDPPRSSQAILRVLITDVNDNSPRFEKSVYEADLAENSAPGTPILQLRAADLDVGVNGQIEYVFGAATESVRRLLRLDETSGWLSVLHRIDREEVNQLRFTVMARDRGQPPKTDKATVVLNIKDENDNVPSIEIRKIGRIPLKDGVANVAEDVLVDTPIALVQVSDRDQGENGVVTCTVVGDVPFQLKPASDTEGDQNKKKYFLHTSTPLDYEATREFNVVIVAVDSGSPSLSSNNSLIVKVGDTNDNPPMFGQSVVEVYFPENNIPGERVATVLATDADSGKNAEIAYSLDSSVMGIFAIDPDSGDILVNTVLDREQTDRYEFKVNAKDKGIPVLQGSTTVIVQVADKNDNDPKFMQDVFTFYVKENLQPNSPVGMVTVMDADKGRNAEMSLYIEENNNIFSIENDTGTIYSTMSFDREHQTTYTFRVKAVDGGDPPRSATATVSLFVMDENDNAPTVTLPKNISYTLLPPSSNVRTVVATVLATDSDDGINADLNYSIVGGNPFKLFEIDPTSGVVSLVGKLTQKHYGLHRLVVQVNDSGQPSQSTTTLVHVFVNESVSNATAIDSQIARSLHIPLTQDIAGDPSYEISKQRLS

SEQ ID NO: 1711 - protein, 720 aa, synthetic construct
  REGION 1..720: note = PCDH8 (O95206) ECD
KTVRYSTFEEDAPGTVIGTLAEDLHMKVSGDTSFRLMKQFNSSLLRVREGDGQLTVGDAGLDRERLCGQAPQCVLAFDVVSFSQEQFRLVHVEVEVRDVNDHAPRFPRAQIPVEVSEGAAVGTRIPLEVPVDEDVGANGLQTVRLAEPHSPFRVELQTRADGAQCADLVLLQELDRESQAAYSLELVAQDGGRPPRSATAALSVRVLDANDHSPAFPQGAVAEVELAEDAPVGSLLLDLDAADPDEGPNGDVVFAFGARTPPEARRLFRLDPRSGRLTLAGPVDYERQDTYELDVRAQDRGPGPRAATCKVIVRIRDVNDNAPDIAITPLAAPGAPATSPFAAAAAAAALGGADASSPAGAGTPEAGATSLVPEGAARESLVALVSTSDRDSGANGQVRCALYGHEHFRLQPAYAGSYLVVTAASLDRERIAEYNLTLVAEDRGAPPLRTVRPYTVRVGDENDNAPLFTRPVYEVSVRENNPPGAYLATVAARDRDLGRNGQVTYRLLEAEVGRAGGAVSTYVSVDPATGAIYALRSFDYETLRQLDVRIQASDGGSPQLSSSALVQVRVLDQNDHAPVLVHPAPANGSLEVAVPGRTAKDTVVARVQARDADEGANGELAFELQQQEPREAFAIGRRTGEILLTGDLSQEPPGRVFRALLVISDGGRPPLTTTATVSFVVTAGGGRGPAAPASAGSPERSRPPGSRLGVSGSVLQWDTP

SEQ ID NO: 1712 - protein, 791 aa, synthetic construct
  REGION 1..791: note = PCDH9 (Q9HC56) ECD
QELIYTIREELPENVPIGNIPKDLNISHINAATGTSASLVYRLVSKAGDAPLVKVSSSTGEIFTTSNRIDREKLCAGASYAEENECFFELEVVILPNDFFRLIKIKIIVKDTNDNAPMFPSPVINISIPENTLINSRFPIPSATDPDTGFNGVQHYELLNGQSVFGLDIVETPEGEKWPQLIVQQNLDREQKDTYVMKIKVEDGGTPQKSSTAILQVTVSDVNDNRPVFKEGQVEVHIPENAPVGTSVIQLHATDADIGSNAEIRYIFGAQVAPATKRLFALNNTTGLITVQRSLDREETAIHKVTVLASDGSSTPARATVTINVTDVNDNPPNIDLRYIISPINGTVYLSEKDPVNTKIALITVSDKDTDVNGKVICFIEREVPFHLKAVYDNQYLLETSSLLDYEGTKEFSFKIVASDSGKPSLNQTALVRVKLEDENDNPPIFNQPVIELSVSENNRRGLYLTTISATDEDSGKNADIVYQLGPNASFFDLDRKTGVLTASRVFDREEQERFIFTVTARDNGTPPLQSQAAVIVTVLDENDNSPKFTHNHFQFFVSENLPKYSTVGVITVTDADAGENKAVTLSILNDNDNFVLDPYSGVIKSNVSFDREQQSSYTFDVKATDGGQPPRSSTAKVTINVMDVNDNSPVVISPPSNTSFKLVPLSAIPGSVVAEVFAVDVDTGMNAELKYTIVSGNNKGLFRIDPVTGNITLEEKPAPTDVGLHRLVVNISDLGYPKSLHTLVLVFLYVNDTAGNASYIYDLIRRTMETPLDRNIGDSSQPYQNEDYLT

SEQ ID NO: 1713 - protein, 668 aa, synthetic construct
  REGION 1..668: note = PCDHA1 (Q9Y5I3) ECD
QLHYSIPEEAKHGTFVGRVAQDLGLELAELVPRLFRVASKTHRDLLEVNLQNGILFVNSRIDREELCQWSAECSIHLELIADRPLQVFHVEVKVKDINDNPPVFRGREQIIFIPESRLLNSRFPIEGAADADIGANALLTYTLSPSDYFSLDVEASDELSKSLWLELRKYLDREETPELHLLLTATDGGKPELQGTVELLITVLDVNDNAPLFDQAVYRVHLLETTANGTLVTTLNASDADEGVNGEVVFSFDSGISRDIQEKFKVDSSSGEIRLIDKLDYEETKSYEIQVKAVDKGSPPMSNHCKVLVKVLDVNDNAPELAVTSLYLPIREDAPLSTVIALITVSDRDSGANGQVTCSLMPHVPFKLVSTFKNYYSLVLDSALDRESLSVYELVVTARDGGSPSLWATARVSVEVADVNDNAPAFAQPEYTVFVKENNPPGCHIFTVSARDADAQENALVSYSLVERRVGERALSNYVSVHAESGKVYALQPLDHEELELLQFQVSARDAGVPPLGSNVTLQVFVLDENDNAPALLAPRVGGTIGAVSELVPRLVGAGHVVAKVRAVDADSGYNAWLSYELQPAAGGARIPFRVGLYTGEISTTRVLDEADLSRYRLLVLVKDHGEPALTATATVLVSLVESGQAPKASSRASVGVAGPEAALVDVN

SEQ ID NO: 1714 - protein, 667 aa, synthetic construct
  REGION 1..667: note = PCDHA10 (Q9Y5I2) ECD
QLHYSVYEEARHGTFVGRIAQDLGLELAELVQRLFRVASKRHGDLLEVNLQNGILFVNSRIDREELCGRSVECSIHLEVIVDRPLQVFHVDVEVKDINDNPPRFSVTEQKLSIPESRLLDSRFPLEGASDADVGENALLTYKLSPNEYFVLDIINKKDKDKFPVLVLRKLLDREENPQLKLLLTATDGGKPEFTGSVSLLILVLDANDNAPIFDRPVYEVKMYENQVNQTLVIRLNASDSDEGINKEMMYSFSSLVPPTIRRKFWINERTGEIKVNDAIDFEDSNTYEIHVDVTDKGNPPMVGHCTVLVELLDENDNSPEVIVTSLSLPVKEDAQVGTVIALISVSDHDSGANGQVTCSLTPHVPFKLVSTYKNYYSLVLDSALDRERVSAYELVVTARDGGSPPLWATASVSVEVADVNDNAPAFAQSEYTVFVKENNPPGCHIFTVSAWDADAQENALVSYSLVERRLGERSLSSYVSVHAESGKVYALQPLDHEELELLQFQVSARDGGVPPLGSNLTLQVFVLDENDNAPALLASPAGSAGGAVSELVLRSVVAGHVVAKVRAVDADSGYNAWLSYELQSAAVGARIPFRVGLYTGEISTTRALDETDSPRQRLLVLVKDHGEPSLTATATVLVSLVEGSQAPKASSRASVGVAPEVALVDVN

SEQ ID NO: 1715 - protein, 667 aa, synthetic construct
  REGION 1..667: note = PCDHA11 (Q9Y5I1) ECD
QLHYSVSEEAKHGTFVGRIAQDLGLELAELVQRLFRVASKTHGDLLEVNLQNGILFVNSRIDREELCGQSAECSIHLEVIVDRPLQVFHVNVEVKDINDNPPVFSLREQKLLIAESKQSDSRFPLEGASDADIEENALLTYRLSKNEYFSLDSPTNGKQIKRLSLILKKSLDREKTPELNLLLTATDGGKPELTGTVRLLVQVLDVNDNDPEFDKSEYKVSLMENAAKETLVLKLNATDRDEGVNGEVTYSLMSIKPNGRHLFTLDQNNGEVRVNGTLDYEENKFYKIEVQATDKGTPPMAGHCTVWVEILDTNDNSPEVAVTSLSLPVREDAQPSTVIALISVSDRDSGVNGQVTCSLTPHVPFKLVSTFKNYYSLVLDSALDRENVWAYELVVTARDGGSPSLWATARVSVEVADVNDNAPAFAQPEYTVFVKENNPPGCHIFTVSARDADAQENALVSYSLVERRLGDRALSSYVSVHAESGKVYALQPLDHEELELLQFQVSARDAGVPPLSSNVTLQVFVLDENDNAPALLATQAGSAGGAVNKLVPRSVGAGHVVAKVRAVDADSGYNAWLSYELQPAAGGSRIPFRVGLYTGEISTTRALDEADSPRHRLLVLVKDHGEPALTATATVLVSLVESGQAPKASSRTLAGAASPEAALVDVN

SEQ ID NO: 1716 - protein, 668 aa, synthetic construct
  REGION 1..668: note = PCDHA12 (Q9UN75) ECD
QLHYSVYEEAKHGTFVGRIAQDLGLELAELVPRLFRVASKRHGDLLEVNLQNGILFVNSRIDREKLCGRSAECSIHLEVIVDRPLQVFHVDVEVKDINDNPPVFREREQKVPVSESAPLDSHFPLEGASDADIGVNSLLTYALSLNENFELKIKTKKDKSILPELVLRKLLDREQTPKLNLLLMVIDGGKPELTGSVQIQITVLDVNDNGPAFDKPSYKVVLSENVQNDTRVIQLNASDPDEGLNGEISYGIKMILPVSEKCMFSINPDTGEIRIYGELDFEENNAYEIQVNAIDKGIPSMAGHSMVLVEVLDVNDNVPEVMVTSLSLPVQEDAQVGTVIALISVSDRDSGANGQVICSLTPHVPFKLVSTYKNYYSLVLDSALDRESVSAYELVVTARDGGSPSLWATARVSVEVADVNDNAPAFAQPEYTVFVKENNPPGCHIFTVSAWDADAQKNALVSYSLVERRVGEHALSSYVSVHAESGKVYALQPLDHEELELLQFQVSARDAGVPPLGSNVTLQVFVLDENDNAPALLATPAGSAGGAVSELVPRSVGAGHVVAKVRAVDADSGYNAWLSYELQPAAVGAHIPFHVGLYTGEISTTRILDEADAPRHRLLVLVKDHGEPALTSTATVLVSLVENGQAPKTSSRASVGAVDPEAALVDIN

SEQ ID NO: 1717 - protein, 668 aa, synthetic construct
  REGION 1..668: note = PCDHA13 (Q9Y5I0) ECD
QLHYSVPEEAKHGTFVGRIAQDLGLELAELVPRLFRVASKRHGDLLEVNLQNGILFVNSRIDREELCGRSAECSIHLEVIVDRPLQVFHVEVKVRDINDNPPIFPESKKRIIIAESRPPETRFPLDGASDADIGVNSALTYRLDPNDYFTLDAQNSLEQMSSLSLVLRKTLDREEIQEHSLLLTASDGGKPELTGTVQLLITILDVNDNAPEFYQSVYKVTVLENAFNGTLVIKLNATDPDDGTNGDIVYSFRRPVWPAVVYAFTINPNNGEIRTKGKLDFEEKKLYEISVEAVDKGNIPMAGHCTLLVEVLDVNDNAPEVTITSLSLPIREDTQPSAIIALISVSDRDSGSNGQVTCTLTPHVPFKLVSTYKNYYSLVLDSALDRESVSAYELVVTARDGGSPSLWATASVSVGVADVNDNAPAFAQPEYTVFVKENNPPGCHIFTVSAQDADAQENALVSYSLVERRVGERALSSYVSVHAESGKVYALQPLDHEELELLQFQVSARDSGVPPLGSNVTLQVFVLDENDNAPALLTPGAGSAGGTVSELMPRSVGAGHVVAKVRAVDADSGYNAWLSYELQLAAVGARIPFRVGLYTGEISTTRPLDEVDAPHHRLLVLVKDHGEPALTATATVLLSLVESGQAPQASSRASAGAVGPEAALVDVN

SEQ ID NO: 1718 - protein, 675 aa, synthetic construct
  REGION 1..675: note = PCDHA2 (Q9Y5H9) ECD
AWEVGSGQLRYSVPEEAKHGTFVGRIAQDLGLELEELVPRLFRVASKRHGDLLEVNLQNGILFVNSRIDREELCGRSAECSIHVEVIVDRPLQVFHVEVEVKDINDNPPIFPMTVKTIRFPESRLLDSRFPLEGASDADIGVNALLSYKLSSSEFFFLDIQANDELSESLSLVLGKSLDREETAEVNLLLVATDGGKPELTGTVQILIKVLDVNDNEPTFAQSVYKVKLLENTANGTLVVKLNASDADEGPNSEIVYSLGSDVSSTIQTKFTIDPISGEIRTKGKLDYEEAKSYEIQVTATDKGTPSMSGHCKISLKLVDINDNTPEVSITSLSLPISENASLGTVIALITVSDRDSGTNGHVTCSLTPHVPFKLVSTFKNYYSLVLDSALDRESVSAYELVVTARDGGSPSLWATTSVSIEVADVNDNAPAFAQPEYTVFVKENNPPGCHIFTVSAWDADAQENALVSYSLVERRVGERALSSYVSVHAESGKVYALQPLDHEEVELLQFQVSARDAGVPPLGSNVTLQVFVLDENDNAPALLAPRAGTAAGAVSELVPWSVGAGHVVAKVRAVDADSGYNAWLSYELQLGTGSARIPFRVGLYTGEISTTRALDEADSPRHRLLVLVKDHGEPALTATATVLVSLVESGQAPKASSRAWVGAAGSEATLVDVN

SEQ ID NO: 1719 - protein, 668 aa, synthetic construct
  REGION 1..668: note = PCDHA3 (Q9Y5H8) ECD
QLHYSVSEEAKHGTFVGRIAQDLGLELAELVPRLFRVASKRHGDLLEVNLQNGILFVNSRIDREELCGRSAECSIHLEVIVDRPLQVFHVEVEVKDINDNAPVFPMAVKNLFISESRQPGSRFSLEGASDADIGTNSLLTYSLDSTEYFTLDVKRNDEEIKSLGLVLKKNLNREDTPKHYLLITAIDGGKPELTGTTQLKITVLDVNDNAPAFERTIYKVRLLENAPNGTLVVTVNATDLDEGVNKDIAYSFNTDMSADILSKFHLDPVNGQISVKGNIDFEESKSYEIQVEATDKGNPPMSDHCTVLLEIVDINDNVPELVIQSLSLPVLEDSPLSTVIALISVSDRDSGVNGQVTCSLTPHVPFKLVSTFKNYYSLVLDSPLDRESVSAYELVVTARDGGSPSLWATASVSVEVADVNDNAPAFSQSEYTVFVKENNPPGCHIFTVSARDADAQENALVSYSLVERRVGERALSSYVSVHAESGKVYALQPLDHEELELLQFQVSARDAGVPPLGSNVTLQVFVLDENDNAPALLMPRVGGIGGAVSELVPRSVGAGHVVAKVRAVDADSGYNAWLSYELQPGTGGARIPFRVGLYTGEISTTRALDEVDAPRHRLLVLVKDHGEPSLTATATVLVSLVESGQAPKASSQASAGATGPEAALVDVN

SEQ ID NO: 1720 - protein, 668 aa, synthetic construct
  REGION 1..668: note = PCDHA4 (Q9UN74) ECD
QLHYSVSEEAKHGTFVGRIAQDLGLELAELVPRLFRVASKGRGGLLEVNLQNGILFVNSRIDREELCRRSAECSIHLEVIVDRPLQVFHVDVEVRDINDNPPVFPATQKNLSIAESRPLDSRFPLEGASDADIGENALLTYRLSPNEYFSLEKPPDDELVKGLGLILRKSLDREEAPEIFLVLTATDGGKPELTGTVQLLITVLDANDNAPAFDRTIYKVRLLENVPNGTLVIKLNASDLDEGLNGDIVYSFSNDISPNVKSKFHIDPITGQIIVKGYIDFEESKSYEIIVEGIDKGQLPLSGHCRVIVEVEDNNDNVPDLEFKSLSLPIREDAPLGTVIALISVSDKDMGVNGLVTCSLTSHVPFKLVSTFKNYYSLVLDSALDRESVSAYELVVTARDGGSPSLWATASVSVEVADVNDNAPAFAQPEYTVFVKENNPPGCHIFTVSAWDADAQENALVSYSLVERRVGERALSSYVSVHAESGKVYALQPLDHEELELLQFQVTARDAGVPPLGSNVTLQVFVLDENDNAPALLAPRAGGTGGAVSELVPWSVGVGHVVAKVRAVDADSGYNAWLSYELQPGTGGARIPFRVGLYTGEISTTRALDETDAPRHRLLVLVKDHGEPALTATATVLVSLVESGQAPKASSRALVGAVGPDAALVDVN

SEQ ID NO: 1721 - protein, 668 aa, synthetic construct
  REGION 1..668: note = PCDHA5 (Q9Y5H7) ECD
QLHYSIPEEAKHGTFVGRIAQDLGLELAELVPRLFRVASKGRGDLLEVNLQNGILFVNSRIDREELCRRRAECSIHLEVIVDRPLQVFHVEVAVKDINDNPPRFSRQEQRLFILESRMPDSRFPLEGASDLDIGANAQLRYRLNPNEYFDLDVKTNEEETNFLELVLRKSLDREETQEHRLLVIATDGGKPELTGTVQLLINVLDANDNAPEFDKSIYNVRLLENAPSGTLVIKLNASDADEGINKEIVYFFSNLVLDDVKSKFIINSNTGEIKVNGELDYEDYNSYEINIDAMDKSTFPLSGHCKVVVKLLDVNDNTPEMAITTLFLPVKEDAPLSTVIALISVSDRDSGANGQVTCSLMPHVPFKLVSTFKNYYSLVLDSALDRESVSVYELVVTARDGGSPSLWATASVSVEVADVNDNAPAFAQPQYTVFVKENNPPGCHIFTVSARDADAQENALVSYSLVERRVGERPLSSYVSVHAESGKVYALQPLDHEEVELLQFQVSARDAGVPPLGSNVTLQVFVLDENDNAPALLVPRVGGTGGAVSELVPRSVGAGHVVAKVRAVDPDSGYNAWLSYELQPAPGSARIPFRVGLYTGEISTTRSLDETEAPRHRLLVLVKDHGEPPLTATATVLVSLVESGQAPKASSRASAGAVGPEAALVDVN

SEQ ID NO: 1722 - protein, 668 aa, synthetic construct
  REGION 1..668: note = PCDHA6 (Q9UN73) ECD
QLHYSVPEEAKHGTFVGRIAQDLGLELAELVPRLFRMASKDREDLLEVNLQNGILFVNSRIDREELCGRSAECSIHLEVIVDRPLQVFHVDVEVRDINDNPPLFPVEEQRVLIYESRLPDSVFPLEGASDADVGSNSILTYKLSSSEYFGLDVKINSDDNKQIGLLLKKSLDREEAPAHNLFLTATDGGKPELTGTVQLLVTVLDVNDNAPTFEQSEYEVRIFENADNGTTVIRLNASDRDEGANGAISYSFNSLVAAMVIDHFSIDRNTGEIVIRGNLDFEQENLYKILIDATDKGHPPMAGHCTVLVRILDKNDNVPEIALTSLSLPVREDAQFGTVIALISVNDLDSGANGQVNCSLTPHVPFKLVSTFKNYYSLVLDSALDRESVSAYELVVTARDGGSPSLWATASLSVEVADMNDNAPAFAQPEYTVFVKENNPPGCHIFTVSARDADAQENALVSYSLVERRVGERALSSYISVHAESGKVYALQPLDHEELELLQFQVSARDAGVPPLGSNVTLQVFVLDENDNAPALLAPRVGGTGGAVSELVPRSLGAGQVVAKVRAVDADSGYNAWLSYELQPPASSARFPFRVGLYTGEISTTRVLDEADSPRHRLLVLVKDHGEPALTATATVLVSLVESGQAPKASSRASVGAAGPEAALVDVN

SEQ ID NO: 1723 - protein, 668 aa, synthetic construct
  REGION 1..668: note = PCDHA7 (Q9UN72) ECD
QLHYSVPEEAKHGNFVGRIAQDLGLELAELVPRLFRAVCKFRGDLLEVNLQNGILFVNSRIDREELCGRSAECSIHLEVIVERPLQVFHVDVEVKDINDNPPVFPATQRNLFIAESRPLDSRFPLEGASDADIGENALLTYRLSPNEYFFLDVPTSNQQVKPLGLVLRKLLDREETPELHLLLTATDGGKPELTGTVQLLITVLDNNDNAPVFDRTLYTVKLPENVSIGTLVIHPNASDLDEGLNGDIIYSFSSDVSPDIKSKFHMDPLSGAITVIGHMDFEESRAHKIPVEAVDKGFPPLAGHCTVLVEVVDVNDNAPQLTLTSLSLPIPEDAQPGTVITLISVFDRDFGVNGQVTCSLTPRVPFKLVSTFKNYYSLVLDSALDRESVSAYELVVTARDGGSPSLWATASVSVEVADVNDNAPAFAQPEYTVFVKENNPPGCHIFTVSAGDADAQKNALVSYSLVELRVGERALSSYVSVHAESGKVYALQPLDHEELELLQFQVSARDAGVPPLGSNVTLQVFVLDENDNAPALLAPRVGGTGGAVRELVPRSVGAGHVVAKVRAVDADSGYNAWLSYELQPVAAGASIPFRVGLYTGEISTTRALDETDAPRHRLLVLVKDHGEPSLTATATVLVSLVESGQAPKASSRASLGIAGPETELVDVN

SEQ ID NO: 1724 - protein, 668 aa, synthetic construct
  REGION 1..668: note = PCDHA8 (Q9Y5H6) ECD
QLHYSVPEEAKHGTFVGRIAQDLGLELAELVPRLFRVASKRHRDLLEVSLQNGILFVNSRIDREELCGRSAECSIHLEVIVDRPLQVFHVDVEVKDVNDNPPVFRVKDQKLFVSESRMPDSRFPLEGASDADVGANSVLTYRLSSHDYFMLDVNSKNDENKLVELVLRKSLDREDAPAHHLFLTATDGGKPELTGTVQLLVTVLDVNDNAPTFEQSEYEVRIFENADNGTTVIKLNASDPDEGANGAISYSFNSLVETMVIDHFSIDRNTGEIVIRGNLDFEQENLYKILIDATDKGHPPMAGHCTVLVRILDKNDNVPEIALTSLSLPVREDAQFGTVIALISVNDLDSGANGQVTCSLMPHVPFKLVSTFKNYYSLVLDSALDRERVSAYELVVTARDGGSPSLWATASLSVEVADVNDNAPAFAQPEYTVFVKENNPPGCHIFTVSARDADAQENALVSYSLVERRVGERSLSSYISVHTESGKVYALQPLDHEELELLQFQVSARDAGVPPLGSNVTLQVFVLDENDNAPALLEPRVGGTGGAASKLVPRSVGAGHVVAKVRAVDADSGYNAWLSYELQPAASSPRIPFRVGLYTGEISTTRVLDEADSPRHRLLVLVKDHGEPALTATATVLVSLVESGQAPKASSRQSAGVLGPEAALVDVN

SEQ ID NO: 1725 - protein, 668 aa, synthetic construct
  REGION 1..668: note = PCDHA9 (Q9Y5H5) ECD
QLHYSVPEEAEHGTFVGRIAQDLGLELAELVPRLFQLDSKGRGDLLEVNLQNGILFVNSRIDREELCGRSAECSIHLEVIVDRPLQVFHVDVEVKDINDNPPVFPATQKNLFIAESRPLDSRFPLEGASDADIGENALLTYRLSPNEYFFLDVPTSNQQVKPLGLVLRKLLDREETPELHLLLTATDGGKPELTGTVQLLITVLDNNDNAPVFDRTLYTVKLPENVSIGTLVIHPNASDLDEGLNGDIIYSFSSDVSPDIKSKFHMDPLSGAITVIGHMDFEESRAHKIPVEAVDKGFPPLAGHCTLLVEVVDVNDNAPQLTIKTLSVPVKEDAQLGTVIALISVIDLDADANGQVTCSLTPHVPFKLVSTYKNYYSLVLDRALDRESVSAYELVVTARDGGSPSLWATARVSVEVADVNDNAPAFAQSEYTVFVKENNPPGCHIFTVSARDADAQENALVSYSLVERRLGERSLSSYVSVHAESGKVYALQPLDHEELELLQFQVSARDAGVPPLGSNVTLQVFVLDENDNAPALLTPRMRGTDGAVSEMVLRSVGAGVVVGKVRAVDADSGYNAWLSYELQPETASASIPFRVGLYTGEISTTRALDETDAPRQRLLVLVKDHGEPALTATATVLVSLVESGQAPKSSSRASVGATGPEVTLVDVN

SEQ ID NO: 1726 - protein, 665 aa, synthetic construct
  REGION 1..665: note = PCDHAC1 (Q9H158) ECD
AGQLEYSVPEETERGVAVGNLSADLRLPAAAMSSRNFRFLSSHRELYFGVDLPSGNLVVREPADREQLCRAKAACVLTYDLVLEDPLELHKIRIHVLDTNDNSPLFPAGDVQLHIPEFLTPGARFTLPNAQDDDEGSNGILSYSLSPSQHFRLDMGSRVDGSEYPELVLEKALDREQRATHLLVLTARDGGLPARSGDAQVTIIVVDTNDNAPVFERSVYRTKVPETAPNGTVLFRVQALDPDEGSNGEVQYSLSNSTQAELRHRFHVHPKSGEVQVAASLGPPETLLEAYIEARDEGVFGLASTAKLLVEVTDVNDHAPELDFLTLSNPVPEDAAPGTVIALFSVKDEDLDSNGRVICGMSSAGPFQLTASFDNYYSLLIDGPLDREQISEYQVLITASDSGSPPLSTRRTITVSVADVNDNTPNFPQPQQELFVAENNGPGASLGRVFAQDPDLGKNGLVSYELLDVISEGPSASSLLAVESSSGAITAKTSFDFEQLRGFHFQVEGRDGGIPPRSATVTINLFVVDRNDNYPVILFPLPRNGSVPVEIVPRSARTGHLVTKVVAEDADSGSNAWLSYHISRASDSSLFRISANIGELRTARLVLPTDAVKQRVVVVVRDHGDPPLSSSVTLGVLLSNSVPQLLPDFEDVWEPGGQLSAQNLY

SEQ ID NO: 1727 - protein, 666 aa, synthetic construct
  REGION 1..666: note = PCDHAC2 (Q9Y5I4) ECD
QLRYSVPEEQAPGALVGNVARALGLELRRLGPGCLRINHLGAPSPRYLELDLTSGALFVNERIDREALCEQRPRCLLSLEVLAHNPVAVSAVEVEILDINDNSPRFPRPNYQLQVSESVAPGARFHIESAQDPDVGANSVQTYELSPSEHFELDLKPLQENSKVLELVLRKGLDREQAALHHLVLTAVDGGIPARSGTAQISVRVLDTNDNSPAFDQSTYRVQLREDSPPGTLVVKLNASDPDEGSNGELRYSLSSYTSDRERQLFSIDASTGEVRVIGGLDYEEASSYQIYVQATDRGPVPMAGHCKVLVDIVDVNDNAPEVVLTDLYSPVPENATPNTIVAVLSVNDQDSGPNRKVSLGLEATLPFRLNGFGNSYTLVVSGPLDRERVAVYNITVTATDGGIPQLTSLRTLKVEISDINDNPPSFLEDSYSIYIQENNLPGVLLCTVQATDPDEKENAEVTYSLLEREIQGLPVTSYVSINSASGSLYAVNSFDYEKFREFFVTVEAQDKGSPPLSSTVTANVYVVDMNDHAPHILYPTSTNSSAAFEMVPRTAPAGYLVTKVIAMDSDSGQNAWLFYHLAQTSDLDLFKVELHTGEIRTTRKMGDESGSTFNLTVVVRDNGEPSLSASVAITVAVVDRVSKILPDTQRHVKSPRTYSEITLYL

SEQ ID NO: 1728 - protein, 663 aa, synthetic construct
  REGION 1..663: note = PCDHB1 (Q9Y5F3) ECD
TTIRYSVAEEMESGSFVANVAKDLGLEVGKLAARGARLVSEGNKMHFRLHRKTGDLFVKEKLDRESLCGKADPCVLHFEVVLVEPLQSFRAEVRVFDINDNAPVFLNKEPLLKIPESTPLGSRFPLQSAQDLDVGLNGLQNYTLSANGYFHLHTRFCSHGPKYAELVLNKPLDREEQPEVNLTITAVDGGSPPKSGTAHIHVVVLDVNDHVPQFSRLVYRAQVSENSPNGSLVATVTAVDLDEGTNKAITYSLAQNPEAILKTFQIDPQNGEVRLRGPLDFEAIETYDIDIQATDGGGLSAHSKVLVEVVDVNDNPPEVMVSSVSSPLPEDSPPQTVVALFTIRDRDIRVGGKVTCFLREDLPFVIKPTFGNSYSLVTDRSLDREEVSGYNITIVAMDTGPPSLSAETMIEVLISDVNDNPPIFREDSYILTVRENNSPAVFIGKVHAEDLDLGENAQITYSLLPPKNGDLSVFAYISINSGNGKLYALRTMDYEAIQDFQFVVKATDGGFLSLSSQVTVRVVVLDDNDNRPMILYPLQNGTLPCNDLVPRSAEAGYLVTKVVAVDGDSGQNSWLSYHLLKATDLGLFSVQRQNGEIHTLRQISERDPMMQKLIILVQDHGQPALSTTVSLNILLVDGFSEPYLQFQDPTKHSRKVNPSTKYL

SEQ ID NO: 1729 - protein, 666 aa, synthetic construct
  REGION 1..666: note = PCDHB10 (Q9UN67) ECD
GSGFGRYSVTEETEKGSFVVNLAKDLGLAEGELAARGTRVVSDDNKQYLLLDSHTGNLLTNEKLDREKLCGPKEPCMLYFQILMDDPFQIYRAELRVRDINDHAPVFQDKETVLKISENTAEGTAFRLERAQDPDGGLNGIQNYTISPNSFFHINISGGDEGMIYPELVLDKALDREEQGELSLTLTALDGGSPSRSGTSTVRIVVLDVNDNAPQFAQALYETQAPENSPIGFLIVKVWAEDVDSGVNAEVSYSFFDASENIRTTFQINPFSGEIFLRELLDYELVNSYKINIQAMDGGGLSARCRVLVEVLDTNDNPPELIVSSFSNSVAENSPETPLAVFKINDRDSGENGKMVCYIQENLPFLLKPSVENFYILITEGALDREIRAEYNITITVTDLGTPRLKTEHNITVLVSDVNDNAPAFTQTSYTLFVRENNSPALHIGSVSATDRDSGTNAQVTYSLLPPQDPHLPLASLVSINADNGHLFALRSLDYEALQAFEFRVGATDRGSPALSREALVRVLVLDANDNSPFVLYPLQNGSAPCTELVPRAAEPGYLVTKVVAVDGDSGQNAWLSYQLLKATEPGLFGVWAHNGEVRTARLLSERDAAKHRLVVLVKDNGEPPRSATATLHLLLVDGFSQPYLPLPEAAPAQAQAEADLLTVYL

SEQ ID NO: 1730 - protein, 664 aa, synthetic construct
  REGION 1..664: note = PCDHB11 (Q9Y5F2) ECD
GSETWSFSVAEEMQSGSFVGNLAKDLGLKVRELSSRGARVVSNDKKQRLQLDINTGDLLLSETLDREELCGSIEPCVLHLQVLMQNPTQFLQIELQVRDINDHSPIFSEKQMLLEIPENSPVGAVFLLESAKDLDVGINAVKSYTISPNSHFHIKMRVIPDNRKYPELVLDKALDYEELPELSFILSALDGGSPPRSGTALVRVVVVDINDNSPEFEQAFYEVKIRENSILGSLILIVSAWDLDSGTNGEICYTFSHASEDIRKTFEINQKSGEITLRAPLDFETIESYSIIIQATDGGGLFGKSTVIIHVIDVNDNAPEITVSSITSPIPENTPETVVMVFSIQDIDSGDNGRIVCSIPEDLPFVLKSSVENYYTLETERPLDRESTAEYNITITVTDLGIPRLKTEHNTTVLVSDVNDNAPTFTQTSYTLFVRENNSPALHIGSVSATDRDSGTNAQVNYSLLPPQDLHLPLASLVSINTDNGHLFALRSLDYEALQAFDFRVGATDRGSPALSSEALVRVLVLDANDNSPFVLYPLQNGSAPCTELVPRAAEPGYLVTKVVAVDGDSGQNAWLSYQLLKATEPGLFGVWAHNGEVRTARLLSERDAAKHRLVVLVKDNGEPPRSATATLQVLLVDGFSQPYLPLPEAAPAQAQADSLTVYL

SEQ ID NO: 1731 - protein, 664 aa, synthetic construct
  REGION 1..664: note = PCDHB12 (Q9Y5F1) ECD
GSETGNFLVMEELQSGSFVGNLAKTLGLEVSELSSRGARVVSNDNKECLQLDTNTGDLLLREMLDREELCGSNEPCVLYFQVLMKNPTQFLQIELQVRDINDHSPVFLEKEMLLEIPENSPVGAVFLLESAKDLDVGINAVKSYTINPNSHFHVKIRVNPDNRKYPELVLDKALDYEERPELSFILTALDGGSPPRSGTALVRVVVVDINDNSPEFEQAFYEVKILENSILGSLVVTVSAWDLDSGTNSELSYTFSHASEDIRKTFEINQKSGDITLTAPLDFEAIESYSIIIQATDGGGLFGKSTVRIQVMDVNDNAPEITVSSITSPIPENTPETVVMVFRIRDRDSGDNGKMVCSIPEDIPFVLKSSVNNYYTLETERPLDRESRAEYNITITVTDLGTPRLKTEHNITVLVSDVNDNAPAFTQTSYALFVRENNSPALHIGSISATDRDSGTNAQVNYSLLPSQDPHLPLASLVSINADNGHLFALRSLDYEALQGFQFRVGATDHGSPALSSEALVRVLVLDANDNSPFVLYPLQNGSAPCTELVPWAAEPGYLVTKVVAVDGDSGQNAWLSYQLLKATEPGLFGVWAHNGEVRTARLLSERDAAKHRLVVLVKDNGEPPRSATATLHVLLVDGFSQPYLPLPEAAPAQAQADSLTVYL

SEQ ID NO: 1732 - protein, 662 aa, synthetic construct
  REGION 1..662: note = PCDHB13 (Q9Y5F0) ECD
AEPRSYSVVEETEGSSFVTNLAKDLGLEQREFSRRGVRVVSRGNKLHLQLNQETADLLLNEKLDREDLCGHTEPCVLRFQVLLESPFEFFQAELQVIDINDHSPVFLDKQMLVKVSESSPPGTTFPLKNAEDLDVGQNNIENYIISPNSYFRVLTRKRSDGRKYPELVLDKALDREEEAELRLTLTALDGGSPPRSGTAQVYIEVLDVNDNAPEFEQPFYRVQISEDSPVGFLVVKVSATDVDTGVNGEISYSLFQASEEIGKTFKINPLTGEIELKKQLDFEKLQSYEVNIEARDAGTFSGKCTVLIQVIDVNDHAPEVTMSAFTSPIPENAPETVVALFSVSDLDSGENGKISCSIQEDLPFLLKSAENFYTLLTERPLDRESRAEYNITITVTDLGTPMLITQLNMTVLIADVNDNAPAFTQTSYTLFVRENNSPALHIRSVSATDRDSGTNAQVTYSLLPPQDPHLPLTSLVSINADNGHLFALRSLDYEALQGFQFRVGASDHGSPALSSEALVRVVVLDANDNSPFVLYPLQNGSAPCTELVPRAAEPGYLVTKVVAVDGDSGQNAWLSYQLLKATELGLFGVWAHNGEVRTARLLSERDAAKHRLVVLVKDNGEPPRSATATLHVLLVDGFSQPYLPLPEAAPTQAQADLLTVYL

SEQ ID NO: 1733 - protein, 660 aa, synthetic construct
  REGION 1..660: note = PCDHB14 (Q9Y5E9) ECD
GTESAHYSVAEETEIGSFVANLARDLGLGVEELSSREARVVSDDNKKYLHLDLLTGNLLLNEKLDRDELCGSTEPCVLHFQVVLENPLQFFRFELCVKDINDHSPTFLDKEILIKISEGTTVGATFLMESAQDLDVGSNSLQNYTISPNSHFYIKIPDSSDRKIYPELVLDRALDYEQEAELRLTLTAVDGGSPPKSGTTLVLIKVLDINDNAPEFPQSLYEVQVPEDRPLGSWIATISAKDLDAGNYGKISYTFFHASEDIRKTFEINPISGEVNLRSPLDFEVIQSYTINIQATDGGGLSGKCTLLVKVMDINDNPPEVTISSITKRIPENASETLVALFSILDQDSGDNGRMICSIQDNLPFFLKPTFKNFFTLVSEKALDRESQAEYNITITVTDLGTPRLKTEYNITVLLSDVNDNAPTFTQTSYTLFVRENNSPALHIGSVSATDRDSGTNAQVNYSLLPPQDRHLPLASLVSINADNGHLFALRSLDYEALQEFEFRVGATDRGSPALSSEALVRVLVLDANDNSPFVLYPLQNGSAPCTELVPRAAEPGYLVTKVVAVDGDSGQNAWLSYQLLKATEPGLFGVWAHNGEVRTARLLSERDAAKHRLVVLVKDNGEPPRSATATLHVLLVDGFSQPYLPLPEAAPAQAQADSL

SEQ ID NO: 1734 - protein, 664 aa, synthetic construct
  REGION 1..664: note = PCDHB15 (Q9Y5E8) ECD
GWEPRRYSVMEETERGSFVANLANDLGLGVGELAERGARVVSEDNEQGLQLDLQTGQLILNEKLDREKLCGPTEPCIMHFQVLLKKPLEVFRAELLVTDINDHSPEFPEREMTLKIPETSSLGTVFPLKKARDLDVGSNNVQNYNISPNSHFHVSTRTRGDGRKYPELVLDTELDREEQAELRLTLTAVDGGSPPRSGTVQILILVLDANDNAPEFVQALYEVQVPENSPVGSLVVKVSARDLDTGTNGEISYSLYYSSQEIDKPFELSSLSGEIRLIKKLDFETMSSYDLDIEASDGGGLSGKCSVSVKVLDVNDNFPELSISSLTSPIPENSPETEVALFRIRDRDSGENGKMICSIQDDVPFKLKPSVENFYRLVTEGALDRETRAEYNITITITDLGTPRLKTEQSITVLVSDVNDNAPAFTQTSYTLFVRENNSPALHIGSVSATDRDSGTNAQVTYSLLPPRDPHLPLTSLVSINTDNGHLFALQSLDYEALQAFEFRVGATDRGFPALSSEALVRVLVLDANDNSPFVLYPLQNGSAPCTELVPRAAEPGYLVTKVVAVDGDSGQNAWLSYQLLKATEPGLFGVWAHNGEVRTARLLSERDVAKHRLVVLVKDNGEPPRSATATLQVLLVDGFSQPYLPLPEAAPAQAQADSLTVYL

SEQ ID NO: 1735 - protein, 662 aa, synthetic construct
  REGION 1..662: note = PCDHB16 (Q9NRJ7) ECD
ELGSYSVVEETERGSFVANLGKDLGLGLTEMSTRKARIISQGNKQHLQLKAQTGDLLINEKLDREELCGPTEPCILHFQVLMENPLEIFQAELRVIDINDHSPMFTEKEMILKIPENSPLGTEFPLNHALDLDVGSNNVQNYKISPSSHFRVLIHEFRDGRKYPELVLDKELDREEEPQLRLTLTALDGGSPPRSGTAQVRIEVVDINDNAPEFEQPIYKVQIPENSPLGSLVATVSARDLDGGANGKISYTLFQPSEDISKTLEVNPMTGEVRLRKQVDFEMVTSYEVRIKATDGGGLSGKCTLLLQVVDVNDNPPQVTMSALTSPIPENSPEIVVAVFSVSDPDSGNNGKTISSIQEDLPFLLKPSVKNFYTLVTERALDREARAEYNITLTVTDMGTPRLKTEHNITVQISDVNDNAPTFTQTSYTLFVRENNSPALHIGSVSATDRDSGTNAQVTYSLLPPQDPHLPLASLVSINADNGHLFALRSLDYEALREFEFRVSATDRGSPALSSEALVRVLVLDANDNSPFVLYPLQNGSAPCTELVPRAAEPGYLVTKVVAVDGDSGQNAWLSYQLLKATEPGLFGVWAHNGEVRTARLLSERDAAKQRLVVLVKDNGEPPRSATATLHVLLVDGFSQPFLPLPEAAPGQTQANSLTVYL

SEQ ID NO: 1736 - protein, 662 aa, synthetic construct
  REGION 1..662: note = PCDHB2 (Q9Y5E7) ECD
QPRHYSVAEETESGSFVANLLKDLGLEIGELAVRGARVVSKGKKMHLQFDRQTGDLLLNEKLDREELCGPTEPCVLPFQVLLENPLQFFQAELRIRDVNDHSPVFLDKEILLKIPESITPGTTFLIERAQDLDVGTNSLQNYTISPNFHFHLNLQDSLDGIILPQLVLNRALDREEQPEIRLTLTALDGGSPPRSGTALVRIEVVDINDNVPEFAKLLYEVQIPEDSPVGSQVAIVSARDLDIGTNGEISYAFSQASEDIRKTFRLSAKSGELLLRQKLDFESIQTYTVNIQATDGGGLSGTCVVFVQVMDLNDNPPELTMSTLINQIPENLQDTLIAVFSVSDPDSGDNGRMVCSIQDDLPFFLKPSVENFYTLVISTALDRETRSEYNITITVTDFGTPRLKTEHNITVLVSDVNDNAPAFTQTSYTLFVRENNSPALHIGSVSATDRDSGTNAQVTYSLLPPQDPHLPLASLVSINADNGHLFALQSLDYEALQAFEFRVGAADRGSPALSSEALVRVLVLDANDNSPFVLYPLQNGSAPCTELVPRAAEPGYLVTKVVAVDGDSGQNAWLSYQLLKATEPGLFGVWAHNGEVRTARLLRERDAAKQRLVVLVKDNGEPPRSATATLHVLLVDGFSQPYLLLPEAAPAQAQADLLTVYL

SEQ ID NO: 1737 - protein, 664 aa, synthetic construct
  REGION 1..664: note = PCDHB3 (Q9Y5E6) ECD
GSESRRYSVAEEKEKGFLIANLAKDLGLRVEELAARGAQVVSKGNKQHFQLSHQTGDLLLNEKLDREELCGPTEPCILHFQILLQNPLQFVTNELRIIDVNDHSPVFFENEMHLKILESTLPGTVIPLGNAEDLDVGRNSLQNYTITPNSHFHVLTRSRRDGRKYPELVLDKALDPEEQPELSLTLTALDGGSPPRSGTAQINIQVLDINDNAPEFAQPLYEVAVLENTPVNSVIVTVSASDLDTGSFGTISYAFFHASEEIRKTFQLNPITGDMQLVKYLNFEAINSYEVDIEAKDGGGLSGKSTVIVQVVDVNDNPPELTLSSVNSPIPENSGETVLAVFSVSDLDSGDNGRVMCSIENNLPFFLKPSVENFYTLVSEGALDRETRSEYNITITITDLGTPRLKTKYNITVLVSDVNDNAPAFTQISYTLFVRENNSPALHIGSVSATDRDSGTNAQVTYSLLPPQDPHLPLSSLVSINADNGHLFALRSLDYEALQAFEFRVGATDRGSPALSSEALVRVLVLDANDNSPFVLYPLQNGSAPCTELVPRAAEPGYLVTKVVAVDGDSGQNAWLSYQLLKATEPGLFGVWAHNGEVRTARLLSERDAAKHRLVVLVKDNGEPPRSATATLHVLLVDGFSQPYLPLPEAAPAQAQADLLTVYL

SEQ ID NO: 1738 - protein, 662 aa, synthetic construct
  REGION 1..662: note = PCDHB4 (Q9Y5E5) ECD
EPIRYSVLEETESGSFVAHLAKDLGLGIGELASRSARVLSDDDKQRLQLDRQTGDLLLREKLDREELCGPIEPCVLHFQVFLEMPVQFFQGELLIQDINDHSPIFPEREVLLKILENSQPGTLFPLLIAEDLDVGSNGLQKYTISPNSHFHILTRNHSEGKKYPDLVQDKPLDREEQPEFSLTLVALDGGSPPRSGTVMVRILIMDINDNAPEFVHTPYGVQVLENSPLDSPIVRVLARDIDAGNFGSVSYGLFQASDEIKQTFSINEVTGEILLKKKLDFEKIKSYHVEIEATDGGGLSGKGTVVIEVVDVNDNPPELIISSLTSSIPENAPETVVSIFRIRDRDSGENGKMICSIPDNLPFILKPTLKNFYTLVTERPLDRETSAEYNITIAVTDLGTPRLKTQQNITVQVSDVNDNAPAFTQTSYTLFVRENNSPALHIGSVSATDRDSGTNAQVTYSLLPPQDPHLPLASLVSINADNGHLFALRSLDYEALQAFEFRVGASDRGSPALSSEALVRVLVLDTNDNSPFVLYPLQNGSAPCTELVPRAAEPGYLVTKVVAVDGDSGQNAWLSYQLLKATEPGLFGVWAHNGEVRTARLLSERDAAKHRLVVLVKDNGEPPRSATATLHVLLVDGFSQPYLPLPEAAPAQAQADSLTVYL

SEQ ID NO: 1739 - protein, 659 aa, synthetic construct
  REGION 1..659: note = PCDHB5 (Q9Y5E4) ECD
VRYSIPEETESGYSVANLAKDLGLGVGELATRGARMHYKGNKELLQLDIKTGNLLLYEKLDREVMCGATEPCILHFQLLLENPVQFFQTDLQLTDINDHAPEFPEKEMLLKIPESTQPGTVFPLKIAQDFDIGSNTVQNYTISPNSHFHVATHNRGDGRKYPELVLDKALDREERPELSLTLTALDGGAPPRSGTTTIRIVVLDNNDNAPEFLQSFYEVQVPENSPLNSLVVVVSARDLDAGAYGSVAYALFQGDEVTQPFVIDEKTAEIRLKRALDFEATPYYNVEIVATDGGGLSGKCTVAIEVVDVNDNAPELTMSTLSSPTPENAPETVVAVFSVSDPDSGDNGRMICSIQNDLPFLLKPTLKNFYTLVTQRTLDRESQAEYNITITVTDMGTPRLKTEHNITVLVSDVNDNAPAFTQTSYTLFVRENNSPALHIGSVSATDRDSGTNAQVTYSLLPPQNPHLRLASLVSINADNGHLFALRSLDYEALQAFEFRVGATDRGSPALSSEALVRVLVLDANDNSPFVLYPLQNGSAPCTELVPRAAEPGYLVTKVVAVDGDSGQNAWLSYQLLKATEPGLFSMWAHNGEVRTARLLSERDAAKHRLVVLVKDNGEPPRSATATLHVLLVDGFSQPYLPLPEAAPAQAQADSLTVYL

SEQ ID NO: 1740 - protein, 661 aa, synthetic construct
  REGION 1..661: note = PCDHB6 (Q9Y5E3) ECD
ESIQYSVLEETESGTFVANLTKDLGLRVGELASRGARVVFKGNRQHLQFDPQTHDLLLNEKLDREELCGSTEPCVLPFQVLLENPLQFFQASLRVRDINDHAPEFPAREMLLKISEITMPGKIFPLKMAHDLDTGSNGLQRYTISSNPHFHVLTRNRSEGRKFPELVLDKPLDREEQPQLRLTLIALDGGSPPRSGTSEIQIQVLDINDNVPEFAQELYEAQVPENNPLGSLVITVSARDLDAGSFGKVSYALFQVDDVNQPFEINAITGEIRLRKALDFEEIQSYDVDVEATDGGGLSGKCSLVVRVLDVNDNAPELTMSFFISLIPENLPEITVAVFSVSDADSGHNQQVICSIENNLPFLLRPSVENFYTLVTEGALDRESRAEYNITITVTDLGTPRLKTQQSITVQVSDVNDNVPAFTQTSYTLFVRENNSPALHIGSVSATDRDSGINAQVTYSLLPPQDPHLPLSSLVSINADNGHLFALRSLDYEALQSFEFRVGATDRGSPALSSEALVRLLVLDANDNSPFVLYPLQNGSAPCTELVPRAAEPGYLVTKVVAVDGDSGQNAWLSYQLLKATELGLFGVWAHNGEVRTARLLSERDAAKHRLVVLVKDNGEPPRSATATLHVLLVDGFSQPYLPLPEAAPAQAQADSLTVYL

SEQ ID NO: 1741 - protein, 662 aa, synthetic construct
  REGION 1..662: note = PCDHB7 (Q9Y5E2) ECD
GAEPLRYFVAEETERGTFLTNLAKDLGLGVGELRARGTRIVSDQNMQILLLSSLTGDLLLNEKLDREELCGPREPCVLPFQLLLEKPFQIFRAELWVRDINDHAPVFLDREISLKILESTTPGAAFLLESAQDSDVGTNSLSNYTISPNAYFHINVHDSGEGNIYPELVLNQVLDREEIPEFSLTLTALDGGSPPRSGTALVRILVLDVNDNAPDFVRSLYKVQVPENSPVGSMVVSVSARDLDTGSNGEIAYAFSYATERILKTFQINPTSGSLHLKAQLDYEAIQTYTLTIQAKDGGGLSGKCTVVVDVTDINDNRPELLLSSLTSPIAENSPETVVAVFRIRDRDSGNNGKTVCSIQDDVPFILKPSVENFYTLVTEKPLDRERNTEYNITITVTDLGTPRLKTEHNITVLVSDVNDNAPAFTQTSYTLFVRENNSPALPIGSVSATDRDSGTNAQVIYSLLPSQDPHLPLASLVSINADNGHLFALRSLDYEALQAFEFRVGATDRGSPALSSEALVRVLVLDANDNSPFVLYPLQNSSAPCTEPLPRAAEPGYLVTKVVAVDGDSGQNAWLSYQLLKATEPGLFGVWAHNGEVRTARLLSERDAAKQRLVVLVKDNGEPPRSATATLHVLLVDGFSQPYLRLPEAAPDQANSLTVYL

SEQ ID NO: 1742 - protein, 662 aa, synthetic construct
  REGION 1..662: note = PCDHB8 (Q9UN66) ECD
EPRSYSVVEETEGSSFVTNLAKDLGLEQREFSRRGVRVVSRGNKLHLQLNQETADLLLNEKLDREDLCGHTEPCVLRFQVLLESPFEFFQAELQVIDINDHSPVFLDKQMLVKVSESSPPGTAFPLKNAEDLDIGQNNIENYIISPNSYFRVLTRKRSDGRKYPELVLDKALDREEEAELRLTLTALDGGSPPRSGTAQVYIEVVDVNDNAPEFEQPFYRVQISEDSPISFLVVKVSATDVDTGVNGEISYSLFQASDEISKTFKVDFLTGEIRLKKQLDFEKFQSYEVNIEARDAGGFSGKCTVLIQVIDVNDHAPEVTMSAFTSPIPENAPETVVALFSVSDLDSGENGKISCSIQEDLPFLLKSSVGNFYTLLTETPLDRESRAEYNVTITVTDLGTPRLTTHLNMTVLVSDVNDNAPAFTQTSYTLFVRENNSPALHIGSVSATDRDSGTNAQVTYSLLPPQDPHLPLASLVSINTDNGHLFALRSLDYEALQAFEFRVGASDRGSPALSSEALVRVLVLDANDNSPFVLYPLQNGSAPCTELVPRAAEPGYLVTKVVAVDGDSGQNAWLSYQLLKATEPGLFGVWAHNGEVRTARLLSERDAAKQRLVVLVKDNGEPPCSATATLHVLLVDGFSQPYLPLPEAAPAQGQADSLTVYL

SEQ ID NO: 1743 - protein, 664 aa, synthetic construct
  REGION 1..664: note = PCDHB9 (Q9Y5E1) ECD
GSGFGRYSVTEETEKGSFVVNLAKDLGLAEGELAARGTRVVSDDNKQYLLLDSHTGNLLTNEKLDREKLCGPKEPCMLYFQILMDDPFQIYRAELRVRDINDHSPVFRHKEMVLKISENTAEGTAFRLERAQDPDEGHNSIQNYTISSNSFFHIKISGSDEGMIYPELVLDKALDREEQEELSLTLTALDGGSPSRSGTSTIRIVVLDVNDNAPQFAQALYETQAPENSPVGSLIVKVSAGDADSGVNAEVSYSFFDASEDILTTFQINPFSGEIFLRELLDYELVNSYKINIQAMDGGGLSARCTVLIKVLDSNDNPPELIISSLSNSVAENSPGIVLAVFKIKDRDSGENGKTICYVQDNLPFFLKPSVDNFYILMTEGALDRESKAEYNITITVTDLGTPRLKTEHSITLQVSDVNDNAPAFTQTSYTLFVRENNSPALHIGSVSATDRDSGTNAQVTYSLLPPQDPHLPLASLVSINADNGHLFALRSLDYEALQAFDFRVGASDRGSPALSSEALVRVLVLDANDNSPFVLYPLQNGSAPCTELVPRAAEPGYLVTKVVAVDGDSGQNAWLSYQLLKATEPGLFGVWAHNGEVRTARLLSERDAAKHRLVVLVKDNGEPPRSATATLHVLLVDGFSQPYLPLPEAAPAQAQADLLTVYL

SEQ ID NO: 1744 - protein, 664 aa, synthetic construct
  REGION 1..664: note = PCDHGA1 (Q9Y5H4) ECD
GNIHYSVPEETDKGSFVGNIAKDLGLQPQELADGGVRIVSRGRMPLFALNPRSGSLITARRIDREELCAQSMPCLVSFNILVEDKMKLFPVEVEIIDINDNTPQFQLEELEFKMNEITTPGTRVSLPFGQDLDVGMNSLQSYQLSSNPHFSLDVQQGADGPQHPEMVLQSPLDREEEAVHHLILTASDGGEPVRSGTLRIYIQVVDANDNPPAFTQAQYHINVPENVPLGTQLLMVNATDPDEGANGEVTYSFHNVDHRVAQIFRLDSYTGEISNKEPLDFEEYKMYSMEVQAQDGAGLMAKVKVLIKVLDVNDNAPEVTITSVTTAVPENFPPGTIIALISVHDQDSGDNGYTTCFIPGNLPFKLEKLVDNYYRLVTERTLDRELISGYNITITAIDQGTPALSTETHISLLVTDINDNSPVFHQDSYSAYIPENNPRGASIFSVRAHDLDSNENAQITYSLIEDTIQGAPLSAYLSINSDTGVLYALRSFDYEQFRDMQLKVMARDSGDPPLSSNVSLSLFLLDQNDNAPEILYPALPTDGSTGVELAPLSAEPGYLVTKVVAVDRDSGQNAWLSYRLLKASEPGLFSVGLHTGEVRTARALLDRDALKQSLVVAVQDHGQPPLSATVTLTVAVADRISDILADLGSLEPSAKPNDSDLTLY

SEQ ID NO: 1745 - protein, 664 aa, synthetic construct
  REGION 1..664: note = PCDHGA10 (Q9Y5H3) ECD
RQISYSIPEELEKGSFVGNISKDLGLAPRELAERGVRIVSRGRTQLFSLNPRSGSLITAGRIDREELCAQSARCVVSFNILVEDRVKLFGIEIEVTDINDNAPKFQAENLDVKINENVAAGMRFPLPEAIDPDVGVNSLQSYQLSPNKHFSLRVQSRANGVKYPELVLEHSLDREEEAIHHLVLTASDGGDPLRSGTVLVSVTVFDANDNAPVFTLPEYRVSVPENLPVGTQLLTVTATDRDEGANGEVTYSFRKLPDTQLLKFQLNKYTGEIKISENLDYEETGFYEIEIQAEDGGAYLATAKVLITVEDVNDNSPELTITSLFSPVTEDSPLGTVVALLNVHDLDSEQNGQVTCSILAYLPFKLEKSIDSYYRLVIHRALDREQVSSYNITVTATDGGSPPLSTEAHFMLQVADINDNPPTFSQVSYFTYIPENNARGASIFSVTALDPDSKENAQIIYSLAEDTIQGVPLSSYISINSDTGVLYALRSFDYEQFHELQMQVTASDSGDPPLSSNVSLSLFVLDQNDNAPEILYPALPTDGSTGVELAPRSAEPGYLVTKVVAVDRDSGQNAWLSYRLLKASEPGLFAVGEHTGEVRTARALLDRDALKQSLVVAVQDHGQPPLSATVTLTVAVADSIPQVLADLGSFESPANSETSDLTLY

SEQ ID NO: 1746 - protein, 664 aa, synthetic construct
  REGION 1..664: note = PCDHGA11 (Q9Y5H2) ECD
RQIRYSVPEETEKGSFVGNISKDLGLEPRELAKRGVRIVSRGKTQLFAVNPRSGSLITAGRIDREELCETVSSCFLNMELLVEDTLKIYGVEVEIIDINDNAPSFQEDEVEIKVSEHAIPGARFALPNARDPDVGVNSLQSYQLSPNNYFSLQLRGRTDGAKNPELVLEGSLDREKEAAHLLLLTALDGGDPIRKGAVPIRVVVLDVNDHIPMFTQSVYRVSVPENISSGTRVLMVNATDPDEGINGEVMYSFRNMESKASEIFQLDSQTGEVQVRGSLDFEKYRFYEMEIQGQDGGGLFTTTTMLITVVDVNDNAPEITITSSINSILENSPPGTVIALLNVQDQDSGENGQVSCFIPNHLPFKLEKTYGNYYKLITSRVLDRELVQSYNITLTATDQGSPPLSAETHVWLNVADDNDNPPVFPHSSYSAYIPENNPRGASIFSVTALDPDSKQNALVTYSLTDDTVQGVPLSSYVSINSNTGVLYALQSFDYEQFRDLELRVIARDSGDPPLSSNVSLSLFVLDQNDNAPEILYPALPTDGSTGVELAPRSAEPGYLVTKVVAVDKDSGQNAWLSYRLLKASEPGLFAVGEHTGEVRTARALLDRDALKQSLVVAVQDHGQPPLSATVTLTVAVADSIPEVLADLGSLESLANSETSDLSLY

SEQ ID NO: 1747 - protein, 663 aa, synthetic construct
  REGION 1..663: note = PCDHGA12 (O60330) ECD
QIRYSVPEELEKGSRVGDISRDLGLEPRELAERGVRIIPRGRTQLFALNPRSGSLVTAGRIDREELCMGAIKCQLNLDILMEDKVKIYGVEVEVRDINDNAPYFRESELEIKISENAATEMRFPLPHAWDPDIGKNSLQSYELSPNTHFSLIVQNGADGSKYPELVLKRALDREEKAAHHLVLTASDGGDPVRTGTARIRVMVLDANDNAPAFAQPEYRASVPENLALGTQLLVVNATDPDEGVNAEVRYSFRYVDDKAAQVFKLDCNSGTISTIGELDHEESGFYQMEVQAMDNAGYSARAKVLITVLDVNDNAPEVVLTSLASSVPENSPRGTLIALLNVNDQDSEENGQVICFIQGNLPFKLEKSYGNYYSLVTDIVLDREQVPSYNITVTATDRGTPPLSTETHISLNVADTNDNPPVFPQASYSAYIPENNPRGVSLVSVTAHDPDCEENAQITYSLAENTIQGASLSSYVSINSDTGVLYALSSFDYEQFRDLQVKVMARDNGHPPLSSNVSLSLFVLDQNDNAPEILYPALPTDGSTGVELAPRSAEPGYLVTKVVAVDRDSGQNAWLSYRLLKASEPGLFSVGLHTGEVRTARALLDRDALKQSLVVAVQDHGQPPLSATVTLTVAVADSIPQVLADLGSLESPANSETSDLTLY

SEQ ID NO: 1748 - protein, 664 aa, synthetic construct
  REGION 1..664: note = PCDHGA2 (Q9Y5H1) ECD
GQIRYSVREEIDRGSFVGNIAKDLGLEPLALAEQGVRIVSRGRSQLFALNPRSGSLVTANRIDREELCAQSAPCLLNFNILLEDKLTIYSVEVEITDINDNAPRFGVEELELKISETTTPGFRIPLKNAHDADVGENALQKYALNPNDHFSLDVRRGADGNKYPELVLERSLDREEEAVHHLVLVASDGGDPVLSGTSRICVKVLDANDNAPVFTQPEYRISIPENTLVGTRILTVTATDADEGYYAQVVYFLEKSPGETSEVFELKSTSGELTIIKDLDYEDATFHEIDIEAQDGPGLLTRAKVIVTVLDVNDNAPEFYMTSATSSVSEDSLPGTIIGLFNVHDRDSGQNAFTTCSLPEDLPFKLEKSVDNYYRLVTTRALDREQFSFYNITLTAKDGGNPSLSTDAHILLQVADINDNAPAFSRTSYSTYIPENNPRGASVFSVTAHDPDSNDNAHVTYSFAEDTVQGAPLSSYISINSDTGVLYALRSFDYEQLRDLQVWVIARDSGNPPLSSNVSLSLFVLDQNDNAPEILYPAFPTDGSTGVELAPRSAEPGYLVTKVVAVDRDSGQNAWLSYHLLKASEPGLFSVGLHTGEVRTARALLDRDALKQSLVVAIQDHGQPPLSATVTLTVAVADRIPDILADLGSLEPSAIPNDSDLTLY

SEQ ID NO: 1749 - protein, 663 aa, synthetic construct
  REGION 1..663: note = PCDHGA3 (Q9Y5H0) ECD
QIRYSVSEELDKGSFVGNIANDLGLEPRELAERGVRIVSRGRTQLFSLNPQSGSLVTAERIDREELCAQIPLCLVKINILVEDKLKIFEVEIEIKDINDNAPNFPTEELEIKIGELTVPGTRFPIKTAFDPDVGINSLQNYKLSPNDYFSLAVNSVSEGAKYPELVLERALDREKKEIHQLVLVASDGGDPVHSGNLHIQVIVLDANDNPPMFTQPEYRVSVWENVPVGTRLLTVNATDPDEGFNAQVSYILDKMPGKIAEIFHLNSVSGEVSILKSLDYEDAMFYEIKIEAQDGPGLLSRAKILVTVLDVNDNAPEITITSLTSSVPEEGTVGREIALIDVHDRDSGQNGQVEVFVLGNLPFKLEKSIDQYYRLVTATSLDREQISEYNISLRASDGGSPPLSTETHITLHVIDINDNPPTFPHLSYSAYIPENNPRGASIFSVTAQDPDSNNNARITYALTEDTLQGAPLSSFVSINSNTGVLYALRSFDYEQFRDLKLLVTASDSGNPPLSSNVSLNLFVLDQNDNAPEILYPALPTDGSTGVELAPRSAEPGYLVTKVVAVDRDSGQNAWLSYRLLKASEPGLFSVGLHTGEVRTARALLDRDALKQSLVVAVQDHGQPPLSATVTLTVAVADRIPDILADLGSLEPSAKPNDSDLTLY

SEQ ID NO: 1750 - protein, 664 aa, synthetic construct
  REGION 1..664: note = PCDHGA4 (Q9Y5G9) ECD
EQILYSVFEEQEEGSVVGNIAKDLGLAPRELAERGVRIVSRGRTQLFALNPRSGTLVTAGRIDREELCDRSPNCVTNLEILLEDTVKILRVEVEIIDVNDNPPSFGTEQREIKVAENENPGARFPLPEAFDPDVGVNSLQGYQLNSNGYFSLDVQSGADGIKYPELVLERALDREEEAVHHLVLTAFDGGDPVRSGTARILIILVDTNDNAPVFTQPEYHVSVRENVPVGTRLLTVKATDPDEGANGDVTYSFRKVRDKISQLFQLNSLSGDITILGGLDYEDSGFYDIDVEAHDGPGLRARSKVLVTVLDENDNAPEVTVTSLTSSVQESSSPGTVIALFNVHDSDSGGNGLVTCSIPDNLPFTLEKTYGNYYRLLTHRTLDREEVSEYNITVTATDQGTPPLSTETHISLQVMDINDNPPTFPHASYSAYIPENNPRGASILSMTAQDPDSGDNARITYSLAEDTFQGAPLSSYVSINSNTGILYALCSFDYEQFRDLQLLMTASDSGDPPLSSNVSLSLFVLDQNDNVPEILYPTFPTDGSTGVELAPRSADSGYLVTKVVAVDRDSGQNAWLSYSLLKSSEPGLFAVGLHTGEVRTARALLDRDALKQRLVVVVQDHGQPPLSATVTLTVAVADSIPDVLADLGSLKPSADPDDSGLTLY

SEQ ID NO: 1751 - protein, 663 aa, synthetic construct
  REGION 1..663: note = PCDHGA5 (Q9Y5G8) ECD
QIRYSMPEELDKGSFVGNIAKDLGLEPQELAERGVRIVSRGRTQLFALNPRSGSLVTAGRIDREELCAQSPLCVVNFNILVENKMKIYGVEVEIIDINDNFPRFRDEELKVKVNENAAAGTRLVLPFARDADVGVNSLRSYQLSSNLHFSLDVVSGTDGQKYPELVLEQPLDREKETVHDLLLTALDGGDPVLSGTTHIRVTVLDANDNAPLFTPSEYSVSVPENIPVGTRLLMLTATDPDEGINGKLTYSFRNEEEKISETFQLDSNLGEISTLQSLDYEESRFYLMEVVAQDGGALVASAKVVVTVQDVNDNAPEVILTSLTSSISEDCLPGTVIALFSVHDGDSGENGEIACSIPRNLPFKLEKSVDNYYHLLTTRDLDREETSDYNITLTVMDHGTPPLSTESHIPLKVADVNDNPPNFPQASYSTSVTENNPRGVSIFSVTAHDPDSGDNARVTYSLAEDTFQGAPLSSYVSINSDTGVLYALRSFDYEQLRDLQLWVTASDSGNPPLSSNVSLSLFVLDQNDNTPEILYPALPTDGSTGVELAPRSAEPGYLVTKVVAVDKDSGQNAWLSYRLLKASEPGLFAVGLHTGEVRTARALLDRDALKQSLVVAVEDHGQPPLSATFTVTVAVADRIPDILADLGSIKTPIDPEDLDLTLY

SEQ ID NO: 1752 - protein, 663 aa, synthetic construct
  REGION 1..663: note = PCDHGA6 (Q9Y5G7) ECD
QIRYSIPEELEKGSFVGNIVKDLGLEPQELAEHGVRIVSRGRMQLFSLNPRNGSLVTAGRIDREELCAQSPRCLVSFNILVEDKLNLYPVEVEIVDINDNTPRFLKEELEVKILENAAPSSRFPLMEVYDPDVGMNSLQGFKLSGNSHFSVDVQSEAHGPKYPELVLEGTLDREGEAVYRLVLTAMDGGDPVRSSVAQILVTVLDVNDNTPMFTQPVYRVSVPENLPVGTPVLAVTATDQDEGVHGEVTYSFVKITEKISQIFCLNVLTGEISTSANLDYEDSSFYELGVEARDGPGLRDRAKVLITILDVNDNVPEVVVTSGSRTIAESAPPGTVIALFQVFDRDSGLNGLVTCSIPRSLPFELEKSVGNYYRLVTNAALDREEVFLYNITVTATDKGTPPLSTETIISLNVADTNDNPPTFPHSSYSVYVLENNPRGASIFSVNALDPDVDQNAQVSYSLAEDTLQGAPLSSYVSINSDTGILYALRSFDYEQLRDLQLWVTASDSGDPPLSSNVSLSLFVLDQNDNAPEILYPALPTDGSTGVELAPRSAEPGYLVTKVVAVDRDSGQNAWLSYRLLKASEPGLFSVGLHTGEVRTARALLDRDALKQSLVVAVQDHGQPPLSATVTLTVAVADRIPDILADLGSLEPSAKPNDSDLTLY

SEQ ID NO: 1753 - protein, 664 aa, synthetic construct
  REGION 1..664: note = PCDHGA7 (Q9Y5G6) ECD
GRILYSVSEETDKGSFVGDIAKDLGLEPRELAERGVRIISRGRTQLFALNQRSGSLVTAGRIDREEICAQSARCLVNFNILMEDKMNLYPIDVEIIDINDNVPRFLTEEINVKIMENTAPGVRFPLSEAGDPDVGTNSLQSYQLSPNRHFSLAVQSGDDETKYPELVLERVLDREEERVHHLVLTASDGGDPPRSSTAHIQVTVVDVNDHTPVFSLPQYQVTVPENVPVGTRLLTVHAIDLDEGVNGEVTYSFRKITPKLPKMFHLNSLTGEISTLEGLDYEETAFYEMEVQAQDGPGSLTKAKVLITVLDVNDNAPEVTMTSLSSSIPEDTPLGTVIALFYLQDRDSGKNGEVTCTIPENLPFKLEKSIDNYYRLVTTKNLDRETLSLYNITLKATDGGTPPLSRETHIFMQVADTNDNPPTFPHSSYSVYIAENNPRGASIFLVTAQDHDSEDNAQITYSLAEDTIQGAPVSSYVSINSDTGVLYALQSFDYEQLRELQLRVTAHDSGDPPLSSNMSLSLFVLDQNDNPPEILYPALPTDGSTGMELAPRSAEPGYLVTKVVAVDKDSGQNAWLSYLLLKASEPGLFAVGLYTGEVRTARALLDRDALKQSLVVAVQDHGQPPLSATVTLTVAVADSIPEVLADLGSLEPSDGPYNYDLTLY

SEQ ID NO: 1754 - protein, 663 aa, synthetic construct
  REGION 1..663: note = PCDHGA8 (Q9Y5G5) ECD
QIRYSVPEETDKGSFVGNISKDLGLDPRKLAKHGVRIVSRGRTQLFALNPRSGSLITAGRIDREELCAQSPRCLININTLVEDKGKLFGVEIEIIDINDNNPKFQVEDLEVKINEIAVPGARYPLPEAVDPDVGVNSLQSYQLSPNHHFSLDVQTGDNGAINPELVLERALDREEEAAHHLVLTASDGGKPPRSSTVRIHVTVLDTNDNAPVFPHPIYRVKVLENMPPGTRLLTVTASDPDEGINGKVAYKFRKINEKQTPLFQLNENTGEISIAKSLDYEECSFYEMEIQAEDVGALLGRTKLLISVEDVNDNRPEVIITSLFSPVLENSLPGTVIAFLSVHDQDSGKNGQVVCYTRDNLPFKLEKSIGNYYRLVTRKYLDRENVSIYNITVMASDLGTPPLSTETQIALHVADINDNPPTFPHASYSAYILENNLRGASIFSLTAHDPDSQENAQVTYSVTEDTLQGAPLSSYISINSDTGVLYALQSFDYEQIRDLQLLVTASDSGDPPLSSNMSLSLFVLDQNDNAPEILYPALPTDGSTGVELAPRSAERGYLVTKVVAVDRDSGQNAWLSYRLLKASEPGLFSVGLHTGEVRTARALLDRDALKQSLVVAVQDHGQPPLSATVTLTVAVADSIPEVLTELGSLKPSVDPNDSSLTLY

SEQ ID NO: 1755 - protein, 664 aa, synthetic construct
  REGION 1..664: note = PCDHGA9 (Q9Y5G4) ECD
SQIRYSVPEETEKGYIVGNISKDLALEPRELAERRVRIVSRGRTQLFSLNPRSGTLVTAGRIDREELCAQSPRCLVNFKVLVEDRVKLYGIEIEVTDINDSAPKFQAESLEVKINEIAVPGARYPLPEAIDPDVGVNSLQSYQLSPNHHFSLNVQTGDNGAINPELVLERALDREEATAHHLVLTASDGGEPRRSSTVRIHVTVLDTNDNAPVFAQRIYRVKVLENVPPGTWLLTATASDLDEGINGKVAYKFWKINEKQSLLFQLNENTGEISTAKSLDYEECSFYEMEIQAEDGGGLKGWTKVLISVEDVNDNRPEVTITSLFSPVREDAPQGTVILLFNAHDRDSGKNGQVVCSIQENLSFTLENSEEDYYRLLTAQILDREKASEYNITVTATDRGTPPLSTEIHITLQVTDINDNPPAFSQASYSVYLPENNARGTSIFSVIAYDPDSNENSRVIYSLAEDTIQGSPLSTYVSINSDTGVLYALCSFDYEQFRDLQMQVTASDSGSPPLSSNVSLRLFVLDQNDNAPEILYPALPTDGSTGVELAPRSAEPGYLVTKVVAVDRDSGQNAWLSYRLFKASEPGLFSVGLHTGEVRTARALLDRDALKQSLVVAVQDHGQPPLSATVTLTVAIADSIPDILADLGSLQIPADLEASDLTLY

SEQ ID NO: 1756 - protein, 659 aa, synthetic construct
  REGION 1..659: note = PCDHGB1 (Q9Y5G3) ECD
QQIRYTIPEELANGSRVGKLAKDLGLSVRELPTRKLRVSAEDYFNVSLESGDLLVNGRIDREKICGRKLECALEFETVAENPMNVFHVVVVIQDINDNAPRFVAKGIDLEICESALPGVKFSLDSAQDADVEGNSLKLYTINPNQYFSLSTKESPDGSKYPVLLLEKPLDREHQSSHRLILTAMDGGDPPLSGTTHIWIRVTDANDNAPVFSQEVYRVSLQENVPWGTSVLRVMATDQDEGINAEITYAFLNSPISTSLFNLNPNTGDITTNGTLDFEETSRYVLSVEAKDGGVHTAHCNVQIEIVDENDNAPEVTFMSFSNQIPEDSDLGTVIALIKVRDKDSGQNGMVTCYTQEEVPFKLESTSKNYYKLVIAGALNREQTADYNVTIIATDKGKPALSSRTSITLHISDINDNAPVFHQASYVVHVSENNPPGASIAQVSASDPDLGPNGRVSYSILASDLEPRELLSYVSVSPQSGVVFAQRAFDHEQLRAFELTLQARDQGSPALSANVSLRVLVGDLNDNAPRVLYPALGPDGSALFDMVPRAAEPGYLVTKVVAVDADSGHNAWLSYHVLQASEPGLFSLGLRTGEVRTARALGDRDAARQRLLVAVRDGGQPPLSATATLHLIFADSLQEVLPDLSDRPEPSDPQTELQFY

SEQ ID NO: 1757 - protein, 661 aa, synthetic construct
  REGION 1..661: note = PCDHGB2 (Q9Y5G2) ECD
VQIRYSIPEELAKNSVVGNLAKDLGLSVRDLPARKLRVSAEKEYFTVNPESGDLLVSDRIDREQICGKQPLCVLDFDTVAENPLNIFYIAVIVQDINDNTPLFKQTKINLKIGESTKPGTTFPLDPALDSDVGPNSLQRYHLNDNEYFDLAEKQTPDGRKYPELILKHSLDREEHSLHQLVLTAVDGGDPPQSGTTQIRIKVTDANDNPPVFSQDVYRVTLREDVPPGFFVLQVTATDRDEGINAEITYSFHNVDEQVKHFFNLNEKTGEITTKDDLDFEIASSYTLSIEAKDPGDLAAHCSIQVEILDDNDCAPEVIVTSVSTPLPEDSPPGTVIALIKTRDRDSGENGEVYCQVLGNAKFILKSSSKNYYKLVTDGALDREEIPEYNLTITATDGGKPPLSSSIIVTLHISDVNDNAPVFQQTSYMVHVAENNPPGASIAQISASDPDLGPSGQVSYSIVASDLKPREILSYVSVSAQSGVVFAQRAFDHEQLRAFELTLQARDQGSPALSANVSLRVLVGDLNDNAPRVLYPALGPDGSALFDMVPRAAEPGYLVTKVVAVDADSGHNAWLSYHVLQASEPGLFSLGLRTGEVRTARALGDRDAARQRLLVAVRDGGQPPLSATATLHLIFADSLQEVLPDLSDRREPSDPQAKLQFY

SEQ ID NO: 1758 - protein, 661 aa, synthetic construct
  REGION 1..661: note = PCDHGB3 (Q9Y5G1) ECD
EPIRYAIPEELDRGSLVGNLAKDLGFGVGDLPTRNLRVIAEKKFFTVSPENGNLLVSDRIDREEICGKKSTCVLEFEMVAEKPLNFFHVTVLIQDINDNPPTFSQNITELEISELALTGATFALESAQDPDVGVNSLQQYYLSPDPHFSLIQKENLDGSRYPELVLKAPLDREEQPHHHLVLTAVDGGEPSRSCTTQIRVIVADANDNPPVFTQDMYRVNVAENLPAGSSVLKVMAIDMDEGINAEIIYAFINIGKEVRQLFKLDSKTGELTTIGELDFEERDSYTIGVEAKDGGHHTAYCKVQIDISDENDNAPEITLASESQHIQEDAELGTAVALIKTHDLDSGFNGEILCQLKGNFPFKIVQDTKNTYRLVTDGALDREQIPEYNVTITATDKGNPPLSSSKTITLHILDVNDNVPVFHQASYTVHVAENNPPGASIAHVRASDPDLGPNGLVSYYIVASDLEPRELSSYVSVSARSGVVFAQRAFDHEQLRAFELTLQARDQGSPTLSANVSLRVLVDDRNDNAPLVLYPALGPEGSALFDMVPRSAEPGYLVTKVVAVDADSGYNAWLSYHIVQASEPGLFSLGLRTGEVRTARTLGDREAARQRLLVTVRDGGQQPLSATVMLHLIFADSLQEIQPDLSDRPTPSDPQAELQFH

SEQ ID NO: 1759 - protein, 659 aa, synthetic construct
  REGION 1..659: note = PCDHGB4 (Q9UN71) ECD
EQIRYRIPEEMPKGSVVGNLATDLGFSVQELPTRKLRVSSEKPYFTVSAESGELLVSSRLDREEICGKKPACALEFEAVAENPLNFYHVNVEIEDINDHTPKFTQNSFELQISESAQPGTRFILGSAHDADIGSNTLQNYQLSPSDHFSLINKEKSDGSKYPEMVLKTPLDREKQKSYHLTLTALDFGAPPLSSTAQIHVLVTDANDNAPVFSQDVYRVSLSENVYPGTTVLQVTATDQDEGVNAEITFSFSEASQITQFDLNSNTGEITVLNTLDFEEVKEYSIVLEARDGGGMIAQCTVEVEVIDENDNAPEVIFQSLPNLIMEDAELGTHIALLKVRDKDSRHNGEVTCKLEGDVPFKILTSSRNTYKLVTDAVLDREQNPEYNITVTATDRGKPPLSSSSSITLHIGDVNDNAPVFSQSSYIVHVAENNPPGASISQVRASDPDLGPNGQVSYCIMASDLEQRELSSYVSISAESGVVFAQRAFDHEQLRAFELTLQARDQGSPALSANVSLRVLVDDRNDNAPRVLYPALGPDGSALFDMVPHAAEPGYLVTKVVAVDADSGHNAWLSYHVLQASEPGLFSLGLRTGEVRTARALGDRDAVRQRLLVAVRDGGQPPLSATATLHLVFADSLQEVLPDITDRPDPSDLQAELQFY

SEQ ID NO: 1760 - protein, 657 aa, synthetic construct
  REGION 1..657: note = PCDHGB5 (Q9Y5G0) ECD
EQIRYRIPEEMPKGSVVGNLATDLGFSVQELPTRKLRVSSEKPYFTVSAESGELLVSSRLDREEICGKKPACALEFEAVAENPLNFYHVNVEIEDINDHTPKFTQNSFELQISESAQPGTRFILEVAEDADIGLNSLQKYKLSLNPSFSLIIKEKQDGSKYPELALEKTLDREQQSYHRLVLTALDGGHPPLSGTTELRIQVTDANDNPPVFNRDVYRVSLRENVPPGTTVLQVSATDQDEGINSEITYSFYRTGQIFSLNSKSGEITTQKKLDFEETKEYSMVVEGRDGGGLVAQCTVEINIQDENDNSPEVTFHSLLEMILENAVPGTLIALIKIHDQDSGENGEVNCQLQGEVPFKIISSSKNSYKLVTDGTLDREQTPEYNVTITATDRGKPPLSSSISVILHIRDVNDNAPVFHQASYLVSVPENNPPGASIAQVCASDLDLGLNGQVSYSIMASDLEPLALASYVSMSAQSGVVFAQRAFDYEQLRTFELTLQARDQGSPALSANVSLRVLVGDRNDNAPRVLYPALGPDGSALFDMVPRAAEPGYLVTKVVAVDADSGHNAWLSYHVLQASEPGLFSLGLRTGEVRTARALGDRDAARQRLLVAVRDGGQPPLSATATLHLVFADSLQEVLPDITDRPVPSDPQAELQFY

SEQ ID NO: 1761 - protein, 661 aa, synthetic construct
  REGION 1..661: note = PCDHGB6 (Q9Y5F9) ECD
EPIRYSIPEELAKGSVVGNLAKDLGLSVLDVSARKLRVSAEKLHFSVDAESGDLLVKNRIDREQICKERRRCELQLEAVVENPLNIFHVIVVIEDVNDHAPQFDKKEIHLEIFESASAGTRLSLDPATDPDININSIKDYKINSNPYFSLMVRVNSDGGKYPELSLEKLLDREEQRSHSLILTALDGGDPPRSATAHIEISVKDTNDNPPVFSRDEYRISLSENLPPGSPVLQVTATDQDEGVNAEINYYFRSTAQSTKHMFSLDEKTGMIKNNQSFDFEDVERYTMEVEAKDGGGLSTQCKVIIEILDENDNSPEIIITSLSDQILENSPPGMVVALFKTRDLDFGGNGEVRCNIETDIPFKIYSSSNNYYKLVTDGALDREQTPEYNVTIVATDRGKPPLSSSRSITLYVADINDNAPVFDQTSYVVHVAENNPPGASIAQVSASDPDLGLNGHISYSIVASDLEPLAVSSYVSVSAQSGVVFAQRAFDHEQLRAFALTLQARDHGSPTLSANVSLRVLVGDRNDNAPRVLYPALGPDGSAFFDMVPRSAEPGYLVTKVVAVDADSGHNAWLSYHVLQASEPGLFSLGLRTGEVRTARALGDRDAARQRLLVAVRDGGQPPLSATATLHLVFADNLQEILPDLSDRPVLSDPQAELQFY

SEQ ID NO: 1762 - protein, 661 aa, synthetic construct
  REGION 1..661: note = PCDHGB7 (Q9Y5F8) ECD
EPIRYSIPEELAKGSVVGNLAKDLGLSVLDVSARELRVSAEKLHFSVDAQSGDLLVKDRIDREQICKERRRCELQLEAVVENPLNIFHVIVVIEDVNDHAPQFRKDEINLEISESVSLGMGTILESAEDPDISMNSLSKYQLSPNEYFSLVEKDNPDGGKYPELVLQKTLDRETQSAHHLVLTALDGGDPPRSGTAQIRILVIDANDNPPVFSQDVYRVSLREDVPPGTSILRVKATDQDEGINSEITYSFFGVADKAQHVFSLDYTTGNILTQQPLDFEEVERYTINIEAKDRGSLSTRCKVIVEVVDENDNSPEIIITSLSDQIMEDSPPGVVVALFKTRDQDSGENGEVRCSLSRGVPFKIHSSSNNYYKLVTDEALDREQTPEYNVTIAATDRGKPPLSSSKTITLHITDVNDNAPVFGQSAYLVHVPENNQPGASIAQVSASDPDFGLNGRVSYSLIASDLESRTLSSYVSVSAQSGVVFAQRAFDHEQLRTFELTLQARDQGSPALSANVSLRVLVGDRNDNAPRVLYPALGPDGSALFDTVPRAAQPGYLVTKVVAVDADSGHNAWLSYHVVQASEPGLFSLGLRTGEVRMVRALGDKDSVRQRLLVAVRDGGQPPLSATATLHLVFADSLQEVLPDFSDHPTPSDSQAEMQFY

SEQ ID NO: 1763 - protein, 662 aa, synthetic construct
  REGION 1..662: note = PCDHGC3 (Q9UN70) ECD
VIHYEIPEEREKGFAVGNVVANLGLDLGSLSARRFRVVSGASRRFFEVNRETGEMFVNDRLDREELCGTLPSCTVTLELVVENPLELFSVEVVIQDINDNNPAFPTQEMKLEISEAVAPGTRFPLESAHDPDVGSNSLQTYELSRNEYFALRVQTREDSTKYAELVLERALDREREPSLQLVLTALDGGTPALSASLPIHIKVLDANDNAPVFNQSLYRARVLEDAPSGTRVVQVLATDLDEGPNGEIIYSFGSHNRAGVRQLFALDLVTGMLTIKGRLDFEDTKLHEIYIQAKDKGANPEGAHCKVLVEVVDVNDNAPEITVTSVYSPVPEDAPLGTVIALLSVTDLDAGENGLVTCEVPPGLPFSLTSSLKNYFTLKTSADLDRETVPEYNLSITARDAGTPSLSALTIVRVQVSDINDNPPQSSQSSYDVYIEENNLPGAPILNLSVWDPDAPQNARLSFFLLEQGAETGLVGRYFTINRDNGIVSSLVPLDYEDRREFELTAHISDGGTPVLATNISVNIFVTDRNDNAPQVLYPRPGGSSVEMLPRGTSAGHLVSRVVGWDADAGHNAWLSYSLLGSPNQSLFAIGLHTGQISTARPVQDTDSPRQTLTVLIKDNGEPSLSTTATLTVSVTEDSPEARAEFPSGSAPREQKKNLTFY

SEQ ID NO: 1764 - protein, 663 aa, synthetic construct
  REGION 1..663: note = PCDHGC4 (Q9Y5F7) ECD
QIRYPVPEESQEGTFVGNVAQDFLLDTDSLSARRLQVAGEVNQRHFRVDLDSGALLIKNPIDREALCGLSASCIVPLEFVTEGPLEMYRAEVEIVDVNDHAPRFPRQQLDLEIGEAAPPGQRFPLEKAQDADVGSNSISSYRLSSNEHFALDVKKRSDGSLVPELLLEKPLDREKQSDYRLVLTAVDGGNPPRSGTAELRVSVLDVNDNAPAFQQSSYRISVLESAPAGMVLIQLNASDPDLGPSGNVTFYFSGHTPDRVRNLFSLHPTTGKLTLLGPLDFESENYYEFDVRARDGGSPAMEQHCSLRVDLLDVNDNAPYITVTSELGTLPESAEPGTVVALISVQDPDSGSNGDVSLRIPDHLPFALKSAFRNQFSLVTAGPLDREAKSSYDIMVTASDAGNPPLSTHRTIFLNISDVNDNPPSFFQRSHEVFVPENNRPGDLLCSLAASDPDSGLNALISYSLLEPRNRDVSASSFISLNPQTGAVHATRSFDYEQTQTLQFEVQARDRGNPPLSSTVTVRLFVLDLNDNAPAVLRPRARPGSLCPQALPPSVGAGHLITKVTAVDLDSGYNAWVSYQLLEAPDPSLFAVSRYAGEVRTAVPIPADLPPQKLVIVVKDSGSPPLSTSVTLLVSLEEDTHPVVPDLRESSAPREGESRLTLY

SEQ ID NO: 1765 - protein, 664 aa, synthetic construct
  REGION 1..664: note = PCDHGC5 (Q9Y5F6) ECD
QLRYSVVEESEPGTLVGNVAQDLGLKMTDLLSRRLQLGSEENGRYFSLSLMSGALAVNQKIDRESLCGASTSCLLPVQVVTEHPLELIRVEVEILDLNDNSPSFATPEREMRISESAASGARFPLDSAQDPDVGTNTVSFYTLSPNSHFSLNVKTLKDGKPFPELVLEQQLDREAQARHQLVLTAVDGGTPARSGTTLISVIVLDINDNAPTFQSSVLRVGIPENAPIGTLLLRLNATDPDEGTNGQLDYSFGDHTSEAVRNLFGLDPSSGAIHVLGPIDFEESRFYEIHARARDQGQPAMEGHCVIQVDVGDVNDNAPEVLLASLANPVLESTPVGTVVGLFNVRDRDSGRNGEVSLDISPDLPFQIKPSENHYSLLTSQPLDREATSHYIIELLASDAGSPSLHKHLTIRLNISDVNDNAPRFNQQLYTAYILENRPPGSLLCTVAASDPDTGDNARLTYSIVGNQVQGAPASSFVYVNPEDGRIFAQRTFDYELLQMLQIVVGVRDSGSPPLHANTSLHVFVLDENDNAPAVLHPRPDWEHSAPQRLPRSAPPGSLVTKVTAVDADAGHNAWLSYSLLPQSTAPGLFLVSTHTGEVRTARALLEDDSDTQQVVVLVRDNGDPSLSSTATVLLVLEDEDPEEMPKSSDFLIHPPERSDLTLY

SEQ ID NO: 1766 - protein, 1629 aa, synthetic construct
  REGION 1..1629: note = PCSK5 (Q92824) ECD
DYDFSRAQSTYFNDPKWPSMWYMHCSDNTHPCQSDMNIEGAWKRGYTGKNIVVTILDDGIERTHPDLMQNYDALASCDVNGNDLDPMPRYDASNENKHGTRCAGEVAAAANNSHCTVGIAFNAKIGGVRMLDGDVTDMVEAKSVSFNPQHVHIYSASWGPDDDGKTVDGPAPLTRQAFENGVRMGRRGLGSVFVWASGNGGRSKDHCSCDGYTNSIYTISISSTAESGKKPWYLEECSSTLATTYSSGESYDKKIITTDLRQRCTDNHTGTSASAPMAAGIIALALEANPFLTWRDVQHVIVRTSRAGHLNANDWKTNAAGFKVSHLYGFGLMDAEAMVMEAEKWTTVPRQHVCVESTDRQIKTIRPNSAVRSIYKASGCSDNPNRHVNYLEHVVVRITITHPRRGDLAIYLTSPSGTRSQLLANRLFDHSMEGFKNWEFMTIHCWGERAAGDWVLEVYDTPSQLRNFKTPGKLKEWSLVLYGTSVQPYSPTNEFPKVERFRYSRVEDPTDDYGTEDYAGPCDPECSEVGCDGPGPDHCNDCLHYYYKLKNNTRICVSSCPPGHYHADKKRCRKCAPNCESCFGSHGDQCMSCKYGYFLNEETNSCVTHCPDGSYQDTKKNLCRKCSENCKTCTEFHNCTECRDGLSLQGSRCSVSCEDGRYFNGQDCQPCHRFCATCAGAGADGCINCTEGYFMEDGRCVQSCSISYYFDHSSENGYKSCKKCDISCLTCNGPGFKNCTSCPSGYLLDLGMCQMGAICKDGEYVDEHGHCQTCEASCAKCQGPTQEDCTTCPMTRIFDDGRCVSNCPSWKFEFENQCHPCHHTCQRCQGSGPTHCTSCGADNYGREHFLYQGECGDSCPEGHYATEGNTCLPCPDNCELCHSVHVCTRCMKGYFIAPTNHTCQKLECGQGEVQDPDYEECVPCEEGCLGCSLDDPGTCTSCAMGYYRFDHHCYKTCPEKTYSEEVECKACDSNCGSCDQNGCYWCEEGFFLLGGSCVRKCGPGFYGDQEMGECESCHRACETCTGPGHDECSSCQEGLQLLRGMCVHATKTQEEGKFWNDILRKLQPCHSSCKTCNGSATLCTSCPKGAYLLAQACVSSCPQGTWPSVRSGSCENCTEACAICSGADLCKKCQMQPGHPLFLHEGRCYSKCPEGSYAEDGICERCSSPCRTCEGNATNCHSCEGGHVLHHGVCQENCPERHVAVKGVCKHCPEMCQDCIHEKTCKECTPEFFLHDDMCHQSCPRGFYADSRHCVPCHKDCLECSGPKADDCELCLESSWVLYDGLCLEECPAGTYYEKETKECRDCHKSCLTCSSSGTCTTCQKGLIMNPRGSCMANEKCSPSEYWDEDAPGCKPCHVKCFHCMGPAEDQCQTCPMNSLLLNTTCVKDCPEGYYADEDSNRCAHCHSSCRTCEGRHSRQCHSCRPGWFQLGKECLLQCREGYYADNSTGRCERCNRSCKGCQGPRPTDCLSCDRFFFLLRSKGECHRSCPDHYYVEQSTQTCERCHPTCDQCKGKGALNCLSCVWSYHLMGGICTSDCLVGEYRVGEGEKFNCEKCHESCMECKGPGAKNCTLCPANLVLHMDDSHCLHCCNTSDPPSAQECCDCQDTTDECILRTSKVRPATEHFKT

SEQ ID NO: 1767 - protein, 147 aa, synthetic construct
  REGION 1..147: note = PDCD1 (Q15116) ECD
FLDSPDRPWNPPTFSPALLVVTEGDNATFTCSFSNTSESFVLNWYRMSPSNQTDKLAAFPEDRSQPGQDCRFRVTQLPNGRDFHMSVVRARRNDSGTYLCGAISLAPKAQIKESLRAELRVTERRAEVPTAHPSPSPRPAGQFQTLV

SEQ ID NO: 1768 - protein, 201 aa, synthetic construct
  REGION 1..201: note = PDCD1LG2 (Q9BQ51) ECD
LFTVTVPKELYIIEHGSNVTLECNFDTGSHVNLGAITASLQKVENDTSPHRERATLLEEQLPLGKASFHIPQVQVRDEGQYQCIIIYGVAWDYKYLTLKVKASYRKINTHILKVPETDEVELTCQATGYPLAEVSWPNVSVPANTSHSRTPEGLYQVTSVLRLKPPPGRNFSCVFWNTHVRELTLASIDLQSQMEPRTHPT

SEQ ID NO: 1769 - protein, 505 aa, synthetic construct
  REGION 1..505: note = PDGFRA (P16234) ECD
QLSLPSILPNENEKVVQLNSSFSLRCFGESEVSWQYPMSEEESSDVEIRNEENNSGLFVTVLEVSSASAAHTGLYTCYYNHTQTEENELEGRHIYIYVPDPDVAFVPLGMTDYLVIVEDDDSAIIPCRTTDPETPVTLHNSEGVVPASYDSRQGFNGTFTVGPYICEATVKGKKFQTIPFNVYALKATSELDLEMEALKTVYKSGETIVVTCAVFNNEVVDLQWTYPGEVKGKGITMLEEIKVPSIKLVYTLTVPEATVKDSGDYECAARQATREVKEMKKVTISVHEKGFIEIKPTFSQLEAVNLHEVKHFVVEVRAYPPPRISWLKNNLTLIENLTEITTDVEKIQEIRYRSKLKLIRAKEEDSGHYTIVAQNEDAVKSYTFELLTQVPSSILDLVDDHHGSTGGQTVRCTAEGTPLPDIEWMICKDIKKCNNETSWTILANNVSNIITEIHSRDRSTVEGRVTFAKVEETIAVRCLAKNLLGAENRELKLVAPTLRSELTVA

SEQ ID NO: 1770 - protein, 500 aa, synthetic construct
  REGION 1..500: note = PDGFRB (P09619) ECD
LVVTPPGPELVLNVSSTFVLTCSGSAPVVWERMSQEPPQEMAKAQDGTFSSVLTLTNLTGLDTGEYFCTHNDSRGLETDERKRLYIFVPDPTVGFLPNDAEELFIFLTEITEITIPCRVTDPQLVVTLHEKKGDVALPVPYDHQRGFSGIFEDRSYICKTTIGDREVDSDAYYVYRLQVSSINVSVNAVQTVVRQGENITLMCIVIGNEVVNFEWTYPRKESGRLVEPVTDFLLDMPYHIRSILHIPSAELEDSGTYTCNVTESVNDHQDEKAINITVVESGYVRLLGEVGTLQFAELHRSRTLQVVFEAYPPPTVLWFKDNRTLGDSSAGEIALSTRNVSETRYVSELTLVRVKVAEAGHYTMRAFHEDAEVQLSFQLQINVPVRVLELSESHPDSGEQTVRCRGRGMPQPNIIWSACRDLKRCPRELPPTLLGNSSEEESQLETNVTYWEEEQEFEVVSTLRLQHVDRPLSVRCTLRNAVGQDTQEVIVVPHSLPFKV

SEQ ID NO: 1771 - protein, 735 aa, synthetic construct
  REGION 1..735: note = PEAR1 (Q5VY43) ECD
LNPSDPNTCSFWESFTTTTKESHSRPFSLLPSEPCERPWEGPHTCPQPTVVYRTVYRQVVKTDHRQRLQCCHGFYESRGFCVPLCAQECVHGRCVAPNQCQCVPGWRGDDCSSECAPGMWGPQCDKPCSCGNNSSCDPKSGVCSCPSGLQPPNCLQPCTPGYYGPACQFRCQCHGAPCDPQTGACFCPAERTGPSCDVSCSQGTSGFFCPSTHSCQNGGVFQTPQGSCSCPPGWMGTICSLPCPEGFHGPNCSQECRCHNGGLCDRFTGQCRCAPGYTGDRCREECPVGRFGQDCAETCDCAPDARCFPANGACLCEHGFTGDRCTDRLCPDGFYGLSCQAPCTCDREHSLSCHPMNGECSCLPGWAGLHCNESCPQDTHGPGCQEHCLCLHGGVCQATSGLCQCAPGYTGPHCASLCPPDTYGVNCSARCSCENAIACSPIDGECVCKEGWQRGNCSVPCPPGTWGFSCNASCQCAHEAVCSPQTGACTCTPGWHGAHCQLPCPKGQFGEGCASRCDCDHSDGCDPVHGRCQCQAGWMGARCHLSCPEGLWGVNCSNTCTCKNGGTCLPENGNCVCAPGFRGPSCQRSCQPGRYGKRCVPCKCANHSFCHPSNGTCYCLAGWTGPDCSQPCPPGHWGENCAQTCQCHHGGTCHPQDGSCICPLGWTGHHCLEGCPLGTFGANCSQPCQCGPGEKCHPETGACVCPPGHSGAPCRIGIQEPFTVMPTTPVAYNSL

SEQ ID NO: 1772 - protein, 574 aa, synthetic construct
  REGION 1..574: note = PECAM1 (P16284) ECD
QENSFTINSVDMKSLPDWTVQNGKNLTLQCFADVSTTSHVKPQHQMLFYKDDVLFYNISSMKSTESYFIPEVRIYDSGTYKCTVIVNNKEKTTAEYQVLVEGVPSPRVTLDKKEAIQGGIVRVNCSVPEEKAPIHFTIEKLELNEKMVKLKREKNSRDQNFVILEFPVEEQDRVLSFRCQARIISGIHMQTSESTKSELVTVTESFSTPKFHISPTGMIMEGAQLHIKCTIQVTHLAQEFPEIIIQKDKAIVAHNRHGNKAVYSVMAMVEHSGNYTCKVESSRISKVSSIVVNITELFSKPELESSFTHLDQGERLNLSCSIPGAPPANFTIQKEDTIVSQTQDFTKIASKSDSGTYICTAGIDKVVKKSNTVQIVVCEMLSQPRISYDAQFEVIKGQTIEVRCESISGTLPISYQLLKTSKVLENSTKNSNDPAVFKDNPTEDVEYQCVADNCHSHAKMLSEVLRVKVIAPVDEVQISILSSKVVESGEDIVLQCAVNEGSGPITYKFYREKEGKPFYQMTSNATQAFWTKQKASKEQEGEYYCTAFNRANHASSVPRSKILTVRVILAPWKK

SEQ ID NO: 1773 - protein, 400 aa, synthetic construct
  REGION 1..400: note = PI16 (Q6UXB8) ECD
LTDEEKRLMVELHNLYRAQVSPTASDMLHMRWDEELAAFAKAYARQCVWGHNKERGRRGENLFAITDEGMDVPLAMEEWHHEREHYNLSAATCSPGQMCGHYTQVVWAKTERIGCGSHFCEKLQGVEETNIELLVCNYEPPGNVKGKRPYQEGTPCSQCPSGYHCKNSLCEPIGSPEDAQDLPYLVTEAPSFRATEASDSRKMGTPSSLATGIPAFLVTEVSGSLATKALPAVETQAPTSLATKDPPSMATEAPPCVTTEVPSILAAHSLPSLDEEPVTFPKSTHVPIPKSADKVTDKTKVPSRSPENSLDPKMSLTGARELLPHAQEEAEAEAELPPSSEVLASVFPAQDKPGELQATLDHTGHTSSKSLPNFPNTSATANATGGRALALQSSLPGAEG

SEQ ID NO: 1774 - protein, 620 aa, synthetic construct
  REGION 1..620: note = PIGR (P01833) ECD
KSPIFGPEEVNSVEGNSVSITCYYPPTSVNRHTRKYWCRQGARGGCITLISSEGYVSSKYAGRANLTNFPENGTFVVNIAQLSQDDSGRYKCGLGINSRGLSFDVSLEVSQGPGLLNDTKVYTVDLGRTVTINCPFKTENAQKRKSLYKQIGLYPVLVIDSSGYVNPNYTGRIRLDIQGTGQLLFSVVINQLRLSDAGQYLCQAGDDSNSNKKNADLQVLKPEPELVYEDLRGSVTFHCALGPEVANVAKFLCRQSSGENCDVVVNTLGKRAPAFEGRILLNPQDKDGSFSVVITGLRKEDAGRYLCGAHSDGQLQEGSPIQAWQLFVNEESTIPRSPTVVKGVAGGSVAVLCPYNRKESKSIKYWCLWEGAQNGRCPLLVDSEGWVKAQYEGRLSLLEEPGNGTFTVILNQLTSRDAGFYWCLTNGDTLWRTTVEIKIIEGEPNLKVPGNVTAVLGETLKVPCHFPCKFSSYEKYWCKWNNTGCQALPSQDEGPSKAFVNCDENSRLVSLTLNLVTRADEGWYWCGVKQGHFYGETAAVYVAVEERKAAGSRDVSLAKADAAPDEKVLDSGFREIENKAIQDPRLFAEEKAVADTRDQADGSRASVDSGSSEEQGGSSR

SEQ ID NO: 1775 - protein, 506 aa, synthetic construct
  REGION 1..506: note = PIGT (Q969N2) ECD
LAEPPRDSLREELVITPLPSGDVAATFQFRTRWDSELQREGVSHYRLFPKALGQLISKYSLRELHLSFTQGFWRTRYWGPPFLQAPSGAELWVWFQDTVTDVDKSWKELSNVLSGIFCASLNFIDSTNTVTPTASFKPLGLANDTDHYFLRYAVLPREVVCTENLTPWKKLLPCSSKAGLSVLLKADRLFHTSYHSQAVHIRPVCRNARCTSISWELRQTLSVVFDAFITGQGKKDWSLFRMFSRTLTEPCPLASESRVYVDITTYNQDNETLEVHPPPTTTYQDVILGTRKTYAIYDLLDTAMINNSRNLNIQLKWKRPPENEAPPVPFLHAQRYVSGYGLQKGELSTLLYNTHPYRAFPVLLLDTVPWYLRLYVHTLTITSKGKENKPSYIHYQPAQDRLQPHLLEMLIQLPANSVTKVSIQFERALLKWTEYTPDPNHGFYVSPSVLSALVPSMVAAKPVDWEESPLFNSLFPVSDGSNYFVRLYTEPLLVNLPTPDFSMPYN

SEQ ID NO: 1776 - protein, 147 aa, synthetic construct
  REGION 1..147: note = PIK3IP1 (Q96FE7) ECD
SGGCFWDNGHLYREDQTSPAPGLRCLNWLDAQSGLASAPVSGAGNHSYCRNPDEDPRGPWCYVSGEAGVPEKRPCEDLRCPETTSQALPAFTTEIQEASEGPGADEVQVFAPANALPARSEAAAVQPVIGISQRVRMNSKEKKDLGT

SEQ ID NO: 1777 - protein, 178 aa, synthetic construct
  REGION 1..178: note = PILRA (Q9UKJ1) ECD
QPSGSTGSGPSYLYGVTQPKHLSASMGGSVEIPFSFYYPWELATAPDVRISWRRGHFHRQSFYSTRPPSIHKDYVNRLFLNWTEGQKSGFLRISNLQKQDQSVYFCRVELDTRSSGRQQWQSIEGTKLSITQAVTTTTQRPSSMTTTWRLSSTTTTTGLRVTQGKRRSDSWHISLETA

SEQ ID NO: 1778 - protein, 172 aa, synthetic construct
  REGION 1..172: note = PILRB (Q9UKJ0) ECD
QPGGSTGSGPSYLYGVTQPKHLSASMGGSVEIPFSFYYPWELAIVPNVRISWRRGHFHGQSFYSTRPPSIHKDYVNRLFLNWTEGQESGFLRISNLRKEDQSVYFCRVELDTRRSGRQQLQSIKGTKLTITQAVTTTTTWRPSSTTTIAGLRVTESKGHSESWHLSLDTAIR

SEQ ID NO: 1779 - protein, 3835 aa, synthetic construct
  REGION 1..3835: note = PKHD1 (P08F94) ECD
HIEPEEGSLAGGTWITVIFDGLELGVLYPNNGSQLEIHLVNVNMVVPALRSVPCDVFPVFLDLPVVTCRTRSVLSEAHEGLYFLEAYFGGQLVSSPNPGPRDSCTFKFSKAQTPIVHQVYPPSGVPGKLIHVYGWIITGRLETFDFDAEYIDSPVILEAQGDKWVTPCSLINRQMGSCYPIQEDHGLGTLQCHVEGDYIGSQNVSFSVFNKGKSMVHKKAWLISAKQDLFLYQTHSEILSVFPETGSLGGRTNITITGDFFDNSAQVTIAGIPCDIRHVSPRKIECTTRAPGKDVRLTTPQPGNRGLLFEVGDAVEGLELTEATPGYRWQIVPNASSPFGFWSQEGQPFRARLSGFFVAPETNNYTFWIQADSQASLHFSWSEEPRTKVKVASISVGTADWFDSWEQNRDEGTWQQKTPKLELLGGAMYYLEAEHHGIAPSRGMRIGVQIHNTWLNPDVVTTYLREKHQIRVRAQRLPEVQVLNVSGRGNFFLTWDNVSSQPIPANATAHLIQTTIEELLAVKCKLEPLWSNILLRLGFERGPEVSNSDGDLTSGTEPFCGRFSLRQPRHLVLTPPAAQKGYRLDQYTHLCLAYKGHMNKILKMIVSFTIGFQNMVKNTTCDWSLTRTSPESWQFDCTDLWETCVRCFGDLQPPPANSPVLVHQINLLPLAQETGLFYVDEIIIADTNVTVSQADSGTARPGGNLVESVSVVGSPPVYSVTSWLAGCGTELPLITARSVPTEGTEEGSGLVLVTTQRRQRTSPPLGGHFRIQLPNTVISDVPVQISAHHLHQLLQNNADDFTSRYLNASDFTVKEDLYTCYEHVWTLSWSTQIGDLPNFIRVSDENLTGVNPAAATRVVYDGGVFLGPIFGDMLATANQHTQVVVRVNDVPAHCPGSCSFQYLQGSTPCVHSVWYSIDGDINLMIYITGTGFSGDSQFLQVTVNKTSCKVIFSNQTNVVCQTDLLPVGMHRILMLVRPSGLAISATGEDLFLNVKPRLDMVEPSRAADIGGLWATIRGSSLEGVSLILFGSYSCAINVATSNSSRIQCKVPPRGKDGRIVNVTVIRGDYSAVLPRAFTYVSSLNPVIVTLSRNISNIAGGETLVIGVARLMNYTDLDVEVHVQDALAPVHTQSAWGLEVALPPLPAGLHRISVSINGVSIHSQGVDLHIQYLTEVFSIEPCCGSLLGGTILSISGIGFSRDPALVWVLVGNRSCDIVNLTEASIWCETLPAPQIPDAGAPTVPAAVEVWAGNRFFARGPSPSLVGKGFTFMYEAAATPVVTAMQGEITNSSLSLHVGGSNLSNSVILLGNLNCDVETQSFQGNVSLSGCSIPLHSLEAGIYPLQVRQKQMGFANMSVVLQQFAVMPRIMAIFPSQGSACGGTILTVRGLLLNSRRRSVRVDLSGPFTCVILSLGDHTILCQVSLEGDPLPGASFSLNVTVLVNGLTSECQGNCTLFIREEASPVMDALSTNTSGSLTTVLIRGQRLATTADEPMVFVDDQLPCNVTFFNASHVVCQTRDLAPGPHYLSVFYTRNGYACSGNVSRHFYIMPQVFHYFPKNFSLHGGSLLTIEGTGLRGQNTTSVYIDQQTCLTVNIGAELIRCIVPTGNGSVALEIEVDGLWYHIGVIGYNKAFTPELISISQSDDILTFAVAQISGAANIDIFIGMSPCVGVSGNHTVLQCVVPSLPAGEYHVRGYDCIRGWASSALVFTSRVIITAVTENFGCLGGRLVHVFGAGFSPGNVSAAVCGAPCRVLANATVSAFSCLVLPLDVSLAFLCGLKREEDSCEAARHTYVQCDLTVAMATEQLLESWPYLYICEESSQCLFVPDHWAESMFPSFSGLFISPKLERDEVLIYNSSCNITMETEAEMECETPNQPITVKITEIRKRWGQNTQGNFSLQFCRRWSRTHSWFPERLPQDGDNVTVENGQLLLLDTNTSILNLLHIKGGKLIFMAPGPIELRAHAILVSDGGELRIGSEDKPFQGRAQITLYGSSYSTPFFPYGVKFLAVRNGTLSLHGSLPEVIVTCLRATAHALDTVLALEDAVDWNPGDEVVIISGTGVKGAKPMEEIVTVETVQDTDLYLKSPLRYSHNFTENWVAGEHHILKATVALLSRSITIQGNLTNEREKLLVSCQEANAPEGNLQHCLYSMSEKMLGSRDMGARVIVQSFPEEPSQVQLKGVQFQVLGQAFHKHLSSLTLVGAMRESFIQGCTVRNSFSRGLSMCGTLGLKVDSNVFYNILGHALLVGTCTEMRYISWEAIHGRKDDWSGHGNIIRNNVIIQVSGAEGLSNPEMLTPSGIYICSPTNVIEGNRVCGAGYGYFFHLMTNQTSQAPLLSFTQNIAHSCTRYGLFVYPKFQPPWDNVTGTTLFQSFTVWESAGGAQIFRSSNLRLKNFKVYSCRDFGIDVLESDANTSVTDSLLLGHFAHKGSLCMSSGIKTPKRWELMVSNTTFVNFDLINCVAIRTCSDCSQGQGGFTVKTSQLKFTNSSNLVAFPFPHAAILEDLDGSLSGKNRSHILASMETLSASCLVNSSFGRVVHGSACGGGVLFHRMSIGLANTPEVSYDLTMTDSRNKTTTVNYVRDTLSNPRGWMALLLDQETYSLQSENLWINRSLQYSATFDNFAPGNYLLLVHTDLPPYPDILLRCGSRVGLSFPFLPSPGQNQGCDWFFNSQLRQLTYLVSGEGQVQVILRVKEGMPPTISASTSAPESALKWSLPETWQGVEEGWGGYNNTIPGPGDDVLILPNRTVLVDTDLPFFKGLYVMGTLDFPVDRSNVLSVACMVIAGGELKVGTLENPLEKEQKLLILLRASEGVFCDRMNGIHIDPGTIGVYGKVHLYSAYPKNSWTHLGADIASGNERIIVEDAVDWRPHDKIVLSSSSYEPHEAEVLTVKEVKGHHVRIYERLKHRHIGSVHVTEDGRHIRLAAEVGLLTRNIQIQPDVSCRGRLFVGSFRKSSREEFSGVLQLLNVEIQNFGSPLYSSVEFSNVSAGSWIISSTLHQSCGGGIHAAASHGVLLNDNIVFGTAGHGIDLEGQAYTVTNNLVVLMTQPAWSTIWVAGIKVNQVKDINLHGNVVAGSERLGFHIRGHKCSSCELLWSDNVAHSSLHGLHLYKESGLDNCTRISGFLAFKNFDYGAMLHVENSVEIENITLVDNTIGLLAVVYVFSAPQNSVKKVQIVLRNSVIVATSSSFDCIQDKVKPHSANLTSTDRAPSNPRGGRIGILWPVFTSEPNQWPQEPWHKVRNDHSISGIMKLQDVTFSSFVKSCYSDDLDVCILPNAENSGIMHPITAERTRMLKIKDKNKFYFPSLQPRKDLGKVVCPELDCASPRKYLFKDLDGRALGLPPPVSVFPKTEAEWTASFFNAGTFREEQKCTYQFLMQGFICKQTDQVVLILDSADAIWAIQKLYPVVSVTSGFVDVFSSVNANIPCSTSGSVSTFYSILPIRQITKVCFMDQTPQVLRFFLLGNKSTSKLLLAVFYHELQSPHVFLGESFIPPTLVQSASLLLNESIGANYFNIMDNLLYVVLQGEEPIEIRSGVSIHLALTVMVSVLEKGWEIVILERLTNFLQIGQNQIRFIHEMPGHEETLKAIADSRAKRKRNCPTVTCTSHYRRVGQRRPLMMEMNSHRASPPMTVETISKVIVIEIGDSPTVRSTGMISSLSSNKLQNLAHRVITAQQTGVLENVLNMTIGALLVTQSKGVIGYGNTSSFKTGNLIYIRPYALSILVQPSDGEVGNELPVQPQLVFLDEQNRRVESLGPPSEPWTISASLEGASDSVLKGCTQAETQDGYVSFYNLAVLISGSNWHFIFTVTSPPGVNFTARSKPFAVLPVTRKEKST

SEQ ID NO: 1780 - protein, 4190 aa, synthetic construct
  REGION 1..4190: note = PKHD1L1 (Q86WI1) ECD
DPSTDGSQIIPKVTEIIPKYGSINGATRLTIRGEGFSQANQFNYGVDNAELGNSVQLISSFQSITCDVEKDASHSTQITCYTRAMPEDSYTVRVSVDGVPVTENNTCKGHINSWECTFNAKSFRTPTIRSITPLSGTPGTLITIQGRIFTDVYGSNIALSSNGKNVRILRVYIGGMPCELLIPQSDNLYGLKLDHPNGDMGSMVCKTTGTFIGHHNVSFILDNDYGRSFPQKMAYFVSSLNKIAMFQTYAEVTMIFPSQGSIRGGTTLTISGRFFDQTDFPVRVLVGGEPCDILNVTENSICCKTPPKPHILKTVYPGGRGLKLEVWNNSRPIRLEEILEYNEKTPGYMGASWVDSASYIWLMEQDTFVARFSGFLVAPDSDVYRFYIKGDDRYAIYFSQTGLPEDKVRIAYHSANANSYFSSPTQRSDDIHLQKGKEYYIEILLQEYRLSAFVDVGLYQYRNVYTEQQTGDAVNEEQVIKSQSTILQEVQVITLENWETTNAINEVQKIKVTSPCVEANSCSLYQYRLIYNMEKTVFLPADASEFILQSALNDLWSIKPDTVQVIRTQNPQSYVYMVTFISTRGDFDLLGYEVVEGNNVTLDITEQTKGKPNLETFTLNWDGIASKPLTLWSSEAEFQGAVEEMVSTKCPPQIANFEEGFVVKYFRDYETDFNLEHINRGQKTAETDAYCGRYSLKNPAVLFDSADVKPNRRPYGDILLFPYNQLCLAYKGFLANYIGLKFQYQDNSKITRSTDTQFTYNFAYGNNWTYTCIDLLDLVRTKYTGTNVSLQRISLHKASESQSFYVDVVYIGHTSTISTLDEMPKRRLPALANKGIFLEHFQVNQTKTNGPTMTNQYSVTMTSYNCSYNIPMMAVSFGQIITHETENEFVYRGNNWPGESKIHIQRIQAASPPLSGSFDIQAYGHILKGLPAAVSAADLQFALQSLEGMGRISVTREGTCAGYAWNIKWRSTCGKQNLLQINDSNIIGEKANMTVTRIKEGGLFRQHVLGDLLRTPSQQPQVEVYVNGIPAKCSGDCGFTWDSNITPLVLAISPSQGSYEEGTILTIVGSGFSPSSAVTVSVGPVGCSLLSVDEKELKCQILNGSAGHAPVAVSMADVGLAQNVGGEEFYFVYQSQISHIWPDSGSIAGGTLLTLSGFGFNENSKVLVGNETCNVIEGDLNRITCRTPKKTEGTVDISVTTNGFQATARDAFSYNCLQTPIITDFSPKVRTILGEVNLTIKGYNFGNELTQNMAVYVGGKTCQILHWNFTDIRCLLPKLSPGKHDIYVEVRNWGFASTRDKLNSSIQYVLEVTSMFPQRGSLFGGTEITIRGFGFSTIPAENTVLLGSIPCNVTSSSENVIKCILHSTGNIFRITNNGKDSVHGLGYAWSPPVLNVSVGDTVAWHWQTHPFLRGIGYRIFSVSSPGSVIYDGKGFTSGRQKSTSGSFSYQFTSPGIHYYSSGYVDEAHSIFLQGVINVLPAETRHIPLHLFVGRSEATYAYGGPENLHLGSSVAGCLATEPLCSLNNTRVKNSKRLLFEVSSCFSPSISNITPSTGTVNELITIIGHGFSNLPWANKVTIGSYPCVVEESSEDSITCHIDPQNSMDVGIRETVTLTVYNLGTAINTLSNEFDRRFVLLPNIDLVLPNAGSTTGMTSVTIKGSGFAVSSAGVKVLMGHFPCKVLSVNYTAIECETSPAAQQLVDVDLLIHGVPAQCQGNCTFSYLESITPYITGVFPNSVIGSVKVLIEGEGLGTVLEDIAVFIGNQQFRAIEVNENNITALVTPLPVGHHSVSVVVGSKGLALGNLTVSSPPVASLSPTSGSIGGGTTLVITGNGFYPGNTTVTIGDEPCQIISINPNEVYCRTPAGTTGMVDVKIFVNTIAYPPLLFTYALEDTPFLRGIIPSRGPPGTEIEITGSNFGFEILEISVMINNIQCNVTMANDSVVQCIVGDHAGGTFPVMMHHKTKGSAMSTVVFEYPLNIQNINPSQGSFGGGQTMTVTGTGFNPQNSIILVCGSECAIDRLRSDYTTLLCEIPSNNGTGAEQACEVSVVNGKDLSQSMTPFTYAVSLTPLITAVSPKRGSTAGGTRLTVVGSGFSENMEDVHITIAEAKCDVEYSNKTHIICMTDAHTLSGWAPVCVHIRGVGMAKLDNADFLYVDAWSSNFSWGGKSPPEEGSLVVITKGQTILLDQSTPILKMLLIQGGTLIFDEADIELQAENILITDGGVLQIGTETSPFQHKAVITLHGHLRSPELPVYGAKTLAVREGILDLHGVPVPVTWTRLAHTAKAGERILILQEAVTWKPGDNIVIASTGHRHSQGENEKMTIASVSADGINITLSNPLNYTHLGITVTLPDGTLFEARAEVGILTRNILIRGSDNVEWNNKIPACPDGFDTGEFATQTCLQGKFGEEIGSDQFGGCVMFHAPVPGANMVTGRIEYVEVFHAGQAFRLGRYPIHWHLLGDLQFKSYVRGCAIHQAYNRAVTIHNTHHLLVERNIIYDIKGGAFFIEDGIEHGNILQYNLAVFVQQSTSLLNDDVTPAAFWVTNPNNTIRHNAVAGGTHFGFWYRMNNHPDGPSYDRNICQKRVPLGEFFNNTVHSQGWFGMWIFEEYFPMQTGSCTSTVPAPAIFNSLTTWNCQKGAEWVNGGALQFHNFVMVNNYEAGIETKRILAPYVGGWGETNGAVIKNAKIVGHLDELGMGSAFCTAKGLVLPFSEGLTVSSVHFMNFDRPNCVALGVTSISGVCNDRCGGWSAKFVDVQYSHTPNKAGFRWEHEMVMIDVDGSLTGHKGHTVIPHSSLLDPSHCTQEAEWSIGFPGSVCDASVSFHRLAFNQPSPVSLLEKDVVLSDSFGTSIIPFQKKRLTHMSGWMALIPNANHINWYFKGVDHITNISYTSTFYGFKEEDYVIISHNFTQNPDMFNIIDMRNGSSNPLNWNTSKNGDWHLEANTSTLYYLVSGRNDLHQSQLISGNLDPDVKDVVINFQAYCCILQDCFPVHPPSRKPIPKKRPATYNLWSNDSFWQSSRENNYTVPHPGANVIIPEGTWIVADIDMPSMERLIIWGVLELEDKYNVGAAESSYREVVLNATYISLQGGRLIGGWEDNPFKGDLKIVLRGNHTTQDWALPEGPNQGAKVLGVFGELDLHGIPHSIYKTKLSETAFAGSKVLSLMDAVDWQEGEEIVITTTSYDFHQTETRSIVKILHDHKILILNDSLSYTHFAEKYHVPGTGESYTLAADVGILSRNIKIVGEDYPGWSEDSFGARVLVGSFTENMMTFKGNARISNVEFYHSGQEGFRDSTDPRYAVTFLNLGQIQEHGSSYIRGCAFHHGFSPAIGVFGTDGLDIDDNIIHFTVGEGIRIWGNANRVRGNLIALSVWPGTYQNRKDLSSTLWHAAIEINRGTNTVLQNNVVAGFGRAGYRIDGEPCPGQFNPVEKWFDNEAHGGLYGIYMNQDGLPGCSLIQGFTIWTCWDYGIYFQTTESVHIYNVTLVDNGMAIFPMIYMPAAISHKISSKNVQIKSSLIVGSSPGFNCSDVLTNDDPNIELTAAHRSPRSPSGGRSGICWPTFASAHNMAPRKPHAGIMSYNAISGLLDISGSTFVGFKNVCSGETNVIFITNPLNEDLQHPIHVKNIKLVDTTEQSKIFIHRPDISKVNPSDCVDMVCDAKRKSFLRDIDGSFLGNAGSVIPQAEYEWDGNSQVGIGDYRIPKAMLTFLNGSRIPVTEKAPHKGIIRDSTCKYLPEWQSYQCFGMEYAMMVIESLDPDTETRRLSPVAIMGNGYVDLINGPQDHGWCAGYTCQRRLSLFHSIVALNKSYEVYFTGTSPQNLRLMLLNVDHNKAVLVGIFFSTLQRLDVYVNNLLVCPKTTIWNAQQKHCELNNHLYKDQFLPNLDSTVLGENYFDGTYQMLYLLVKGTIPVEIHTATVIFVSFQLSVATEDDFYTSHNLVKNLALFLKIPSDKIRISKIRGKSLRRKRSMGFIIEIEIGDPPIQFISNGTTGQMQLSELQEIAGSLGQAVILGNISSILGFNISSMSITNPLPSPSDSGWIKVTAQPVERSAFPVHHVAFVSSLLVITQPVAAQPGQPFPQQPSVKATDSDGNCVSVGITALTLRAILKDSNNNQVNGLSGNTTIPFSSCWANYTDLTPLRTGKNYKIEFILDNVVGVESRTFSLLAESVSSSGSSSSSNSKASTVGTYAQ

SEQ ID NO: 1781 - protein, 1377 aa, synthetic construct [sequence omitted]

SEQ ID NO: 1782 - protein, 1396 aa, synthetic construct
  REGION 1..1396: note = PLB1 (Q6P1J6) ECD
QIHTSPRKSTLEGQLWPETLKNSPFPCNPNKLGVNMPSKSVHSLKPSDIKFVAAIGNLEIPPDPGTGDLEKQDWTERPQQVCMGVMTVLSDIIRYFSPSVPMPVCHTGKRVIPHDGAEDLWIQAQELVRNMKENLQLDFQFDWKLINVFFSNASQCYLCPSAQQNGLAAGGVDELMGVLDYLQQEVPRAFVNLVDLSEVAEVSRQYHGTWLSPAPEPCNCSEETTRLAKVVMQWSYQEAWNSLLASSRYSEQESFTVVFQPFFYETTPSLHSEDPRLQDSTTLAWHLWNRMMEPAGEKDEPLSVKHGRPMKCPSQESPYLFSYRNSNYLTRLQKPQDKLEVREGAEIRCPDKDPSDTVPTSVHRLKPADINVIGALGDSLTAGNGAGSTPGNVLDVLTQYRGLSWSVGGDENIGTVTTLANILREFNPSLKGFSVGTGKETSPNAFLNQAVAGGRAEDLPVQARRLVDLMKNDTRIHFQEDWKIITLFIGGNDLCDFCNDLVHYSPQNFTDNIGKALDILHAEVPRAFVNLVTVLEIVNLRELYQEKKVYCPRMILRSLCPCVLKFDDNSTELATLIEFNKKFQEKTHQLIESGRYDTREDFTVVVQPFFENVDMPKTSEGLPDNSFFAPDCFHFSSKSHSRAASALWNNMLEPVGQKTTRHKFENKINITCPNQVQPFLRTYKNSMQGHGTWLPCRDRAPSALHPTSVHALRPADIQVVAALGDSLTAGNGIGSKPDDLPDVTTQYRGLSYSAGGDGSLENVTTLPNILREFNRNLTGYAVGTGDANDTNAFLNQAVPGAKAEDLMSQVQTLMQKMKDDHRVNFHEDWKVITVLIGGSDLCDYCTDSNLYSAANFVHHLRNALDVLHREVPRVLVNLVDFLNPTIMRQVFLGNPDKCPVQQASVLCNCVLTLRENSQELARLEAFSRAYRSSMRELVGSGRYDTQEDFSVVLQPFFQNIQLPVLADGLPDTSFFAPDCIHPNQKFHSQLARALWTNMLEPLGSKTETLDLRAEMPITCPTQNEPFLRTPRNSNYTYPIKPAIENWGSDFLCTEWKASNSVPTSVHQLRPADIKVVAALGDSLTTAVGARPNNSSDLPTSWRGLSWSIGGDGNLETHTTLPNILKKFNPYLLGFSTSTWEGTAGLNVAAEGARARDMPAQAWDLVERMKNSPDINLEKDWKLVTLFIGVNDLCHYCENPEAHLATEYVQHIQQALDILSEELPRAFVNVVEVMELASLYQGQGGKCAMLAAQNNCTCLRHSQSSLEKQELKKVNWNLQHGISSFSYWHQYTQREDFAVVVQPFFQNTLTPLNERGDTDLTFFSEDCFHFSDRGHAEMAIALWNNMLEPVGRKTTSNNFTHSRAKLKCPSPESPYLYTLRNSRLLPDQAEEAPEVLY

SEQ ID NO: 1783 - protein, 408 aa, synthetic construct
  REGION 1..408: note = PLXDC1 (Q8IUK5) ECD
LSPQPGAGHDEGPGSGWAAKGTVRGWNRRARESPGHVSEPDRTQLSQDLGGGTLAMDTLPDNRTRVVEDNHSYYVSRLYGPSEPHSRELWVDVAEANRSQVKIHTILSNTHRQASRVVLSFDFPFYGHPLRQITIATGGFIFMGDVIHRMLTATQYVAPLMANFNPGYSDNSTVVYFDNGTVFVVQWDHVYLQGWEDKGSFTFQAALHHDGRIVFAYKEIPMSVPEISSSQHPVKTGLSDAFMILNPSPDVPESRRRSIFEYHRIELDPSKVTSMSAVEFTPLPTCLQHRSCDACMSSDLTFNCSWCHVLQRCSSGFDRYRQEWMDYGCAQEAEGRMCEDFQDEDHDSASPDTSFSPYDGDLTTTSSSLFIDSLTTEDDTKLNPYAGGDGLQNNLSPKTKGTPVHLGT

SEQ ID NO: 1784 - protein, 424 aa, synthetic construct
  REGION 1..424: note = PLXDC2 (Q6UX71) ECD
KPGDQILDWQYGVTQAFPHTEEEVEVDSHAYSHRWKRNLDFLKAVDTNRASVGQDSPEPRSFTDLLLDDGQDNNTQIEEDTDHNYYISRIYGPSDSASRDLWVNIDQMEKDKVKIHGILSNTHRQAARVNLSFDFPFYGHFLREITVATGGFIYTGEVVHRMLTATQYIAPLMANFDPSVSRNSTVRYFDNGTALVVQWDHVHLQDNYNLGSFTFQATLLMDGRIIFGYKEIPVLVTQISSTNHPVKVGLSDAFVVVHRIQQIPNVRRRTIYEYHRVELQMSKITNISAVEMTPLPTCLQFNRCGPCVSSQIGFNCSWCSKLQRCSSGFDRHRQDWVDSGCPEESKEKMCENTEPVETSSRTTTTVGATTTQFRVLTTTRRAVTSQFPTSLPTEDDTKIALHLKDNGASTDDSAAEKKGGTLHA

SEQ ID NO: 1785 - protein, 1218 aa, synthetic construct
  REGION 1..1218: note = PLXNA1 (Q9UIW2) ECD
EAGLPRAGGGSQPPFRTFSASDWGLTHLVVHEQTGEVYVGAVNRIYKLSGNLTLLRAHVTGPVEDNEKCYPPPSVQSCPHGLGSTDNVNKLLLLDYAANRLLACGSASQGICQFLRLDDLFKLGEPHHRKEHYLSSVQEAGSMAGVLIAGPPGQGQAKLFVGTPIDGKSEYFPTLSSRRLMANEEDADMFGFVYQDEFVSSQLKIPSDTLSKFPAFDIYYVYSFRSEQFVYYLTLQLDTQLTSPDAAGEHFFTSKIVRLCVDDPKFYSYVEFPIGCEQAGVEYRLVQDAYLSRPGRALAHQLGLAEDEDVLFTVFAQGQKNRVKPPKESALCLFTLRAIKEKIKERIQSCYRGEGKLSLPWLLNKELGCINSPLQIDDDFCGQDFNQPLGGTVTIEGTPLFVDKDDGLTAVAAYDYRGRTVVFAGTRSGRIRKILVDLSNPGGRPALAYESVVAQEGSPILRDLVLSPNHQYLYAMTEKQVTRVPVESCVQYTSCELCLGSRDPHCGWCVLHSICSRRDACERADEPQRFAADLLQCVQLTVQPRNVSVTMSQVPLVLQAWNVPDLSAGVNCSFEDFTESESVLEDGRIHCRSPSAREVAPITRGQGDQRVVKLYLKSKETGKKFASVDFVFYNCSVHQSCLSCVNGSFPCHWCKYRHVCTHNVADCAFLEGRVNVSEDCPQILPSTQIYVPVGVVKPITLAARNLPQPQSGQRGYECLFHIPGSPARVTALRFNSSSLQCQNSSYSYEGNDVSDLPVNLSVVWNGNFVIDNPQNIQAHLYKCPALRESCGLCLKADPRFECGWCVAERRCSLRHHCAADTPASWMHARHGSSRCTDPKILKLSPETGPRQGGTRLTITGENLGLRFEDVRLGVRVGKVLCSPVESEYISAEQIVCEIGDASSVRAHDALVEVCVRDCSPHYRALSPKRFTFVTPTFYRVSPSRGPLSGGTWIGIEGSHLNAGSDVAVSVGGRPCSFSWRNSREIRCLTPPGQSPGSAPIIININRAQLTNPEVKYNYTEDPTILRIDPEWSINSGGTLLTVTGTNLATVREPRIRAKYGGIERENGCLVYNDTTMVCRAPSVANPVRSPPELGERPDELGFVMDNVRSLLVLNSTSFLYYPDPVLEPLSPTGLLELKPSSPLILKGRNLLPPAPGNSRLNYTVLIGSTPCTLTVSETQLLCEAPNLTGQHKVTVRAGGFEFSPGTLQVYSDSLLTLP

SEQ ID NO: 1786 - protein, 1203 aa, synthetic construct
  REGION 1..1203: note = PLXNA2 (O75051) ECD
MPQFSTFHSENRDWTFNHLTVHQGTGAVYVGAINRVYKLTGNLTIQVAHKTGPEEDNKSCYPPLIVQPCSEVLTLTNNVNKLLIIDYSENRLLACGSLYQGVCKLLRLDDLFILVEPSHKKEHYLSSVNKTGTMYGVIVRSEGEDGKLFIGTAVDGKQDYFPTLSSRKLPRDPESSAMLDYELHSDFVSSLIKIPSDTLALVSHFDIFYIYGFASGGFVYFLTVQPETPEGVAINSAGDLFYTSRIVRLCKDDPKFHSYVSLPFGCTRAGVEYRLLQAAYLAKPGDSLAQAFNITSQDDVLFAIFSKGQKQYHHPPDDSALCAFPIRAINLQIKERLQSCYQGEGNLELNWLLGKDVQCTKAPVPIDDNFCGLDINQPLGGSTPVEGLTLYTTSRDRMTSVASYVYNGYSVVFVGTKSGKLKKIRADGPPHGGVQYEMVSVLKDGSPILRDMAFSIDQRYLYVMSERQVTRVPVESCEQYTTCGECLSSGDPHCGWCALHNMCSRRDKCQQAWEPNRFAASISQCVSLAVHPSSISVSEHSRLLSLVVSDAPDLSAGIACAFGNLTEVEGQVSGSQVICISPGPKDVPVIPLDQDWFGLELQLRSKETGKIFVSTEFKFYNCSAHQLCLSCVNSAFRCHWCKYRNLCTHDPTTCSFQEGRINISEDCPQLVPTEEILIPVGEVKPITLKARNLPQPQSGQRGYECVLNIQGAIHRVPALRFNSSSVQCQNSSYQYDGMDISNLAVDFAVVWNGNFIIDNPQDLKVHLYKCAAQRESCGLCLKADRKFECGWCSGERRCTLHQHCTSPSSPWLDWSSHNVKCSNPQITEILTVSGPPEGGTRVTIHGVNLGLDFSEIAHHVQVAGVPCTPLPGEYIIAEQIVCEMGHALVGTTSGPVRLCIGECKPEFMTKSHQQYTFVNPSVLSLNPIRGPESGGTMVTITGHYLGAGSSVAVYLGNQTCEFYGRSMSEIVCVSPPSSNGLGPVPVSVSVDRAHVDSNLQFEYIDDPRVQRIEPEWSIASGHTPLTITGFNLDVIQEPRIRVKFNGKESVNVCKVVNTTTLTCLAPSLTTDYRPGLDTVERPDEFGFVFNNVQSLLIYNDTKFIYYPNPTFELLSPTGVLDQKPGSPIILKGKNLCPPASGGAKLNYTVLIGETPCAVTVSETQLLCEPPNLTGQHKVMVHVGGMVFSPGSVSVISDSLLTLP

SEQ ID NO: 1787 - protein, 1201 aa, synthetic construct
  REGION 1..1201: note = PLXNA3 (P51805) ECD
NRPFRAFVVTDTTLTHLAVHRVTGEVFVGAVNRVFKLAPNLTELRAHVTGPVEDNARCYPPPSMRVCAHRLAPVDNINKLLLIDYAARRLVACGSIWQGICQFLRLDDLFKLGEPHHRKEHYLSGAQEPDSMAGVIVEQGQGPSKLFVGTAVDGKSEYFPTLSSRKLISDEDSADMFSLVYQDEFVSSQIKIPSDTLSLYPAFDIYYIYGFVSASFVYFLTLQLDTQQTLLDTAGEKFFTSKIVRMCAGDSEFYSYVEFPIGCSWRGVEYRLVQSAHLAKPGLLLAQALGVPADEDVLFTIFSQGQKNRASPPRQTILCLFTLSNINAHIRRRIQSCYRGEGTLALPWLLNKELPCINTPMQINGNFCGLVLNQPLGGLHVIEGLPLLADSTDGMASVAAYTYRQHSVVFIGTRSGSLKKVRVDGFQDAHLYETVPVVDGSPILRDLLFSPDHRHIYLLSEKQVSQLPVETCEQYQSCAACLGSGDPHCGWCVLRHRCCREGACLGASAPHGFAEELSKCVQVRVRPNNVSVTSPGVQLTVTLHNVPDLSAGVSCAFEAAAENEAVLLPSGELLCPSPSLQELRALTRGHGATRTVRLQLLSKETGVRFAGADFVFYNCSVLQSCMSCVGSPYPCHWCKYRHTCTSRPHECSFQEGRVHSPEGCPEILPSGDLLIPVGVMQPLTLRAKNLPQPQSGQKNYECVVRVQGRQQRVPAVRFNSSSVQCQNASYSYEGDEHGDTELDFSVVWDGDFPIDKPPSFRALLYKCWAQRPSCGLCLKADPRFNCGWCISEHRCQLRTHCPAPKTNWMHLSQKGTRCSHPRITQIHPLVGPKEGGTRVTIVGDNLGLLSREVGLRVAGVRCNSIPAEYISAERIVCEMEESLVPSPPPGPVELCVGDCSADFRTQSEQVYSFVTPTFDQVSPSRGPASGGTRLTISGSSLDAGSRVTVTVRDSECQFVRRDAKAIVCISPLSTLGPSQAPITLAIDRANISSPGLIYTYTQDPTVTRLEPTWSIINGSTAITVSGTHLLTVQEPRVRAKYRGIETTNTCQVINDTAMLCKAPGIFLGRPQPRAQGEHPDEFGFLLDHVQTARSLNRSSFTYYPDPSFEPLGPSGVLDVKPGSHVVLKGKNLIPAAAGSSRLNYTVLIGGQPCSLTVSDTQLLCDSPSQTGRQPVMVLVGGLEFWLGTLHISAERALTLPA

SEQ ID NO: 1788 - protein, 1214 aa, synthetic construct
  REGION 1..1214: note = PLXNA4 (Q9HCM2) ECD
TLLTRQPAPLSQKQRSFVTFRGEPAEGFNHLVVDERTGHIYLGAVNRIYKLSSDLKVLVTHETGPDEDNPKCYPPRIVQTCNEPLTTTNNVNKMLLIDYKENRLIACGSLYQGICKLLRLEDLFKLGEPYHKKEHYLSGVNESGSVFGVIVSYSNLDDKLFIATAVDGKPEYFPTISSRKLTKNSEADGMFAYVFHDEFVASMIKIPSDTFTIIPDFDIYYVYGFSSGNFVYFLTLQPEMVSPPGSTTKEQVYTSKLVRLCKEDTAFNSYVEVPIGCERSGVEYRLLQAAYLSKAGAVLGRTLGVHPDDDLLFTVFSKGQKRKMKSLDESALCIFILKQINDRIKERLQSCYRGEGTLDLAWLKVKDIPCSSALLTIDDNFCGLDMNAPLGVSDMVRGIPVFTEDRDRMTSVIAYVYKNHSLAFVGTKSGKLKKIRVDGPRGNALQYETVQVVDPGPVLRDMAFSKDHEQLYIMSERQLTRVPVESCGQYQSCGECLGSGDPHCGWCVLHNTCTRKERCERSKEPRRFASEMKQCVRLTVHPNNISVSQYNVLLVLETYNVPELSAGVNCTFEDLSEMDGLVVGNQIQCYSPAAKEVPRIITENGDHHVVQLQLKSKETGMTFASTSFVFYNCSVHNSCLSCVESPYRCHWCKYRHVCTHDPKTCSFQEGRVKLPEDCPQLLRVDKILVPVEVIKPITLKAKNLPQPQSGQRGYECILNIQGSEQRVPALRFNSSSVQCQNTSYSYEGMEINNLPVELTVVWNGHFNIDNPAQNKVHLYKCGAMRESCGLCLKADPDFACGWCQGPGQCTLRQHCPAQESQWLELSGAKSKCTNPRITEIIPVTGPREGGTKVTIRGENLGLEFRDIASHVKVAGVECSPLVDGYIPAEQIVCEMGEAKPSQHAGFVEICVAVCRPEFMARSSQLYYFMTLTLSDLKPSRGPMSGGTQVTITGTNLNAGSNVVVMFGKQPCLFHRRSPSYIVCNTTSSDEVLEMKVSVQVDRAKIHQDLVFQYVEDPTIVRIEPEWSIVSGNTPIAVWGTHLDLIQNPQIRAKHGGKEHINICEVLNATEMTCQAPALALGPDHQSDLTERPEEFGFILDNVQSLLILNKTNFTYYPNPVFEAFGPSGILELKPGTPIILKGKNLIPPVAGGNVKLNYTVLVGEKPCTVTVSDVQLLCESPNLIGRHKVMARVGGMEYSPGMVYIAPDSPLSLP

SEQ ID NO: 1789 - protein, 1471 aa, synthetic construct
  REGION 1..1471: note = PLXNB1 (O43157) ECD
LQPLPPTAFTPNGTYLQHLARDPTSGTLYLGATNFLFQLSPGLQLEATVSTGPVLDSRDCLPPVMPDECPQAQPTNNPNQLLLVSPGALVVCGSVHQGVCEQRRLGQLEQLLLRPERPGDTQYVAANDPAVSTVGLVAQGLAGEPLLFVGRGYTSRGVGGGIPPITTRALWPPDPQAAFSYEETAKLAVGRLSEYSHHFVSAFARGASAYFLFLRRDLQAQSRAFRAYVSRVCLRDQHYYSYVELPLACEGGRYGLIQAAAVATSREVAHGEVLFAAFSSAAPPTVGRPPSAAAGASGASALCAFPLDEVDRLANRTRDACYTREGRAEDGTEVAYIEYDVNSDCAQLPVDTLDAYPCGSDHTPSPMASRVPLEATPILEWPGIQLTAVAVTMEDGHTIAFLGDSQGQLHRVYLGPGSDGHPYSTQSIQQGSAVSRDLTFDGTFEHLYVMTQSTLLKVPVASCAQHLDCASCLAHRDPYCGWCVLLGRCSRRSECSRGQGPEQWLWSFQPELGCLQVAAMSPANISREETREVFLSVPDLPPLWPGESYSCHFGEHQSPALLTGSGVMCPSPDPSEAPVLPRGADYVSVSVELRFGAVVIAKTSLSFYDCVAVTELRPSAQCQACVSSRWGCNWCVWQHLCTHKASCDAGPMVASHQSPLVSPDPPARGGPSPSPPTAPKALATPAPDTLPVEPGAPSTATASDISPGASPSLLSPWGPWAGSGSISSPGSTGSPLHEEPSPPSPQNGPGTAVPAPTDFRPSATPEDLLASPLSPSEVAAVPPADPGPEALHPTVPLDLPPATVPATTFPGAMGSVKPALDWLTREGGELPEADEWTGGDAPAFSTSTLLSGDGDSAELEGPPAPLILPSSLDYQYDTPGLWELEEATLGASSCPCVESVQGSTLMPVHVEREIRLLGRNLHLFQDGPGDNECVMELEGLEVVVEARVECEPPPDTQCHVTCQQHQLSYEALQPELRVGLFLRRAGRLRVDSAEGLHVVLYDCSVGHGDCSRCQTAMPQYGCVWCEGERPRCVTREACGEAEAVATQCPAPLIHSVEPLTGPVDGGTRVTIRGSNLGQHVQDVLGMVTVAGVPCAVDAQEYEVSSSLVCITGASGEEVAGATAVEVPGRGRGVSEHDFAYQDPKVHSIFPARGPRAGGTRLTLNGSKLLTGRLEDIRVVVGDQPCHLLPEQQSEQLRCETSPRPTPATLPVAVWFGATERRLQRGQFKYTLDPNITSAGPTKSFLSGGREICVRGQNLDVVQTPRIRVTVVSRMLQPSQGLGRRRRVVPETACSLGPSCSSQQFEEPCHVNSSQLITCRTPALPGLPEDPWVRVEFILDNLVFDFATLNPTPFSYEADPTLQPLNPEDPTMPFRHKPGSVFSVEGENLDLAMSKEEVVAMIGDGPCVVKTLTRHHLYCEPPVEQPLPRHHALREAPDSLPEFTVQMGNLRFSLGHVQYDGESPGAFPVAAQ

SEQ ID NO: 1790 - protein, 1178 aa, synthetic construct
  REGION 1..1178: note = PLXNB2 (O15031) ECD
LRPRKLDFFRSEKELNHLAVDEASGVVYLGAVNALYQLDAKLQLEQQVATGPALDNKKCTPPIEASQCHEAEMTDNVNQLLLLDPPRKRLVECGSLFKGICALRALSNISLRLFYEDGSGEKSFVASNDEGVATVGLVSSTGPGGDRVLFVGKGNGPHDNGIIVSTRLLDRTDSREAFEAYTDHATYKAGYLSTNTQQFVAAFEDGPYVFFVFNQQDKHPARNRTLLARMCREDPNYYSYLEMDLQCRDPDIHAAAFGTCLAASVAAPGSGRVLYAVFSRDSRSSGGPGAGLCLFPLDKVHAKMEANRNACYTGTREARDIFYKPFHGDIQCGGHAPGSSKSFPCGSEHLPYPLGSRDGLRGTAVLQRGGLNLTAVTVAAENNHTVAFLGTSDGRILKVYLTPDGTSSEYDSILVEINKRVKRDLVLSGDLGSLYAMTQDKVFRLPVQECLSYPTCTQCRDSQDPYCGWCVVEGRCTRKAECPRAEEASHWLWSRSKSCVAVTSAQPQNMSRRAQGEVQLTVSPLPALSEEDELLCLFGESPPHPARVEGEAVICNSPSSIPVTPPGQDHVAVTIQLLLRRGNIFLTSYQYPFYDCRQAMSLEENLPCISCVSNRWTCQWDLRYHECREASPNPEDGIVRAHMEDSCPQFLGPSPLVIPMNHETDVNFQGKNLDTVKGSSLHVGSDLLKFMEPVTMQESGTFAFRTPKLSHDANETLPLHLYVKSYGKNIDSKLHVTLYNCSFGRSDCSLCRAANPDYRCAWCGGQSRCVYEALCNTTSECPPPVITRIQPETGPLGGGIRITILGSNLGVQAGDIQRISVAGRNCSFQPERYSVSTRIVCVIEAAETPFTGGVEVDVFGKLGRSPPNVQFTFQQPKPLSVEPQQGPQAGGTTLTIHGTHLDTGSQEDVRVTLNGVPCKVTKFGAQLQCVTGPQATRGQMLLEVSYGGSPVPNPGIFFTYRENPVLRAFEPLRSFASGGRSINVTGQGFSLIQRFAMVVIAEPLQSWQPPREAESLQPMTVVGTDYVFHNDTKVVFLSPAVPEEPEAYNLTVLIEMDGHRALLRTEAGAFEYVPDPTFENFTGGVKKQVNKLIHARGTNLNKAMTLQEAEAFVGAERCTMKTLTETDLYCEPPEVQPPPKRRQKRDTTHNLPEFIVKFGSREWVLGRVEYDTRVSDVP

SEQ ID NO: 1791 - protein, 1211 aa, synthetic construct
  REGION 1..1211: note = PLXNB3 (Q9ULL4) ECD
HRFSAPNTTLNHLALAPGRGTLYVGAVNRLFQLSPELQLEAVAVTGPVIDSPDCVPFRDPAECPQAQLTDNANQLLLVSSRAQELVACGQVRQGVCETRRLGDVAEVLYQAEDPGDGQFVAANTPGVATVGLVVPLPGRDLLLVARGLAGKLSAGVPPLAIRQLAGSQPFSSEGLGRLVVGDFSDYNNSYVGAFADARSAYFVFRRRGARAQAEYRSYVARVCLGDTNLYSYVEVPLACQGQGLIQAAFLAPGTLLGVFAAGPRGTQAALCAFPMVELGASMEQARRLCYTAGGRGPSGAEEATVEYGVTSRCVTLPLDSPESYPCGDEHTPSPIAGRQPLEVQPLLKLGQPVSAVAALQADGHMIAFLGDTQGQLYKVFLHGSQGQVYHSQQVGPPGSAISPDLLLDSSGSHLYVLTAHQVDRIPVAACPQFPDCASCLQAQDPLCGWCVLQGRCTRKGQCGRAGQLNQWLWSYEEDSHCLHIQSLLPGHHPRQEQGQVTLSVPRLPILDADEYFHCAFGDYDSLAHVEGPHVACVTPPQDQVPLNPPGTDHVTVPLALMFEDVTVAATNFSFYDCSAVQALEAAAPCRACVGSIWRCHWCPQSSHCVYGEHCPEGERTIYSAQEVDIQVRGPGACPQVEGLAGPHLVPVGWESHLALRVRNLQHFRGLPASFHCWLELPGELRGLPATLEETAGDSGLIHCQAHQFYPSMSQRELPVPIYVTQGEAQRLDNTHALYVILYDCAMGHPDCSHCQAANRSLGCLWCADGQPACRYGPLCPPGAVELLCPAPSIDAVEPLTGPPEGGLALTILGSNLGRAFADVQYAVSVASRPCNPEPSLYRTSARIVCVTSPAPNGTTGPVRVAIKSQPPGISSQHFTYQDPVLLSLSPRWGPQAGGTQLTIRGQHLQTGGNTSAFVGGQPCPILEPVCPEAIVCRTRPQAAPGEAAVLVVFGHAQRTLLASPFRYTANPQLVAAEPSASFRGGGRLIRVRGTGLDVVQRPLLSVWLEADAEVQASRAQPQDPQPRRSCGAPAADPQACIQLGGGLLQCSTVCSVNSSSLLLCRSPAVPDRAHPQRVFFTLDNVQVDFASASGGQGFLYQPNPRLAPLSREGPARPYRLKPGHVLDVEGEGLNLGISKEEVRVHIGRGECLVKTLTRTHLYCEPPAHAPQPANGSGLPQFVVQMGNVQLALGPVQYEAEPPLSAFPVEAQ

SEQ ID NO: 1792 - protein, 910 aa, synthetic construct
  REGION 1..910: note = PLXNC1 (O60486) ECD
ADEPVWRSEQAIGAIAASQEDGVFVASGSCLDQLDYSLEHSLSRLYRDQAGNCTEPVSLAPPARPRPGSSFSKLLLPYREGAAGLGGLLLTGWTFDRGACEVRPLGNLSRNSLRNGTEVVSCHPQGSTAGVVYRAGRNNRWYLAVAATYVLPEPETASRCNPAASDHDTAIALKDTEGRSLATQELGRLKLCEGAGSLHFVDAFLWNGSIYFPYYPYNYTSGAATGWPSMARIAQSTEVLFQGQASLDCGHGHPDGRRLLLSSSLVEALDVWAGVFSAAAGEGQERRSPTTTALCLFRMSEIQARAKRVSWDFKTAESHCKEGDQPERVQPIASSTLIHSDLTSVYGTVVMNRTVLFLGTGDGQLLKVILGENLTSNCPEVIYEIKEETPVFYKLVPDPVKNIYIYLTAGKEVRRIRVANCNKHKSCSECLTATDPHCGWCHSLQRCTFQGDCVHSENLENWLDISSGAKKCPKIQIIRSSKEKTTVTMVGSFSPRHSKCMVKNVDSSRELCQNKSQPNRTCTCSIPTRATYKDVSVVNVMFSFGSWNLSDRFNFTNCSSLKECPACVETGCAWCKSARRCIHPFTACDPSDYERNQEQCPVAVEKTSGGGRPKENKGNRTNQALQVFYIKSIEPQKVSTLGKSNVIVTGANFTRASNITMILKGTSTCDKDVIQVSHVLNDTHMKFSLPSSRKEMKDVCIQFDGGNCSSVGSLSYIALPHCSLIFPATTWISGGQNITMMGRNFDVIDNLIISHELKGNINVSEYCVATYCGFLAPSLKSSKVRTNVTVKLRVQDTYLDCGTLQYREDPRFTGYRVESEVDTELEVKIQKENDNFNISKKDIEITLFHGENGQLNCSFENITRNQDLTTILCKIKGIKTASTIANSSKKVRVKLGNLELYVEQESVPST

SEQ ID NO: 1793 - protein, 1225 aa, synthetic construct
  REGION 1..1225: note = PLXND1 (Q9Y4D7) ECD
LEIQRRFPSPTPTNNFALDGAAGTVYLAAVNRLYQLSGANLSLEAEAAVGPVPDSPLCHAPQLPQASCEHPRRLTDNYNKILQLDPGQGLVVVCGSIYQGFCQLRRRGNISAVAVRFPPAAPPAEPVTVFPSMLNVAANHPNASTVGLVLPPAAGAGGSRLLVGATYTGYGSSFFPRNRSLEDHRFENTPEIAIRSLDTRGDLAKLFTFDLNPSDDNILKIKQGAKEQHKLGFVSAFLHPSDPPPGAQSYAYLALNSEARAGDKESQARSLLARICLPHGAGGDAKKLTESYIQLGLQCAGGAGRGDLYSRLVSVFPARERLFAVFERPQGSPAARAAPAALCAFRFADVRAAIRAARTACFVEPAPDVVAVLDSVVQGTGPACERKLNIQLQPEQLDCGAAHLQHPLSILQPLKATPVFRAPGLTSVAVASVNNYTAVFLGTVNGRLLKINLNESMQVVSRRVVTVAYGEPVHHVMQFDPADSGYLYLMTSHQMARVKVAACNVHSTCGDCVGAADAYCGWCALETRCTLQQDCTNSSQQHFWTSASEGPSRCPAMTVLPSEIDVRQEYPGMILQISGSLPSLSGMEMACDYGNNIRTVARVPGPAFGHQIAYCNLLPRDQFPPFPPNQDHVTVEMSVRVNGRNIVKANFTIYDCSRTAQVYPHTACTSCLSAQWPCFWCSQQHSCVSNQSRCEASPNPTSPQDCPRTLLSPLAPVPTGGSQNILVPLANTAFFQGAALECSFGLEEIFEAVWVNESVVRCDQVVLHTTRKSQVFPLSLQLKGRPARFLDSPEPMTVMVYNCAMGSPDCSQCLGREDLGHLCMWSDGCRLRGPLQPMAGTCPAPEIHAIEPLSGPLDGGTLLTIRGRNLGRRLSDVAHGVWIGGVACEPLPDRYTVSEEIVCVTGPAPGPLSGVVTVNASKEGKSRDRFSYVLPLVHSLEPTMGPKAGGTRITIHGNDLHVGSELQVLVNDTDPCTELMRTDTSIACTMPEGALPAPVPVCVRFERRGCVHGNLTFWYMQNPVITAISPRRSPVSGGRTITVAGERFHMVQNVSMAVHHIGREPTLCKVLNSTLITCPSPGALSNASAPVDFFINGRAYADEVAVAEELLDPEEAQRGSRFRLDYLPNPQFSTAKREKWIKHHPGEPLTLVIHKEQDSLGLQSHEYRVKIGQVSCDIQIVSDRIIHCSVNESLGAAVGQLPITIQVGNFNQTIATLQLGGSETA

SEQ ID NO: 1794 - protein, 443 aa, synthetic construct
  REGION 1..443: note = PMEL (P40967) ECD
KVPRNQDWLGVSRQLRTKAWNRQLYPEWTEAQRLDCWRGGQVSLKVSNDGPTLIGANASFSIALNFPGSQKVLPDGQVIWVNNTIINGSQVWGGQPVYPQETDDACIFPDGGPCPSGSWSQKRSFVYVWKTWGQYWQVLGGPVSGLSIGTGRAMLGTHTMEVTVYHRRGSRSYVPLAHSSSAFTITDQVPFSVSVSQLRALDGGNKHFLRNQPLTFALQLHDPSGYLAEADLSYTWDFGDSSGTLISRALVVTHTYLEPGPVTAQVVLQAAIPLTSCGSSPVPGTTDGHRPTAEAPNTTAGQVPTTEVVGTTPGQAPTAEPSGTTSVQVPTTEVISTAPVQMPTAESTGMTPEKVPVSEVMGTTLAEMSTPEATGMTPAEVSIVVLSGTTAAQVTTTEWVETTARELPIPEPEGPDASSIMSTESITGSLGPLLDGTATLRLV

SEQ ID NO: 1795 - protein, 439 aa, synthetic construct
  REGION 1..439: note = PODXL (O00592) ECD
SPSPSPSPSQNATQTTTDSSNKTAPTPASSVTIMATDTAQQSTVPTSKANEILASVKATTLGVSSDSPGTTTLAQQVSGPVNTTVARGGGSGNPTTTIESPKSTKSADTTTVATSTATAKPNTTSSQNGAEDTTNSGGKSSHSVTTDLTSTKAEHLTTPHPTSPLSPRQPTSTHPVATPTSSGHDHLMKISSSSSTVAIPGYTFTSPGMTTTLLETVFHHVSQAGLELLTSGDLPTLASQSAGITASSVISQRTQQTSSQMPASSTAPSSQETVQPTSPATALRTPTLPETMSSSPTAASTTHRYPKTPSPTVAHESNWAKCEDLETQTQSEKQLVLNLTGNTLCAGGASDEKLISLICRAVKATFNPAQDKCGIRLASVPGSQTVVVKEITIHTKLPAKDVYERLKDKWDELKEAGVSDMKLGDQGPPEEAEDRFSMP

SEQ ID NO: 1796 - protein, 468 aa, synthetic construct
  REGION 1..468: note = PODXL2 (Q9NZ53) ECD
GSDEPGPEGLTSTSLLDLLLPTGLEPLDSEEPSETMGLGAGLGAPGSGFPSEENEESRILQPPQYFWEEEEELNDSSLDLGPTADYVFPDLTEKAGSIEDTSQAQELPNLPSPLPKMNLVEPPWHMPPREEEEEEEEEEEREKEEVEKQEEEEEEELLPVNGSQEEAKPQVRDFSLTSSSQTPGATKSRHEDSGDQASSGVEVESSMGPSLLLPSVTPTTVTPGDQDSTSQEAEATVLPAAGLGVEFEAPQEASEEATAGAAGLSGQHEEVPALPSFPQTTAPSGAEHPDEDPLGSRTSASSPLAPGDMELTPSSATLGQEDLNQQLLEGQAAEAQSRIPWDSTQVICKDWSNLAGKNYIILNMTENIDCEVFRQHRGPQLLALVEEVLPRHGSGHHGAWHISLSKPSEKEQHLLMTLVGEQGVVPTQDVLSMLGDIRRSLEEIGIQNYSTTSSCQARASQVRSDYGT

SEQ ID NO: 1797 - protein, 57 aa, synthetic construct
  REGION 1..57: note = PRIMA1 (Q86XR5) ECD
EPQKSCSKVTDSCRHVCQCRPPPPLPPPPPPPPPPRLLSAPAPNSTSCPTEESWWSG

SEQ ID NO: 1798 - protein, 210 aa, synthetic construct
  REGION 1..210: note = PRLR (P16471) ECD
QLPPGKPEIFKCRSPNKETFTCWWRPGTDGGLPTNYSLTYHREGETLMHECPDYITGGPNSCHFGKQYTSMWRTYIMMVNATNQMGSSFSDELYVDVTYIVQPDPPLELAVEVKQPEDRKPYLWIKWSPPTLIDLKTGWFTLLYEIRLKPEKAAEWEIHFAGQQTEFKILSLHPGQKYLVQVRCKPDHGYWSAWSPATFIQIPSDFTMND

SEQ ID NO: 1799 - protein, 193 aa, synthetic construct
  REGION 1..193: note = PROCR (Q9UNN8) ECD
SQDASDGLQRLHMLQISYFRDPYHVWYQGNASLGGHLTHVLEGPDTNTTIIQLQPLQEPESWARTQSGLQSYLLQFHGLVRLVHQERTLAFPLTIRCFLGCELPPEGSRAHVFFEVAVNGSSFVSFRPERALWQADTQVTSGVVTFTLQQLNAYNRTRYELREFLEDTCVQYVQKHISAENTKGSQTSRSYTS

SEQ ID NO: 1800 - protein, 290 aa, synthetic construct
  REGION 1..290: note = PRSS8 (Q16651) ECD
AEGAEAPCGVAPQARITGGSSAVAGQWPWQVSITYEGVHVCGGSLVSEQWVLSAAHCFPSEHHKEAYEVKLGAHQLDSYSEDAKVSTLKDIIPHPSYLQEGSQGDIALLQLSRPITFSRYIRPICLPAANASFPNGLHCTVTGWGHVAPSVSLLTPKPLQQLEVPLISRETCNCLYNIDAKPEEPHFVQEDMVCAGYVEGGKDACQGDSGGPLSCPVEGLWYLTGIVSWGDACGARNRPGVYTLASSYASWIQSKVTELQPRVVPQTQESQPDSNLCGSHLAFSSAPAQG

SEQ ID NO: 1801 - protein, 914 aa, synthetic construct
  REGION 1..914: note = PRTG (Q2VWP7) ECD
FSELSFVKEPQDVTVTRKDPVVLDCQAHGEVPIKVTWLKNGAKMSENKRIEVLSNGSLYISEVEGRRGEQSDEGFYQCLAMNKYGAILSQKAHLALSTISAFEVQPISTEVHEGGVARFACKISSHPPAVITWEFNRTTLPMTMDRITALPTGVLQIYDVSQRDSGNYRCIAATVAHRRKSMEASLTVIPAKESKSFHTPTIIAGPQNITTSLHQTVVLECMATGNPKPIISWSRLDHKSIDVFNTRVLGNGNLMISDVRLQHAGVYVCRATTPGTRNFTVAMATLTVLAPPSFVEWPESLTRPRAGTARFVCQAEGIPSPKMSWLKNGRKIHSNGRIKMYNSKLVINQIIPEDDAIYQCMAENSQGSILSRARLTVVMSEDRPSAPYNVHAETMSSSAILLAWERPLYNSDKVIAYSVHYMKAEGLNNEEYQVVIGNDTTHYIIDDLEPASNYTFYIVAYMPMGASQMSDHVTQNTLEDVPLRPPEISLTSRSPTDILISWLPIPAKYRRGQVVLYRLSFRLSTENSIQVLELPGTTHEYLLEGLKPDSVYLVRITAATRVGLGESSVWTSHRTPKATSVKAPKSPELHLEPLNCTTISVRWQQDVEDTAAIQGYKLYYKEEGQQENGPIFLDTKDLLYTLSGLDPRRKYHVRLLAYNNIDDGYQADQTVSTPGCVSVRDRMVPPPPPPHHLYAKANTSSSIFLHWRRPAFTAAQIINYTIRCNPVGLQNASLVLYLQTSETHMLVQGLEPNTKYEFAVRLHVDQLSSPWSPVVYHSTLPEAPAGPPVGVKVTLIEDDTALVSWKPPDGPETVVTRYTILYASRKAWIAGEWQVLHREGAITMALLENLVAGNVYIVKISASNEVGEGPFSNSVELAVLPKETSESNQRPKRLDSADAKVYSGYYHLDQKSMT

SEQ ID NO: 1802 - protein, 123 aa, synthetic construct
  REGION 1..123: note = PTCRA (Q6ISU1) ECD
TPFPSLAPPIMLLVDGKQQMVVVCLVLDVAPPGLDSPIWFSAGNGSALDAFTYGPSPATDGTWTNLAHLSLPSEELASWEPLVCHTGPGAEGHSRSTQPMHLSGEASTARTCPQEPLRGTPGG

SEQ ID NO: 1803 - protein, 807 aa, synthetic construct [sequence omitted]

SEQ ID NO: 1804 - protein, 674 aa, synthetic construct
  REGION 1..674: note = PTK7 (Q13308) ECD
AIVFIKQPSSQDALQGRRALLRCEVEAPGPVHVYWLLDGAPVQDTERRFAQGSSLSFAAVDRLQDSGTFQCVARDDVTGEEARSANASFNIKWIEAGPVVLKHPASEAEIQPQTQVTLRCHIDGHPRPTYQWFRDGTPLSDGQSNHTVSSKERNLTLRPAGPEHSGLYSCCAHSAFGQACSSQNFTLSIADESFARVVLAPQDVVVARYEEAMFHCQFSAQPPPSLQWLFEDETPITNRSRPPHLRRATVFANGSLLLTQVRPRNAGIYRCIGQGQRGPPIILEATLHLAEIEDMPLFEPRVFTAGSEERVTCLPPKGLPEPSVWWEHAGVRLPTHGRVYQKGHELVLANIAESDAGVYTCHAANLAGQRRQDVNITVATVPSWLKKPQDSQLEEGKPGYLDCLTQATPKPTVVWYRNQMLISEDSRFEVFKNGTLRINSVEVYDGTWYRCMSSTPAGSIEAQARVQVLEKLKFTPPPQPQQCMEFDKEATVPCSATGREKPTIKWERADGSSLPEWVTDNAGTLHFARVTRDDAGNYTCIASNGPQGQIRAHVQLTVAVFITFKVEPERTTVYQGHTALLQCEAQGDPKPLIQWKGKDRILDPTKLGPRMHIFQNGSLVIHDVAPEDSGRYTCIAGNSCNIKHTEAPLYVVDKPVPEESEGPGSPPPYKMIQT

SEQ ID NO: 1805 - protein, 132 aa, synthetic construct
  REGION 1..132: note = PTPRA (P18433) ECD
NNATTVAPSVGITRLINSSTAEPVKEEAKTSNPTSSLTSLSVAPTFSPNITLGPTYLTTVNSSDSDNGTTRTASTNSIGITISPNGTWLPDNQFTDARTEPWEGNSSTAATTPETFPPSGNSDSKDRRDETP

SEQ ID NO: 1806 - protein, 1599 aa, synthetic construct
  REGION 1..1599: note = PTPRB (P23467) ECD
EPERCNFTLAESKASSHSVSIQWRILGSPCNFSLIYSSDTLGAALCPTFRIDNTTYGCNLQDLQAGTIYNFRIISLDEERTVVLQTDPLPPARFGVSKEKTTSTSLHVWWTPSSGKVTSYEVQLFDENNQKIQGVQIQESTSWNEYTFFNLTAGSKYNIAITAVSGGKRSFSVYTNGSTVPSPVKDIGISTKANSLLISWSHGSGNVERYRLMLMDKGILVHGGVVDKHATSYAFHGLTPGYLYNLTVMTEAAGLQNYRWKLVRTAPMEVSNLKVTNDGSLTSLKVKWQRPPGNVDSYNITLSHKGTIKESRVLAPWITETHFKELVPGRLYQVTVSCVSGELSAQKMAVGRTFPDKVANLEANNNGRMRSLVVSWSPPAGDWEQYRILLFNDSVVLLNITVGKEETQYVMDDTGLVPGRQYEVEVIVESGNLKNSERCQGRTVPLAVLQLRVKHANETSLSIMWQTPVAEWEKYIISLADRDLLLIHKSLSKDAKEFTFTDLVPGRKYMATVTSISGDLKNSSSVKGRTVPAQVTDLHVANQGMTSSLFTNWTQAQGDVEFYQVLLIHENVVIKNESISSETSRYSFHSLKSGSLYSVVVTTVSGGISSRQVVVEGRTVPSSVSGVTVNNSGRNDYLSVSWLLAPGDVDNYEVTLSHDGKVVQSLVIAKSVRECSFSSLTPGRLYTVTITTRSGKYENHSFSQERTVPDKVQGVSVSNSARSDYLRVSWVHATGDFDHYEVTIKNKNNFIQTKSIPKSENECVFVQLVPGRLYSVTVTTKSGQYEANEQGNGRTIPEPVKDLTLRNRSTEDLHVTWSGANGDVDQYEIQLLFNDMKVFPPFHLVNTATEYRFTSLTPGRQYKILVLTISGDVQQSAFIEGFTVPSAVKNIHISPNGATDSLTVNWTPGGGDVDSYTVSAFRHSQKVDSQTIPKHVFEHTFHRLEAGEQYQIMIASVSGSLKNQINVVGRTVPASVQGVIADNAYSSYSLIVSWQKAAGVAERYDILLLTENGILLRNTSEPATTKQHKFEDLTPGKKYKIQILTVSGGLFSKEAQTEGRTVPAAVTDLRITENSTRHLSFRWTASEGELSWYNIFLYNPDGNLQERAQVDPLVQSFSFQNLLQGRMYKMVIVTHSGELSNESFIFGRTVPASVSHLRGSNRNTTDSLWFNWSPASGDFDFYELILYNPNGTKKENWKDKDLTEWRFQGLVPGRKYVLWVVTHSGDLSNKVTAESRTAPSPPSLMSFADIANTSLAITWKGPPDWTDYNDFELQWLPRDALTVFNPYNNRKSEGRIVYGLRPGRSYQFNVKTVSGDSWKTYSKPIFGSVRTKPDKIQNLHCRPQNSTAIACSWIPPDSDFDGYSIECRKMDTQEVEFSRKLEKEKSLLNIMMLVPHKRYLVSIKVQSAGMTSEVVEDSTITMIDRPPPPPPHIRVNEKDVLISKSSINFTVNCSWFSDTNGAVKYFTVVVREADGSDELKPEQQHPLPSYLEYRHNASIRVYQTNYFASKCAENPNSNSKSFNIKLGAEMESLGGKCDPTQQKFCDGPLKPHTAYRISIRAFTQLFDEDLKEFTKPLYSDTFFSLPITTESEPLFGAIE

SEQ ID NO: 1807 - protein, 552 aa, synthetic construct
  REGION 1..552: note = PTPRC (P08575) ECD
QSPTPSPTGLTTAKMPSVPLSSDPLPTHTTAFSPASTFERENDFSETTTSLSPDNTSTQVSPDSLDNASAFNTTGVSSVQTPHLPTHADSQTPSAGTDTQTFSGSAANAKLNPTPGSNAISDVPGERSTASTFPTDPVSPLTTTLSLAHHSSAALPARTSNTTITANTSDAYLNASETTTLSPSGSAVISTTTIATTPSKPTCDEKYANITVDYLYNKETKLFTAKLNVNENVECGNNTCTNNEVHNLTECKNASVSISHNSCTAPDKTLILDVPPGVEKFQLHDCTQVEKADTTICLKWKNIETFTCDTQNITYRFQCGNMIFDNKEIKLENLEPEHEYKCDSEILYNNHKFTNASKIIKTDFGSPGEPQIIFCRSEAAHQGVITWNPPQRSFHNFTLCYIKETEKDCLNLDKNLIKYDLQNLKPYTKYVLSLHAYIIAKVQRNGSAAMCHFTTKSAPPSQVWNMTVSMTSDNSMHVKCRPPRDRNGPHERYHLEVEAGNTLVRNESHKNCDFRVKDLQYSTDYTFKAYFHNGDYPGEPFILHHSTSYNSK

SEQ ID NO: 1808 - protein, 1245 aa, synthetic construct
  REGION 1..1245: note = PTPRD (P23468) ECD
ETPPRFTRTPVDQTGVSGGVASFICQATGDPRPKIVWNKKGKKVSNQRFEVIEFDDGSGSVLRIQPLRTPRDEAIYECVASNNVGEISVSTRLTVLREDQIPRGFPTIDMGPQLKVVERTRTATMLCAASGNPDPEITWFKDFLPVDTSNNNGRIKQLRSESIGGTPIRGALQIEQSEESDQGKYECVATNSAGTRYSAPANLYVRELREVRRVPPRFSIPPTNHEIMPGGSVNITCVAVGSPMPYVKWMLGAEDLTPEDDMPIGRNVLELNDVRQSANYTCVAMSTLGVIEAIAQITVKALPKPPGTPVVTESTATSITLTWDSGNPEPVSYYIIQHKPKNSEELYKEIDGVATTRYSVAGLSPYSDYEFRVVAVNNIGRGPPSEPVLTQTSEQAPSSAPRDVQARMLSSTTILVQWKEPEEPNGQIQGYRVYYTMDPTQHVNNWMKHNVADSQITTIGNLVPQKTYSVKVLAFTSIGDGPLSSDIQVITQTGVPGQPLNFKAEPESETSILLSWTPPRSDTIANYELVYKDGEHGEEQRITIEPGTSYRLQGLKPNSLYYFRLAARSPQGLGASTAEISARTMQSKPSAPPQDISCTSPSSTSILVSWQPPPVEKQNGIITEYSIKYTAVDGEDDKPHEILGIPSDTTKYLLEQLEKWTEYRITVTAHTDVGPGPESLSVLIRTNEDVPSGPPRKVEVEAVNSTSVKVSWRSPVPNKQHGQIRGYQVHYVRMENGEPKGQPMLKDVMLADAQWEFDDTTEHDMIISGLQPETSYSLTVTAYTTKGDGARSKPKLVSTTGAVPGKPRLVINHTQMNTALIQWHPPVDTFGPLQGYRLKFGRKDMEPLTTLEFSEKEDHFTATDIHKGASYVFRLSARNKVGFGEEMVKEISIPEEVPTGFPQNLHSEGTTSTSVQLSWQPPVLAERNGIITKYTLLYRDINIPLLPMEQLIVPADTTMTLTGLKPDTTYDVKVRAHTSKGPGPYSPSVQFRTLPVDQVFAKNFHVKAVMKTSVLLSWEIPENYNSAMPFKILYDDGKMVEEVDGRATQKLIVNLKPEKSYSFVLTNRGNSAGGLQHRVTAKTAPDVLRTKPAFIGKTNLDGMITVQLPEVPANENIKGYYIIIVPLKKSRGKFIKPWESPDEMELDELLKEISRKRRSIRYGREVELKPYIAAHFDVLPTEFTLGDDKHYGGFTNKQLQSGQEYVFFVLAVMEHAESKMYATSPYSDPVVSMDLDPQPITDEEE

SEQ ID NO: 1809 - protein, 1234 aa, synthetic construct
  REGION 1..1234: note = PTPRF (P10586) ECD
DSKPVFIKVPEDQTGLSGGVASFVCQATGEPKPRITWMKKGKKVSSQRFEVIEFDDGAGSVLRIQPLRVQRDEAIYECTATNSLGEINTSAKLSVLEEEQLPPGFPSIDMGPQLKVVEKARTATMLCAAGGNPDPEISWFKDFLPVDPATSNGRIKQLRSGALQIESSEESDQGKYECVATNSAGTRYSAPANLYVRVRRVAPRFSIPPSSQEVMPGGSVNLTCVAVGAPMPYVKWMMGAEELTKEDEMPVGRNVLELSNVVRSANYTCVAISSLGMIEATAQVTVKALPKPPIDLVVTETTATSVTLTWDSGNSEPVTYYGIQYRAAGTEGPFQEVDGVATTRYSIGGLSPFSEYAFRVLAVNSIGRGPPSEAVRARTGEQAPSSPPRRVQARMLSASTMLVQWEPPEEPNGLVRGYRVYYTPDSRRPPNAWHKHNTDAGLLTTVGSLLPGITYSLRVLAFTAVGDGPPSPTIQVKTQQGVPAQPADFQAEVESDTRIQLSWLLPPQERIIMYELVYWAAEDEDQQHKVTFDPTSSYTLEDLKPDTLYRFQLAARSDMGVGVFTPTIEARTAQSTPSAPPQKVMCVSMGSTTVRVSWVPPPADSRNGVITQYSVAYEAVDGEDRGRHVVDGISREHSSWDLVGLEKWTEYRVWVRAHTDVGPGPESSPVLVRTDEDVPSGPPRKVEVEPLNSTAVHVYWKLPVPSKQHGQIRGYQVTYVRLENGEPRGLPIIQDVMLAEAQWRPEESEDYETTISGLTPETTYSVTVAAYTTKGDGARSKPKIVTTTGAVPGRPTMMISTTAMNTALLQWHPPKELPGELLGYRLQYCRADEARPNTIDFGKDDQHFTVTGLHKGTTYIFRLAAKNRAGLGEEFEKEIRTPEDLPSGFPQNLHVTGLTTSTTELAWDPPVLAERNGRIISYTVVFRDINSQQELQNITTDTRFTLTGLKPDTTYDIKVRAWTSKGSGPLSPSIQSRTMPVEQVFAKNFRVAAAMKTSVLLSWEVPDSYKSAVPFKILYNGQSVEVDGHSMRKLIADLQPNTEYSFVLMNRGSSAGGLQHLVSIRTAPDLLPHKPLPASAYIEDGRFDLSMPHVQDPSLVRWFYIVVVPIDRVGGSMLTPRWSTPEELELDELLEAIEQGGEEQRRRRRQAERLKPYVAAQLDVLPETFTLGDKKNYRGFYNRPLSPDLSYQCFVLASLKEPMDQKRYASSPYSDEIVVQVTPAQQQEEPEMLW

SEQ ID NO: 1810 - protein, 717 aa, synthetic construct
  REGION 1..717: note = PTPRG (P23470) ECD
VLHYVVCFPALTEGYVGALHENRHGSAVQIRRRKASGDPYWAYSGAYGPEHWVTSSVSCGGRHQSPIDILDQYARVGEEYQELQLDGFDNESSNKTWMKNTGKTVAILLKDDYFVSGAGLPGRFKAEKVEFHWGHSNGSAGSEHSINGRRFPVEMQIFFYNPDDFDSFQTAISENRIIGAMAIFFQVSPRDNSALDPIIHGLKGVVHHEKETFLDPFVLRDLLPASLGSYYRYTGSLTTPPCSEIVEWIVFRRPVPISYHQLEAFYSIFTTEQQDHVKSVEYLRNNFRPQQRLHDRVVSKSAVRDSWNHDMTDFLENPLGTEASKVCSSPPIHMKVQPLNQTALQVSWSQPETIYHPPIMNYMISYSWTKNEDEKEKTFTKDSDKDLKATISHVSPDSLYLFRVQAVCRNDMRSDFSQTMLFQANTTRIFQGTRIVKTGVPTASPASSADMAPISSGSSTWTSSGIPFSFVSMATGMGPSSSGSQATVASVVTSTLLAGLGFGGGGISSFPSTVWPTRLPTAASASKQAARPVLATTEALASPGPDGDSSPTKDGEGTEEGEKDEKSESEDGEREHEEDGEKDSEKKEKSGVTHAAEERNQTEPSPTPSSPNRTAEGGHQTIPGHEQDHTAVPTDQTGGRRDAGPGLDPDMVTSTQVPPTATEEQYAGSDPKRPEMPSKKPMSRGDRFSEDSRFITVNPAEKNTSGMISRPAPGRME

SEQ ID NO: 1811 - protein, 727 aa, synthetic construct
  REGION 1..727: note = PTPRH (Q9HD43) ECD
PAPNPGRNLTVETQTTSSISLSWEVPDGLDSQNSNYWVQCTGDGGTTETRNTTATNVTVDGLGPGSLYTCSVWVEKDGVNSSVGTVTTATAPNPVRNLRVEAQTNSSIALTWEVPDGPDPQNSTYGVEYTGDGGRAGTRSTAHTNITVDGLEPGCLYAFSMWVGKNGINSSRETRNATTAHNPVRNLRVEAQTTSSISLSWEVPDGTDPQNSTYCVQCTGDGGRTETRNTTDTRVTVDGLGPGSLYTCSVWVEKDGVNSSVEIVTSATAPNPVRNLTVEAQTNSSIALTWEVPDGPDPQNSTYGVEYTGDGGRAGTRSTAHTNITVDRLEPGCLYVFSVWVGKNGINSSRETRNATTAPNPVRNLHMETQTNSSIALCWEVPDGPYPQDYTYWVEYTGDGGGTETRNTTNTSVTAERLEPGTLYTFSVWAEKNGARGSRQNVSISTVPNAVTSLSKQDWTNSTIALRWTAPQGPGQSSYSYWVSWVREGMTDPRTQSTSGTDITLKELEAGSLYHLTVWAERNEVRGYNSTLTAATAPNEVTDLQNETQTKNSVMLWWKAPGDPHSQLYVYWVQWASKGHPRRGQDPQANWVNQTSRTNETWYKVEALEPGTLYNFTVWAERNDVASSTQSLCASTYPDTVTITSCVSTSAGYGVNLIWSCPQGGYEAFELEVGGQRGSQDRSSCGEAVSVLGLGPARSYPATITTIWDGMKVVSHSVVCHTESAGV

SEQ ID NO: 1812 - protein, 940 aa, synthetic construct
  REGION 1..940: note = PTPRJ (Q12913) ECD
AGGTPSPIPDPSVATVATGENGITQISSTAESFHKQNGTGTPQVETNTSEDGESSGANDSLRTPEQGSNGTDGASQKTPSSTGPSPVFDIKAVSISPTNVILTWKSNDTAASEYKYVVKHKMENEKTITVVHQPWCNITGLRPATSYVFSITPGIGNETWGDPRVIKVITEPIPVSDLRVALTGVRKAALSWSNGNGTASCRVLLESIGSHEELTQDSRLQVNISGLKPGVQYNINPYLLQSNKTKGDPLGTEGGLDASNTERSRAGSPTAPVHDESLVGPVDPSSGQQSRDTEVLLVGLEPGTRYNATVYSQAANGTEGQPQAIEFRTNAIQVFDVTAVNISATSLTLIWKVSDNESSSNYTYKIHVAGETDSSNLNVSEPRAVIPGLRSSTFYNITVCPVLGDIEGTPGFLQVHTPPVPVSDFRVTVVSTTEIGLAWSSHDAESFQMHITQEGAGNSRVEITTNQSIIIGGLFPGTKYCFEIVPKGPNGTEGASRTVCNRTVPSAVFDIHVVYVTTTEMWLDWKSPDGASEYVYHLVIESKHGSNHTSTYDKAITLQGLIPGTLYNITISPEVDHVWGDPNSTAQYTRPSNVSNIDVSTNTTAATLSWQNFDDASPTYSYCLLIEKAGNSSNATQVVTDIGITDATVTELIPGSSYTVEIFAQVGDGIKSLEPGRKSFCTDPASMASFDCEVVPKEPALVLKWTCPPGANAGFELEVSSGAWNNATHLESCSSENGTEYRTEVTYLNFSTSYNISITTVSCGKMAAPTRNTCTTGITDPPPPDGSPNITSVSHNSVKVKFSGFEASHGPIKAYAVILTTGEAGHPSADVLKYTYEDFKKGASDTYVTYLIRTEEKGRSQSLSEVLKYEIDVGNESTTLGYYNGKLEPLGSYRACVAGFTNITFHPQNKGLIDGAESYVSFSRYSDAVSLPQDPGVICG

SEQ ID NO: 1813 - protein, 726 aa, synthetic construct
  REGION 1..726: note = PTPRK (Q15262) ECD
AQGQFSAGGCTFDDGPGACDYHQDLYDDFEWVHVSAQEPHYLPPEMPQGSYMIVDSSDHDPGEKARLQLPTMKENDTHCIDFSYLLYSQKGLNPGTLNILVRVNKGPLANPIWNVTGFTGRDWLRAELAVSTFWPNEYQVIFEAEVSGGRSGYIAIDDIQVLSYPCDKSPHFLRLGDVEVNAGQNATFQCIATGRDAVHNKLWLQRRNGEDIPVAQTKNINHRRFAASFRLQEVTKTDQDLYRCVTQSERGSGVSNFAQLIVREPPRPIAPPQLLGVGPTYLLIQLNANSIIGDGPIILKEVEYRMTSGSWTETHAVNAPTYKLWHLDPDTEYEIRVLLTRPGEGGTGLPGPPLITRTKCAEPMRTPKTLKIAEIQARRIAVDWESLGYNITRCHTFNVTICYHYFRGHNESKADCLDMDPKAPQHVVNHLPPYTNVSLKMILTNPEGRKESEETIIQTDEDVPGPVPVKSLQGTSFENKIFLNWKEPLDPNGIITQYEISYSSIRSFDPAVPVAGPPQTVSNLWNSTHHVFMHLHPGTTYQFFIRASTVKGFGPATAINVTTNISAPTLPDYEGVDASLNETATTITVLLRPAQAKGAPISAYQIVVEELHPHRTKREAGAMECYQVPVTYQNAMSGGAPYYFAAELPPGNLPEPAPFTVGDNRTYQGFWNPPLAPRKGYNIYFQAMSSVEKETKTQCVRIATKAATEEPEVIPDPAKQTDRVVK

SEQ ID NO: 1814 - protein, 722 aa, synthetic construct
  REGION 1..722: note = PTPRM (P28827) ECD
ETFSGGCLFDEPYSTCGYSQSEGDDFNWEQVNTLTKPTSDPWMPSGSFMLVNASGRPEGQRAHLLLPQLKENDTHCIDFHYFVSSKSNSPPGLLNVYVKVNNGPLGNPIWNISGDPTRTWNRAELAISTFWPNFYQVIFEVITSGHQGYLAIDEVKVLGHPCTRTPHFLRIQNVEVNAGQFATFQCSAIGRTVAGDRLWLQGIDVRDAPLKEIKVTSSRRFIASFNVVNTTKRDAGKYRCMIRTEGGVGISNYAELVVKEPPVPIAPPQLASVGATYLWIQLNANSINGDGPIVAREVEYCTASGSWNDRQPVDSTSYKIGHLDPDTEYEISVLLTRPGEGGTGSPGPALRTRTKCADPMRGPRKLEVVEVKSRQITIRWEPFGYNVTRCHSYNLTVHYCYQVGGQEQVREEVSWDTENSHPQHTITNLSPYTNVSVKLILMNPEGRKESQELIVQTDEDLPGAVPTESIQGSTFEEKIFLQWREPTQTYGVITLYEITYKAVSSFDPEIDLSNQSGRVSKLGNETHFLFFGLYPGTTYSFTIRASTAKGFGPPATNQFTTKISAPSMPAYELETPLNQTDNTVTVMLKPAHSRGAPVSVYQIVVEEERPRRTKKTTEILKCYPVPIHFQNASLLNSQYYFAAEFPADSLQAAQPFTIGDNKTYNGYWNTPLLPYKSYRIYFQAASRANGETKIDCVQVATKGAATPKPVPEPEKQTDHTVK

SEQ ID NO: 1815 - protein, 541 aa, synthetic construct
  REGION 1..541: note = PTPRN (Q16849) ECD
VSAHGCLFDRRLCSHLEVCIQDGLFGQCQVGVGQARPLLQVTSPVLQRLQGVLRQLMSQGLSWHDDLTQYVISQEMERIPRLRPPEPRPRDRSGLAPKRPGPAGELLLQDIPTGSAPAAQHRLPQPPVGKGGAGASSSLSPLQAELLPPLLEHLLLPPQPPHPSLSYEPALLQPYLFHQFGSRDGSRVSEGSPGMVSVGPLPKAEAPALFSRTASKGIFGDHPGHSYGDLPGPSPAQLFQDSGLLYLAQELPAPSRARVPRLPEQGSSSRAEDSPEGYEKEGLGDRGEKPASPAVQPDAALQRLAAVLAGYGVELRQLTPEQLSTLLTLLQLLPKGAGRNPGGVVNVGADIKKTMEGPVEGRDTAELPARTSPMPGHPTASPTSSEVQQVPSPVSSEPPKAARPPVTPVLLEKKSPLGQSQPTVAGQPSARPAAEEYGYIVTDQKPLSLAAGVKLLEILAEHVHMSSGSFINISVVGPALTFRIRHNEQNLSLADVTQQAGLVKSELEAQTGLQILQTGVGQREEAAAVLPQTAHSTSPMR

SEQ ID NO: 1816 - protein, 594 aa, synthetic construct
  REGION 1..594: note = PTPRN2 (Q92932) ECD
AAPSSVPRGRQLPGRLGCLLEEGLCGASEACVNDGVFGRCQKVPAMDFYRYEVSPVALQRLRVALQKLSGTGFTWQDDYTQYVMDQELADLPKTYLRRPEASSPARPSKHSVGSERRYSREGGAALANALRRHLPFLEALSQAPASDVLARTHTAQDRPPAEGDDRFSESILTYVAHTSALTYPPGSRTQLREDLLPRTLGQLQPDELSPKVDSGVDRHHLMAALSAYAAQRPPAPPGEGSLEPQYLLRAPSRMPRPLLAPAAPQKWPSPLGDSEDPSSTGDGARIHTLLKDLQRQPAEVRGLSGLELDGMAELMAGLMQGVDHGVARGSPGRAALGESGEQADGPKATLRGDSFPDDGVQDDDDRLYQEVHRLSATLGGLLQDHGSRLLPGALPFARPLDMERKKSEHPESSLSSEEETAGVENVKSQTYSKDLLGQQPHSEPGAAAFGELQNQMPGPSKEEQSLPAGAQEALSDGLQLEVQPSEEEARGYIVTDRDPLRPEEGRRLVEDVARLLQVPSSAFADVEVLGPAVTFKVSANVQNVTTEDVEKATVDNKDKLEETSGLKILQTGVGSKSKLKFLPPQAEQEDSTKF

SEQ ID NO: 1817 - protein, 793 aa, synthetic construct
  REGION 1..793: note = PTPRO (Q16827) ECD
FHVTVQDDNNIVVSLEASDVISPASVYVVKITGESKNYFFEFEEFNSTLPPPVIFKASYHGLYYIITLVVVNGNVVTKPSRSITVLTKPLPVTSVSIYDYKPSPETGVLFEIHYPEKYNVFTRVNISYWEGKDFRTMLYKDFFKGKTVFNHWLPGMCYSNITFQLVSEATFNKSTLVEYSGVSHEPKQHRTAPYPPQNISVRIVNLNKNNWEEQSGNFPEESFMRSQDTIGKEKLFHFTEETPEIPSGNISSGWPDFNSSDYETTSQPYWWDSASAAPESEDEFVSVLPMEYENNSTLSETEKSTSGSFSFFPVQMILTWLPPKPPTAFDGFHIHIEREENFTEYLMVDEEAHEFVAELKEPGKYKLSVTTFSSSGSCETRKSQSAKSLSFYISPSGEWIEELTEKPQHVSVHVLSSTTALMSWTSSQENYNSTIVSVVSLTCQKQKESQRLEKQYCTQVNSSKPIIENLVPGAQYQVVIYLRKGPLIGPPSDPVTFAIVPTGIKDLMLYPLGPTAVVLSWTRPYLGVFRKYVVEMFYFNPATMTSEWTTYYEIAATVSLTASVRIANLLPAWYYNFRVTMVTWGDPELSCCDSSTISFITAPVAPEITSVEYFNSLLYISWTYGDDTTDLSHSRMLHWMVVAEGKKKIKKSVTRNVMTAILSLPPGDIYNLSVTACTERGSNTSMLRLVKLEPAPPKSLFAVNKTQTSVTLLWVEEGVADFFEVFCQQVGSSQKTKLQEPVAVSSHVVTISSLLPATAYNCSVTSFSHDSPSVPTFIAVSTMVTEMNPNVVV

SEQ ID NO: 1818 - protein, 1912 aa, synthetic construct
  REGION 1..1912: note = PTPRQ (Q9UMZ3) ECD
ERYQVDLVPDSGFVTIRDLGGGEYQVDVSNVVPGTRYDITISSISTTYTSPVTRIVTTNVTKPGPPVFLAGERVGSAGILLSWNTPPNPNGRIISYIVKYKEVCPWMQTVYTQVRSKPDSLEVLLTNLNPGTTYEIKVAAENSAGIGVFSDPFLFQTAESAPGKVVNLTVEAYNASAVKLIWYLPRQPNGKITSFKISVKHARSGIVVKDVSIRVEDILTGKLPECNENSESFLWSTASPSPTLGRVTPPSRTTHSSSTLTQNEISSVWKEPISFVVTHLRPYTTYLFEVSAVTTEAGYIDSTIVRTPESVPEGPPQNCVTGNITGKSFSILWDPPTIVTGKFSYRVELYGPSGRILDNSTKDLKFAFTNLTPFTMYDVYIAAETSAGTGPKSNISVFTPPDVPGAVFDLQLAEVESTQVRITWKKPRQPNGIINQYRVKVLVPETGIILENTLLTGNNEYINDPMAPEIVNIVEPMVGLYEGSAEMSSDLHSLATFIYNSHPDKNFPARNRAEDQTSPVVTTRNQYITDIAAEQLSYVIRRLVPFTEHMISVSAFTIMGEGPPTVLSVRTRQQVPSSIKIINYKNISSSSILLYWDPPEYPNGKITHYTIYAMELDTNRAFQITTIDNSFLITGLKKYTKYKMRVAASTHVGESSLSEENDIFVRTSEDEPESSPQDVEVIDVTADEIRLKWSPPEKPNGIIIAYEVLYKNIDTLYMKNTSTTDIILRNLRPHTLYNISVRSYTRFGHGNQVSSLLSVRTSETVPDSAPENITYKNISSGEIELSFLPPSSPNGIIKKYTIYLKRSNGNEERTINTTSLTQNIKVLKKYTQYIIEVSASTLKGEGVRSAPISILTEEDAPDSPPQDFSVKQLSGVTVKLSWQPPLEPNGIILYYTVYVWNRSSLKTINVTETSLELSDLDYNVEYSAYVTASTRFGDGKTRSNIISFQTPEGAPSDPPKDVYYANLSSSSIILFWTPPSKPNGIIQYYSVYYRNTSGTFMQNFTLHEVTNDFDNMTVSTIIDKLTIFSYYTFWLTASTSVGNGNKSSDIIEVYTDQDIPEGFVGNLTYESISSTAINVSWVPPAQPNGLVFYYVSLILQQTPRHVRPPLVTYERSIYFDNLEKYTDYILKITPSTEKGFSDTYTAQLYIKTEEDVPETSPIINTFKNLSSTSVLLSWDPPVKPNGAIISYDLTLQGPNENYSFITSDNYIILEELSPFTLYSFFAAARTRKGLGPSSILFFYTDESVPLAPPQNLTLINCTSDFVWLKWSPSPLPGGIVKVYSFKIHEHETDTIYYKNISGFKTEAKLVGLEPVSTYSIRVSAFTKVGNGNQFSNVVKFTTQESVPDVVQNMQCMATSWQSVLVKWDPPKKANGIITQYMVTVERNSTKVSPQDHMYTFIKLLANTSYVFKVRASTSAGEGDESTCHVSTLPETVPSVPTNIAFSDVQSTSATLTWIRPDTILGYFQNYKITTQLRAQKCKEWESEECVEYQKIQYLYEAHLTEETVYGLKKFRWYRFQVAASTNAGYGNASNWISTKTLPGPPDGPPENVHVVATSPFSISISWSEPAVITGPTCYLIDVKSVDNDEFNISFIKSNEENKTIEIKDLEIFTRYSVVITAFTGNISAAYVEGKSSAEMIVTTLESAPKDPPNNMTFQKIPDEVTKFQLTFLPPSQPNGNIQVYQALVYREDDPTAVQIHNLSIIQKTNTFVIAMLEGLKGGHTYNISVYAVNSAGAGPKVPMRITMDIKAPARPKTKPTPIYDATGKLLVTSTTITIRMPICYYSDDHGPIKNVQVLVTETGAQHDGNVTKWYDAYFNKARPYFTNEGFPNPPCTEGKTKFSGNEEIYIIGADNACMIPGNEDKICNGPLKPKKQYLFKFRATNIMGQFTDSDYSDPVKTLGEGLSERTVE

SEQ ID NO: 1819 - protein, 206 aa, synthetic construct
  REGION 1..206: note = PTPRR (Q15256) ECD
FSGNNDHFLAINQKKSGKPVFIYKHSQDIEKSLDIAPQKIYRHSYHSSSEAQVSKRHQIVNSAFPRPAYDPSLNLLAMDGQDLEVENLPIPAANVIVVTLQMDVNKLNITLLRIFRQGVAAALGLLPQQVHINRLIGKKNSIELFVSPINRKTGISDALPSEEVLRSLNINVLHQSLSQFGITEVSPEKNVLQGQHEADKIWSKEG

SEQ ID NO: 1820 - protein, 1253 aa, synthetic construct
  REGION 1..1253: note = PTPRS (Q13332) ECD
EEPPRFIKEPKDQIGVSGGVASFVCQATGDPKPRVTWNKKGKKVNSQRFETIEFDESAGAVLRIQPLRTPRDENVYECVAQNSVGEITVHAKLTVLREDQLPSGFPNIDMGPQLKVVERTRTATMLCAASGNPDPEITWFKDFLPVDPSASNGRIKQLRSETFESTPIRGALQIESSEETDQGKYECVATNSAGVRYSSPANLYVRELREVRRVAPRFSILPMSHEIMPGGNVNITCVAVGSPMPYVKWMQGAEDLTPEDDMPVGRNVLELTDVKDSANYTCVAMSSLGVIEAVAQITVKSLPKAPGTPMVTENTATSITITWDSGNPDPVSYYVIEYKSKSQDGPYQIKEDITTTRYSIGGLSPNSEYEIWVSAVNSIGQGPPSESVVTRTGEQAPASAPRNVQARMLSATTMIVQWEEPVEPNGLIRGYRVYYTMEPEHPVGNWQKHNVDDSLLTTVGSLLEDETYTVRVLAFTSVGDGPLSDPIQVKTQQGVPGQPMNLRAEARSETSITLSWSPPRQESIIKYELLFREGDHGREVGRTFDPTTSYVVEDLKPNTEYAFRLAARSPQGLGAFTPVVRQRTLQSKPSAPPQDVKCVSVRSTAILVSWRPPPPETHNGALVGYSVRYRPLGSEDPEPKEVNGIPPTTTQILLEALEKWTQYRITTVAHTEVGPGPESSPVVVRTDEDVPSAPPRKVEAEALNATAIRVLWRSPAPGRQHGQIRGYQVHYVRMEGAEARGPPRIKDVMLADAQWETDDTAEYEMVITNLQPETAYSITVAAYTMKGDGARSKPKVVVTKGAVLGRPTLSVQQTPEGSLLARWEPPAGTAEDQVLGYRLQFGREDSTPLATLEFPPSEDRYTASGVHKGATYVFRLAARSRGGLGEEAAEVLSIPEDTPRGHPQILEAAGNASAGTVLLRWLPPVPAERNGAIVKYTVAVREAGALGPARETELPAAAEPGAENALTLQGLKPDTAYDLQVRAHTRRGPGPFSPPVRYRTFLRDQVSPKNFKVKMIMKTSVLLSWEFPDNYNSPTPYKIQYNGLTLDVDGRTTKKLITHLKPHTFYNFVLTNRGSSLGGLQQTVTAWTAFNLLNGKPSVAPKPDADGFIMVYLPDGQSPVPVQSYFIVMVPLRKSRGGQFLTPLGSPEDMDLEELIQDISRLQRRSLRHSRQLEVPRPYIAARFSVLPPTFHPGDQKQYGGFDNRGLEPGHRYVLFVLAVLQKSEPTFAASPFSDPFQLDNPDPQPIVDGEEG

SEQ ID NO: 1821 - protein, 722 aa, synthetic construct
  REGION 1..722: note = PTPRT (O14522) ECD
QSAAGGCSFDEHYSNCGYSVALGTNGFTWEQINTWEKPMLDQAVPTGSFMMVNSSGRASGQKAHLLLPTLKENDTHCIDFHYYFSSRDRSSPGALNVYVKVNGGPQGNPVWNVSGVVTEGWVKAELAISTFWPHFYQVIFESVSLKGHPGYIAVDEVRVLAHPCRKAPHFLRLQNVEVNVGQNATFQCIAGGKWSQHDKLWLQQWNGRDTALMVTRVVNHRRFSATVSVADTAQRSVSKYRCVIRSDGGSGVSNYAELIVKEPPTPIAPPELLAVGATYLWIKPNANSIIGDGPIILKEVEYRTTTGTWAETHIVDSPNYKLWHLDPDVEYEIRVLLTRPGEGGTGPPGPPLTTRTKCADPVHGPQNVEIVDIRARQLTLQWEPFGYAVTRCHSYNLTVQYQYVFNQQQYEAEEVIQTSSHYTLRGLRPFMTIRLRLLLSNPEGRMESEELVVQTEEDVPGAVPLESIQGGPFEEKIYIQWKPPNETNGVITLYEINYKAVGSLDPSADLSSQRGKVFKLRNETHHLFVGLYPGTTYSFTIKASTAKGFGPPVTTRIATKISAPSMPEYDTDTPLNETDTTITVMLKPAQSRGAPVSVYQLVVKEERLQKSRRAADIIECFSVPVSYRNASSLDSLHYFAAELKPANLPVTQPFTVGDNKTYNGYWNPPLSPLKSYSIYFQALSKANGETKINCVRLATKGASTQNSNTVEPEKQVDNTVKM

SEQ ID NO: 1822 - protein, 731 aa, synthetic construct
  REGION 1..731: note = PTPRU (Q92729) ECD
ETETPAAGCTFEEASDPAVPCEYSQAQYDDFQWEQVRIHPGTRAPADLPHGSYLMVNTSQHAPGQRAHVIFQSLSENDTHCVQFSYFLYSRDGHSPGTLGVYVRVNGGPLGSAVWNMTGSHGRQWHQAELAVSTFWPNEYQVLFEALISPDRRGYMGLDDILLLSYPCAKAPHFSRLGDVEVNAGQNASFQCMAAGRAAEAERFLLQRQSGALVPAAGVRHISHRRFLATFPLAAVSRAEQDLYRCVSQAPRGAGVSNFAELIVKEPPTPIAPPQLLRAGPTYLIIQLNTNSIIGDGPIVRKEIEYRMARGPWAEVHAVSLQTYKLWHLDPDTEYEISVLLTRPGDGGTGRPGPPLISRTKCAEPMRAPKGLAFAEIQARQLTLQWEPLGYNVTRCHTYTVSLCYHYTLGSSHNQTIRECVKTEQGVSRYTIKNLLPYRNVHVRLVLTNPEGRKEGKEVTFQTDEDVPSGIAAESLTFTPLEDMIFLKWEEPQEPNGLITQYEISYQSIESSDPAVNVPGPRRTISKLRNETYHVFSNLHPGTTYLFSVRARTGKGFGQAALTEITTNISAPSFDYADMPSPLGESENTITVLLRPAQGRGAPISVYQVIVEEERARRLRREPGGQDCFPVPLTFEAALARGLVHYFGAELAASSLPEAMPFTVGDNQTYRGFWNPPLEPRKAYLIYFQAASHLKGETRLNCIRIARKAACKESKRPLEVSQRSEEMGLIL

SEQ ID NO: 1823 - protein, 1612 aa, synthetic construct
  REGION 1..1612: note = PTPRZ1 (P23471) ECD
YYRQQRKLVEEIGWSYTGALNQKNWGKKYPTCNSPKQSPINIDEDLTQVNVNLKKLKFQGWDKTSLENTFIHNTGKTVEINLTNDYRVSGGVSEMVFKASKITFHWGKCNMSSDGSEHSLEGQKFPLEMQIYCFDADRFSSFEEAVKGKGKLRALSILFEVGTEENLDFKAIIDGVESVSRFGKQAALDPFILLNLLPNSTDKYYIYNGSLTSPPCTDTVDWIVFKDTVSISESQLAVFCEVLTMQQSGYVMLMDYLQNNFREQQYKFSRQVFSSYTGKEEIHEAVCSSEPENVQADPENYTSLLVTWERPRVVYDTMIEKFAVLYQQLDGEDQTKHEFLTDGYQDLGAILNNLLPNMSYVLQIVAICTNGLYGKYSDQLIVDMPTDNPELDLFPELIGTEEIIKEEEEGKDIEEGAIVNPGRDSATNQIRKKEPQISTTTHYNRIGTKYNEAKTNRSPTRGSEFSGKGDVPNTSLNSTSQPVTKLATEKDISLTSQTVTELPPHTVEGTSASLNDGSKTVLRSPHMNLSGTAESLNTVSITEYEEESLLTSFKLDTGAEDSSGSSPATSAIPFISENISQGYIFSSENPETITYDVLIPESARNASEDSTSSGSEESLKDPSMEGNVWFPSSTDITAQPDVGSGRESFLQTNYTEIRVDESEKTTKSFSAGPVMSQGPSVTDLEMPHYSTFAYFPTEVTPHAFTPSSRQQDLVSTVNVVYSQTTQPVYNGETPLQPSYSSEVFPLVTPLLLDNQILNTTPAASSSDSALHATPVFPSVDVSFESILSSYDGAPLLPFSSASFSSELFRHLHTVSQILPQVTSATESDKVPLHASLPVAGGDLLLEPSLAQYSDVLSTTHAASETLEFGSESGVLYKTLMFSQVEPPSSDAMMHARSSGPEPSYALSDNEGSQHIFTVSYSSAIPVHDSVGVTYQGSLFSGPSHIPIPKSSLITPTASLLQPTHALSGDGEWSGASSDSEFLLPDTDGLTALNISSPVSVAEFTYTTSVFGDDNKALSKSEIIYGNETELQIPSFNEMVYPSESTVMPNMYDNVNKLNASLQETSVSISSTKGMFPGSLAHTTTKVFDHEISQVPENNFSVQPTHTVSQASGDTSLKPVLSANSEPASSDPASSEMLSPSTQLLFYETSASFSTEVLLQPSFQASDVDTLLKTVLPAVPSDPILVETPKVDKISSTMLHLIVSNSASSENMLHSTSVPVFDVSPTSHMHSASLQGLTISYASEKYEPVLLKSESSHQVVPSLYSNDELFQTANLEINQAHPPKGRHVFATPVLSIDEPLNTLINKLIHSDEILTSTKSSVTGKVFAGIPTVASDTFVSTDHSVPIGNGHVAITAVSPHRDGSVTSTKLLFPSKATSELSHSAKSDAGLVGGGEDGDTDDDGDDDDDDRGSDGLSIHKCMSCSSYRESQEKVMNDSDTHENSLMDQNNPISYSLSENSEEDNRVTSVSSDSQTGMDRSPGKSPSANGLSQKHNDGKEENDIQTGSALLPLSPESKAWAVLTSDEESGSGQGTSDSLNENETSTDFSFADTNEKDADGILAAGDSEITPGFPQSPTSSVTSENSEVFHVSEAEASNSSHESRIGLAEGLESEKK

SEQ ID NO: 1824 - protein, 64 aa, synthetic construct
  REGION 1..64: note = PTTG1IP (P53801) ECD
QEPPGAACSQNTNKTCEECLKNVSCLWCNTNKACLDYPVTSVLPPASLCKLSSARWGVCWVNFE

SEQ ID NO: 1825 - protein, 323 aa, synthetic construct
  REGION 1..323: note = PVR (P15151) ECD
WPPPGTGDVVVQAPTQVPGFLGDSVTLPCYLQVPNMEVTHVSQLTWARHGESGSMAVFHQTQGPSYSESKRLEFVAARLGAELRNASLRMFGLRVEDEGNYTCLFVTFPQGSRSVDIWLRVLAKPQNTAEVQKVQLTGEPVPMARCVSTGGRPPAQITWHSDLGGMPNTSQVPGFLSGTVTVTSLWILVPSSQVDGKNVTCKVEHESFEKPQLLTVNLTVYYPPEVSISGYDNNWYLGQNEATLTCDARSNPEPTGYNWSTTMGPLPPFAVAQGAQLLIRPVDKPINTTLICNVTNALGARQAELTVQVKEGPPSEHSGISRN

SEQ ID NO: 1826 - protein, 325 aa, synthetic construct
  REGION 1..325: note = PVRL1 (Q15223) ECD
QVVQVNDSMYGFIGTDVVLHCSFANPLPSVKITQVTWQKSTNGSKQNVAIYNPSMGVSVLAPYRERVEFLRPSFTDGTIRLSRLELEDEGVYICEFATFPTGNRESQLNLTVMAKPTNWIEGTQAVLRAKKGQDDKVLVATCTSANGKPPSVVSWETRLKGEAEYQEIRNPNGTVTVISRYRLVPSREAHQQSLACIVNYHMDRFKESLTLNVQYEPEVTIEGFDGNWYLQRMDVKLTCKADANPPATEYHWTTLNGSLPKGVEAQNRTLFFKGPINYSLAGTYICEATNPIGTRSGQVEVNITEFPYTPSPPEHGRRAGPVPTA

SEQ ID NO: 1827 - protein, 329 aa, synthetic construct
  REGION 1..329: note = PVRL2 (Q92692) ECD
QDVRVQVLPEVRGQLGGTVELPCHLLPPVPGLYISLVTWQRPDAPANHQNVAAFHPKMGPSFPSPKPGSERLSFVSAKQSTGQDTEAELQDATLALHGLTVEDEGNYTCEFATFPKGSVRGMTWLRVIAKPKNQAEAQKVTFSQDPTTVALCISKEGRPPARISWLSSLDWEAKETQVSGTLAGTVTVTSRFTLVPSGRADGVTVTCKVEHESFEEPALIPVTLSVRYPPEVSISGYDDNWYLGRTDATLSCDVRSNPEPTGYDWSTTSGTFPTSAVAQGSQLVIHAVDSLFNTTFVCTVTNAVGMGRAEQVIFVRETPNTAGAGATGG

SEQ ID NO: 1828 - protein, 347 aa, synthetic construct
  REGION 1..347: note = PVRL3 (Q9NQS3) ECD
GPIIVEPHVTAVWGKNVSLKCLIEVNETITQISWEKIHGKSSQTVAVHHPQYGFSVQGEYQGRVLFKNYSLNDATITLHNIGFSDSGKYICKAVTFPLGNAQSSTTVTVLVEPTVSLIKGPDSLIDGGNETVAAICIAATGKPVAHIDWEGDLGEMESTTTSFPNETATIISQYKLFPTRFARGRRITCVVKHPALEKDIRYSFILDIQYAPEVSVTGYDGNWFVGRKGVNLKCNADANPPPFKSVWSRLDGQWPDGLLASDNTLHFVHPLTFNYSGVYICKVTNSLGQRSDQKVIYISDPPTTTTLQPTIQWHPSTADIEDLATEPKKLPFPLSTLATIKDDTIAT

SEQ ID NO: 1829 - protein, 318 aa, synthetic construct
  REGION 1..318: note = PVRL4 (Q96NY8) ECD
GELETSDVVTVVLGQDAKLPCFYRGDSGEQVGQVAWARVDAGEGAQELALLHSKYGLHVSPAYEGRVEQPPPPRNPLDGSVLLRNAVQADEGEYECRVSTFPAGSFQARLRLRVLVPPLPSLNPGPALEEGQGLTLAASCTAEGSPAPSVTWDTEVKGTTSSRSFKHSRSAAVTSEFHLVPSRSMNGQPLTCVVSHPGLLQDQRITHILHVSFLAEASVRGLEDQNLWHIGREGAMLKCLSEGQPPPSYNWTRLDGPLPSGVRVDGDTLGFPPLTTEHSGIYVCHVSNEFSSRDSQVTVDVLDPQEDSGKQVDLVSAS

SEQ ID NO: 1830 - protein, 680 aa, synthetic construct
  REGION 1..680: note = QSOX1 (O00391) ECD
APRSALYSPSDPLTLLQADTVRGAVLGSRSAWAVEFFASWCGHCIAFAPTWKALAEDVKAWRPALYLAALDCAEETNSAVCRDFNIPGFPTVRFFKAFTKNGSGAVFPVAGADVQTLRERLIDALESHHDTWPPACPPLEPAKLEEIDGFFARNNEEYLALIFEKGGSYLGREVALDLSQHKGVAVRRVLNTEANVVRKFGVTDFPSCYLLFRNGSVSRVPVLMESRSFYTAYLQRLSGLTREAAQTTVAPTTANKIAPTVWKLADRSKIYMADLESALHYILRIEVGRFPVLEGQRLVALKKFVAVLAKYFPGRPLVQNFLHSVNEWLKRQKRNKIPYSFFKTALDDRKEGAVLAKKVNWIGCQGSEPHFRGFPCSLWVLFHFLTVQAARQNVDHSQEAAKAKEVLPAIRGYVHYFFGCRDCASHFEQMAAASMHRVGSPNAAVLWLWSSHNRVNARLAGAPSEDPQFPKVQWPPRELCSACHNERLDVPVWDVEATLNFLKAHFSPSNIILDFPAAGSAARRDVQNVAAAPELAMGALELESRNSTLDPGKPEMMKSPTNTTPHVPAEGPEASRPPKLHPGLRAAPGQEPPEHMAELQRNEQEQPLGQWHLSKRDTGAALLAESRAEKNRLWGPLEVRRVGRSSKQLVDIPEGQLEARAGRGRGQWLQVLGGGFSYLD

SEQ ID NO: 1831 - protein, 640 aa, synthetic construct
  REGION 1..640: note = QSOX2 (Q6ZRP7) ECD
ARRSPPPRAARLPRLLVLLAAAAVGPGAGGAARLYRAGEDAVWVLDSGSVRGATANSSAAWLVQFYSSWCGHCIGYAPTWRALAGDVRDWASAIRVAALDCMEEKNQAVCHDYDIHFYPTFRYFKAFTKEFTTGENFKGPDRELRTVRQTMIDFLQNHTEGSRPPACPRLDPIQPSDVLSLLDNRGSHYVAIVFESNSSYLGREVILDLIPYESIVVTRALDGDKAFLEKLGVSSVPSCYLIYPNGSHGLINVVKPLRAFFSSYLKSLPDVRKKSLPLPEKPHKEENSEIVVWREFDKSKLYTVDLESGLHYLLRVELAAHKSLAGAELKTLKDFVTVLAKLFPGRPPVKKLLEMLQEWLASLPLDRIPYNAVLDLVNNKMRISGIFLTNHIKWVGCQGSRSELRGYPCSLWKLFHTLTVEASTHPDALVGTGFEDDPQAVLQTMRRYVHTFFGCKECGEHFEEMAKESMDSVKTPDQAILWLWKKHNMVNGRLAGHLSEDPRFPKLQWPTPDLCPACHEEIKGLASWDEGHVLTFLKQHYGRDNLLDTYSADQGDSSEGGTLARGEEEEKRLTPPEVSHGDRDTQSVRPPGALGPRPALPESLHHSLDGKLQSLDGPGAHKEVGGAAPFLGVDFSSLDM

SEQ ID NO: 1832 - protein, 195 aa, synthetic construct
  REGION 1..195: note = RAET1E (Q8TD07) ECD
HSLCFNFTIKSLSRPGQPWCEAQVFLNKNLFLQYNSDNNMVKPLGLLGKKVYATSTWGELTQTLGEVGRDLRMLLCDIKPQIKTSDPSTLQVEMFCQREAERCTGASWQFATNGEKSLLFDAMNMTWTVINHEASKIKETWKKDRGLEKYFRKLSKGDCDHWLREFLGHWEAMPEPTVSPVNASDIHWSSSSLPD

SEQ ID NO: 1833 - protein, 198 aa, synthetic construct
  REGION 1..198: note = RAET1G (Q6H3X3) ECD
GLADPHSLCYDITVIPKFRPGPRWCAVQGQVDEKTFLHYDCGSKTVTPVSPLGKKLNVTTAWKAQNPVLREVVDILTEQLLDIQLENYIPKEPLTLQARMSCEQKAEGHGSGSWQLSFDGQIFLLFDSENRMWTTVHPGARKMKEKWENDKDMTMSFHYISMGDCTGWLEDFLMGMDSTLEPSAGAPPTMSSGTAQPR

SEQ ID NO: 1834 - protein, 103 aa, synthetic construct
  REGION 1..103: note = RAMP2 (O60895) ECD
QPLPTTGTPGSEGGTVKNYETAVQFCWNHYKDQMDPIEKDWCDWAMISRPYSTLRDCLEHFAELFDLGFPNPLAERIIFETHQIHFANCSLVQPTFSDPPEDV

SEQ ID NO: 1835 - protein, 95 aa, synthetic construct
  REGION 1..95: note = RAMP3 (O60896) ECD
RAGGCNETGMLERLPLCGKAFADMMGKVDVWKWCNLSEFIVYYESFTNCTEMEANVVGCYWPNPLAQGFITGIHRQFFSNCTVDRVHLEDPPDEV

SEQ ID NO: 1836 - protein, 34 aa, synthetic construct
  REGION 1..34: note = RELL1 (Q8IUW5) ECD
SPLVAPDNGSSRTLHSRTETTPSPSNDTGNGHPE

SEQ ID NO: 1837 - protein, 137 aa, synthetic construct
  REGION 1..137: note = RELT (Q969Z4) ECD
STTLWQCPPGEEPDLDPGQGTLCRPCPPGTFSAAWGSSPCQPHARCSLWRRLEAQVGMATRDTLCGDCWPGWFGPWGVPRVPCQPCSWAPLGTHGCDEWGRRARRGVEVAAGASSGGETRQPGNGTRAGGPEETAAQ

SEQ ID NO: 1838 - protein, 607 aa, synthetic construct
  REGION 1..607: note = RET (P07949) ECD
LYFSRDAYWEKLYVDQAAGTPLLYVHALRDAPEEVPSFRLGQHLYGTYRTRLHENNWICIQEDTGLLYLNRSLDHSSWEKLSVRNRGFPLLTVYLKVFLSPTSLREGECQWPGCARVYFSFFNTSFPACSSLKPRELCFPETRPSFRIRENRPPGTFHQFRLLPVQFLCPNISVAYRLLEGEGLPFRCAPDSLEVSTRWALDREQREKYELVAVCTVHAGAREEVVMVPFPVTVYDEDDSAPTFPAGVDTASAVVEFKRKEDTVVATLRVFDADVVPASGELVRRYTSTLLPGDTWAQQTFRVEHWPNETSVQANGSFVRATVHDYRLVLNRNLSISENRTMQLAVLVNDSDFQGPGAGVLLLHFNVSVLPVSLHLPSTYSLSVSRRARRFAQIGKVCVENCQAFSGINVQYKLHSSGANCSTLGVVTSAEDTSGILFVNDTKALRRPKCAELHYMVVATDQQTSRQAQAQLLVTVEGSYVAEEAGCPLSCAVSKRRLECEECGGLGSPTGRCEWRQGDGKGITRNFSTCSPSTKTCPDGHCDVVETQDINICPQDCLRGSIVGGHEPGEPRGIKAGYGTCNCFPEEEKCFCEPEDIQDPLCDELCR

SEQ ID NO: 1839 - protein, 169 aa, synthetic construct
  REGION 1..169: note = RNF128 (Q8TEB7) ECD
AEAVWTAYLNVSWRVPHTGVNRTVWELSEEGVYGQDSPLEPVAGVLVPPDGPGALNACNPHTNFTVPTVWGSTVQVSWLALIQRGGGCTFADKIHLAYERGASGAVIFNFPGTRNEVIPMSHPGAVDIVAIMIGNLKGTKILQSIQRGIQVTMVIEVGKKHGPWVNHYS

SEQ ID NO: 1840 - protein, 148 aa, synthetic construct
  REGION 1..148: note = RNF13 (O43567) ECD
DILAYNFENASQTFDDLPARFGYRLPAEGLKGFLINSKPENACEPIVPPPVKDNSSGTFIVLIRRLDCNFDIKVLNAQRAGYKAAIVHNVDSDDLISMGSNDIEVLKKIDIPSVFIGESSANSLKDEFTYEKGGHLILVPEFSLPLEY

SEQ ID NO: 1841 - protein, 167 aa, synthetic construct
  REGION 1..167: note = RNF130 (Q86XS8) ECD
DNASQEYYTALINVTVQEPGRGAPLTFRIDRGRYGLDSPKAEVRGQVLAPLPLHGVADHLGCDPQTRFFVPPNIKQWIALLQRGNCTFKEKISRAAFHNAVAVVIYNNKSKEEPVTMTHPGTGDIIAVMITELRGKDILSYLEKNISVQMTIAVGTRMPPKNFSRGS

SEQ ID NO: 1842 - protein, 168 aa, synthetic construct
  REGION 1..168: note = RNF149 (Q8NC42) ECD
RALEWFSAVVNIEYVDPQTNLTVWSVSESGRFGDSSPKEGAHGLVGVPWAPGGDLEGCAPDTRFFVPEPGGRGAAPWVALVARGGCTFKDKVLVAARRNASAVVLYNEERYGNITLPMSHAGTGNIVVIMISYPKGREILELVQKGIPVTMTIGVGTRHVQEFISGQS

SEQ ID NO: 1843 - protein, 174 aa, synthetic construct
  REGION 1..174: note = RNF150 (Q9ULK6) ECD
EKEEWYTAFVNITYAEPAPDPGAGAAGGGGAELHTEKTECGRYGEHSPKQDARGEVVMASSAHDRLACDPNTKFAAPTRGKNWIALIPKGNCTYRDKIRNAFLQNASAVVIFNVGSNTNETITMPHAGVEDIVAIMIPEPKGKEIVSLLERNITVTMYITIGTRNLQKYVSRTS

SEQ ID NO: 1844 - protein, 149 aa, synthetic construct
  REGION 1..149: note = RNF167 (Q9H6Y7) ECD
LIRATSDHNASMDFADLPALFGATLSQEGLQGFLVEAHPDNACSPIAPPPPAPVNGSVFIALLRRFDCNFDLKVLNAQKAGYGAAVVHNVNSNELLNMVWNSEEIQQQIWIPSVFIGERSSEYLRALFVYEKGARVLLVPDNTFPLGYY

SEQ ID NO: 1845 - protein, 174 aa, synthetic construct
  REGION 1..174: note = RNF43 (Q68DV7) ECD
GFGRTGLVLAAAVESERSAEQKAIIRVIPLKMDPTGKLNLTLEGVFAGVAEITPAEGKLMQSHPLYLCNASDDDNLEPGFISIVKLESPRRAPRPCLSLASKARMAGERGASAVLFDITEDRAAAEQLQQPLGLTWPVVLIWGNDAEKLMEFVYKNQKAHVRIELKEPPAWPDY

SEQ ID NO: 1846 - protein, 872 aa, synthetic construct
  REGION 1..872: note = ROBO1 (Q9Y6N7) ECD
QLIPDPEDVERGNDHGTPIPTSDNDDNSLGYTGSRLRQEDFPPRIVEHPSDLIVSKGEPATLNCKAEGRPTPTIEWYKGGERVETDKDDPRSHRMLLPSGSLFFLRIVHGRKSRPDEGVYVCVARNYLGEAVSHNASLEVAILRDDFRQNPSDVMVAVGEPAVMECQPPRGHPEPTISWKKDGSPLDDKDERITIRGGKLMITYTRKSDAGKYVCVGTNMVGERESEVAELTVLERPSFVKRPSNLAVTVDDSAEFKCEARGDPVPTVRWRKDDGELPKSRYEIRDDHTLKIRKVTAGDMGSYTCVAENMVGKAEASATLTVQEPPHFVVKPRDQVVALGRTVTFQCEATGNPQPAIFWRREGSQNLLFSYQPPQSSSRFSVSQTGDLTITNVQRSDVGYYICQTLNVAGSIITKAYLEVTDVIADRPPPVIRQGPVNQTVAVDGTFVLSCVATGSPVPTILWRKDGVLVSTQDSRIKQLENGVLQIRYAKLGDTGRYTCIASTPSGEATWSAYIEVQEFGVPVQPPRPTDPNLIPSAPSKPEVTDVSRNTVTLSWQPNLNSGATPTSYIIEAFSHASGSSWQTVAENVKTETSAIKGLKPNAIYLFLVRAANAYGISDPSQISDPVKTQDVLPTSQGVDHKQVQRELGNAVLHLHNPTVLSSSSIEVHWTVDQQSQYIQGYKILYRPSGANHGESDWLVFEVRTPAKNSVVIPDLRKGVNYEIKARPFFNEFQGADSEIKFAKTLEEAPSAPPQGVTVSKNDGNGTAILVSWQPPPEDTQNGMVQEYKVWCLGNETRYHINKTVDGSTFSVVIPFLVPGIRYSVEVAASTGAGSGVKSEPQFIQLDAHGNPVSPEDQVSLAQQISDVVKQP

SEQ ID NO: 1847 - protein, 838 aa, synthetic construct
  REGION 1..838: note = ROBO2 (Q9HCK4) ECD
SRLRQEDFPPRIVEHPSDVIVSKGEPTTLNCKAEGRPTPTIEWYKDGERVETDKDDPRSHRMLLPSGSLFFLRIVHGRRSKPDEGSYVCVARNYLGEAVSRNASLEVALLRDDFRQNPTDVVVAAGEPAILECQPPRGHPEPTIYWKKDKVRIDDKEERISIRGGKLMISNTRKSDAGMYTCVGTNMVGERDSDPAELTVFERPTFLRRPINQVVLEEEAVEFRCQVQGDPQPTVRWKKDDADLPRGRYDIKDDYTLRIKKTMSTDEGTYMCIAENRVGKMEASATLTVRAPPQFVVRPRDQIVAQGRTVTFPCETKGNPQPAVFWQKEGSQNLLFPNQPQQPNSRCSVSPTGDLTITNIQRSDAGYYICQALTVAGSILAKAQLEVTDVLTDRPPPIILQGPANQTLAVDGTALLKCKATGDPLPVISWLKEGFTFPGRDPRATIQEQGTLQIKNLRISDTGTYTCVATSSSGETSWSAVLDVTESGATISKNYDLSDLPGPPSKPQVTDVTKNSVTLSWQPGTPGTLPASAYIIEAFSQSVSNSWQTVANHVKTTLYTVRGLRPNTIYLFMVRAINPQGLSDPSPMSDPVRTQDISPPAQGVDHRQVQKELGDVLVRLHNPVVLTPTTVQVTWTVDRQPQFIQGYRVMYRQTSGLQATSSWQNLDAKVPTERSAVLVNLKKGVTYEIKVRPYFNEFQGMDSESKTVRTTEEAPSAPPQSVTVLTVGSYNSTSISVSWDPPPPDHQNGIIQEYKIWCLGNETRFHINKTVDAAIRSVIIGGLFPGIQYRVEVAASTSAGVGVKSEPQPIIIGRRNEVVITENNNSITEQITDVVKQP

SEQ ID NO: 1848 - protein, 871 aa, synthetic construct
  REGION 1..871: note = ROBO3 (Q96MS0) ECD
GDISNSSELLLGFNSSLAALNHTLLPPGDPSLNGSRVGPEDAMPRIVEQPPDLLVSRGEPATLPCRAEGRPRPNIEWYKNGARVATVREDPRAHRLLLPSGALFFPRIVHGRRARPDEGVYTCVARNYLGAAASRNASLEVAVLRDDFRQSPGNVVVAVGEPAVLECVPPRGHPEPSVSWRKDGARLKEEEGRITIRGGKLMMSHTLKSDAGMYVCVASNMAGERESAAAEVMVLERPSFLRRPVNQVVLADAPVTFLCEVKGDPPPRLRWRKEDGELPTGRYEIRSDHSLWIGHVSAEDEGTYTCVAENSVGRAEASGSLSVHVPPQLVTQPQDQMAAPGESVAFQCETKGNPPPAIFWQKEGSQVLLFPSQSLQPTGRFSVSPRGQLNITAVQRGDAGYYVCQAVSVAGSILAKALLEIKGASLDGLPPVILQGPANQTLVLGSSVWLPCRVTGNPQPSVRWKKDGQWLQGDDLQFKTMANGTLYIANVQEMDMGFYSCVAKSSTGEATWSGWLKMREDWGVSPDPPTEPSSPPGAPSQPVVTEITKNSITLTWKPNPQTGAAVTSYVIEAFSPAAGNTWRTVADGVQLETHTVSGLQPNTIYLFLVRAVGAWGLSEPSPVSEPVRTQDSSPSRPVEDPWRGQQGLAEVAVRLQEPIVLGPRTLQVSWTVDGPVQLVQGFRVSWRVAGPEGGSWTMLDLQSPSQQSTVLRGLPPGTQIQIKVQAQGQEGLGAESLSVTRSIPEEAPSGPPQGVAVALGGDGNSSITVSWEPPLPSQQNGVITEYQIWCLGNESRFHLNRSAAGWARSAMLRGLVPGLLYRTLVAAATSAGVGVPSAPVLVQLPSPPDLEPGLEVGAGLAVRLARVLREP

SEQ ID NO: 1849 - protein, 377 aa, synthetic construct
  REGION 1..377: note = ROR1 (Q01973) ECD
QETELSVSAELVPTSSWNISSELNKDSYLTLDEPMNNITTSLGQTAELHCKVSGNPPPTIRWFKNDAPVVQEPRRLSFRSTIYGSRLRIRNLDTTDTGYFQCVATNGKEVVSSTGVLFVKFGPPPTASPGYSDEYEEDGFCQPYRGIACARFIGNRTVYMESLHMQGEIENQITAAFTMIGTSSHLSDKCSQFAIPSLCHYAFPYCDETSSVPKPRDLCRDECEILENVLCQTEYIFARSNPMILMRLKLPNCEDLPQPESPEAANCIRIGIPMADPINKNHKCYNSTGVDYRGTVSVTKSGRQCQPWNSQYPHTHTFTALRFPELNGGHSYCRNPGNQKEAPWCFTLDENFKSDLCDIPACDSKDSKEKNKMEILY

SEQ ID NO: 1850 - protein, 370 aa, synthetic construct
  REGION 1..370: note = ROR2 (Q01974) ECD
EVEVLDPNDPLGPLDGQDGPIPTLKGYFLNFLEPVNNITIVQGQTAILHCKVAGNPPPNVRWLKNDAPVVQEPRRIIIRKTEYGSRLRIQDLDTTDTGYYQCVATNGMKTITATGVLFVRLGPTHSPNHNFQDDYHEDGFCQPYRGIACARFIGNRTIYVDSLQMQGEIENRITAAFTMIGTSTHLSDQCSQFAIPSFCHFVFPLCDARSRTPKPRELCRDECEVLESDLCRQEYTIARSNPLILMRLQLPKCEALPMPESPDAANCMRIGIPAERLGRYHQCYNGSGMDYRGTASTTKSGHQCQPWALQHPHSHHLSSTDFPELGGGHAYCRNPGGQMEGPWCFTQNKNVRMELCDVPSCSPRDSSKMG

SEQ ID NO: 1851 - protein, 1832 aa, synthetic construct
  REGION 1..1832: note = ROS1 (P08922) ECD
TVLNSCLKSCVTNLGQQLDLGTPHNLSEPCIQGCHFWNSVDQKNCALKCRESCEVGCSSAEGAYEEEVLENADLPTAPFASSIGSHNMTLRWKSANFSGVKYIIQWKYAQLLGSWTYTKTVSRPSYVVKPLHPFTEYIFRVVWIFTAQLQLYSPPSPSYRTHPHGVPETAPLIRNIESSSPDTVEVSWDPPQFPGGPILGYNLRLISKNQKLDAGTQRTSFQFYSTLPNTIYRFSIAAVNEVGEGPEAESSITTSSSAVQQEEQWLFLSRKTSLRKRSLKHLVDEAHCLRLDAIYHNITGISVDVHQQIVYFSEGTLIWAKKAANMSDVSDLRIFYRGSGLISSISIDWLYQRMYFIMDELVCVCDLENCSNIEEITPPSISAPQKIVADSYNGYVFYLLRDGIYRADLPVPSGRCAEAVRIVESCTLKDFAIKPQAKRIIYFNDTAQVFMSTFLDGSASHLILPRIPFADVKSFACENNDFLVTDGKVIFQQDALSFNEFIVGCDLSHIEEFGFGNLVIFGSSSQLHPLPGRPQELSVLFGSHQALVQWKPPALAIGANVILISDIIELFELGPSAWQNWTYEVKVSTQDPPEVTHIFLNISGTMLNVPELQSAMKYKVSVRASSPKRPGPWSEPSVGTTLVPASEPPFIMAVKEDGLWSKPLNSFGPGEFLSSDIGNVSDMDWYNNSLYYSDTKGDVFVWLLNGTDISENYHLPSIAGAGALAFEWLGHFLYWAGKTYVIQRQSVLTGHTDIVTHVKLLVNDMVVDSVGGYLYWTTLYSVESTRLNGESSLVLQTQPWFSGKKVIALTLDLSDGLLYWLVQDSQCIHLYTAVLRGQSTGDTTITEFAAWSTSEISQNALMYYSGRLFWINGFRIITTQEIGQKTSVSVLEPARFNQFTIIQTSLKPLPGNFSFTPKVIPDSVQESSFRIEGNASSFQILWNGPPAVDWGVVFYSVEFSAHSKFLASEQHSLPVFTVEGLEPYALFNLSVTPYTYWGKGPKTSLSLRAPETVPSAPENPRIFILPSGKCCNKNEVVVEFRWNKPKHENGVLTKFEIFYNISNQSITNKTCEDWIAVNVTPSVMSFQLEGMSPRCFIAFQVRAFTSKGPGPYADVVKSTTSEINPFPHLITLLGNKIVFLDMDQNQVVWTFSAERVISAVCYTADNEMGYYAEGDSLFLLHLHNRSSSELFQDSLVFDITVITIDWISRHLYFALKESQNGMQVFDVDLEHKVKYPREVKIHNRNSTIISFSVYPLLSRLYWTEVSNFGYQMFYYSIISHTLHRILQPTATNQQNKRNQCSCNVTEFELSGAMAIDTSNLEKPLIYFAKAQEIWAMDLEGCQCWRVITVPAMLAGKTLVSLTVDGDLIYWIITAKDSTQIYQAKKGNGAIVSQVKALRSRHILAYSSVMQPFPDKAFLSLASDTVEPTILNATNTSLTIRLPLAKTNLTWYGITSPTPTYLVYYAEVNDRKNSSDLKYRILEFQDSIALIEDLQPFSTYMIQIAVKNYYSDPLEHLPPGKEIWGKTKNGVPEAVQLINTTVRSDTSLIISWRESHKPNGPKESVRYQLAISHLALIPETPLRQSEFPNGRLTLLVTRLSGGNIYVLKVLACHSEEMWCTESHPVTVEMFNTPEKPYSLVPENTSLQFNWKAPLNVNLIRFWVELQKWKYNEFYHVKTSCSQGPAYVCNITNLQPYTSYNVRVVVVYKTGENSTSLPESFKTKAGVPNKPGIPKLLEGSKNSIQWEKAEDNGCRITYYILEIRKSTSNNLQNQNLRWKMTFNGSCSSVCTWKSKNLKGIFQFRVVAANNLGFGEYSGISENIILVGDDFWIPE

SEQ ID NO: 1852 - protein, 415 aa, synthetic construct
  REGION 1..415: note = RPN1 (P04843) ECD
ASSEAPPLINEDVKRTVDLSSHLAKVTAEVVLAHLGGGSTSRATSFLLALEPELEARLAHLGVQVKGEDEEENNLEVRETKIKGKSGRFFTVKLPVALDPGAKISVIVETVYTHVLHPYPTQITQSEKQFVVFEGNHYFYSPYPTKTQTMRVKLASRNVESYTKLGNPTRSEDLLDYGPFRDVPAYSQDTFKVHYENNSPFLTITSMTRVIEVSHWGNIAVEENVDLKHTGAVLKGPFSRYDYQRQPDSGISSIRSFKTILPAAAQDVYYRDEIGNVSTSHLLILDDSVEMEIRPRFPLFGGWKTHYIVGYNLPSYEYLYNLGDQYALKMRFVDHVFDEQVIDSLTVKIILPEGAKNIEIDSPYEISRAPDELHYTYLDTFGRPVIVAYKKNLVEQHIQDIVVHYTFNKVLMLQE

SEQ ID NO: 1853 - protein, 202 aa, synthetic construct
  REGION 1..202: note = RYK (P34925) ECD
PPPLLLLLALLPLLPAPGAAAAPAPRPPELQSASAGPSVSLYLSEDEVRRLIGLDAELYYVRNDLISHYALSFSLLVPSETNFLHFTWHAKSKVEYKLGFQVDNVLAMDMPQVNISVQGEVPRTLSVFRVELSCTGKVDSEVMILMQLNLTVNSSKNFTVLNFKRRKMCYKKLEEVKTSALDKNTSRTIYDPVHAAPTTSTR

SEQ ID NO: 1854 - protein, 402 aa, synthetic construct
  REGION 1..402: note = SCARF1 (Q14162) ECD
SELDPKGQHVCVASSPSAELQCCAGWRQKDQECTIPICEGPDACQKDEVCVKPGLCRCKPGFFGAHCSSRCPGQYWGPDCRESCPCHPHGQCEPATGACQCQADRWGARCEFPCACGPHGRCDPATGVCHCEPGWWSSTCRRPCQCNTAAARCEQATGACVCKPGWWGRRCSFRCNCHGSPCEQDSGRCACRPGWWGPECQQQCECVRGRCSAASGECTCPPGFRGARCELPCPAGSHGVQCAHSCGRCKHNEPCSPDTGSCESCEPGWNGTQCQQPCLPGTFGESCEQQCPHCRHGEACEPDTGHCQRCDPGWLGPRCEDPCPTGTFGEDCGSTCPTCVQGSCDTVTGDCVCSAGYWGPSCNASCPAGFHGNNCSVPCECPEGLCHPVSGSCQPGSGSRDT

SEQ ID NO: 1855 - protein, 398 aa, synthetic construct
  REGION 1..398: note = SCARF2 (Q96GP6) ECD
QELNPRGRNVCRAPGSQVPTCCAGWRQQGDECGIAVCEGNSTCSENEVCVRPGECRCRHGYFGANCDTKCPRQFWGPDCKELCSCHPHGQCEDVTGQCTCHARRWGARCEHACQCQHGTCHPRSGACRCEPGWWGAQCASACYCSATSRCDPQTGACLCHAGWWGRSCNNQCACNSSPCEQQSGRCQCRERTFGARCDRYCQCFRGRCHPVDGTCACEPGYRGKYCREPCPAGFYGLGCRRRCGQCKGQQPCTVAEGRCLTCEPGWNGTKCDQPCATGFYGEGCSHRCPPCRDGHACNHVTGKCTRCNAGWIGDRCETKCSNGTYGEDCAFVCADCGSGHCDFQSGRCLCSPGVHGPHCNVTCPPGLHGADCAQACSCHEDTCDPVTGACHLETNQRK

SEQ ID NO: 1856 - protein, 887 aa, synthetic construct
  REGION 1..887: note = SCART1 (Q4G0T1) ECD
VPIGGPGALRLAYRHSTCDGVVLVRHHGAWGYVCNQEWTLAEASVVCRQLGCGPAVGAPKYVPLPGEMAQPWLHNVSCRGNESSLWECSLGSWCQSPCPHAWVVVALCSNGTFRELRLVKGRSPCAGLPEIRNVNGVDRLCVLHVEEAMVFCRELGCGPVLQAPRRDVGVVRKYLACRGTEPTIRSCRLDNNFRSGCDLRLDAEVVCSGHTEARLVGGEHPCAGRLEVTWGTVCDAALDLATAHVVCRELQCGAVVSTPEGARFGRGSGPVWTEAFRCAGNESLLFHCPRGRGSQCGHGHDAGLRCSEFRMVNGSSSCEGRVEFQVQGSWAPLCATHWDIADATVLCHQLNCGNAVAAPGGGHFGDGDAAIWPDAFHCEGTESYLWNCPVSTLGAPACAPGNTASAVCSGLAHALRLREGQSRCDGRVEVSLDGVWGRVLDDAWDLRGAGVVCRQLGCRGAQQAYDAPAPSRGSVQVALSRVRCLGTETRLTQCNVSATLQEPAGTSRDAGVVCSGEVGTASPMARRHGIPGALTLSLHREPQGAAGRGAGALHGGAWGTVCDDAWDLRDAHVVCRQLGCGRALSALGAAHFGAGAGRIWLDELGCQGHESALWQCPSAGWGRHDWRHKEDAGVFCSESVALRLRGGTCCCAGWLDVFYNGTWGAMCSNALKDLSLSIICKQLGCGVWGVGLAGEQALPLCGHRDRLGGQHRVPQAAQLHSVAMPFPPMAPALLRPSRAGLSEDRPQAAGEPLNCSSWLGCPEEGALRVRGGEDRCSGRVELWHAGSWGTVCDDGWDLADAEVVCRQLGCGRAVAALGAAAFGPGSGPVWLDEVGCRGSEASLWGCPAERWGRGDRAHEEDAGVRCWEPGPGPPLPAAPFRTFWVVS

SEQ ID NO: 1857 - protein, 142 aa, synthetic construct
  REGION 1..142: note = SCN1B (Q07699) ECD
GGCVEVDSETEAVYGMTFKILCISCKRRSETNAETFTEWTFRQKGTEEFVKILRYENEVLQLEEDERFEGRVVWNGSRGTKDLQDLSIFITNVTYNHSGDYECHVYRLLFFENYEHNTSVVKKIHIEVVDKANRDMASIVSE

SEQ ID NO: 1858 - protein, 130 aa, synthetic construct
  REGION 1..130: note = SCN2B (O60939) ECD
MEVTVPATLNVLNGSDARLPCTFNSCYTVNHKQFSLNWTYQECNNCSEEMFLQFRMKIINLKLERFQDRVEFSGNPSKYDVSVMLRNVQPEDEGIYNCYIMNPPDRHRGHGKIHLQVLMEEPPERDSTVA

SEQ ID NO: 1859 - protein, 137 aa, synthetic construct
  REGION 1..137: note = SCN3B (Q9NY72) ECD
FPVCVEVPSETEAVQGNPMKLRCISCMKREEVEATTVVEWFYRPEGGKDFLIYEYRNGHQEVESPFQGRLQWNGSKDLQDVSITVLNVTLNDSGLYTCNVSREFEFEAHRPFVKTTRLIPLRVTEEAGEDFTSVVSE

SEQ ID NO: 1860 - protein, 132 aa, synthetic construct
  REGION 1..132: note = SCN4B (Q8IWT1) ECD
LEVSVGKATDIYAVNGTEILLPCTFSSCFGFEDLHFRWTYNSSDAFKILIEGTVKNEKSDPKVTLKDDDRITLVGSTKEKMNNISIVLRDLEFSDTGKYTCHVKNPKENNLQHHATIFLQVVDRLEEVDNTV

SEQ ID NO: 1861 - protein, 232 aa, synthetic construct
  REGION 1..232: note = SDC1 (P18827) ECD
QIVATNLPPEDQDGSGDDSDNFSGSGAGALQDITLSQQTPSTWKDTQLLTAIPTSPEPTGLEATAASTSTLPAGEGPKEGEAVVLPEVEPGLTAREQEATPRPRETTQLPTTHLASTTTATTAQEPATSHPHRDMQPGHHETSTPAGPSQADLHTPHTEDGGPSATERAAEDGASSQLPAAEGSGEQDFTFETSGENTAVVAVEPDRRNQSPVDQGATGASQGLLDRKEVLG

SEQ ID NO: 1862 - protein, 126 aa, synthetic construct
  REGION 1..126: note = SDC2 (P34741) ECD
ESRAELTSDKDMYLDNSSIEEASGVYPIDDDDYASASGSGADEDVESPELTTSRPLPKILLTSAAPKVETTTLNIQNKIPAQTKSPEETDKEKVHLSDSERKMDPAEEDTNVYTEKHSDSLFKRTE

SEQ ID NO: 1863 - protein, 1912 aa, synthetic construct
  REGION 1..1912: note = SDK2 (Q58EX2) ECD
QDDVSPYFKTEPVRTQVHLEGNRLVLTCMAEGSWPLEFKWLHNNRELTKFSLEYRYMITSLDRTHAGFYRCIVRNRMGALLQRQTEVQVAYMGSFEEGEKHQSVSHGEAAVIRAPRIASFPQPQVTWFRDGRKIPPSSRIAITLENTLVILSTVAPDAGRYYVQAVNDKNGDNKTSQPITLTVENVGGPADPIAPTIIIPPKNTSVVAGTSEVTLECVANARPLIKLHIIWKKDGVLLSGGISDHNRRLTIPNPTGSDAGYYECEAVLRSSSVPSVVRGAYLSVLEPPQFVKEPERHITAEMEKVVDIPCQAKGVPPPSITWYKDAAVVEVEKLTRFRQRNDGGLQISGLVPDDTGMFQCFARNAAGEVQTSTYLAVTSIAPNITRGPLDSTVIDGMSVVLACETSGAPRPAITWQKGERILASGSVQLPRFTPLESGSLLISPTHISDAGTYTCLATNSRGVDEASADLVVWARTRITKPPQDQSVIKGTQASMVCGVTHDPRVTIRYIWEKDGATLGTESHPRIRLDRNGSLHISQTWSGDIGTYTCRVISAGGNDSRSAHLRVRQLPHAPEHPVATLSTVERRAINLTWTKPFDGNSPLIRYILEMSENNAPWTVLLASVDPKATSVTVKGLVPARSYQFRLCAVNDVGKGQFSKDTERVSLPEEPPTAPPQNVIASGRTNQSIMIQWQPPPESHQNGILKGYIIRYCLAGLPVGYQFKNITDADVNNLLLEDLIIWTNYEIEVAAYNSAGLGVYSSKVTEWTLQGVPTVPPGNVHAEATNSTTIRFTWNAPSPQFINGINQGYKLIAWEPEQEEEVTMVTARPNFQDSIHVGFVSGLKKFTEYFTSVLCFTTPGDGPRSTPQLVRTHEDVPGPVGHLSFSEILDTSLKVSWQEPGEKNGILTGYRISWEEYNRTNTRVTHYLPNVTLEYRVTGLTALTTYTIEVAAMTSKGQGQVSASTISSGVPPELPGPPTNLGISNIGPRSVTLQFRPGYDGKTSISRWLVEAQVGVVGEGEEWLLIHQLSNEPDARSMEVPDLNPFTCYSFRMRQVNIVGTSPPSQPSRKIQTLQAPPDMAPANVSLRTASETSLWLRWMPLPEMEYNGNPESVGYKIKYSRSDGHGKTLSHVVQDRVERDYTIEDLEEWTEYRVQVQAFNAIGSGPWSQTVVGRTRESVPSSGPTNVSALATTSSSMLVRWSEVPEADRNGLVLGYKVMYKEKDSDTQPRFWLVEGNSSRSAQLTGLGKYVLYEVQVLAFTRIGDGSPSHPPILERTLDDVPGPPMGILFPEVRTTSVRLIWQPPAAPNGIILAYQITHRLNTTTANTATVEVLAPSARQYTATGLKPESVYLFRITAQTRKGWGEAAEALVVTTEKRDRPQPPSRPMVQQEDVRARSVLLSWEPGSDGLSPVRYYTIQTRELPSGRWALHSASVSHNASSFIVDRLKPFTSYKFRVKATNDIGDSEFSEESESLTTLQAAPDEAPTILSVTPHTTTSVLIRWQPPAEDKINGILLGFRIRYRELLYEGLRGFTLRGINNPGATWAELTSMYSMRNLSRPSLTQYELDNLNKHRRYEIRMSVYNAVGEGPSSPPQEVFVGEAVPTAAPRNVVVHGATATQLDVTWEPPPLDSQNGDIQGYKIYFWEAQRGNLTERVKTLFLAENSVKLKNLTGYTAYMVSVAAFNAAGDGPRSTPTQGQTQQAAPSAPSSVKFSELTTTSVNVSWEAPQFPNGILEGYRLVYEPCSPVDGVSKIVTVDVKGNSPLWLKVKDLAEGVTYRFRIRAKTFTYGPEIEANVTTGPGEGAPGPPGVPIIVRYSSAIAIHWSSGDPGKGPITRYVIEARPSDEGLWDILIKDIPKEVSSYTFSMDILKPGVSYDFRVIAVNDYGFGTPSSPSQSVPAQKANPFYEEWWF

SEQ ID NO: 1864 - protein, 117 aa, synthetic construct
  REGION 1..117: note = SECTM1 (Q8WVN6) ECD
QNEGWDSPICTEGVVSVSWGENTVMSCNISNAFSHVNIKLRAHGQESAIFNEVAPGYFSRDGWQLQVQGGVAQLVIKGARDSHAGLYMWHLVGHQRNNRQVTLEVSGAEPQSAPDTG

SEQ ID NO: 1865 - protein, 535 aa, synthetic construct
  REGION 1..535: note = SELE (P16581) ECD
WSYNTSTEAMTYDEASAYCQQRYTHLVAIQNKEEIEYLNSILSYSPSYYWIGIRKVNNVWVWVGTQKPLTEEAKNWAPGEPNNRQKDEDCVEIYIKREKDVGMWNDERCSKKKLALCYTAACTNTSCSGHGECVETINNYTCKCDPGFSGLKCEQIVNCTALESPEHGSLVCSHPLGNFSYNSSCSISCDRGYLPSSMETMQCMSSGEWSAPIPACNVVECDAVTNPANGFVECFQNPGSFPWNTTCTFDCEEGFELMGAQSLQCTSSGNWDNEKPTCKAVTCRAVRQPQNGSVRCSHSPAGEFTFKSSCNFTCEEGFMLQGPAQVECTTQGQWTQQIPVCEAFQCTALSNPERGYMNCLPSASGSFRYGSSCEFSCEQGFVLKGSKRLQCGPTGEWDNEKPTCEAVRCDAVHQPPKGLVRCAHSPIGEFTYKSSCAFSCEEGFELHGSTQLECTSQGQWTEEVPSCQVVKCSSLAVPGKINMSCSGEPVFGTVCKFACPEGWTLNGSAARTCGATGHWSGLLPTCEAPTESNIP

SEQ ID NO: 1866 - protein, 294 aa, synthetic construct
  REGION 1..294: note = SELL (P14151) ECD
WTYHYSEKPMNWQRARRFCRDNYTDLVAIQNKAEIEYLEKTLPFSRSYYWIGIRKIGGIWTWVGTNKSLTEEAENWGDGEPNNKKNKEDCVEIYIKRNKDAGKWNDDACHKLKAALCYTASCQPWSCSGHGECVEIINNYTCNCDVGYYGPQCQFVIQCEPLEAPELGTMDCTHPLGNFSFSSQCAFSCSEGTNLTGIEETTCGPFGNWSSPEPTCQVIQCEPLSAPDLGIMNCSHPLASFSFTSACTFICSEGTELIGKKKTICESSGIWSNPSPICQKLDKSFSMIKEGDYN

SEQ ID NO: 1867 - protein, 730 aa, synthetic construct
  REGION 1..730: note = SELP (P16109) ECD
WTYHYSTKAYSWNISRKYCQNRYTDLVAIQNKNEIDYLNKVLPYYSSYYWIGIRKNNKTWTWVGTKKALTNEAENWADNEPNNKRNNEDCVEIYIKSPSAPGKWNDEHCLKKKHALCYTASCQDMSCSKQGECLETIGNYTCSCYPGFYGPECEYVRECGELELPQHVLMNCSHPLGNFSFNSQCSFHCTDGYQVNGPSKLECLASGIWTNKPPQCLAAQCPPLKIPERGNMTCLHSAKAFQHQSSCSFSCEEGFALVGPEVVQCTASGVWTAPAPVCKAVQCQHLEAPSEGTMDCVHPLTAFAYGSSCKFECQPGYRVRGLDMLRCIDSGHWSAPLPTCEAISCEPLESPVHGSMDCSPSLRAFQYDTNCSFRCAEGFMLRGADIVRCDNLGQWTAPAPVCQALQCQDLPVPNEARVNCSHPFGAFRYQSVCSFTCNEGLLLVGASVLQCLATGNWNSVPPECQAIPCTPLLSPQNGTMTCVQPLGSSSYKSTCQFICDEGYSLSGPERLDCTRSGRWTDSPPMCEAIKCPELFAPEQGSLDCSDTRGEFNVGSTCHFSCDNGFKLEGPNNVECTTSGRWSATPPTCKGIASLPTPGLQCPALTTPGQGTMYCRHHPGTFGFNTTCYFGCNAGFTLIGDSTLSCRPSGQWTAVTPACRAVKCSELHVNKPIAMNCSNLWGNFSYGSICSFHCLEGQLLNGSAQTACQENGHWSTTVPTCQAGPLTIQEA

SEQ ID NO: 1868 - protein, 303 aa, synthetic construct
  REGION 1..303: note = SELPLG (Q14242) ECD
LQLWDTWADEAEKALGPLLARDRRQATEYEYLDYDFLPETEPPEMLRNSTDTTPLTGPGTPESTTVEPAARRSTGLDAGGAVTELTTELANMGNLSTDSAAMEIQTTQPAATEAQTTQPVPTEAQTTPLAATEAQTTRLTATEAQTTPLAATEAQTTPPAATEAQTTQPTGLEAQTTAPAAMEAQTTAPAAMEAQTTPPAAMEAQTTQTTAMEAQTTAPEATEAQTTQPTATEAQTTPLAAMEALSTEPSATEALSMEPTTKRGLFIPFSVSSVTHKGIPMAASNLSVNYPVGAPDHISVKQC

SEQ ID NO: 1869 - protein, 651 aa, synthetic construct [sequence omitted]

SEQ ID NO: 1870 - protein, 674 aa, synthetic construct
  REGION 1..674: note = SEMA4B (Q9NPR2) ECD
LSPRISLPLGSEERPFLRFEAEHISNYTALLLSRDGRTLYVGAREALFALSSNLSFLPGGEYQELLWGADAEKKQQCSFKGKDPQRDCQNYIKILLPLSGSHLFTCGTAAFSPMCTYINMENFTLARDEKGNVLLEDGKGRCPFDPNFKSTALVVDGELYTGTVSSFQGNDPAISRSQSLRPTKTESSLNWLQDPAFVASAYIPESLGSLQGDDDKIYFFFSETGQEFEFFENTIVSRIARICKGDEGGERVLQQRWTSFLKAQLLCSRPDDGFPFNVLQDVFTLSPSPQDWRDTLFYGVFTSQWHRGTTEGSAVCVFTMKDVQRVFSGLYKEVNRETQQWYTVTHPVPTPRPGACITNSARERKINSSLQLPDRVLNFLKDHFLMDGQVRSRMLLLQPQARYQRVAVHRVPGLHHTYDVLFLGTGDGRLHKAVSVGPRVHIIEELQIFSSGQPVQNLLLDTHRGLLYAASHSGVVQVPMANCSLYRSCGDCLLARDPYCAWSGSSCKHVSLYQPQLATRPWIQDIEGASAKDLCSASSVVSPSFVPTGEKPCEQVQFQPNTVNTLACPLLSNLATRLWLRNGAPVNASASCHVLPTGDLLLVGTQQLGEFQCWSLEEGFQQLVASYCPEVVEDGVADQTDEGGSVPVIISTSRVSAPAGGKASWGADRSYWKE

SEQ ID NO: 1871 - protein, 643 aa, synthetic construct
  REGION 1..643: note = SEMA4C (Q9C0C4) ECD
AEVWWNLVPRKTVSSGELATVVRRFSQTGIQDFLTLTLTEPTGLLYVGAREALFAFSMEALELQGAISWEAPVEKKTECIQKGKNNQTECFNFIRFLQPYNASHLYVCGTYAFQPKCTYVNMLTFTLEHGEFEDGKGKCPYDPAKGHAGLLVDGELYSATLNNFLGTEPIILRNMGPHHSMKTEYLAFWLNEPHFVGSAYVPESVGSFTGDDDKVYFFFRERAVESDCYAEQVVARVARVCKGDMGGARTLQRKWTTFLKARLACSAPNWQLYFNQLQAMHTLQDTSWHNTTFFGVFQAQWGDMYLSAICEYQLEEIQRVFEGPYKEYHEEAQKWDRYTDPVPSPRPGSCINNWHRRHGYTSSLELPDNILNFVKKHPLMEEQVGPRWSRPLLVKKGTNFTHLVADRVTGLDGATYTVLFIGTGDGWLLKAVSLGPWVHLIEELQLFDQEPMRSLVLSQSKKLLFAGSRSQLVQLPVADCMKYRSCADCVLARDPYCAWSVNTSRCVAVGGHSGSLLIQHVMTSDTSGICNLRGSKKVRPTPKNITVVAGTDLVLPCHLSSNLAHARWTFGGRDLPAEQPGSFLYDARLQALVVMAAQPRHAGAYHCFSEEQGARLAAEGYLVAVVAGPSVTLEARAPLENLG

SEQ ID NO: 1872 - protein, 713 aa, synthetic construct
  REGION 1..713: note = SEMA4D (Q92854) ECD
MAFAPIPRITWEHREVHLVQFHEPDIYNYSALLLSEDKDTLYIGAREAVFAVNALNISEKQHEVYWKVSEDKKAKCAEKGKSKQTECLNYIRVLQPLSATSLYVCGTNAFQPACDHLNLTSFKFLGKNEDGKGRCPFDPAHSYTSVMVDGELYSGTSYNFLGSEPIISRNSSHSPLRTEYAIPWLNEPSFVFADVIRKSPDSPDGEDDRVYFFFTEVSVEYEFVFRVLIPRIARVCKGDQGGLRTLQKKWTSFLKARLICSRPDSGLVFNVLRDVFVLRSPGLKVPVFYALFTPQLNNVGLSAVCAYNLSTAEEVFSHGKYMQSTTVEQSHTKWVRYNGPVPKPRPGACIDSEARAANYTSSLNLPDKTLQFVKDHPLMDDSVTPIDNRPRLIKKDVNYTQIVVDRTQALDGTVYDVMFVSTDRGALHKAISLEHAVHIIEETQLFQDFEPVQTLLLSSKKGNRFVYAGSNSGVVQAPLAFCGKHGTCEDCVLARDPYCAWSPPTATCVALHQTESPSRGLIQEMSGDASVCPDKSKGSYRQHFFKHGGTAELKCSQKSNLARVFWKFQNGVLKAESPKYGLMGRKNLLIFNLSEGDSGVYQCLSEERVKNKTVFQVVAKHVLEVKVVPKPVVAPTLSVVQTEGSRIATKVLVASTQGSSPPTPAVQATSSGAITLPPKPAPTGTSCEPKIVINTVPQLHSEKTMYLKSSDNR

SEQ ID NO: 1873 - protein, 625 aa, synthetic construct
  REGION 1..625: note = SEMA4F (O95754) ECD
RVPRSVPRTSLPISEADSCLTRFAVPHTYNYSVLLVDPASHTLYVGARDTIFALSLPFSGERPRRIDWMVPEAHRQNCRKKGKKEDECHNFVQILAIANASHLLTCGTFAFDPKCGVIDVSRFQQVERLESGRGKCPFEPAQRSAAVMAGGVLYAATVKNYLGTEPIITRAVGRAEDWIRTDTLPSWLNAPAFVAAVALSPAEWGDEDGDDEIYFFFTETSRAFDSYERIKVPRVARVCAGDLGGRKTLQQRWTTFLKADLLCPGPEHGRASSVLQDVAVLRPELGAGTPIFYGIFSSQWEGATISAVCAFRPQDIRTVLNGPFRELKHDCNRGLPVVDNDVPQPRPGECITNNMKLRHFGSSLSLPDRVLTFIRDHPLMDRPVFPADGHPLLVTTDTAYLRVVAHRVTSLSGKEYDVLYLGTEDGHLHRAVRIGAQLSVLEDLALFPEPQPVENMKLYHSWLLVGSRTEVTQVNTTNCGRLQSCSECILAQDPVCAWSFRLDECVAHAGEHRGLVQDIESADVSSLCPKEPGERPVVFEVPVATAAHVVLPCSPSSAWASCVWHQPSGVTALTPRRDGLEVVVTPGAMGAYACECQEGGAAHVVAAYSLVWGSQRDAPSRAHTV

SEQ ID NO: 1874 - protein, 658 aa, synthetic construct
  REGION 1..658: note = SEMA4G (Q9NTN9) ECD
VPGPSLRRPSRELDATPRMTIPYEELSGTRHFKGQAQNYSTLLLEEASARLLVGARGALFSLSANDIGDGAHKEIHWEASPEMQSKCHQKGKNNQTECFNHVRFLQRLNSTHLYACGTHAFQPLCAAIDAEAFTLPTSFEEGKEKCPYDPARGFTGLIIDGGLYTATRYEFRSIPDIRRSRHPHSLRTEETPMHWLNDAEFVFSVLVRESKASAVGDDDKVYYFFTERATEEGSGSFTQSRSSHRVARVARVCKGDLGGKKILQKKWTSFLKARLICHIPLYETLRGVCSLDAETSSRTHFYAAFTLSTQWKTLEASAICRYDLAEIQAVFAGPYMEYQDGSRRWGRYEGGVPEPRPGSCITDSLRSQGYNSSQDLPSLVLDFVKLHPLMARPVVPTRGRPLLLKRNIRYTHLTGTPVTTPAGPTYDLLFLGTADGWIHKAVVLGSGMHIIEETQVFRESQSVENLVISLLQHSLYVGAPSGVIQLPLSSCSRYRSCYDCILARDPYCGWDPGTHACAAATTIANRTALIQDIERGNRGCESSRDTGPPPPLKTRSVLRGDDVLLPCDQPSNLARALWLLNGSMGLSDGQGGYRVGVDGLLVTDAQPEHSGNYGCYAEENGLRTLLASYSLTVRPATPAPAPKAPATPGAQLAPDVRL

SEQ ID NO: 1875 - protein, 946 aa, synthetic construct
  REGION 1..946: note = SEMA5A (Q13591) ECD
EAQGTTQCQRTEHPVISYKEIGPWLREFRAKNAVDFSQLTFDPGQKELVVGARNYLFRLQLEDLSLIQAVEWECDEATKKACYSKGKSKEECQNYIRVLLVGGDRLFTCGTNAFTPVCTNRSLSNLTEIHDQISGMARCPYSPQHNSTALLTAGGELYAATAMDFPGRDPAIYRSLGILPPLRTAQYNSKWLNEPNFVSSYDIGNFTYFFFRENAVEHDCGKTVFSRAARVCKNDIGGRFLLEDTWTTFMKARLNCSRPGEVPFYYNELQSTFFLPELDLIYGIFTTNVNSIAASAVCVFNLSAIAQAFSGPFKYQENSRSAWLPYPNPNPHFQCGTVDQGLYVNLTERNLQDAQKFILMHEVVQPVTTVPSFMEDNSRFSHVAVDVVQGREALVHIIYLATDYGTIKKVRVPLNQTSSSCLLEEIELFPERRREPIRSLQILHSQSVLFVGLREHVVKIPLKRCQFYRTRSTCIGAQDPYCGWDVVMKKCTSLEESLSMTQWEQSISACPTRNLTVDGHFGVWSPWTPCTHTDGSAVGSCLCRTRSCDSPAPQCGGWQCEGPGMEIANCSRNGGWTPWTSWSPCSTTCGIGFQVRQRSCSNPTPRHGGRVCVGQNREERYCNEHLLCPPHMFWTGWGPWERCTAQCGGGIQARRRICENGPDCAGCNVEYQSCNTNPCPELKKTTPWTPWTPVNISDNGGHYEQRFRYTCKARLADPNLLEVGRQRIEMRYCSSDGTSGCSTDGLSGDFLRAGRYSAHTVNGAWSAWTSWSQCSRDCSRGIRNRKRVCNNPEPKYGGMPCLGPSLEYQECNILPCPVDGVWSCWSPWTKCSATCGGGHYMRTRSCSNPAPAYGGDICLGLHTEEALCNTQPCPESWSEWSDWSECEASGVQVRARQCILLFPMGSQCSGNTTESRPCVFDSNFIPEVSVARSSSVEEKRCGEFNM

SEQ ID NO: 1876 - protein, 631 aa, synthetic construct
  REGION 1..631: note = SEMA6A (Q9H2E6) ECD
GFPEDSEPISISHGNYTKQYPVFVGHKPGRNTTQRHRLDIQMIMIMNGTLYIAARDHIYTVDIDTSHTEEIYCSKKLTWKSRQADVDTCRMKGKHKDECHNFIKVLLKKNDDALFVCGTNAFNPSCRNYKMDTLEPFGDEFSGMARCPYDAKHANVALFADGKLYSATVTDFLAIDAVIYRSLGESPTLRTVKHDSKWLKEPYFVQAVDYGDYIYFFFREIAVEYNTMGKVVFPRVAQVCKNDMGGSQRVLEKQWTSFLKARLNCSVPGDSHFYFNILQAVTDVIRINGRDVVLATFSTPYNSIPGSAVCAYDMLDIASVFTGRFKEQKSPDSTWTPVPDERVPKPRPGCCAGSSSLERYATSNEFPDDTLNFIKTHPLMDEAVPSIFNRPWFLRTMVRYRLTKIAVDTAAGPYQNHTVVFLGSEKGIILKFLARIGNSGFLNDSLFLEEMSVYNSEKCSYDGVEDKRIMGMQLDRASSSLYVAFSTCVIKVPLGRCERYGKCKKTCIASRDPYCGWIKEGGACSHLSPNSRLTFEQDIERGNTDGLGDCHNSFVALNGHSSSLLPSTTTSDSTAQEGYESRGGMLDWKHLLDSPDSTDPLGAVSSHNHQDKKGVIRESYLKGHDQLVPVT

SEQ ID NO: 1877 - protein, 578 aa, synthetic construct
  REGION 1..578: note = SEMA6B (Q9H3T3) ECD
LFPEEPPPLSVAPRDYLNHYPVFVGSGPGRLTPAEGADDLNIQRVLRVNRTLFIGDRDNLYRVELEPPTSTELRYQRKLTWRSNPSDINVCRMKGKQEGECRNFVKVLLLRDESTLFVCGSNAFNPVCANYSIDTLQPVGDNISGMARCPYDPKHANVALFSDGMLFTATVTDFLAIDAVIYRSLGDRPTLRTVKHDSKWFKEPYFVHAVEWGSHVYFFFREIAMEFNYLEKVVVSRVARVCKNDVGGSPRVLEKQWTSFLKARLNCSVPGDSHFYFNVLQAVTGVVSLGGRPVVLAVFSTPSNSIPGSAVCAFDLTQVAAVFEGRFREQKSPESIWTPVPEDQVPRPRPGCCAAPGMQYNASSALPDDILNFVKTHPLMDEAVPSLGHAPWILRTLMRHQLTRVAVDVGAGPWGNQTVVFLGSEAGTVLKFLVRPNASTSGTSGLSVFLEEFETYRPDRCGRPGGGETGQRLLSLELDAASGGLLAAFPRCVVRVPVARCQQYSGCMKNCIGSQDPYCGWAPDGSCIFLSPGTRAAFEQDVSGASTSGLGDCTGLLRASLSEDRAGLVSVNLLVTSS

SEQ ID NO: 1878 - protein, 580 aa, synthetic construct
  REGION 1..580: note = SEMA6C (Q9H3T2) ECD
AFPQDPLPLLISDLQGTSPLSWFRGLEDDAVAAELGLDFQRFLTLNRTLLVAARDHVFSFDLQAEEEGEGLVPNKYLTWRSQDVENCAVRGKLTDECYNYIRVLVPWDSQTLLACGTNSFSPVCRSYGITSLQQEGEELSGQARCPFDATQSNVAIFAEGSLYSATAADFQASDAVVYRSLGPQPPLRSAKYDSKWLREPHFVQALEHGDHVYFFFREVSVEDARLGRVQFSRVARVCKRDMGGSPRALDRHWTSFLKLRLNCSVPGDSTFYFDVLQALTGPVNLHGRSALFGVFTTQTNSIPGSAVCAFYLDEIERGFEGKFKEQRSLDGAWTPVSEDRVPSPRPGSCAGVGGAALFSSSRDLPDDVLTFIKAHPLLDPAVPPVTHQPLLTLTSRALLTQVAVDGMAGPHSNITVMFLGSNDGTVLKVLTPGGRSGGPEPILLEEIDAYSPARCSGKRTAQTARRIIGLELDTEGHRLFVAFSGCIVYLPLSRCARHGACQRSCLASQDPYCGWHSSRGCVDIRGSGGTDVDQAGNQESMEHGDCQDGATGSQSGPGDSAYGVRRDLPPASASRSVPIP

SEQ ID NO: 1879 - protein, 642 aa, synthetic construct
  REGION 1..642: note = SEMA6D (Q8NFY4) ECD
VSFPEDDEPLNTVDYHYSRQYPVFRGRPSGNESQHRLDFQLMLKIRDTLYIAGRDQVYTVNLNEMPKTEVIPNKKLTWRSRQQDRENCAMKGKHKDECHNFIKVFVPRNDEMVFVCGTNAFNPMCRYYRLSTLEYDGEEISGLARCPFDARQTNVALFADGKLYSATVADFLASDAVIYRSMGDGSALRTIKYDSKWIKEPHFLHAIEYGNYVYFFFREIAVEHNNLGKAVYSRVARICKNDMGGSQRVLEKHWTSFLKARLNCSVPGDSFFYFDVLQSITDIIQINGIPTVVGVFTTQLNSIPGSAVCAFSMDDIEKVFKGRFKEQKTPDSVWTAVPEDKVPKPRPGCCAKHGLAEAYKTSIDFPDETLSFIKSHPLMDSAVPPIADEPWFTKTRVRYRLTAISVDHSAGPYQNYTVIFVGSEAGMVLKVLAKTSPFSLNDSVLLEEIEAYNHAKCSAENEEDKKVISLQLDKDHHALYVAFSSCIIRIPLSRCERYGSCKKSCIASRDPYCGWLSQGSCGRVTPGMLAEGYEQDTEFGNTAHLGDCHEILPTSTTPDYKIFGGPTSDMEVSSSSVTTMASIPEITPKVIDTWRPKLTSSRKFVVQDDPNTSDFTDPLSGIPKGVRWEVQSGESNQMVHMN

SEQ ID NO: 1880 - protein, 906 aa, synthetic construct
  REGION 1..906: note = SEZ6 (Q53EL9) ECD
LSLEAPTVGKGQAPGIEETDGELTAAPTPEQPERGVHFVTTAPTLKLLNHHPLLEEFLQEGLEKGDEELRPALPFQPDPPAPFTPSPLPRLANQDSRPVFTSPTPAMAAVPTQPQSKEGPWSPESESPMLRITAPLPPGPSMAVPTLGPGEIASTTPPSRAWTPTQEGPGDMGRPWVAEVVSQGAGIGIQGTITSSTASGDDEETTTTTTIITTTITTVQTPGPCSWNFSGPEGSLDSPTDLSSPTDVGLDCFFYISVYPGYGVEIKVQNISLREGETVTVEGLGGPDPLPLANQSFLLRGQVIRSPTHQAALRFQSLPPPAGPGTFHFHYQAYLLSCHFPRRPAYGDVTVTSLHPGGSARFHCATGYQLKGARHLTCLNATQPFWDSKEPVCIAACGGVIRNATTGRIVSPGFPGNYSNNLTCHWLLEAPEGQRLHLHFEKVSLAEDDDRLIIRNGDNVEAPPVYDSYEVEYLPIEGLLSSGKHFFVELSTDSSGAAAGMALRYEAFQQGHCYEPFVKYGNFSSSTPTYPVGTTVEFSCDPGYTLEQGSIIIECVDPHDPQWNETEPACRAVCSGEITDSAGVVLSPNWPEPYGRGQDCIWGVHVEEDKRIMLDIRVLRIGPGDVLTFYDGDDLTARVLGQYSGPRSHFKLFTSMADVTIQFQSDPGTSVLGYQQGFVIHFFEVPRNDTCPELPEIPNGWKSPSQPELVHGTVVTYQCYPGYQVVGSSVLMCQWDLTWSEDLPSCQRVTSCHDPGDVEHSRRLISSPKFPVGATVQYICDQGFVLMGSSILTCHDRQAGSPKWSDRAPKCLLEQLKPCHGLSAPENGARSPEKQLHPAGATIHFSCAPGYVLKGQASIKCVPGHPSHWSDPPPICRAASLDGFYNSRSLDVAKAPAASSTLDAAH

SEQ ID NO: 1881 - protein, 817 aa, synthetic construct
  REGION 1..817: note = SEZ6L2 (Q6UXD5) ECD
LPLKEEEILPEPGSETPTVASEALAELLHGALLRRGPEMGYLPGSDRDPTLATPPAGQTLAVPSLPRATEPGTGPLTTAVTPNGVRGAGPTAPELLTPPPGTTAPPPPSPASPGPPLGPEGGEEETTTTIITTTTVTTTVTSPVLCNNNISEGEGYVESPDLGSPVSRTLGLLDCTYSIHVYPGYGIEIQVQTLNLSQEEELLVLAGGGSPGLAPRLLANSSMLGEGQVLRSPTNRLLLHFQSPRVPRGGGFRIHYQAYLLSCGFPPRPAHGDVSVTDLHPGGTATFHCDSGYQLQGEETLICLNGTRPSWNGETPSCMASCGGTIHNATLGRIVSPEPGGAVGPNLTCRWVIEAAEGRRLHLHFERVSLDEDNDRLMVRSGGSPLSPVIYDSDMDDVPERGLISDAQSLYVELLSETPANPLLLSLRFEAFEEDRCFAPFLAHGNVTTTDPEYRPGALATFSCLPGYALEPPGPPNAIECVDPTEPHWNDTEPACKAMCGGELSEPAGVVLSPDWPQSYSPGQDCVWGVHVQEEKRILLQVEILNVREGDMLTLFDGDGPSARVLAQLRGPQPRRRLLSSGPDLTLQFQAPPGPPNPGLGQGFVLHFKEVPRNDTCPELPPPEWGWRTASHGDLIRGTVLTYQCEPGYELLGSDILTCQWDLSWSAAPPACQKIMTCADPGEIANGHRTASDAGFPVGSHVQYRCLPGYSLEGAAMLTCYSRDTGTPKWSDRVPKCALKYEPCLNPGVPENGYQTLYKHHYQAGESLRFFCYEGFELIGEVTITCVPGHPSQWTSQPPLCKVTQTTDPSRQLEGGN

SEQ ID NO: 1882 - protein, 267 aa, synthetic construct
  REGION 1..267: note = SGCA (Q16586) ECD
QQTTLHPLVGRVFVHTLDHETFLSLPEHVAVPPAVHITYHAHLQGHPDLPRWLRYTQRSPHHPGFLYGSATPEDRGLQVIEVTAYNRDSFDTTRQRLVLEIGDPEGPLLPYQAEFLVRSHDAEEVLPSTPASRFLSALGGLWEPGELQLLNVTSALDRGGRVPLPIEGRKEGVYIKVGSASPFSTCLKMVASPDSHARCAQGQPPLLSCYDTLAPHFRVDWCNVTLVDKSVPEPADEVPTPGDGILEHDPFFCPPTEAPDRDFLVDA

SEQ ID NO: 1883 - protein, 60 aa, synthetic construct
  REGION 1..60: note = SHISA4 (Q96DD7) ECD
GEDCLWYLDRNGSWHPGFNCEFFTFCCGTCYHRYCCRDLTLLITERQQKHCLAFSPKTIA

SEQ ID NO: 1884 - protein, 149 aa, synthetic construct
  REGION 1..149: note = SHISA6 (Q6ZSJ9) ECD
ARGRAANRTLSAGGAAVGGRRAGGALARGGRELNGTARAPGIPEAGSRRGQPAAAVAAAASAAVTYETCWGYYDVSGQYDKEFECNNSESGYLYCCGTCYYRFCCKKRHEKLDQRQCTNYQSPVWVQTPSTKVVSPGPENKYDPEKDKT

SEQ ID NO: 1885 - protein, 167 aa, synthetic construct
  REGION 1..167: note = SHISA7 (A6NL88) ECD
RPSNATSAEPAGPLPALLAHLRRLTGALTGGGGAASPGANGTRTGPAGGAGAAARAPPPAELCHGYYDVMGQYDATFNCSTGSYRFCCGTCHYRFCCEHRHMRLAQASCSNYDTPRWATTPPPLAGGAGGAGGAGGGPGPGQAGWLEGGRTGGAGGRGGEGPGGSTA

SEQ ID NO: 1886 - protein, 100 aa, synthetic construct
  REGION 1..100: note = SHISA8 (B8ZZ34) ECD
GAPEAQGPAAPGTTAPEGGDRCRGYYDVMGQWDPPFNCSSGAYSFCCGTCGYRFCCHDGPRRLDQSRCSNYDTPAWVQTGRPPARARDTAAPRDPGRERS

SEQ ID NO: 1887 - protein, 126 aa, synthetic construct
  REGION 1..126: note = SHISA9 (B4DS77) ECD
QERAGHGQLAQLGGVLLLAGGNRSGAASGEASEGAEASDAPPTRAPTPDFCRGYFDVMGQWDPPFNCSSGDFIFCCGTCGFRFCCTFKKRRLNQSTCTNYDTPLWLNTGKPPARKDDPLHDPTKDK

SEQ ID NO: 1888 - protein, 1622 aa, synthetic construct
  REGION 1..1622: note = SIGLEC1 (Q9BZZ2) ECD
SWGVSSPQDVQGVKGSCLLIPCIFSFPADVEVPDGITAIWYYDYSGQRQVVSHSADPKLVEARFRGRTEFMGNPEHRVCNLLLKDLQPEDSGSYNFRFEISEVNRWSDVKGTLVTVTEEPRVPTIASPVELLEGTEVDFNCSTPYVCLQEQVRLQWQGQDPARSVTFNSQKFEPTGVGHLETLHMAMSWQDHGRILRCQLSVANHRAQSEIHLQVKYAPKGVKILLSPSGRNILPGELVTLTCQVNSSYPAVSSIKWLKDGVRLQTKTGVLHLPQAAWSDAGVYTCQAENGVGSLVSPPISLHIFMAEVQVSPAGPILENQTVTLVCNTPNEAPSDLRYSWYKNHVLLEDAHSHTLRLHLATRADTGFYFCEVQNVHGSERSGPVSVVVNHPPLTPVLTAFLETQAGLVGILHCSVVSEPLATLVLSHGGHILASTSGDSDHSPRFSGTSGPNSLRLEIRDLEETDSGEYKCSATNSLGNATSTLDFHANAARLLISPAAEVVEGQAVTLSCRSGLSPTPDARFSWYLNGALLHEGPGSSLLLPAASSTDAGSYHCRARDGHSASGPSSPAVLTVLYPPRQPTFTTRLDLDAAGAGAGRRGLLLCRVDSDPPARLQLLHKDRVVATSLPSGGGCSTCGGCSPRMKVTKAPNLLRVEIHNPLLEEEGLYLCEASNALGNASTSATFNGQATVLAIAPSHTLQEGTEANLTCNVSREAAGSPANFSWFRNGVLWAQGPLETVTLLPVARTDAALYACRILTEAGAQLSTPVLLSVLYPPDRPKLSALLDMGQGHMALFICTVDSRPLALLALFHGEHLLATSLGPQVPSHGRFQAKAEANSLKLEVRELGLGDSGSYRCEATNVLGSSNTSLFFQVRGAWVQVSPSPELQEGQAVVLSCQVHTGVPEGTSYRWYRDGQPLQESTSATLRFAAITLTQAGAYHCQAQAPGSATTSLAAPISLHVSYAPRHVTLTTLMDTGPGRLGLLLCRVDSDPPAQLRLLHGDRLVASTLQGVGGPEGSSPRLHVAVAPNTLRLEIHGAMLEDEGVYICEASNTLGQASASADFDAQAVNVQVWPGATVREGQLVNLTCLVWTTHPAQLTYTWYQDGQQRLDAHSIPLPNVTVRDATSYRCGVGPPGRAPRLSRPITLDVLYAPRNLRLTYLLESHGGQLALVLCTVDSRPPAQLALSHAGRLLASSTAASVPNTLRLELRGPQPRDEGFYSCSARSPLGQANTSLELRLEGVRVILAPEAAVPEGAPITVTCADPAAHAPTLYTWYHNGRWLQEGPAASLSFLVATRAHAGAYSCQAQDAQGTRSSRPAALQVLYAPQDAVLSSFRDSRARSMAVIQCTVDSEPPAELALSHDGKVLATSSGVHSLASGTGHVQVARNALRLQVQDVPAGDDTYVCTAQNLLGSISTIGRLQVEGARVVAEPGLDVPEGAALNLSCRLLGGPGPVGNSTFAWFWNDRRLHAEPVPTLAFTHVARAQAGMYHCLAELPTGAAASAPVMLRVLYPPKTPTMMVFVEPEGGLRGILDCRVDSEPLASLTLHLGSRLVASSQPQGAPAEPHIHVLASPNALRVDIEALRPSDQGEYICSASNVLGSASTSTYFGVRALHRLHQFQQ

SEQ ID NO: 1889 - protein, 534 aa, synthetic construct
  REGION 1..534: note = SIGLEC10 (Q96LC7) ECD
MDGRFWIRVQESVMVPEGLCISVPCSFSYPRQDWTGSTPAYGYWFKAVTETTKGAPVATNHQSREVEMSTRGRFQLTGDPAKGNCSLVIRDAQMQDESQYFFRVERGSYVRYNFMNDGFFLKVTALTQKPDVYIPETLEPGQPVTVICVFNWAFEECPPPSFSWTGAALSSQGTKPTTSHFSVLSFTPRPQDHNTDLTCHVDFSRKGVSAQRTVRLRVAYAPRDLVISISRDNTPALEPQPQGNVPYLEAQKGQFLRLLCAADSQPPATLSWVLQNRVLSSSHPWGPRPLGLELPGVKAGDSGRYTCRAENRLGSQQRALDLSVQYPPENLRVMVSQANRTVLENLGNGTSLPVLEGQSLCLVCVTHSSPPARLSWTQRGQVLSPSQPSDPGVLELPRVQVEHEGEFTCHARHPLGSQHVSLSLSVHYSPKLLGPSCSWEAEGLHCSCSSQASPAPSLRWWLGEELLEGNSSQDSFEVTPSSAGPWANSSLSLHGGLSSGLRLRCEAWNVHGAQSGSILQLPDKKGLISTAFSN

SEQ ID NO: 1890 - protein, 534 aa, synthetic construct
  REGION 1..534: note = SIGLEC11 (Q96RL6) ECD
LNKDPSYSLQVQRQVPVPEGLCVIVSCNLSYPRDGWDESTAAYGYWFKGRTSPKTGAPVATNNQSREVEMSTRDRFQLTGDPGKGSCSLVIRDAQREDEAWYFFRVERGSRVRHSFLSNAFFLKVTALTKKPDVYIPETLEPGQPVTVICVFNWAFKKCPAPSFSWTGAALSPRRTRPSTSHFSVLSFTPSPQDHDTDLTCHVDFSRKGVSAQRTVRLRVAYAPKDLIISISHDNTSALELQGNVIYLEVQKGQFLRLLCAADSQPPATLSWVLQDRVLSSSHPWGPRTLGLELRGVRAGDSGRYTCRAENRLGSQQQALDLSVQYPPENLRVMVSQANRTVLENLGNGTSLPVLEGQSLRLVCVTHSSPPARLSWTRWGQTVGPSQPSDPGVLELPPIQMEHEGEFTCHAQHPLGSQHVSLSLSVHYPPQLLGPSCSWEAEGLHCSCSSQASPAPSLRWWLGEELLEGNSSQGSFEVTPSSAGPWANSSLSLHGGLSSGLRLRCKAWNVHGAQSGSVFQLLPGKLEHGGGLGL

SEQ ID NO: 1891 - protein, 463 aa, synthetic construct
  REGION 1..463: note = SIGLEC12 (Q96PQ1) ECD
KEQKDYLLTMQKSVTVQEGLCVSVLCSFSYPQNGWTASDPVHGYWFRAGDHVSRNIPVATNNPARAVQEETRDRFHLLGDPQNKDCTLSIRDTRESDAGTYVFCVERGNMKWNYKYDQLSVNVTASQDLLSRYRLEVPESVTVQEGLCVSVPCSVLYPHYNWTASSPVYGSWFKEGADIPWDIPVATNTPSGKVQEDTHGRFLLLGDPQTNNCSLSIRDARKGDSGKYYFQVERGSRKWNYIYDKLSVHVTALTHMPTFSIPGTLESGHPRNLTCSVPWACEQGTPPTITWMGASVSSLDPTITRSSMLSLIPQPQDHGTSLTCQVTLPGAGVTMTRAVRLNISYPPQNLTMTVFQGDGTASTTLRNGSALSVLEGQSLHLVCAVDSNPPARLSWTWGSLTLSPSQSSNLGVLELPRVHVKDEGEFTCRAQNPLGSQHISLSLSLQNEYTGKMRPISGVTLGA

SEQ ID NO: 1892 - protein, 342 aa, synthetic construct
  REGION 1..342: note = SIGLEC14 (Q08ET2) ECD
EKPVYELQVQKSVTVQEGLCVLVPCSFSYPWRSWYSSPPLYVYWFRDGEIPYYAEVVATNNPDRRVKPETQGRFRLLGDVQKKNCSLSIGDARMEDTGSYFFRVERGRDVKYSYQQNKLNLEVTALIEKPDIHFLEPLESGRPTRLSCSLPGSCEAGPPLTFSWTGNALSPLDPETTRSSELTLTPRPEDHGTNLTCQVKRQGAQVTTERTVQLNVSYAPQNLAISIFFRNGTGTALRILSNGMSVPIQEGQSLFLACTVDSNPPASLSWFREGKALNPSQTSMSGTLELPNIGAREGGEFTCRVQHPLGSQHLSFILSVQRSSSSCICVTEKQQGSWPLVL

SEQ ID NO: 1893 - protein, 244 aa, synthetic construct
  REGION 1..244: note = SIGLEC15 (Q6ZMC9) ECD
FVRTKIDTTENLLNTEVHSSPAQRWSMQVPPEVSAEAGDAAVLPCTFTHPHRHYDGPLTAIWRAGEPYAGPQVFRCAAARGSELCQTALSLHGRFRLLGNPRRNDLSLRVERLALADDRRYFCRVEFAGDVHDRYESRHGVRLHVTAAPRIVNISVLPSPAHAFRALCTAEGEPPPALAWSGPALGNSLAAVRSPREGHGHLVTAELPALTHDGRYTCTAANSLGRSEASVYLFRFHGASGAST

SEQ ID NO: 1894 - protein, 418 aa, synthetic construct
  REGION 1..418: note = SIGLEC16 (A6NMB1) ECD
NKDPSYSLQVQRQVPVPEGLCVIVSCNLSYPRDGWDESTAAYGYWFKGRTSPKTGAPVATNNQSREVAMSTRDRFQLTGDPGKGSCSLVIRDAQREDEAWYFFRVERGSRVRHSFLSNAFFLKVTALTQKPDVYIPETLEPGQPVTVICVFNWAFKKCPAPSFSWTGAALSPRRTRPSTSHFSVLSFTPSPQDHDTDLTCHVDFSRKGVSAQRTVRLRVASLELQGNVIYLEVQKGQFLRLLCAADSQPPATLSWVLQDRVLSSSHPWGPRTLGLELPGVKAGDSGRYTCRAENRLGSQQRALDLSVQYPPENLRVMVSQANRTVLENLRNGTSLRVLEGQSLRLVCVTHSSPPARLSWTWGEQTVGPSQPSDPGVLQLPRVQMEHEGEFTCHARHPLGSQRVSLSFSVHCKSGPMTG

SEQ ID NO: 1895 - protein, 425 aa, synthetic construct
  REGION 1..425: note = SIGLEC5 (O15389) ECD
EKPVYELQVQKSVTVQEGLCVLVPCSFSYPWRSWYSSPPLYVYWFRDGEIPYYAEVVATNNPDRRVKPETQGRFRLLGDVQKKNCSLSIGDARMEDTGSYFFRVERGRDVKYSYQQNKLNLEVTALIEKPDIHFLEPLESGRPTRLSCSLPGSCEAGPPLTFSWTGNALSPLDPETTRSSELTLTPRPEDHGTNLTCQMKRQGAQVTTERTVQLNVSYAPQTITIFRNGIALEILQNTSYLPVLEGQALRLLCDAPSNPPAHLSWFQGSPALNATPISNTGILELRRVRSAEEGGFTCRAQHPLGFLQIFLNLSVYSLPQLLGPSCSWEAEGLHCRCSFRARPAPSLCWRLEEKPLEGNSSQGSFKVNSSSAGPWANSSLILHGGLSSDLKVSCKAWNIYGSQSGSVLLLQGRSNLGTGVVPAAL

SEQ ID NO: 1896 - protein, 321 aa, synthetic construct
  REGION 1..321: note = SIGLEC6 (O43699) ECD
QERRFQLEGPESLTVQEGLCVLVPCRLPTTLPASYYGYGYWFLEGADVPVATNDPDEEVQEETRGRFHLLWDPRRKNCSLSIRDARRRDNAAYFFRLKSKWMKYGYTSSKLSVRVMALTHRPNISIPGTLESGHPSNLTCSVPWVCEQGTPPIFSWMSAAPTSLGPRTTQSSVLTITPRPQDHSTNLTCQVTFPGAGVTMERTIQLNVSYAPQKVAISIFQGNSAAFKILQNTSSLPVLEGQALRLLCDADGNPPAHLSWFQGFPALNATPISNTGVLELPQVGSAEEGDFTCRAQHPLGSLQISLSLFVHWKPEGRAGGV

SEQ ID NO: 1897 - protein, 335 aa, synthetic construct
  REGION 1..335: note = SIGLEC7 (Q9Y286) ECD
QKSNRKDYSLTMQSSVTVQEGMCVHVRCSFSYPVDSQTDSDPVHGYWFRAGNDISWKAPVATNNPAWAVQEETRDRFHLLGDPQTKNCTLSIRDARMSDAGRYFFRMEKGNIKWNYKYDQLSVNVTALTHRPNILIPGTLESGCFQNLTCSVPWACEQGTPPMISWMGTSVSPLHPSTTRSSVLTLIPQPQHHGTSLTCQVTLPGAGVTTNRTIQLNVSYPPQNLTVTVFQGEGTASTALGNSSSLSVLEGQSLRLVCAVDSNPPARLSWTWRSLTLYPSQPSNPLVLELQVHLGDEGEFTCRAQNSLGSQHVSLNLSLQQEYTGKMRPVSGVLL

SEQ ID NO: 1898 - protein, 347 aa, synthetic construct [sequence omitted]

SEQ ID NO: 1899 - protein, 331 aa, synthetic construct
  REGION 1..331: note = SIGLEC9 (Q9Y336) ECD
QTSKLLTMQSSVTVQEGLCVHVPCSFSYPSHGWIYPGPVVHGYWFREGANTDQDAPVATNNPARAVWEETRDRFHLLGDPHTKNCTLSIRDARRSDAGRYFFRMEKGSIKWNYKHHRLSVNVTALTHRPNILIPGTLESGCPQNLTCSVPWACEQGTPPMISWIGTSVSPLDPSTTRSSVLTLIPQPQDHGTSLTCQVTFPGASVTTNKTVHLNVSYPPQNLTMTVFQGDGTVSTVLGNGSSLSLPEGQSLRLVCAVDAVDSNPPARLSLSWRGLTLCPSQPSNPGVLELPWVHLRDAAEFTCRAQNPLGSQQVYLNVSLQSKATSGVTQG

SEQ ID NO: 1900 - protein, 343 aa, synthetic construct
  REGION 1..343: note = SIRPA (P78324) ECD
EEELQVIQPDKSVLVAAGETATLRCTATSLIPVGPIQWFRGAGPGRELIYNQKEGHFPRVTTVSDLTKRNNMDFSIRIGNITPADAGTYYCVKFRKGSPDDVEFKSGAGTELSVRAKPSAPVVSGPAARATPQHTVSFTCESHGFSPRDITLKWFKNGNELSDFQTNVDPVGESVSYSIHSTAKVVLTREDVHSQVICEVAHVTLQGDPLRGTANLSETIRVPPTLEVTQQPVRAENQVNVTCQVRKFYPQRLQLTWLENGNVSRTETASTVTENKDGTYNWMSWLLVNVSAHRDDVKLTCQVEHDGQPAVSKSHDLKVSAHPKEQGSNTAAENTGSNERNIY

SEQ ID NO: 1901 - protein, 342 aa, synthetic construct
  REGION 1..342: note = SIRPB1 (O00241) ECD
EDELQVIQPEKSVSVAAGESATLRCAMTSLIPVGPIMWFRGAGAGRELIYNQKEGHFPRVTTVSELTKRNNLDFSISISNITPADAGTYYCVKFRKGSPDDVEFKSGAGTELSVRAKPSAPVVSGPAVRATPEHTVSFTCESHGFSPRDITLKWFKNGNELSDFQTNVDPAGDSVSYSIHSTARVVLTRGDVHSQVICEIAHITLQGDPLRGTANLSEAIRVPPTLEVTQQPMRAENQANVTCQVSNFYPRGLQLTWLENGNVSRTETASTLIENKDGTYNWMSWLLVNTCAHRDDVVLTCQVEHDGQQAVSKSYALEISAHQKEHGSDITHEAALAPTAPL

SEQ ID NO: 1902 - protein, 342 aa, synthetic construct
  REGION 1..342: note = SIRPB1 (Q5TFQ8) ECD
EEELQVIQPDKSISVAAGESATLHCTVTSLIPVGPIQWFRGAGPGRELIYNQKEGHFPRVTTVSDLTKRNNMDFSIRISNITPADAGTYYCVKFRKGSPDHVEFKSGAGTELSVRAKPSAPVVSGPAARATPQHTVSFTCESHGFSPRDITLKWFKNGNELSDFQTNVDPAGDSVSYSIHSTAKVVLTREDVHSQVICEVAHVTLQGDPLRGTANLSETIRVPPTLEVTQQPVRAENQVNVTCQVRKFYPQRLQLTWLENGNVSRTETASTLTENKDGTYNWMSWLLVNVSAHRDDVKLTCQVEHDGQPAVSKSHDLKVSAHPKEQGSNTAPGPALASAAPL

SEQ ID NO: 1903 - protein, 255 aa, synthetic construct
  REGION 1..255: note = SIRPB2 (Q5JXA9) ECD
QSSRNDWQVLQPEGPMLVAEGETLLLRCMVVGSCTDGMIKWVKVSTQDQQEIYNFKRGSFPGVMPMIQRTSEPLNCDYSIYIHNVTREHTGTYHCVRFDGLSEHSEMKSDEGTSVLVKGAGDPEPDLWIIQPQELVLGTTGDTVFLNCTVLGDGPPGPIRWFQGAGLSREAIYNFGGISHPKETAVQASNNDFSILLQNVSSEDAGTYYCVKFQRKPNRQYLSGQGTSLKVKAKSTSSKEAEFTSEPATEMSPTG

SEQ ID NO: 1904 - protein, 332 aa, synthetic construct
  REGION 1..332: note = SIRPG (Q9P1W8) ECD
EEELQMIQPEKLLLVTVGKTATLHCTVTSLLPVGPVLWFRGVGPGRELIYNQKEGHFPRVTTVSDLTKRNNMDFSIRISSITPADVGTYYCVKFRKGSPENVEFKSGPGTEMALGAKPSAPVVLGPAARTTPEHTVSFTCESHGFSPRDITLKWFKNGNELSDFQTNVDPTGQSVAYSIRSTARVVLDPWDVRSQVICEVAHVTLQGDPLRGTANLSEAIRVPPTLEVTQQPMRVGNQVNVTCQVRKFYPQSLQLTWSENGNVCQRETASTLTENKDGTYNWTSWFLVNISDQRDDVVLTCQVKHDGQLAVSKRLALEVTVHQKDQSSDATP

SEQ ID NO: 1905 - protein, 16 aa, synthetic construct
  REGION 1..16: note = SIT1 (Q9Y3P8) ECD
DNCTDLLALGIPSITQ

SEQ ID NO: 1906 - protein, 217 aa, synthetic construct
  REGION 1..217: note = SLAMF1 (Q13291) ECD
ASYGTGGRMMNCPKILRQLGSKVLLPLTYERINKSMNKSIHIVVTMAKSLENSVENKIVSLDPSEAGPPRYLGDRYKFYLENLTLGIRESRKEDEGWYLMTLEKNVSVQRFCLQLRLYEQVSTPEIKVLNKTQENGTCTLILGCTVEKGDHVAYSWSEKAGTHPLNPANSSHLLSLTLGPQHADNIYICTVSNPISNNSQTFSPWPGCRTDPSETKP

SEQ ID NO: 1907 - protein, 205 aa, synthetic construct
  REGION 1..205: note = SLAMF6 (Q96DU3) ECD
QSSLTPLMVNGILGESVTLPLEFPAGEKVNFITWLFNETSLAFIVPHETKSPEIHVTNPKQGKRLNFTQSYSLQLSNLKMEDTGSYRAQISTKTSAKLSSYTLRILRQLRNIQVTNHSQLFQNMTCELHLTCSVEDADDNVSFRWEALGNTLSSQPNLTVSWDPRISSEQDYTCIAENAVSNLSFSVSAQKLCEDVKIQYTDTKM

SEQ ID NO: 1908 - protein, 204 aa, synthetic construct
  REGION 1..204: note = SLAMF7 (Q9NQ25) ECD
SGPVKELVGSVGGAVTFPLKSKVKQVDSIVWTFNTTPLVTIQPEGGTIIVTQNRNRERVDFPDGGYSLKLSKLKKNDSGIYYVGIYSSSLQQPSTQEYVLHVYEHLSKPKVTMGLQSNKNGTCVTNLTCCMEHGEEDVIYTWKALGQAANESHNGSILPISWRWGESDMTFICVARNPVSRNFSSPILARKLCEGAADDPDSSM

SEQ ID NO: 1909 - protein, 211 aa, synthetic construct
  REGION 1..211: note = SLAMF8 (Q9P0V8) ECD
AQVLSKVGGSVLLVAARPPGFQVREAIWRSLWPSEELLATFFRGSLETLYHSRFLGRAQLHSNLSLELGPLESGDSGNFSVLMVDTRGQPWTQTLQLKVYDAVPRPVVQVFIAVERDAQPSKTCQVFLSCWAPNISEITYSWRRETTMDFGMEPHSLFTDGQVLSISLGPGDRDVAYSCIVSNPVSWDLATVTPWDSCHHEAAPGKASYKD

SEQ ID NO: 1910 - protein, 218 aa, synthetic construct
  REGION 1..218: note = SLAMF9 (Q96A28) ECD
RRLWRWCGSEEVVAVLQESISLPLEIPPDEEVENIIWSSHKSLATVVPGKEGHPATIMVTNPHYQGQVSFLDPSYSLHISNLSWEDSGLYQAQVNLRTSQISTMQQYNICVYRWLSEPQITVNFESSGEGACSMSLVCSVEKAGMDMTYSWLSRGDSTYTFHEGPVLSTSWRPGDSALSYTCRANNPISNVSSCPIPDGPFYADPNYASEKPSTAFCL

SEQ ID NO: 1911 - protein, 605 aa, synthetic construct
  REGION 1..605: note = SLITRK1 (Q96PX8) ECD
NVTGDVCKEKICSCNEIEGDLHVDCEKKGFTSLQRFTAPTSQFYHLFLHGNSLTRLFPNEFANFYNAVSLHMENNGLHEIVPGAFLGLQLVKRLHINNNKIKSFRKQTFLGLDDLEYLQADFNLLRDIDPGAFQDLNKLEVLILNDNLISTLPANVFQYVPITHLDLRGNRLKTLPYEEVLEQIPGIAEILLEDNPWDCTCDLLSLKEWLENIPKNALIGRVVCEAPTRLQGKDLNETTEQDLCPLKNRVDSSLPAPPAQEETFAPGPLPTPFKTNGQEDHATPGSAPNGGTKIPGNWQIKIRPTAAIATGSSRNKPLANSLPCPGGCSCDHIPGSGLKMNCNNRNVSSLADLKPKLSNVQELFLRDNKIHSIRKSHFVDYKNLILLDLGNNNIATVENNTFKNLLDLRWLYMDSNYLDTLSREKFAGLQNLEYLNVEYNAIQLILPGTFNAMPKLRILILNNNLLRSLPVDVFAGVSLSKLSLHNNYFMYLPVAGVLDQLTSIIQIDLHGNPWECSCTIVPFKQWAERLGSEVLMSDLKCETPVNFFRKDFMLLSNDEICPQLYARISPTLTSHSKNSTGLAETGTHSNSYLDTSRVSISVLVP

SEQ ID NO: 1912 - protein, 600 aa, synthetic construct
  REGION 1..600: note = SLITRK2 (Q9H156) ECD
RKTAKDICKIRCLCEEKENVLNINCENKGFTTVSLLQPPQYRIYQLFLNGNLLTRLYPNEFVNYSNAVTLHLGNNGLQEIRTGAFSGLKTLKRLHLNNNKLEILREDTFLGLESLEYLQADYNYISAIEAGAFSKLNKLKVLILNDNLLLSLPSNVFRFVLLTHLDLRGNRLKVMPFAGVLEHIGGIMEIQLEENPWNCTCDLLPLKAWLDTITVFVGEIVCETPFRLHGKDVTQLTRQDLCPRKSASDSSQRGSHADTHVQRLSPTMNPALNPTRAPKASRPPKMRNRPTPRVTVSKDRQSFGPIMVYQTKSPVPLTCPSSCVCTSQSSDNGLNVNCQERKFTNISDLQPKPTSPKKLYLTGNYLQTVYKNDLLEYSSLDLLHLGNNRIAVIQEGAFTNLTSLRRLYLNGNYLEVLYPSMFDGLQSLQYLYLEYNVIKEIKPLTFDALINLQLLFLNNNLLRSLPDNIFGGTALTRLNLRNNHFSHLPVKGVLDQLPAFIQIDLQENPWDCTCDIMGLKDWTEHANSPVIINEVTCESPAKHAGEILKFLGREAICPDSPNLSDGTVLSMNHNTDTPRSLSVSPSSYPELHTEVPLSVL

SEQ ID NO: 1913 - protein, 600 aa, synthetic construct
  REGION 1..600: note = SLITRK4 (Q8IW52) ECD
DSDISVEICNVCSCVSVENVLYVNCEKVSVYRPNQLKPPWSNFYHLNFQNNFLNILYPNTFLNFSHAVSLHLGNNKLQNIEGGAFLGLSALKQLHLNNNELKILRADTFLGIENLEYLQADYNLIKYIERGAFNKLHKLKVLILNDNLISFLPDNIFRFASLTHLDIRGNRIQKLPYIGVLEHIGRVVELQLEDNPWNCSCDLLPLKAWLENMPYNIYIGEAICETPSDLYGRLLKETNKQELCPMGTGSDFDVRILPPSQLENGYTTPNGHTTQTSLHRLVTKPPKTTNPSKISGIVAGKALSNRNLSQIVSYQTRVPPLTPCPAPCFCKTHPSDLGLSVNCQEKNIQSMSELIPKPLNAKKLHVNGNSIKDVDVSDFTDFEGLDLLHLGSNQITVIKGDVFHNLTNLRRLYLNGNQIERLYPEIFSGLHNLQYLYLEYNLIKEISAGTFDSMPNLQLLYLNNNLLKSLPVYIFSGAPLARLNLRNNKFMYLPVSGVLDQLQSLTQIDLEGNPWDCTCDLVALKLWVEKLSDGIVVKELKCETPVQFANIELKSLKNEILCPKLLNKPSAPFTSPAPAITFTTPLGPIRSPPGGPVPLS

SEQ ID NO: 1914 - protein, 624 aa, synthetic construct
  REGION 1..624: note = SLITRK5 (O94991) ECD
IDYYGEICDNACPCEEKDGILTVSCENRGIISLSEISPPRFPIYHLLLSGNLLNRLYPNEFVNYTGASILHLGSNVIQDIETGAFHGLRGLRRLHLNNNKLELLRDDTFLGLENLEYLQVDYNYISVIEPNAFGKLHLLQVLILNDNLLSSLPNNLFRFVPLTHLDLRGNRLKLLPYVGLLQHMDKVVELQLEENPWNCSCELISLKDWLDSISYSALVGDVVCETPFRLHGRDLDEVSKQELCPRRLISDYEMRPQTPLSTTGYLHTTPASVNSVATSSSAVYKPPLKPPKGTRQPNKPRVRPTSRQPSKDLGYSNYGPSIAYQTKSPVPLECPTACSCNLQISDLGLNVNCQERKIESIAELQPKPYNPKKMYLTENYIAVVRRTDFLEATGLDLLHLGNNRISMIQDRAFGDLTNLRRLYLNGNRIERLSPELFYGLQSLQYLFLQYNLIREIQSGTFDPVPNLQLLFLNNNLLQAMPSGVFSGLTLLRLNLRSNHFTSLPVSGVLDQLKSLIQIDLHDNPWDCTCDIVGMKLWVEQLKVGVLVDEVICKAPKKFAETDMRSIKSELLCPDYSDVVVSTPTPSSIQVPARTSAVTPAVRLNSTGAPASLGAGGGASSVPLS

SEQ ID NO: 1915 - protein, 582 aa, synthetic construct
  REGION 1..582: note = SLITRK6 (Q9H5Y7) ECD
SRGSCDSLCNCEEKDGTMLINCEAKGIKMVSEISVPPSRPFQLSLLNNGLTMLHTNDFSGLTNAISIHLGFNNIADIEIGAFNGLGLLKQLHINHNSLEILKEDTFHGLENLEFLQADNNFITVIEPSAFSKLNRLKVLILNDNAIESLPPNIFRFVPLTHLDLRGNQLQTLPYVGFLEHIGRILDLQLEDNKWACNCDLLQLKTWLENMPPQSIIGDVVCNSPPFFKGSILSRLKKESICPTPPVYEEHEDPSGSLHLAATSSINDSRMSTKTTSILKLPTKAPGLIPYITKPSTQLPGPYCPIPCNCKVLSPSGLLIHCQERNIESLSDLRPPPQNPRKLILAGNIIHSLMKSDLVEYFTLEMLHLGNNRIEVLEEGSFMNLTRLQKLYLNGNHLTKLSKGMFLGLHNLEYLYLEYNAIKEILPGTFNPMPKLKVLYLNNNLLQVLPPHIFSGVPLTKVNLKTNQFTHLPVSNILDDLDLLTQIDLEDNPWDCSCDLVGLQQWIQKLSKNTVTDDILCTSPGHLDKKELKALNSEILCPGLVNNPSMPTQTSYLMVTTPATTTNTADTILRSLTDAVPLS

SEQ ID NO: 1916 - protein, 1066 aa, synthetic construct
  REGION 1..1066: note = SORCS1 (Q8WY21) ECD
GGSCCPSPHPSSAPRSASTPRGFSHQGRPGRAPATPLPLVVRPLFSVAPGDRALSLERARGTGASMAVAARSGRRRRSGADQEKAERGEGASRSPRGVLRDGGQQEPGTRERDPDKATRFRMEELRLTSTTFALTGDSAHNQAMVHWSGHNSSVILILTKLYDYNLGSITESSLWRSTDYGTTYEKLNDKVGLKTILSYLYVCPTNKRKIMLLTDPEIESSLLISSDEGATYQKYRLNFYIQSLLFHPKQEDWILAYSQDQKLYSSAEFGRRWQLIQEGVVPNRFYWSVMGSNKEPDLVHLEARTVDGHSHYLTCRMQNCTEANRNQPFPGYIDPDSLIVQDHYVFVQLTSGGRPHYYVSYRRNAFAQMKLPKYALPKDMHVISTDENQVFAAVQEWNQNDTYNLYISDTRGVYFTLALENVQSSRGPEGNIMIDLYEVAGIKGMFLANKKIDNQVKTFITYNKGRDWRLLQAPDTDLRGDPVHCLLPYCSLHLHLKVSENPYTSGIIASKDTAPSIIVASGNIGSELSDTDISMFVSSDAGNTWRQIFEEEHSVLYLDQGGVLVAMKHTSLPIRHLWLSFDEGRSWSKYSFTSIPLFVDGVLGEPGEETLIMTVFGHFSHRSEWQLVKVDYKSIFDRRCAEEDYRPWQLHSQGEACIMGAKRIYKKRKSERKCMQGKYAGAMESEPCVCTEADFDCDYGYERHSNGQCLPAFWFNPSSLSKDCSLGQSYLNSTGYRKVVSNNCTDGVREQYTAKPQKCPGKAPRGLRIVTADGKLTAEQGHNVTLMVQLEEGDVQRTLIQVDFGDGIAVSYVNLSSMEDGIKHVYQNVGIFRVTVQVDNSLGSDSAVLYLHVTCPLEHVHLSLPFVTTKNKEVNATAVLWPSQVGTLTYVWWYGNNTEPLITLEGSISFRFTSEGMNTITVQVSAGNAILQDTKTIAVYEEFRSLRLSFSPNLDDYNPDIPEWRRDIGRVIKKSLVEATGVPGQHILVAVLPGLPTTAELFVLPYQDPAGENKRSTDDLEQISELLIHTLNQNSVHFELKPGVRVLVHAAHLTAAPLVDLTPTHS

SEQ ID NO: 1917 - protein, 1028 aa, synthetic construct
  REGION 1..1028: note = SORCS2 (Q96PQ0) ECD
RSPEPGRLGPHAQLTRVPRSPPAGRAEPGGGEDRQARGTEPGAPGPSPGPAPGPGEDGAPAAGYRRWERAAPLAGVASRAQVSLISTSFVLKGDATHNQAMVHWTGENSSVILILTKYYHADMGKVLESSLWRSSDFGTSYTKLTLQPGVTTVIDNFYICPTNKRKVILVSSSLSDRDQSLFLSADEGATFQKQPIPFFVETLIFHPKEEDKVLAYTKESKLYVSSDLGKKWTLLQERVTKDHVFWSVSGVDADPDLVHVEAQDLGGDFRYVTCAIHNCSEKMLTAPFAGPIDHGSLTVQDDYIFFKATSANQTKYYVSYRRNEFVLMKLPKYALPKDLQIISTDESQVFVAVQEWYQMDTYNLYQSDPRGVRYALVLQDVRSSRQAEESVLIDILEVRGVKGVFLANQKIDGKVMTLITYNKGRDWDYLRPPSMDMNGKPTNCKPPDCHLHLHLRWADNPYVSGTVHTKDTAPGLIMGAGNLGSQLVEYKEEMYITSDCGHTWRQVFEEEHHILYLDHGGVIVAIKDTSIPLKILKFSVDEGLTWSTHNFTSTSVFVDGLLSEPGDETLVMTVFGHISFRSDWELVKVDFRPSFSRQCGEEDYSSWELSNLQGDRCIMGQQRSFRKRKSTSWCIKGRSFTSALTSRVCECRDSDFLCDYGFERSSSSESSTNKCSANFWFNPLSPPDDCALGQTYTSSLGYRKVVSNVCEGGVDMQQSQVQLQCPLTPPRGLQVSIQGEAVAVRPGEDVLFVVRQEQGDVLTTKYQVDLGDGFKAMYVNLTLTGEPIRHRYESPGIYRVSVRAENTAGHDEAVLFVQVNSPLQALYLEVVPVIGLNQEVNLTAVLLPLNPNLTVFYWWIGHSLQPLLSLDNSVTTRFSDTGDVRVTVQAACGNSVLQDSRVLRVLDQFQVMPLQFSKELDAYNPNTPEWREDVGLVVTRLLSKETSVPQELLVTVVKPGLPTLADLYVLLPPPRPTRKRSLSSDKRLAAIQQVLNAQKISFLLRGGVRVLVALRDTGTGAEQLGGGG

SEQ ID NO: 1918 - protein, 1092 aa, synthetic construct
  REGION 1..1092: note = SORCS3 (Q9UPU3) ECD
EITWDATGGPGRPAAPASRPPALSPLSPRAVASQWPEELASARRAAVLGRRAGPELLPQQGGGRGGEMQVEAGGTSPAGERRGRGIPAPAKLGGARRSRRAQPPITQERGDAWATAPADGSRGSRPLAKGSREEVKAPRAGGSAAEDLRLPSTSFALTGDSAHNQAMVHWSGHNSSVILILTKLYDFNLGSVTESSLWRSTDYGTTYEKLNDKVGLKTVLSYLYVNPTNKRKIMLLSDPEMESSILISSDEGATYQKYRLTFYIQSLLFHPKQEDWVLAYSLDQKLYSSMDFGRRWQLMHERITPNRFYWSVAGLDKEADLVHMEVRTTDGYAHYLTCRIQECAETTRSGPFARSIDISSLVVQDEYIFIQVTTSGRASYYVSYRREAFAQIKLPKYSLPKDMHIISTDENQVFAAVQEWNQNDTYNLYISDTRGIYFTLAMENIKSSRGLMGNIIIELYEVAGIKGIFLANKKVDDQVKTYITYNKGRDWRLLQAPDVDLRGSPVHCLLPFCSLHLHLQLSENPYSSGRISSKETAPGLVVATGNIGPELSYTDIGVFISSDGGNTWRQIFDEEYNVWFLDWGGALVAMKHTPLPVRHLWVSFDEGHSWDKYGFTSVPLFVDGALVEAGMETHIMTVFGHFSLRSEWQLVKVDYKSIFSRHCTKEDYQTWHLLNQGEPCVMGERKIFKKRKPGAQCALGRDHSGSVVSEPCVCANWDFECDYGYERHGESQCVPAFWYNPASPSKDCSLGQSYLNSTGYRRIVSNNCTDGLREKYTAKAQMCPGKAPRGLHVVTTDGRLVAEQGHNATFIILMEEGDLQRTNIQLDFGDGIAVSYANFSPIEDGIKHVYKSAGIFQVTAYAENNLGSDTAVLFLHVVCPVEHVHLRVPFVAIRNKEVNISAVVWPSQLGTLTYFWWFGNSTKPLITLDSSISFTFLAEGTDTITVQVAAGNALIQDTKEIAVHEYFQSQLLSFSPNLDYHNPDIPEWRKDIGNVIKRALVKVTSVPEDQILIAVFPGLPTSAELFILPPKNLTERRKGNEGDLEQIVETLFNALNQNLVQFELKPGVQVIVYVTQLTLAPLVDSSAGHSSS

SEQ ID NO: 1919 - protein, 2056 aa, synthetic construct
  REGION 1..2056: note = SORL1 (Q92673) ECD
SAALQPEPIKVYGQVSLNDSHNQMVVHWAGEKSNVIVALARDSLALARPKSSDVYVSYDYGKSFKKISDKLNFGLGNRSEAVIAQFYHSPADNKRYIFADAYAQYLWITFDFCNTLQGFSIPFRAADLLLHSKASNLLLGFDRSHPNKQLWKSDDFGQTWIMIQEHVKSFSWGIDPYDKPNTIYIERHEPSGYSTVFRSTDFFQSRENQEVILEEVRDFQLRDKYMFATKVVHLLGSEQQSSVQLWVSFGRKPMRAAQFVTRHPINEYYIADASEDQVFVCVSHSNNRTNLYISEAEGLKFSLSLENVLYYSPGGAGSDTLVRYFANEPFADFHRVEGLQGVYIATLINGSMNEENMRSVITFDKGGTWEFLQAPAFTGYGEKINCELSQGCSLHLAQRLSQLLNLQLRRMPILSKESAPGLIIATGSVGKNLASKTNVYISSSAGARWREALPGPHYYTWGDHGGIITAIAQGMETNELKYSTNEGETWKTFIFSEKPVFVYGLLTEPGEKSTVFTIFGSNKENVHSWLILQVNATDALGVPCTENDYKLWSPSDERGNECLLGHKTVFKRRTPHATCFNGEDFDRPVVVSNCSCTREDYECDFGFKMSEDLSLEVCVPDPEFSGKSYSPPVPCPVGSTYRRTRGYRKISGDTCSGGDVEARLEGELVPCPLAEENEFILYAVRKSIYRYDLASGATEQLPLTGLRAAVALDFDYEHNCLYWSDLALDVIQRLCLNGSTGQEVIINSGLETVEALAFEPLSQLLYWVDAGFKKIEVANPDGDFRLTIVNSSVLDRPRALVLVPQEGVMFWTDWGDLKPGIYRSNMDGSAAYHLVSEDVKWPNGISVDDQWIYWTDAYLECIERITFSGQQRSVILDNLPHPYAIAVFKNEIYWDDWSQLSIFRASKYSGSQMEILANQLTGLMDMKIFYKGKNTGSNACVPRPCSLLCLPKANNSRSCRCPEDVSSSVLPSGDLMCDCPQGYQLKNNTCVKQENTCLRNQYRCSNGNCINSIWWCDFDNDCGDMSDERNCPTTICDLDTQFRCQESGTCIPLSYKCDLEDDCGDNSDESHCEMHQCRSDEYNCSSGMCIRSSWVCDGDNDCRDWSDEANCTAIYHTCEASNFQCRNGHCIPQRWACDGDTDCQDGSDEDPVNCEKKCNGFRCPNGTCIPSSKHCDGLRDCSDGSDEQHCEPLCTHFMDFVCKNRQQCLFHSMVCDGIIQCRDGSDEDAAFAGCSQDPEFHKVCDEFGFQCQNGVCISLIWKCDGMDDCGDYSDEANCENPTEAPNCSRYFQFRCENGHCIPNRWKCDRENDCGDWSDEKDCGDSHILPFSTPGPSTCLPNYYRCSSGTCVMDTWVCDGYRDCADGSDEEACPLLANVTAASTPTQLGRCDRFEFECHQPKTCIPNWKRCDGHQDCQDGRDEANCPTHSTLTCMSREFQCEDGEACIVLSERCDGFLDCSDESDEKACSDELTVYKVQNLQWTADFSGDVTLTWMRPKKMPSASCVYNVYYRVVGESIWKTLETHSNKTNTVLKVLKPDTTYQVKVQVQCLSKAHNTNDFVTLRTPEGLPDAPRNLQLSLPREAEGVIVGHWAPPIHTHGLIREYIVEYSRSGSKMWASQRAASNFTEIKNLLVNTLYTVRVAAVTSRGIGNWSDSKSITTIKGKVIPPPDIHIDSYGENYLSFTLTMESDIKVNGYVVNLFWAFDTHKQERRTLNFRGSILSHKVGNLTAHTSYEISAWAKTDLGDSPLAFEHVMTRGVRPPAPSLKAKAINQTAVECTWTGPRNVVYGIFYATSFLDLYRNPKSLTTSLHNKTVIVSKDEQYLFLVRVVVPYQGPSSDYVVVKMIPDSRLPPRHLHVVHTGKTSVVIKWESPYDSPDQDLLYAVAVKDLIRKTDRSYKVKSRNSTVEYTLNKLEPGGKYHIIVQLGNMSKDSSIKITTVSLSAPDALKIITENDHVLLFWKSLALKEKHFNESRGYEIHMFDSAMNITAYLGNTTDNFFKISNLKMGHNYTFTVQARCLFGNQICGEPAILLYDELGSGADASATQAARSTDVA

SEQ ID NO: 1920 - protein, 678 aa, synthetic construct
  REGION 1..678: note = SORT1 (Q99523) ECD
SAPGEDEECGRVRDFVAKLANNTHQHVFDDLRGSVSLSWVGDSTGVILVLTTFHVPLVIMTFGQSKLYRSEDYGKNFKDITDLINNTFIRTEFGMAIGPENSGKVVLTAEVSGGSRGGRIFRSSDFAKNFVQTDLPFHPLTQMMYSPQNSDYLLALSTENGLWVSKNFGGKWEEIHKAVCLAKWGSDNTIFFTTYANGSCKADLGALELWRTSDLGKSFKTIGVKIYSFGLGGRFLFASVMADKDTTRRIHVSTDQGDTWSMAQLPSVGQEQFYSILAANDDMVFMHVDEPGDTGFGTIFTSDDRGIVYSKSLDRHLYTTTGGETDFTNVTSLRGVYITSVLSEDNSIQTMITFDQGGRWTHLRKPENSECDATAKNKNECSLHIHASYSISQKLNVPMAPLSEPNAVGIVIAHGSVGDAISVMVPDVYISDDGGYSWTKMLEGPHYYTILDSGGIIVAIEHSSRPINVIKFSTDEGQCWQTYTFTRDPIYFTGLASEPGARSMNISIWGFTESFLTSQWVSYTIDFKDILERNCEEKDYTIWLAHSTDPEDYEDGCILGYKEQFLRLRKSSVCQNGRDYVVTKQPSICLCSLEDFLCDFGYYRPENDSKCVEQPELKGHDLEFCLYGREEHLTTNGYRKIPGDKCQGGVNPVREVKDLKKKCTSNFLSPEKQNSKSN

SEQ ID NO: 1921 - protein, 192 aa, synthetic construct
  REGION 1..192: note = SPACA1 (Q9HBV2) ECD
TNVTAAVQDAGLAHEGEGEEETENNDSETAENYAPPETEDVSNRNVVKEVEFGMCTVTCGIGVREVILTNGCPGGESKCVVRVEECRGPTDCGWGKPISESLESVRLACIHTSPLNRFKYMWKLLRQDQQSIILVNDSAILEVRKESHPLAFECDTLDNNEIVATIKFTVYTSSELQMRRSSLPATDAALIF

SEQ ID NO: 1922 - protein, 170 aa, synthetic construct
  REGION 1..170: note = SPINT2 (O43291) ECD
ADRERSIHDFCLVSKVVGRCRASMPRWWYNVTDGSCQLFVYGGCDGNSNNYLTKEECLKKCATVTENATGDLATSRNAADSSVPSAPRRQDSEDHSSDMFNYEEYCTANAVTGPCRASFPRWYFDVERNSCNNFIYGGCRGNKNSYRSEEACMLRCFRQQENPPLPLGSK

SEQ ID NO: 1923 - protein, 234 aa, synthetic construct
  REGION 1..234: note = SPN (P16150) ECD
STTAVQTPTSGEPLVSTSEPLSSKMYTTSITSDPKADSTGDQTSALPPSTSINEGSPLWTSIGASTGSPLPEPTTYQEVSIKMSSVPQETPHATSHPAVPITANSLGSHTVTGGTITTNSPETSSRTSGAPVTTAASSLETSRGTSGPPLTMATVSLETSKGTSGPPVTMATDSLETSTGTTGPPVTMTTGSLEPSSGASGPQVSSVKLSTMMSPTTSTNASTVPFRNPDENSR

SEQ ID NO: 1924 - protein, 189 aa, synthetic construct
  REGION 1..189: note = SSR1 (P43307) ECD
VLFRGGPRGLLAVAQDLTEDEETVEDSIIEDEDDEAEVEEDEPTDLVEDKEEEDVSGEPEASPSADTTILFVKGEDFPANNIVKFLVGFTNKGTEDFIVESLDASFRYPQDYQFYIQNFTALPLNTVVPPQRQATFEYSFIPAEPMGGRPFGLVINLNYKDLNGNVFQDAVFNQTVTVIEREDGLDGET

SEQ ID NO: 1925 - protein, 2453 aa, synthetic construct
  REGION 1..2453: note = STAB1 (Q9NY15) ECD
QVLFKGCDVKTTFVTHVPCTSCAAIKKQTCPSGWLRELPDQITQDCRYEVQLGGSMVSMSGCRRKCRKQVVQKACCPGYWGSRCHECPGGAETPCNGHGTCLDGMDRNGTCVCQENFRGSACQECQDPNRFGPDCQSVCSCVHGVCNHGPRGDGSCLCFAGYTGPHCDQELPVCQELRCPQNTQCSAEAPSCRCLPGYTQQGSECRAPNPCWPSPCSLLAQCSVSPKGQAQCHCPENYHGDGMVCLPKDPCTDNLGGCPSNSTLCVYQKPGQAFCTCRPGLVSINSNASAGCFAFCSPFSCDRSATCQVTADGKTSCVCRESEVGDGRACYGHLLHEVQKATQTGRVFLQLRVAVAMMDQGCREILTTAGPFTVLVPSVSSFSSRTMNASLAQQLCRQHIIAGQHILEDTRTQQTRRWWTLAGQEITVTFNQFTKYSYKYKDQPQQTFNIYKANNIAANGVFHVVTGLRWQAPSGTPGDPKRTIGQILASTEAFSRFETILENCGLPSILDGPGPFTVFAPSNEAVDSLRDGRLIYLFTAGLSKLQELVRYHIYNHGQLTVEKLISKGRILTMANQVLAVNISEEGRILLGPEGVPLQRVDVMAANGVIHMLDGILLPPTILPILPKHCSEEQHKIVAGSCVDCQALNTSTCPPNSVKLDIFPKECVYIHDPTGLNVLKKGCASYCNQTIMEQGCCKGFFGPDCTQCPGGFSNPCYGKGNCSDGIQGNGACLCFPDYKGIACHICSNPNKHGEQCQEDCGCVHGLCDNRPGSGGVCQQGTCAPGFSGRFCNESMGDCGPTGLAQHCHLHARCVSQEGVARCRCLDGFEGDGFSCTPSNPCSHPDRGGCSENAECVPGSLGTHHCTCHKGWSGDGRVCVAIDECELDMRGGCHTDALCSYVGPGQSRCTCKLGFAGDGYQCSPIDPCRAGNGGCHGLATCRAVGGGQRVCTCPPGFGGDGFSCYGDIFRELEANAHFSIFYQWLKSAGITLPADRRVTALVPSEAAVRQLSPEDRAFWLQPRTLPNLVRAHFLQGALFEEELARLGGQEVATLNPTTRWEIRNISGRVWVQNASVDVADLLATNGVLHILSQVLLPPRGDVPGGQGLLQQLDLVPAFSLFRELLQHHGLVPQIEAATAYTIFVPTNRSLEAQGNSSHLDADTVRHHVVLGEALSMETLRKGGHRNSLLGPAHWIVFYNHSGQPEVNHVPLEGPMLEAPGRSLIGLSGVLTVGSSRCLHSHAEALREKCVNCTRRFRCTQGFQLQDTPRKSCVYRSGFSFSRGCSYTCAKKIQVPDCCPGFFGTLCEPCPGGLGGVCSGHGQCQDRFLGSGECHCHEGFHGTACEVCELGRYGPNCTGVCDCAHGLCQEGLQGDGSCVCNVGWQGLRCDQKITSPQCPRKCDPNANCVQDSAGASTCACAAGYSGNGIFCSEVDPCAHGHGGCSPHANCTKVAPGQRTCTCQDGYMGDGELCQEINSCLIHHGGCHIHAECIPTGPQQVSCSCREGYSGDGIRTCELLDPCSKNNGGCSPYATCKSTGDGQRTCTCDTAHTVGDGLTCRARVGLELLRDKHASFFSLRLLEYKELKGDGPFTIFVPHADLMSNLSQDELARIRAHRQLVFRYHVVGCRRLRSEDLLEQGYATALSGHPLRFSEREGSIYLNDFARVVSSDHEAVNGILHFIDRVLLPPEALHWEPDDAPIPRRNVTAAAQGFGYKIFSGLLKVAGLLPLLREASHRPFTMLWPTDAAFRALPPDRQAWLYHEDHRDKLAAILRGHMIRNVEALASDLPNLGPLRTMHGTPISFSCSRTRAGELMVGEDDARIVQRHLPFEGGLAYGIDQLLEPPGLGARCDHFETRPLRLNTCSICGLEPPCPEGSQEQGSPEACWRFYPKFWTSPPLHSLGLRSVWVHPSLWGRPQGLGRGCHRNCVTTTWKPSCCPGHYGSECQACPGGPSSPCSDRGVCMDGMSGSGQCLCRSGFAGTACELCAPGAFGPHCQACRCTVHGRCDEGLGGSGSCFCDEGWTGPRCEVQLELQPVCTPPCAPEAVCRAGNSCECSLGYEGDGRVCTVADLCQDGHGGCSEHANCSQVGTMVTCTCLPDYEGDGWSCRARNPCTDGHRGGCSEHANCLSTGLNTRRCECHAGYVGDGLQCLEESEPPVDRCLGQPPPCHSDAMCTDLHFQEKRAGVFHLQATSGPYGLNFSEAEAACEAQGAVLASFPQLSAAQQLGFHLCLMGWLANGSTAHPVVFPVADCGNGRVGIVSLGARKNLSERWDAYCFRVQDVACRCRNGFVGDGISTCNGKLLDVLAATANFSTFYGMLLGYANATQRGLDFLDFLDDELTYKTLFVPVNEGFVDNMTLSGPDLELHASNATLLSANASQGKLLPAHSGLSLIISDAGPDNSSWAPVAPGTVVVSRIIVWDIMAFNGIIHALASPLLAPPQPQAVLAPEAPPVAA

SEQ ID NO: 1926 - protein, 2439 aa, synthetic construct
  REGION 1..2439: note = STAB2 (Q8WWQ8) ECD
SPAETTGQARRCDRKSLLTIRTECRSCALNLGVKCPDGYTMITSGSVGVRDCRYTFEVRTYSLSLPGCRHICRKDYLQPRCCPGRWGPDCIECPGGAGSPCNGRGSCAEGMEGNGTCSCQEGFGGTACETCADDNLFGPSCSSVCNCVHGVCNSGLDGDGTCECYSAYTGPKCDKPIPECAALLCPENSRCSPSTEDENKLECKCLPNYRGDGKYCDPINPCLRKICHPHAHCTYLGPNRHSCTCQEGYRGDGQVCLPVDPCQINFGNCPTKSTVCKYDGPGQSHCECKEHYQNFVPGVGCSMTDICKSDNPCHRNANCTTVAPGRTECICQKGYVGDGLTCYGNIMERLRELNTEPRGKWQGRLTSFISLLDKAYAWPLSKLGPFTVLLPTDKGLKGFNVNELLVDNKAAQYFVKLHIIAGQMNIEYMNNTDMFYTLTGKSGEIFNSDKDNQIKLKLHGGKKKVKIIQGDIIASNGLLHILDRAMDKLEPTFESNNEQTIMTMLQPRYSKFRSLLEETNLGHALDEDGVGGPYTIFVPNNEALNNMKDGTLDYLLSPEGSRKLLELVRYHIVPFTQLEVATLISTPHIRSMANQLIQFNTTDNGQILANDVAMEEIEITAKNGRIYTLTGVLIPPSIVPILPHRCDETKREMKLGTCVSCSLVYWSRCPANSEPTALFTHRCVYSGRFGSLKSGCARYCNATVKIPKCCKGFYGPDCNQCPGGFSNPCSGNGQCADSLGGNGTCICEEGFQGSQCQFCSDPNKYGPRCNKKCLCVHGTCNNRIDSDGACLTGTCRDGSAGRLCDKQTSACGPYVQFCHIHATCEYSNGTASCICKAGYEGDGTLCSEMDPCTGLTPGGCSRNAECIKTGTGTHTCVCQQGWTGNGRDCSEINNCLLPSAGGCHDNASCLYVGPGQNECECKKGFRGNGIDCEPITSCLEQTGKCHPLASCQSTSSGVWSCVCQEGYEGDGFLCYGNAAVELSFLSEAAIFNRWINNASLQPTLSATSNLTVLVPSQQATEDMDQDEKSFWLSQSNIPALIKYHMLLGTYRVADLQTLSSSDMLATSLQGNFLHLAKVDGNITIEGASIVDGDNAATNGVIHIINKVLVPQRRLTGSLPNLLMRLEQMPDYSIFRGYIIQYNLANAIEAADAYTVFAPNNNAIENYIREKKVLSLEEDVLRYHVVLEEKLLKNDLHNGMHRETMLGFSYFLSFFLHNDQLYVNEAPINYTNVATDKGVIHGLGKVLEIQKNRCDNNDTTIIRGRCRTCSSELTCPFGTKSLGNEKRRCIYTSYFMGRRTLFIGCQPKCVRTVITRECCAGFFGPQCQPCPGNAQNVCFGNGICLDGVNGTGVCECGEGFSGTACETCTEGKYGIHCDQACSCVHGRCNQGPLGDGSCDCDVGWRGVHCDNATTEDNCNGTCHTSANCLTNSDGTASCKCAAGFQGNGTICTAINACEISNGGCSAKADCKRTTPGRRVCTCKAGYTGDGIVCLEINPCLENHGGCDKNAECTQTGPNQAACNCLPAYTGDGKVCTLINVCLTKNGGCSEFAICNHTGQVERTCTCKPNYIGDGFTCRGSIYQELPKNPKTSQYFFQLQEHFVKDLVGPGPFTVFAPLSAAFDEEARVKDWDKYGLMPQVLRYHVVACHQLLLENLKLISNATSLQGEPIVISVSQSTVYINNKAKIISSDIISTNGIVHIIDKLLSPKNLLITPKDNSGRILQNLTTLATNNGYIKFSNLIQDSGLLSVITDPIHTPVTLFWPTDQALHALPAEQQDFLFNQDNKDKLKEYLKFHVIRDAKVLAVDLPTSTAWKTLQGSELSVKCGAGRDIGDLFLNGQTCRIVQRELLFDLGVAYGIDCLLIDPTLGGRCDTFTTFDASGECGSCVNTPSCPRWSKPKGVKQKCLYNLPFKRNLEGCRERCSLVIQIPRCCKGYFGRDCQACPGGPDAPCNNRGVCLDQYSATGECKCNTGFNGTACEMCWPGRFGPDCLPCGCSDHGQCDDGITGSGQCLCETGWTGPSCDTQAVLPAVCTPPCSAHATCKENNTCECNLDYEGDGITCTVVDFCKQDNGGCAKVARCSQKGTKVSCSCQKGYKGDGHSCTEIDPCADGLNGGCHEHATCKMTGPGKHKCECKSHYVGDGLNCEPEQLPIDRCLQDNGQCHADAKCVDLHFQDTTVGVFHLRSPLGQYKLTFDKAREACANEAATMATYNQLSYAQKAKYHLCSAGWLETGRVAYPTAFASQNCGSGVVGIVDYGPRPNKSEMWDVFCYRMKDVNCTCKVGYVGDGFSCSGNLLQVLMSFPSLTNFLTEVLAYSNSSARGRAFLEHLTDLSIRGTLFVPQNSGLGENETLSGRDIEHHLANVSMFFYNDLVNGTTLQTRLGSKLLITASQDPLQPTETRFVDGRAILQWDIFASNGIIHVISRPLKAPPAPVTLTHT

SEQ ID NO: 1927 - protein, 191 aa, synthetic construct
  REGION 1..191: note = STIM1 (Q13586) ECD
LSHSHSEKATGTSSGANSEESTAAEFCRIDKPLCHSEDEKLSFEAVRNIHKLMDDDANGDVDVEESDEFLREDLNYHDPTVKHSTFHGEDKLISVEDLWKAWKSSEVYNWTVDEVVQWLITYVELPQYEETFRKLQLSGHAMPRLAVTNTTMTGTVLKMTDRSHRQKLQLKALDTVLFGPPLLTRHNHLKD

SEQ ID NO: 1928 - protein, 981 aa, synthetic construct
  REGION 1..981: note = SUCO (Q9UBS9) ECD
KESSSASASSYYSQDDNCALENEDVQFQKKDEREGPINAESLGKSGSNLPISPKEHKLKDDSIVDVQNTESKKLSPPVVETLPTVDLHEESSNAVVDSETVENISSSSTSEITPISKLDEIEKSGTIPIAKPSETEQSETDCDVGEALDASAPIEQPSFVSPPDSLVGQHIENVSSSHGKGKITKSEFESKVSASEQGGGDPKSALNASDNLKNESSDYTKPGDIDPTSVASPKDPEDIPTFDEWKKKVMEVEKEKSQSMHASSNGGSHATKKVQKNRNNYASVECGAKILAANPEAKSTSAILIENMDLYMLNPCSTKIWFVIELCEPIQVKQLDIANYELFSSTPKDFLVSISDRYPTNKWIKLGTFHGRDERNVQSFPLDEQMYAKYVKMFIKYIKVELLSHFGSEHFCPLSLIRVFGTSMVEEYEEIADSQYHSERQELFDEDYDYPLDYNTGEDKSSKNLLGSATNAILNMVNIAANILGAKTEDLTEGNKSISENATATAAPKMPESTPVSTPVPSPEYVTTEVHTHDMEPSTPDTPKESPIVQLVQEEEEEASPSTVTLLGSGEQEDESSPWFESETQIFCSELTTICCISSFSEYIYKWCSVRVALYRQRSRTALSKGKDYLVLAQPPLLLPAESVDVSVLQPLSGELENTNIEREAETVVLGDLSSSMHQDDLVNHTVDAVELEPSHSQTLSQSLLLDITPEINPLPKIEVSESVEYEAGHIPSPVIPQESSVEIDNETEQKSESFSSIEKPSITYETNKVNELMDNIIKEDVNSMQIFTKLSETIVPPINTATVPDNEDGEAKMNIADTAKQTLISVVDSSSLPEVKEEEQSPEDALLRGLQRTATDFYAELQNSTDLGYANGNLVHGSNQKESVFMRLNNRIKALEVNMSLSGRYLEELSQRYRKQMEEMQKAFNKTIVKLQNTSRIAEEQDQRQTEAIQLLQAQLTNMTQLVSNLSATVAELKREVSDR

SEQ ID NO: 1929 - protein, 692 aa, synthetic construct
  REGION 1..692: note = SUSD1 (Q6UWL2) ECD
APGPDGLDVCATCHEHATCQQREGKKICICNYGFVGNGRTQCVDKNECQFGATLVCGNHTSCHNTPGGFYCICLEGYRATNNNKTFIPNDGTFCTDIDECEVSGLCRHGGRCVNTHGSFECYCMDGYLPRNGPEPFHPTTDATSCTEIDCGTPPEVPDGYIIGNYTSSLGSQVRYACREGFFSVPEDTVSSCTGLGTWESPKLHCQEINCGNPPEMRHAILVGNHSSRLGGVARYVCQEGFESPGGKITSVCTEKGTWRESTLTCTEILTKINDVSLFNDTCVRWQINSRRINPKISYVISIKGQRLDPMESVREETVNLTTDSRTPEVCLALYPGTNYTVNISTAPPRRSMPAVIGFQTAEVDLLEDDGSFNISIFNETCLKLNRRSRKVGSEHMYQFTVLGQRWYLANFSHATSFNFTTREQVPVVCLDLYPTTDYTVNVTLLRSPKRHSVQITIATPPAVKQTISNISGFNETCLRWRSIKTADMEEMYLFHIWGQRWYQKEFAQEMTFNISSSSRDPEVCLDLRPGTNYNVSLRALSSELPVVISLTTQITEPPLPEVEFFTVHRGPLPRLRLRKAKEKNGPISSYQVLVLPLALQSTFSCDSEGASSFFSNASDADGYVAAELLAKDVPDDAMEIPIGDRLYYGEYYNAPLKRGSDYCIILRITSEWNKVRRHSCAVWAQVKDSSLM

SEQ ID NO: 1930 - protein, 758 aa, synthetic construct
  REGION 1..758: note = SUSD2 (Q9UGT4) ECD
QESCSMRCGALDGPCSCHPTCSGLGTCCLDFRDFCLEILPYSGSMMGGKDFVVRHFKMSSPTDASVICRFKDSIQTLGHVDSSGQVHCVSPLLYESGRIPFTVSLDNGHSFPRAGTWLAVHPNKVSMMEKSELVNETRWQYYGTANTSGNLSLTWHVKSLPTQTITIELWGYEETGMPYSQEWTAKWSYLYPLATHIPNSGSFTFTPKPAPPSYQRWRVGALRIIDSKNYAGQKDVQALWTNDHALAWHLSDDFREDPVAWARTQCQAWEELEDQLPNFLEELPDCPCTLTQARADSGRFFTDYGCDMEQGSVCTYHPGAVHCVRSVQASLRYGSGQQCCYTADGTQLLTADSSGGSTPDRGHDWGAPPFRTPPRVPSMSHWLYDVLSFYYCCLWAPDCPRYMQRRPSNDCRNYRPPRLASAFGDPHFVTFDGTNFTFNGRGEYVLLEAALTDLRVQARAQPGTMSNGTETRGTGLTAVAVQEGNSDVVEVRLANRTGGLEVLLNQEVLSFTEQSWMDLKGMFLSVAAGDRVSIMLASGAGLEVSVQGPFLSVSVLLPEKFLTHTHGLLGTLNNDPTDDFTLHSGRVLPPGTSPQELFLFGANWTVHNASSLLTYDSWFLVHNFLYQPKHDPTFEPLFPSETTLNPSLAQEAAKLCGDDHFCNFDVAATGSLSTGTATRVAHQLHQRRMQSLQPVVSCGWLAPPPNGQKEGNRYLAGSTIYFHCDNGYSLAGAETSTCQADGTWSSPTPKCQPGRSYA

SEQ ID NO: 1931 - protein, 278 aa, synthetic construct
  REGION 1..278: note = SUSD4 (Q5VX71) ECD
FGPAQLTGGFDDLQVCADPGIPENGFRTPSGGVFFEGSVARFHCQDGFKLKGATKRLCLKHFNGTLGWIPSDNSICVQEDCRIPQIEDAEIHNKTYRHGEKLIITCHEGFKIRYPDLHNMVSLCRDDGTWNNLPICQGCLRPLASSNGYVNISELQTSFPVGTVISYRCFPGFKLDGSAYLECLQNLIWSSSPPRCLALEVCPLPPMVSHGDFVCHPRPCERYNHGTVVEFYCDPGYSLTSDYKYITCQYGEWFPSYQVYCIKSEQTWPSTHETLLTT

SEQ ID NO: 1932 - protein, 539 aa, synthetic construct
  REGION 1..539: note = SUSD5 (O60279) ECD
ADGKFFVLESQNGSQGLQLEAARLSCKSRGAHLASADELRRVVQDCSFAVCTTGWLADGTLGTTVCSKGSGEQQIMRAVDVRIESNPVPGGTYSALCIKDEEKPCGDPPSFPHTILQGRTGLEMGDELLYVCAPGHIMGHRETAFTLLCNSCGEWYGLVQACGKDEAEAHIDYEDNFPDDRSVSFRELMEDSRTEADEDRGQGDSSEEAPKQDRLVSISVGRENIARDKVFVPTTGLPGAGSSVPADSPGSRLLQKHLFWFPAEAFHKPGLEKEVDDDTKKQFSAGDNHSGVKLVPGEPETKVIYGNTDGPSGPFVGKNDSKAGDPVVSSSDESWLDGYPVTEGAWRKTEAEEEEDGDRGDGSVGLDENVLVTPDQPILVEVKKPKSSTLTPSEGMTHSSVLPSQMLDVEALALRPVNASETEGIGDGDLTKYQSTLPWRFITEESPMATLSYELTSSTLEILTVNTVKQTPNHIPSTIMATTQPPVETTVPEIQDSFPYLLSEDFFGQEGPGPGASEELHPTLESCVGDGCPGLSRGP

SEQ ID NO: 1933 - protein, 248 aa, synthetic construct
  REGION 1..248: note = TACSTD2 (P09758) ECD
HTAAQDNCTCPTNKMTVCSPDGPGGRCQCRALGSGMAVDCSTLTSKCLLLKARMSAPKNARTLVRPSEHALVDNDGLYDPDCDPEGRFKARQCNQTSVCWCVNSVGVRRTDKGDLSLRCDELVRTHHILIDLRHRPTAGAFNHSDLDAELRRLFRERYRLHPKFVAAVHYEQPTIQIELRQNTSQKAAGDVDIGDAAYYFERDIKGESLFQGRGGLDLRVRGEPLQVERTLIYYLDEIPPKFSMKRLT

SEQ ID NO: 1934 - protein, 220 aa, synthetic construct
  REGION 1..220: note = TARM1 (B6A8C7) ECD
QGDTRGDGSLPKPSLSAWPSSVVPANSNVTLRCWTPARGVSFVLRKGGIILESPKPLDSTEGAAEFHLNNLKVRNAGEYTCEYYRKASPHILSQRSDVLLLLVTGHLSKPFLRTYQRGTVTAGGRVTLQCQKRDQLFVPIMFALLKAGTPSPIQLQSPAGKEIDFSLVDVTAGDAGNYSCMYYQTKSPFWASEPSDQLEILVTVPPGTTSSNYSLGNFVR

SEQ ID NO: 1935 - protein, 643 aa, synthetic construct
  REGION 1..643: note = TCTN2 (Q96GX1) ECD
DLAFIPPFIRMSGPAVSASLVGDTEGVTVSLAVLQDEAGILPIPTCGVLNNETEDWSVTVIPGAKVLEVTVRWKRGLDWCSSNETDSFSESPCILQTLLVSASHNSSCSAHLLIQVEIYANSSLTHNASENVTVIPNQVYQPLGPCPCNLTAGACDVRCCCDQECSSNLTTLFRRSCFTGVFGGDVNPPFDQLCSAGTTTRGVPDWFPFLCVQSPLANTPFLGYFYHGAVSPKQDSSFEVYVDTDAKDFADFGYKQGDPIMTVKKAYFTIPQVSLAGQCMQNAPVAFLHNFDVKCVTNLELYQERDGIINAKIKNVALGGIVTPKVIYEEATDLDKFITNTETPLNNGSTPRIVNVEEHYIFKWNNNTISEINVKIFRAEINAHQKGIMTQRFVVKFLSYNSGNEEELSGNPGYQLGKPVRALNINRMNNVTTLHLWQSAGRGLCTSATFKPILFGENVLSGCLLEVGINENCTQLRENAVERLDSLIQATHVAMRGNSDYADLSDGWLEIIRVDAPDPGADPLASSVNGMCLDIPAHLSIRILISDAGAVEGITQQEILGVETRFSSVNWQYQCGLTCEHKADLLPISASVQFIKIPAQLPHPLTRFQINYTEYDCNRNEVCWPQLLYPWTQYYQGELHSQC

SEQ ID NO: 1936 - protein, 559 aa, synthetic construct
  REGION 1..559: note = TCTN3 (Q6NUS6) ECD
QPSSSPSGAVPTSLELQRGTDGGTLQSPSEATATRPAVPGLPTVVPTLVTPSAPGNRTVDLFPVLPICVCDLTPGACDINCCCDRDCYLLHPRTVFSFCLPGSVRSSSWVCVDNSVIFRSNSPFPSRVFMDSNGIRQFCVHVNNSNLNYFQKLQKVNATNFQALAAEFGGESFTSTFQTQSPPSFYRAGDPILTYFPKWSVISLLRQPAGVGAGGLCAESNPAGFLESKSTTCTRFFKNLASSCTLDSALNAASYYNFTVLKVPRSMTDPQNMEFQVPVILTSQANAPLLAGNTCQNVVSQVTYEIETNGTFGIQKVSVSLGQTNLTVEPGASLQQHFILRFRAFQQSTAASLTSPRSGNPGYIVGKPLLALTDDISYSMTLLQSQGNGSCSVKRHEVQFGVNAISGCKLRLKKADCSHLQQEIYQTLHGRPRPEYVAIFGNADPAQKGGWTRILNRHCSISAINCTSCCLIPVSLEIQVLWAYVGLLSNPQAHVSGVRFLYQCQSIQDSQQVTEVSLTTLVNFVDITQKPQPPRGQPKMDWKWPFDFFPFKVAFSRGV

SEQ ID NO: 1937 - protein, 726 aa, synthetic construct
  REGION 1..726: note = TEK (Q02763) ECD
AMDLILINSLPLVSDAETSLTCIASGWRPHEPITIGRDFEALMNQHQDPLEVTQDVTREWAKKVVWKREKASKINGAYFCEGRVRGEAIRIRTMKMRQQASFLPATLTMTVDKGDNVNISFKKVLIKEEDAVIYKNGSFIHSVPRHEVPDILEVHLPHAQPQDAGVYSARYIGGNLFTSAFTRLIVRRCEAQKWGPECNHLCTACMNNGVCHEDTGECICPPGFMGRTCEKACELHTFGRTCKERCSGQEGCKSYVFCLPDPYGCSCATGWKGLQCNEACHPGFYGPDCKLRCSCNNGEMCDRFQGCLCSPGWQGLQCEREGIQRMTPKIVDLPDHIEVNSGKFNPICKASGWPLPTNEEMTLVKPDGTVLHPKDFNHTDHFSVAIFTIHRILPPDSGVWVCSVNTVAGMVEKPFNISVKVLPKPLNAPNVIDTGHNFAVINISSEPYFGDGPIKSKKLLYKPVNHYEAWQHIQVTNEIVTLNYLEPRTEYELCVQLVRRGEGGEGHPGPVRRFTTASIGLPPPRGLNLLPKSQTTLNLTWQPIFPSSEDDFYVEVERRSVQKSDQQNIKVPGNLTSVLLNNLHPREQYVVRARVNTKAQGEWSEDLTAWTLSDILPPQPENIKISNITHSSAVISWTILDGYSISSITIRYKVQGKNEDQHVDVKIKNATITQYQLKGLEPETAYQVDIFAENNIGSSNPAFSHELVTLPESQAPADLGGGKMLL

SEQ ID NO: 1938 - protein, 75 aa, synthetic construct
  REGION 1..75: note = TGFA (P01135) ECD
ENSTSPLSADPPVAAAVVSHFNDCPDSHTQFCFHGTCRFLVQEDKPACVCHSGYVGARCEHADLLAVVAASQKKQ

SEQ ID NO: 1939 - protein, 93 aa, synthetic construct
  REGION 1..93: note = TGFBR1 (P36897) ECD
LQCFCHLCTKDNFTCVTDGLCFVSVTETTDKVIHNSMCIAEIDLIPRDRPFVCAPSSKTGSVTTTYCCNQDHCNKIELPTTVKSSPGLGPVEL

SEQ ID NO: 1940 - protein, 144 aa, synthetic construct
  REGION 1..144: note = TGFBR2 (P37173) ECD
TIPPHVQKSVNNDMIVTDNNGAVKFPQLCKFCDVRFSTCDNQKSCMSNCSITSICEKPQEVCVAVWRKNDENITLETVCHDPKLPYHDFILEDAASPKCIMKEKKKPGETFFMCSCSSDECNDNIIFSEEYNTSNPDLLLVIFQ

SEQ ID NO: 1941 - protein, 767 aa, synthetic construct
  REGION 1..767: note = TGFBR3 (Q03167) ECD
GPEPGALCELSPVSASHPVQALMESFTVLSGCASRGTTGLPQEVHVLNLRTAGQGPGQLQREVTLHLNPISSVHIHHKSVVFLLNSPHPLVWHLKTERLATGVSRLFLVSEGSVVQFSSANFSLTAETEERNFPHGNEHLLNWARKEYGAVTSFTELKIARNIYIKVGEDQVFPPKCNIGKNFLSLNYLAEYLQPKAAEGCVMSSQPQNEEVHIIELITPNSNPYSAFQVDITIDIRPSQEDLEVVKNLILILKCKKSVNWVIKSFDVKGSLKIIAPNSIGFGKESERSMTMTKSIRDDIPSTQGNLVKWALDNGYSPITSYTMAPVANRFHLRLENNAEEMGDEEVHTIPPELRILLDPGALPALQNPPIRGGEGQNGGLPFPFPDISRRVWNEEGEDGLPRPKDPVIPSIQLFPGLREPEEVQGSVDIALSVKCDNEKMIVAVEKDSFQASGYSGMDVTLLDPTCKAKMNGTHFVLESPLNGCGTRPRWSALDGVVYYNSIVIQVPALGDSSGWPDGYEDLESGDNGFPGDMDEGDASLFTRPEIVVFNCSLQQVRNPSSFQEQPHGNITFNMELYNTDLFLVPSQGVFSVPENGHVYVEVSVTKAEQELGFAIQTCFISPYSNPDRMSHYTIIENICPKDESVKFYSPKRVHFPIPQADMDKKRFSFVFKPVFNTSLLFLQCELTLCTKMEKHPQKLPKCVPPDEACTSLDASIIWAMMQNKKTFTKPLAVIHHEAESKEKGPSMKEPNPISPPIFHGLDTLTV

SEQ ID NO: 1942 - protein, 360 aa, synthetic construct
  REGION 1..360: note = TGOLN2 (O43493) ECD
ATESVKQEEAGVRPSAGNVSTHPSLSQRPGGSTKSHPEPQTPKDSPSKSSAEAQTPEDTPNKSGAEAKTQKDSSNKSGAEAKTQKGSTSKSGSEAQTTKDSTSKSHPELQTPKDSTGKSGAEAQTPEDSPNRSGAEAKTQKDSPSKSGSEAQTTKDVPNKSGADGQTPKDGSSKSGAEDQTPKDVPNKSGAEKQTPKDGSNKSGAEEQGPIDGPSKSGAEEQTSKDSPNKVVPEQPSRKDHSKPISNPSDNKELPKADTNQLADKGKLSPHAFKTESGEETDLISPPQEEVKSSEPTEDVEPKEAEDDDTGPEEGSPPKEEKEKMSGSASSENREGTLSDSTGSEKDDLYPNGSGNGSAE

SEQ ID NO: 1943 - protein, 497 aa, synthetic construct
  REGION 1..497: note = THBD (P07204) ECD
APAEPQPGGSQCVEHDCFALYPGPATFLNASQICDGLRGHLMTVRSSVAADVISLLLNGDGGVGRRRLWIGLQLPPGCGDPKRLGPLRGFQWVTGDNNTSYSRWARLDLNGAPLCGPLCVAVSAAEATVPSEPIWEEQQCEVKADGFLCEFHFPATCRPLAVEPGAAAAAVSITYGTPFAARGADFQALPVGSSAAVAPLGLQLMCTAPPGAVQGHWAREAPGAWDCSVENGGCEHACNAIPGAPRCQCPAGAALQADGRSCTASATQSCNDLCEHFCVPNPDQPGSYSCMCETGYRLAADQHRCEDVDDCILEPSPCPQRCVNTQGGFECHCYPNYDLVDGECVEPVDPCFRANCEYQCQPLNQTSYLCVCAEGFAPIPHEPHRCQMFCNQTACPADCDPNTQASCECPEGYILDDGFICTDIDECENGGFCSGVCHNLPGTFECICGPDSALARHIGTDCDSGKVDGGDSGSGEPPPSPTPGSTLTPPAVGLVHS

SEQ ID NO: 1944 - protein, 389 aa, synthetic construct
  REGION 1..389: note = THSD1 (Q9NS62) ECD
EYLLLREPGHVALSNDTVYVDFQYFDGANGTLRNVSVLLLEANTNQTVTTKYLLTNQSQGTLKFECFYFKEAGDYWFTMTPEATDNSTPFPWWEKSAFLKVEWPVFHVDLNRSAKAAEGTFQVGLFTSQPLCPFPVDKPNIVVDVIFTNSLPEARRNSRQPLEIRTSKRTELAQGQWVEFGCAPLGPEAYVTVVLKLLGRDSVITSTGPIDLAQKFGYKLVMVPELTCESGVEVTVLPPPCTFVQGVVTVFKEAPRYPGKRTIHLAENSLPLGERRTIFNCTLFDMGKNKYCFDFGISSRSHFSAKEECMLIQRNTETWGLWQPWSQCSATCGDGVRERRRVCLTSFPSSPVCPGMSLEASLCSLEECAAFQPSSPSPLQPQGPVKSNN

SEQ ID NO: 1945 - protein, 1560 aa, synthetic construct
  REGION 1..1560: note = THSD7A (Q9UPZ6) ECD
AAQGEAEAPTLYLWKTGPWGRCMGDECGPGGIQTRAVWCAHVEGWTTLHTNCKQAERPNNQQNCFKVCDWHKELYDWRLGPWNQCQPVISKSLEKPLECIKGEEGIQVREIACIQKDKDIPAEDIICEYFEPKPLLEQACLIPCQQDCIVSEFSAWSECSKTCGSGLQHRTRHVVAPPQFGGSGCPNLTEFQVCQSSPCEAEELRYSLHVGPWSTCSMPHSRQVRQARRRGKNKEREKDRSKGVKDPEARELIKKKRNRNRQNRQENKYWDIQIGYQTREVMCINKTGKAADLSFCQQEKLPMTFQSCVITKECQVSEWSEWSPCSKTCHDMVSPAGTRVRTRTIRQFPIGSEKECPEFEEKEPCLSQGDGVVPCATYGWRTTEWTECRVDPLLSQQDKRRGNQTALCGGGIQTREVYCVQANENLLSQLSTHKNKEASKPMDLKLCTGPIPNTTQLCHIPCPTECEVSPWSAWGPCTYENCNDQQGKKGFKLRKRRITNEPTGGSGVTGNCPHLLEAIPCEEPACYDWKAVRLGNCEPDNGKECGPGTQVQEVVCINSDGEEVDRQLCRDAIFPIPVACDAPCPKDCVLSTWSTWSSCSHTCSGKTTEGKQIRARSILAYAGEEGGIRCPNSSALQEVRSCNEHPCTVYHWQTGPWGQCIEDTSVSSFNTTTTWNGEASCSVGMQTRKVICVRVNVGQVGPKKCPESLRPETVRPCLLPCKKDCIVTPYSDWTSCPSSCKEGDSSIRKQSRHRVIIQLPANGGRDCTDPLYEEKACEAPQACQSYRWKTHKWRRCQLVPWSVQQDSPGAQEGCGPGRQARAITCRKQDGGQAGIHECLQYAGPVPALTQACQIPCQDDCQLTSWSKFSSCNGDCGAVRTRKRTLVGKSKKKEKCKNSHLYPLIETQYCPCDKYNAQPVGNWSDCILPEGKVEVLLGMKVQGDIKECGQGYRYQAMACYDQNGRLVETSRCNSHGYIEEACIIPCPSDCKLSEWSNWSRCSKSCGSGVKVRSKWLREKPYNGGRPCPKLDHVNQAQVYEVVPCHSDCNQYLWVTEPWSICKVTFVNMRENCGEGVQTRKVRCMQNTADGPSEHVEDYLCDPEEMPLGSRVCKLPCPEDCVISEWGPWTQCVLPCNQSSFRQRSADPIRQPADEGRSCPNAVEKEPCNLNKNCYHYDYNVTDWSTCQLSEKAVCGNGIKTRMLDCVRSDGKSVDLKYCEALGLEKNWQMNTSCMVECPVNCQLSDWSPWSECSQTCGLTGKMIRRRTVTQPFQGDGRPCPSLMDQSKPCPVKPCYRWQYGQWSPCQVQEAQCGEGTRTRNISCVVSDGSADDFSKVVDEEFCADIELIIDGNKNMVLEESCSQPCPGDCYLKDWSSWSLCQLTCVNGEDLGFGGIQVRSRPVIIQELENQHLCPEQMLETKSCYDGQCYEYKWMASAWKGSSRTVWCQRSDGINVTGGCLVMSQPDADRSCNPPCSQPHSYCSETKTCHCEEGYTEVMSSNSTLEQCTLIPVVVLPTMEDKRGDVKTSRAVHPTQPSSNPAGRGRTWFLQPFGPDGRLKTW

SEQ ID NO: 1946 - protein, 1524 aa, synthetic construct
  REGION 1..1524: note = THSD7B (Q9C0I4) ECD
AHLEGKKDNQFIWKPGPWGRCTGDCGPGGVQSRAVWCFHVDGWTSHLSNCGESNRPPKERSCFRVCDWHSDLFQWEVSDWHHCVLVPYARGEVKPRTAECVTAQHGLQHRMVRCIQKLNRTVVANEICEHFALQPPTEQACLIPCPRDCVVSEFLPWSNCSKGCGKKLQHRTRAVIAPPLFGGLQCPNLTESRACDAPISCPLGEEEYTFSLKVGPWSKCRLPHLKEINPSGRTVLDFNSDSNERVTFKHQSYKAHHHSKSWAIEIGYQTRQVSCTRSDGQNAMLSLCLQDSFPLTVQSCIMPKDCETSQWSSWSPCSKTCRSGSLLPGFRSRSRNVKHMAIGGGKECPELLEKEACIVEGELLQQCPRYSWRTSEWKECQVSLLLEQQDPHWHVTGPVCGGGIQTREVYCAQSVPAAAALRAKEVSRPVEKALCVGPAPLPSQLCNIPCSTDCIVSSWSAWGLCIHENCHDPQGKKGFRTRQRHVLMESTGPAGHCPHLVESVPCEDPMCYRWLASEGICFPDHGKCGLGHRILKAVCQNDRGEDVSGSLCPVPPPPERKSCEIPCRMDCVLSEWTEWSSCSQSCSNKNSDGKQTRSRTILALAGEGGKPCPPSQALQEHRLCNDHSCMQLHWETSPWGPCSEDTLVTALNATIGWNGEATCGVGIQTRRVFCVKSHVGQVMTKRCPDSTRPETVRPCFLPCKKDCIVTAFSEWTPCPRMCQAGNATVKQSRYRIIIQEAANGGQECPDTLYEERECEDVSLCPVYRWKPQKWSPCILVPESVWQGITGSSEACGKGLQTRAVSCISDDNRSAEMMECLKQTNGMPLLVQECTVPCREDCTFTAWSKFTPCSTNCEATKSRRRQLTGKSRKKEKCQDSDLYPLVETELCPCDEFISQPYGNWSDCILPEGRREPHRGLRVQADSKECGEGLRFRAVACSDKNGRPVDPSFCSSSGYIQEKCVIPCPFDCKLSDWSSWGSCSSSCGIGVRIRSKWLKEKPYNGGRPCPKLDLKNQVHEAVPCYSECNQYSWVVEHWSSCKINNELRSLRCGGGTQSRKIRCVNTADGEGGAVDSNLCNQDEIPPETQSCSLMCPNECVMSEWGLWSKCPQSCDPHTMQRRTRHLLRPSLNSRTCAEDSQVQPCLLNENCFQFQYNLTEWSTCQLSENAPCGQGVRTRLLSCVCSDGKPVSMDQCEQHNLEKPQRMSIPCLVECVVNCQLSGWTAWTECSQTCGHGGRMSRTRFIIMPTQGEGRPCPTELTQEKTCPVTPCYSWVLGNWSACKLEGGDCGEGVQIRSLSCMVHSGSISHAAGRVEDALCGEMPFQDSILKQLCSVPCPGDCHLTEWSEWSTCELTCIDGRSFETVGRQSRSRTFIIQSFENQDSCPQQVLETRPCTGGKCYHYTWKASLWNNNERTVWCQRSDGVNVTGGCSPQARPAAIRQCIPACRKPFSYCTQGGVCGCEKGYTEIMKSNGFLDYCMKVPGSEDKKADVKNLSGKNRPVNSKIHDIFKGWSLQPLDPDGRVK

SEQ ID NO: 1947 - protein, 738 aa, synthetic construct
  REGION 1..738: note = TIE1 (P35590) ECD
AVDLTLLANLRLTDPQRFFLTCVSGEAGAGRGSDAWGPPLLLEKDDRIVRTPPGPPLRLARNGSHQVTLRGFSKPSDLVGVFSCVGGAGARRTRVIYVHNSPGAHLLPDKVTHTVNKGDTAVLSARVHKEKQTDVIWKSNGSYFYTLDWHEAQDGRFLLQLPNVQPPSSGIYSATYLEASPLGSAFFRLIVRGCGAGRWGPGCTKECPGCLHGGVCHDHDGECVCPPGFTGTRCEQACREGRFGQSCQEQCPGISGCRGLTFCLPDPYGCSCGSGWRGSQCQEACAPGHFGADCRLQCQCQNGGTCDRFSGCVCPSGWHGVHCEKSDRIPQILNMASELEFNLETMPRINCAAAGNPFPVRGSIELRKPDGTVLLSTKAIVEPEKTTAEFEVPRLVLADSGFWECRVSTSGGQDSRRFKVNVKVPPVPLAAPRLLTKQSRQLVVSPLVSFSGDGPISTVRLHYRPQDSTMDWSTIVVDPSENVTLMNLRPKTGYSVRVQLSRPGEGGEGAWGPPTLMTTDCPEPLLQPWLEGWHVEGTDRLRVSWSLPLVPGPLVGDGFLLRLWDGTRGQERRENVSSPQARTALLTGLTPGTHYQLDVQLYHCTLLGPASPPAHVLLPPSGPPAPRHLHAQALSDSEIQLTWKHPEALPGPISKYVVEVQVAGGAGDPLWIDVDRPEETSTIIRGLNASTRYLFRMRASIQGLGDWSNTVEESTLGNGLQAEGPVQESRAAEEGLDQ

SEQ ID NO: 1948 - protein, 120 aa, synthetic construct
  REGION 1..120: note = TIGIT (Q495A1) ECD
MMTGTIETTGNISAEKGGSIILQCHLSSTTAQVTQVNWEQQDQLLAICNADLGWHISPSFKDRVAPGPGLGLTLQSLTVNDTGEYFCIYHTYPDGTYTGRIFLEVLESSVAEHGARFQIP

SEQ ID NO: 1949 - protein, 290 aa, synthetic construct [sequence omitted]

SEQ ID NO: 1950 - protein, 556 aa, synthetic construct
  REGION 1..556: note = TLR1 (Q15399) ECD
SEFLVDRSKNGLIHVPKDLSQKTTILNISQNYISELWTSDILSLSKLRILIISHNRIQYLDISVFKFNQELEYLDLSHNKLVKISCHPTVNLKHLDLSFNAFDALPICKEFGNMSQLKFLGLSTTHLEKSSVLPIAHLNISKVLLVLGETYGEKEDPEGLQDFNTESLHIVFPTNKEFHFILDVSVKTVANLELSNIKCVLEDNKCSYFLSILAKLQTNPKLSNLTLNNIETTWNSFIRILQLVWHTTVWYFSISNVKLQGQLDFRDFDYSGTSLKALSIHQVVSDVFGFPQSYIYEIFSNMNIKNFTVSGTRMVHMLCPSKISPFLHLDFSNNLLTDTVFENCGHLTELETLILQMNQLKELSKIAEMTTQMKSLQQLDISQNSVSYDEKKGDCSWTKSLLSLNMSSNILTDTIFRCLPPRIKVLDLHSNKIKSIPKQVVKLEALQELNVAFNSLTDLPGCGSFSSLSVLIIDHNSVSHPSADFFQSCQKMRSIKAGDNPFQCTCELGEFVKNIDQVSSEVLEGWPDSYKCDYPESYRGTLLKDFHMSELSCNIT

SEQ ID NO: 1951 - protein, 557 aa, synthetic construct
  REGION 1..557: note = TLR10 (Q9BXR5) ECD
DAPELPEERELMTNCSNMSLRKVPADLTPATTTLDLSYNLLFQLQSSDFHSVSKLRVLILCHNRIQQLDLKTFEFNKELRYLDLSNNRLKSVTWYLLAGLRYLDLSFNDFDTMPICEEAGNMSHLEILGLSGAKIQKSDFQKIAHLHLNTVFLGFRTLPHYEEGSLPILNTTKLHIVLPMDTNFWVLLRDGIKTSKILEMTNIDGKSQFVSYEMQRNLSLENAKTSVLLLNKVDLLWDDLFLILQFVWHTSVEHFQIRNVTFGGKAYLDHNSFDYSNTVMRTIKLEHVHFRVFYIQQDKIYLLLTKMDIENLTISNAQMPHMLFPNYPTKFQYLNFANNILTDELFKRTIQLPHLKTLILNGNKLETLSLVSCFANNTPLEHLDLSQNLLQHKNDENCSWPETVVNMNLSYNKLSDSVFRCLPKSIQILDLNNNQIQTVPKETIHLMALRELNIAFNFLTDLPGCSHFSRLSVLNIEMNFILSPSLDFVQSCQEVKTLNAGRNPFRCTCELKNFIQLETYSEVMMVGWSDSYTCEYPLNLRGTRLKDVHLHELSCNT

SEQ ID NO: 1952 - protein, 568 aa, synthetic construct
  REGION 1..568: note = TLR2 (O60603) ECD
ESSNQASLSCDRNGICKGSSGSLNSIPSGLTEAVKSLDLSNNRITYISNSDLQRCVNLQALVLTSNGINTIEEDSFSSLGSLEHLDLSYNYLSNLSSSWFKPLSSLTFLNLLGNPYKTLGETSLFSHLTKLQILRVGNMDTFTKIQRKDFAGLTFLEELEIDASDLQSYEPKSLKSIQNVSHLILHMKQHILLLEIFVDVTSSVECLELRDTDLDTFHFSELSTGETNSLIKKFTFRNVKITDESLFQVMKLLNQISGLLELEFDDCTLNGVGNFRASDNDRVIDPGKVETLTIRRLHIPRFYLFYDLSTLYSLTERVKRITVENSKVFLVPCLLSQHLKSLEYLDLSENLMVEEYLKNSACEDAWPSLQTLILRQNHLASLEKTGETLLTLKNLTNIDISKNSFHSMPETCQWPEKMKYLNLSSTRIHSVTGCIPKTLEILDVSNNNLNLFSLNLPQLKELYISRNKLMTLPDASLLPMLLVLKISRNAITTFSKEQLDSFHTLKTLEAGGNNFICSCEFLSFTQEQQALAKVLIDWPANYLCDSPSHVRGQQVQDVRLSVSECHRT

SEQ ID NO: 1953 - protein, 681 aa, synthetic construct
  REGION 1..681: note = TLR3 (O15455) ECD
STTKCTVSHEVADCSHLKLTQVPDDLPTNITVLNLTHNQLRRLPAANFTRYSQLTSLDVGFNTISKLEPELCQKLPMLKVLNLQHNELSQLSDKTFAFCTNLTELHLMSNSIQKIKNNPFVKQKNLITLDLSHNGLSSTKLGTQVQLENLQELLLSNNKIQALKSEELDIFANSSLKKLELSSNQIKEFSPGCFHAIGRLFGLFLNNVQLGPSLTEKLCLELANTSIRNLSLSNSQLSTTSNTTFLGLKWTNLTMLDLSYNNLNVVGNDSFAWLPQLEYFFLEYNNIQHLFSHSLHGLFNVRYLNLKRSFTKQSISLASLPKIDDFSFQWLKCLEHLNMEDNDIPGIKSNMFTGLINLKYLSLSNSFTSLRTLTNETFVSLAHSPLHILNLTKNKISKIESDAFSWLGHLEVLDLGLNEIGQELTGQEWRGLENIFEIYLSYNKYLQLTRNSFALVPSLQRLMLRRVALKNVDSSPSPFQPLRNLTILDLSNNNIANINDDMLEGLEKLEILDLQHNNLARLWKHANPGGPIYFLKGLSHLHILNLESNGFDEIPVEVFKDLFELKIIDLGLNNLNTLPASVFNNQVSLKSLNLQKNLITSVEKKVFGPAFRNLTELDMRFNPFDCTCESIAWFVNWINETHTNIPELSSHYLCNTPPHYHGFPVRLFDTSSCKDSAPFEL

SEQ ID NO: 1954 - protein, 608 aa, synthetic construct
  REGION 1..608: note = TLR4 (O00206) ECD
ESWEPCVEVVPNITYQCMELNFYKIPDNLPFSTKNLDLSFNPLRHLGSYSFFSFPELQVLDLSRCEIQTIEDGAYQSLSHLSTLILTGNPIQSLALGAFSGLSSLQKLVAVETNLASLENFPIGHLKTLKELNVAHNLIQSFKLPEYFSNLTNLEHLDLSSNKIQSIYCTDLRVLHQMPLLNLSLDLSLNPMNFIQPGAFKEIRLHKLTLRNNFDSLNVMKTCIQGLAGLEVHRLVLGEFRNEGNLEKFDKSALEGLCNLTIEEFRLAYLDYYLDDIIDLFNCLTNVSSFSLVSVTIERVKDFSYNFGWQHLELVNCKFGQFPTLKLKSLKRLTFTSNKGGNAFSEVDLPSLEFLDLSRNGLSFKGCCSQSDFGTTSLKYLDLSFNGVITMSSNFLGLEQLEHLDFQHSNLKQMSEFSVFLSLRNLIYLDISHTHTRVAFNGIFNGLSSLEVLKMAGNSFQENFLPDIFTELRNLTFLDLSQCQLEQLSPTAFNSLSSLQVLNMSHNNFFSLDTFPYKCLNSLQVLDYSLNHIMTSKKQELQHFPSSLAFLNLTQNDFACTCEHQSFLQWIKDQRQLLVEVERMECATPSDKQGMPVLSLNITCQMNK

SEQ ID NO: 1955 - protein, 619 aa, synthetic construct
  REGION 1..619: note = TLR5 (O60602) ECD
IPSCSFDGRIAFYRFCNLTQVPQVLNTTERLLLSFNYIRTVTASSFPFLEQLQLLELGSQYTPLTIDKEAFRNLPNLRILDLGSSKIYFLHPDAFQGLFHLFELRLYFCGLSDAVLKDGYFRNLKALTRLDLSKNQIRSLYLHPSFGKLNSLKSIDFSSNQIFLVCEHELEPLQGKTLSFFSLAANSLYSRVSVDWGKCMNPFRNMVLEILDVSGNGWTVDITGNFSNAISKSQAFSLILAHHIMGAGFGFHNIKDPDQNTFAGLARSSVRHLDLSHGFVFSLNSRVFETLKDLKVLNLAYNKINKIADEAFYGLDNLQVLNLSYNLLGELYSSNFYGLPKVAYIDLQKNHIAIIQDQTFKFLEKLQTLDLRDNALTTIHFIPSIPDIFLSGNKLVTLPKINLTANLIHLSENRLENLDILYFLLRVPHLQILILNQNRFSSCSGDQTPSENPSLEQLFLGENMLQLAWETELCWDVFEGLSHLQVLYLNHNYLNSLPPGVFSHLTALRGLSLNSNRLTVLSHNDLPANLEILDISRNQLLAPNPDVFVSLSVLDITHNKFICECELSTFINWLNHTNVTIAGPPADIYCVYPDSFSGVSLFSLSTEGCDEEEVLKSLK

SEQ ID NO: 1956 - protein, 555 aa, synthetic construct
  REGION 1..555: note = TLR6 (Q9Y2C9) ECD
NEFAVDKSKRGLIHVPKDLPLKTKVLDMSQNYIAELQVSDMSFLSELTVLRLSHNRIQLLDLSVFKFNQDLEYLDLSHNQLQKISCHPIVSFRHLDLSFNDFKALPICKEFGNLSQLNFLGLSAMKLQKLDLLPIAHLHLSYILLDLRNYYIKENETESLQILNAKTLHLVFHPTSLFAIQVNISVNTLGCLQLTNIKLNDDNCQVFIKFLSELTRGSTLLNFTLNHIETTWKCLVRVFQFLWPKPVEYLNIYNLTIIESIREEDFTYSKTTLKALTIEHITNQVFLFSQTALYTVFSEMNIMMLTISDTPFIHMLCPHAPSTFKFLNFTQNVFTDSIFEKCSTLVKLETLILQKNGLKDLFKVGLMTKDMPSLEILDVSWNSLESGRHKENCTWVESIVVLNLSSNMLTDSVFRCLPPRIKVLDLHSNKIKSVPKQVVKLEALQELNVAFNSLTDLPGCGSFSSLSVLIIDHNSVSHPSADFFQSCQKMRSIKAGDNPFQCTCELREFVKNIDQVSSEVLEGWPDSYKCDYPESYRGSPLKDFHMSELSCNITL

SEQ ID NO: 1957 - protein, 813 aa, synthetic construct
  REGION 1..813: note = TLR7 (Q9NYK1) ECD
ARWFPKTLPCDVTLDVPKNHVIVDCTDKHLTEIPGGIPTNTTNLTLTINHIPDISPASFHRLDHLVEIDFRCNCVPIPLGSKNNMCIKRLQIKPRSFSGLTYLKSLYLDGNQLLEIPQGLPPSLQLLSLEANNIFSIRKENLTELANIEILYLGQNCYYRNPCYVSYSIEKDAFLNLTKLKVLSLKDNNVTAVPTVLPSTLTELYLYNNMIAKIQEDDFNNLNQLQILDLSGNCPRCYNAPFPCAPCKNNSPLQIPVNAFDALTELKVLRLHSNSLQHVPPRWFKNINKLQELDLSQNFLAKEIGDAKFLHFLPSLIQLDLSFNFELQVYRASMNLSQAFSSLKSLKILRIRGYVFKELKSFNLSPLHNLQNLEVLDLGTNFIKIANLSMFKQFKRLKVIDLSVNKISPSGDSSEVGFCSNARTSVESYEPQVLEQLHYFRYDKYARSCRFKNKEASFMSVNESCYKYGQTLDLSKNSIFFVKSSDFQHLSFLKCLNLSGNLISQTLNGSEFQPLAELRYLDFSNNRLDLLHSTAFEELHKLEVLDISSNSHYFQSEGITHMLNFTKNLKVLQKLMMNDNDISSSTSRTMESESLRTLEFRGNHLDVLWREGDNRYLQLFKNLLKLEELDISKNSLSFLPSGVFDGMPPNLKNLSLAKNGLKSFSWKKLQCLKNLETLDLSHNQLTTVPERLSNCSRSLKNLILKNNQIRSLTKYFLQDAFQLRYLDLSSNKIQMIQKTSFPENVLNNLKMLLLHHNRFLCTCDAVWFVWWVNHTEVTIPYLATDVTCVGPGAHKGQSVISLDLYTCELDLTN

SEQ ID NO: 1958 - protein, 801 aa, synthetic construct
  REGION 1..801: note = TLR8 (Q9NR97) ECD
EENFSRSYPCDEKKQNDSVIAECSNRRLQEVPQTVGKYVTELDLSDNFITHITNESFQGLQNLTKINLNHNPNVQHQNGNPGIQSNGLNITDGAFLNLKNLRELLLEDNQLPQIPSGLPESLTELSLIQNNIYNITKEGISRLINLKNLYLAWNCYFNKVCEKTNIEDGVFETLTNLELLSLSFNSLSHVPPKLPSSLRKLFLSNTQIKYISEEDFKGLINLTLLDLSGNCPRCFNAPFPCVPCDGGASINIDRFAFQNLTQLRYLNLSSTSLRKINAAWFKNMPHLKVLDLEFNYLVGEIASGAFLTMLPRLEILDLSFNYIKGSYPQHINISRNFSKLLSLRALHLRGYVFQELREDDFQPLMQLPNLSTINLGINFIKQIDFKLFQNFSNLEIIYLSENRISPLVKDTRQSYANSSSFQRHIRKRRSTDFEFDPHSNFYHFTRPLIKPQCAAYGKALDLSLNSIFFIGPNQFENLPDIACLNLSANSNAQVLSGTEFSAIPHVKYLDLTNNRLDFDNASALTELSDLEVLDLSYNSHYFRIAGVTHHLEFIQNFTNLKVLNLSHNNIYTLTDKYNLESKSLVELVFSGNRLDILWNDDDNRYISIFKGLKNLTRLDLSLNRLKHIPNEAFLNLPASLTELHINDNMLKFFNWTLLQQFPRLELLDLRGNKLLFLTDSLSDFTSSLRTLLLSHNRISHLPSGFLSEVSSLKHLDLSSNLLKTINKSALETKTTTKLSMLELHGNPFECTCDIGDFRRWMDEHLNVKIPRLVDVICASPGDQRGKSIVSLELTTCVSDVT

SEQ ID NO: 1959 - protein, 793 aa, synthetic construct
  REGION 1..793: note = TLR9 (Q9NR96) ECD
LGTLPAFLPCELQPHGLVNCNWLFLKSVPHFSMAAPRGNVTSLSLSSNRIHHLHDSDFAHLPSLRHLNLKWNCPPVGLSPMHFPCHMTIEPSTFLAVPTLEELNLSYNNIMTVPALPKSLISLSLSHTNILMLDSASLAGLHALRFLFMDGNCYYKNPCRQALEVAPGALLGLGNLTHLSLKYNNLTVVPRNLPSSLEYLLLSYNRIVKLAPEDLANLTALRVLDVGGNCRRCDHAPNPCMECPRHFPQLHPDTFSHLSRLEGLVLKDSSLSWLNASWFRGLGNLRVLDLSENFLYKCITKTKAFQGLTQLRKLNLSFNYQKRVSFAHLSLAPSFGSLVALKELDMHGIFFRSLDETTLRPLARLPMLQTLRLQMNFINQAQLGIFRAFPGLRYVDLSDNRISGASELTATMGEADGGEKVWLQPGDLAPAPVDTPSSEDFRPNCSTLNFTLDLSRNNLVTVQPEMFAQLSHLQCLRLSHNCISQAVNGSQFLPLTGLQVLDLSHNKLDLYHEHSFTELPRLEALDLSYNSQPFGMQGVGHNFSFVAHLRTLRHLSLAHNNIHSQVSQQLCSTSLRALDFSGNALGHMWAEGDLYLHFFQGLSGLIWLDLSQNRLHTLLPQTLRNLPKSLQVLRLRDNYLAFFKWWSLHFLPKLEVLDLAGNQLKALTNGSLPAGTRLRRLDVSCNSISFVAPGFFSKAKELRELNLSANALKTVDHSWFGPLASALQILDVSANPLHCACGAAFMDFLLEVQAAVPGLPSRVKCGSPGQLQGLSIFAQDLRLCLDEALSWDC

SEQ ID NO: 1960 - protein, 153 aa, synthetic construct
  REGION 1..153: note = TMED7 (Q9Y3B3) ECD
SEITFELPDNAKQCFYEDIAQGTKCTLEFQVITGGHYDVDCRLEDPDGKVLYKEMKKQYDSFTFTASKNGTYKFCFSNEFSTFTHKTVYFDFQVGEDPPLFPSENRVSALTQMESACVSIHEALKSVIDYQTHFRLREAQGRSRAEDLNTRVA

SEQ ID NO: 1961 - protein, 291 aa, synthetic construct
  REGION 1..291: note = TMEFF1 (Q8IYR6) ECD
SNQPPGGGGGSGGDCPGGKGKSINCSELNVRESDVRVCDESSCKYGGVCKEDGDGLKCACQFQCHTNYIPVCGSNGDTYQNECFLRRAACKHQKEITVIARGPCYSDNGSGSGEGEEEGSGAEVHRKHSKCGPCKYKAECDEDAENVGCVCNIDCSGYSFNPVCASDGSSYNNPCFVREASCIKQEQIDIRHLGHCTDTDDTSLLGKKDDGLQYRPDVKDASDQREDVYIGNHMPCPENLNGYCIHGKCEFIYSTQKASCRCESGYTGQHCEKTDFSILYVVPSRQKLTHV

SEQ ID NO: 1962 - protein, 280 aa, synthetic construct
  REGION 1..280: note = TMEFF2 (Q9UIK5) ECD
FPTSLSDCQTPTGWNCSGYDDRENDLFLCDTNTCKFDGECLRIGDTVTCVCQFKCNNDYVPVCGSNGESYQNECYLRQAACKQQSEILVVSEGSCATDAGSGSGDGVHEGSGETSQKETSTCDICQFGAECDEDAEDVWCVCNIDCSQTNFNPLCASDGKSYDNACQIKEASCQKQEKIEVMSLGRCQDNTTTTTKSEDGHYARTDYAENANKLEESAREHHIPCPEHYNGFCMHGKCEHSINMQEPSCRCDAGYTGQHCEKKDYSVLYVVPGPVRFQYV

SEQ ID NO: 1963 - protein, 439 aa, synthetic construct
  REGION 1..439: note = TMEM108 (Q6UXF1) ECD
QEPSPRESLQVLPSGTPPGTMVTAPHSSTRHTSVVMLTPNPDGPPSQAAAPMATPTPRAEGHPPTHTISTIAATVTAPHSESSLSTGPAPAAMATTSSKPEGRPRGQAAPTILLTKPPGATSRPTTAPPRTTTRRPPRPPGSSRKGAGNSSRPVPPAPGGHSRSKEGQRGRNPSSTPLGQKRPLGKIFQIYKGNFTGSVEPEPSTLTPRTPLWGYSSSPQPQTVAATTVPSNTSWAPTTTSLGPAKDKPGLRRAAQGGGSTFTSQGGTPDATAASGAPVSPQAAPVPSQRPHHGDPQDGPSHSDSWLTVTPGTSRPLSTSSGVFTAATGPTPAAFDTSVSAPSQGIPQGASTTPQAPTHPSRVSESTISGAKEETVATLTMTDRVPSPLSTVVSTATGNFLNRLVPAGTWKPGTAGNISHVAEGDKPQHRATICLSKMD

SEQ ID NO: 1964 - protein, 140 aa, synthetic construct
  REGION 1..140: note = TMEM123 (Q8N131) ECD
HESAAMAASANIENSGLPHNSSANSTETLQHVPSDHTNETSNSTVKPPTSVASDSSNTTVTTMKPTAASNTTTPGMVSTNMTSTTLKSTPKTTSVSQNTSQISTSTMTVTHNSSVTSAASSVTITTTMHSEAKKGSKFDT

SEQ ID NO: 1965 - protein, 817 aa, synthetic construct
  REGION 1..817: note = TMEM132A (Q24JP5) ECD
CGQAPLDPVYLPAALELLDAPEHFRVQQVGHYPPANSSLSSRSETFLLLQPWPRAQPLLRASYPPFATQQVVPPRVTEPHQRPVPWDVRAVSVEAAVTPAEPYARVLFHLKGQDWPPGSGSLPCARLHATHPAGTAHQACRFQPSLGACVVELELPSHWFSQASTTRAELAYTLEPAAEGPGGCGSGEENDPGEQALPVGGVELRPADPPQYQEVPLDEAVTLRVPDMPVRPGQLFSATLLLRHNFTASLLTLRIKVKKGLHVTAARPAQPTLWTAKLDRFKGSRHHTTLITCHRAGLTEPDSSPLELSEFLWVDFVVENSTGGGVAVTRPVTWQLEYPGQAPEAEKDKMVWEILVSERDIRALIPLAKAEELVNTAPLTGVPQHVPVRLVTVDGGGALVEVTEHVGCESANTQVLQVSEACDAVFVAGKESRGARGVRVDFWWRRLRASLRLTVWAPLLPLRIELTDTTLEQVRGWRVPGPAEGPAEPAAEASDEAERRARGCHLQYQRAGVRFLAPFAAHPLDGGRRLTHLLGPDWLLDVSHLVAPHARVLDSRVASLEGGRVVVGREPGVTSIEVRSPLSDSILGEQALAVTDDKVSVLELRVQPVMGISLTLSRGTAHPGEVTATCWAQSALPAPKQEVALSLWLSFSDHTVAPAELYDRRDLGLSVSAEEPGAILPAEEQGAQLGVVVSGAGAEGLPLHVALHPPEPCRRGRHRVPLASGTAWLGLPPASTPAPALPSSPAWSPPATEATMGGKRQVAGSVGGNTGVRGKFERAEEEARKEETEAREEEEEEEEEMVPAPQHVTELELGMYA

SEQ ID NO: 1966 - protein, 895 aa, synthetic construct
  REGION 1..895: note = TMEM132C (Q8N3T6) ECD
KVIEGHGVTDNIQRFSSLPPYLPVSYHILRAETSFFLKEANQDLLRNSSLQARVESFFTYKTRQPPVLNASYGPFSVEKVVPLDLMLTSNFLGPTNKFSFDWKLKAHILRDKVYLSRPKVQVLFHIMGRDWDDHGAGEKLPCLRVFAFRETREVRGSCRLKGDLGLCVAELELLSSWFSAPTVGAGRKKSMDQPEGTPVELYYTVHPGNERGDCAGGDFRKGNAIRPGKDGLEETTSHLQRIGTVGLYRAQDSAQLSELRLDGNVVIWLPSRPVKQGEVVTAYVTISSNSSVDLFILRAKVKKGVNILSAQTREPRQWGVKQEVGSGGKHVTATVACQRLGPSPRNRSSSLFNEVVQMNFEIASFSSLSGTQPITWQVEYPRKGTTDIAVSEIFVSQKDLVGIVPLAMDTEILNTAVLTGKTVAMPIKVVSVEENSAVMDISESVECKSTDEDVIKVSERCDYIFVNGKEIKGKMDAVVNFTYQYLSAPLCVTVWVPRLPLQIEVSDTELSQIKGWRVPIVTNKRPTRESEDEDEEERRGRGCALQYQHATVRVLTQFVSEGAGPWGQPNYLLSPNWQFDITHLVADFMKLEEPHVATLQDSRVLVGREVGMTTIQVLSPLSDSILAEKTITVLDDKVSVTDLAIQLVAGLSVALYPNAENSKAVTAVVTAEEVLRTPKQEAVFSTWLQFSDGSVTPLDIYDTKDFSLAATSQDEAVVSVPQPRSPRWPVVVAEGEGQGPLIRVDMTIAEACQKSKRKSILAVGVGNVRVKFGQNDADSSPGGDYEEDEIKNHASDRRQKGQHHERTGQDGHLYGSSPVEREEGALRRATTTARSLLDNKVVKNSRADGGRLAGEGQLQNIPIDFTNFPAHVDLPKAGSGLEENDLVQTPRGLSD

SEQ ID NO: 1967 - protein, 885 aa, synthetic construct
  REGION 1..885: note = TMEM132D (Q14C87) ECD
RGILESIQRFSLLPTYLPVTYHINNADVSFFLKEANQDIMRNSSLQSRVESFLIYKSRRLPVLNASYGPFSIEQVVPQDLMLPSNPFGFTNKFSLNWKLKAHILRDKVYLSRPKVQVLFHIMGRDWDDRSAGEKLPCLRVFAFRETREVRGSCRLQGDLGLCVAELELLSSWFSPPTVVAGRRKSVDQPEGTPVELYYTVHPGGERGDCVREDARRSNGIRTGHSDIDESGPPLQRIGSIFLYQTHRKPSLRELRLDNSVAIHYIPKTVRKGDVLTFPVSISRNSTEDRFTLRAKVKKGVNIIGVRASSPSIWDVKERTDYTGKYAPAVIVCQKKAAGSENSADGASYEVMQIDVEVEEPGDLPATQLVTWQVEYPGEITSDLGVSKIYVSPKDLIGVVPLAMEAEILNTAILTGKTVAVPVKVVSVEDDGTVTELLESVECRSSDEDVIKVSDRCDYVFVNGKEMKGKVNVVVNFTYQHLSSPLEMTVWVPRLPLQIEVSDTELNQIKGWRVPIVSSRRPAGDSEEEEDDERRGRGCTLQYQHAMVRVLTQFVAEAAGPGGHLAHLLGSDWQVDITELINDFMQVEEPRIAKLQGGQILMGQELGMTTIQILSPLSDTILAEKTITVLDEKVTITDLGVQLVTGLSLSLQLSPGSNRAIFATAVAQELLQRPKQEAAISCWVQFSDGSVTPLDIYDGKDFSLMATSLDEKVVSIHQDPKFKWPIIAAETEGQGTLVKVEMVISESCQKSKRKSVLAVGTANIKVKFGQNDANPNTSDSRHTGAGVHMENNVSDRRPKKPSQEWGSQEGQYYGSSSMGLMEGRGTTTDRSILQKKKGQESLLDDNSHLQTIPSDLTSFPAQVDLPRSNGEMDGNDLMQASKGLSD

SEQ ID NO: 1968 - protein, 868 aa, synthetic construct
  REGION 1..868: note = TMEM132E (Q6IEE7) ECD
RSHPASPSPPGPQASPVLPVSYRLSHTRLAFFLREARPPSPAVANSSLQRSEPFVVFQTKELPVLNVSLGPFSTSQVVARELLQPSSTLDIPERLTVNWKVRAFIVRSHVPASQPVVQVLFYVAGRDWDDFGVTERLPCVRLHAFRDAREVKSSCRLSGGLATCLVRAELPLAWFGPPAPAAPPTARRKSPDGLEPEATGESQQAELYYTLHAPDASGGCGGSRRGAGPGVGARAESPTQHPLLRIGSISLFRPPPRRTLQEHRLDSNLMIRLPDRPLKPGEVLSILLYLAPNSSSPSSPSVEHFTLRVKAKKGVTLLGTKSRSGQWHVTSELLTGAKHSTATVDVAWAQSTPLPPREGQGPLEILQLDFEMENFTSQSVKRRIMWHIDYRGHGALPDLERAVTELTVIQRDVQAILPLAMDTEIINTAILTGRTVAIPVKVIAIEVNGLVLDISALVECESDNEDIIKVSSSCDYVFVSGKESRGSMNARVTFRYDVLNAPLEMTVWVPKLPLHIELSDARLSQVKGWRVPILPDRRSVRESEDEDEEEEERRQSASRGCTLQYQHATLQVFTQFHTTSSEGTDQVVTMLGPDWLVEVTDLVSDFMRVGDPRVAHMVDSSTLAGLEPGTTPFKVVSPLTEAVLGETLLTVTEEKVSITQLQAQVVASLALSLRPSPGSSHTILATTAAQQTLSFLKQEALLSLWLSYSDGTTAPLSLYSPRDYGLLVSSLDEHVATVTQDRAFPLVVAEAEGSGELLRAELTIAESCQKTKRKSVLATTPVGLRVHFGRDEEDPTYDYPGPSQPGPGGGEDEARGAGPPGSALPAPEAPGPGTASPVVPPTEDFLPLPTGFLQVPRGLTDLEIGMYA

SEQ ID NO: 1969 - protein, 53 aa, synthetic construct
  REGION 1..53: note = TMEM154 (Q6P9G4) ECD
NYEELENSGDTTVESERPNKVTIPSTFAAVTIKETLNANINSTNFAPDENQLE

SEQ ID NO: 1970 - protein, 252 aa, synthetic construct
  REGION 1..252: note = TMEM158 (Q8WZ71) ECD
GAADAPGLLGVPSNASVNASSADEPIAPRLLASAAPGPPERPGPEEAAAAAAPCNISVQRQMLSSLLVRWGRPRGFQCDLLLFSTNAHGRAFFAAAFHRVGPPLLIEHLGLAAGGAQQDLRLCVGCGWVRGRRTGRLRPAAAPSAAAATAGAPTALPAYPAAEPPGPLWLQGEPLHFCCLDFSLEELQGEPGWRLNRKPIESTLVACFMTLVIVVWSVAALIWPVPIIAGFLPNGMEQRRTTASTTAATPAA

SEQ ID NO: 1971 - protein, 43 aa, synthetic construct
  REGION 1..43: note = TMEM213 (A2RRL7) ECD
EASSSNSSSLTAHHPDPGTLEQCLNVDFCPQAARCCRTGVDEY

SEQ ID NO: 1972 - protein, 166 aa, synthetic construct
  REGION 1..166: note = TMEM219 (Q86XT9) ECD
SFLLTHRTGLRSPDIPQDWVSFLRSFGQLTLCPRNGTVTGKWRGSHVVGLLTTLNFGDGPDRNKTRTFQATVLGSQMGLKGSSAGQLVLITARVTTERTAGTCLYFSAVPGILPSSQPPISCSEEGAGNATLSPRMGEECVSVWSHEGLVLTKLLTSEELALCGSR

SEQ ID NO: 1973 - protein, 206 aa, synthetic construct
  REGION 1..206: note = TMEM25 (Q86YD3) ECD
ELEPQIDGQTWAERALRENERHAFTCRVAGGPGTPRLAWYLDGQLQEASTSRLLSVGGEAFSGGTSTFTVTAHRAQHELNCSLQDPRSGRSANASVILNVQFKPEIAQVGAKYQEAQGPGLLVVLFALVRANPPANVTWIDQDGPVTVNTSDFLVLDAQNYPWLTNHTVQLQLRSLAHNLSVVATNDVGVTSASLPAPGLLATRVE

SEQ ID NO: 1974 - protein, 127 aa, synthetic construct; identical to SEQ ID NO: 783
  REGION 1..127: note = TMEM27 (Q9HBJ8) ECD

SEQ ID NO: 1975 - protein, 69 aa, synthetic construct
  REGION 1..69: note = TMEM9 (Q9P0T7) ECD
NKSSEDIRCKCICPPYRNISGHIYNQNVSQKDCNCLHVVEPMPVPGHDVEAYCLLCECRYEERSTTTIK

SEQ ID NO: 1976 - protein, 129 aa, synthetic construct
  REGION 1..129: note = TMEM95 (Q3KNT9) ECD
CVFCRLPAHDLSGRLARLCSQMEARQKECGASPDFSAFALDEVSMNKVTEKTHRVLRVMEIKEAVSSLPSYWSWLRKTKLPEYTREALCPPACRGSTTLYNCSTCKGTEVSCWPRKRCFPGSQDLWEAK

SEQ ID NO: 1977 - protein, 71 aa, synthetic construct
  REGION 1..71: note = TMEM9B (Q9NQ34) ECD
AKNFEDVRCKCICPPYKENSGHIYNKNISQKDCDCLHVVEPMPVRGPDVEAYCLRCECKYEERSSVTIKVT

SEQ ID NO: 1978 - protein, 191 aa, synthetic construct
  REGION 1..191: note = TMIGD1 (Q6UXZ0) ECD
VLTVNGKTENYILDTTPGSQASLICAVQNHTREEELLWYREEGRVDLKSGNKINSSSVCVSSISENDNGISFTCRLGRDQSVSVSVVLNVTFPPLLSGNDFQTVEEGSNVKLVCNVKANPQAQMMWYKNSSLLDLEKSRHQIQQTSESFQLSITKVEKPDNGTYSCIAKSSLKTESLDFHLIVKDKTVGVP

SEQ ID NO: 1979 - protein, 128 aa, synthetic construct
  REGION 1..128: note = TMIGD2 (Q96BF3) ECD
LSVQQGPNLLQVRQGSQATLVCQVDQATAWERLRVKWTKDGAILCQPYITNGSLSLGVCGPQGRLSWQAPSHLTLQLDPVSLNHSGAYVCWAAVEIPELEEAEGNITRLFVDPDDPTQNRNRIASFPG

SEQ ID NO: 1980 - protein, 351 aa, synthetic construct
  REGION 1..351: note = TMX3 (Q96JJ7) ECD
KGFVEDLDESFKENRNDDIWLVDFYAPWCGHCKKLEPIWNEVGLEMKSIGSPVKVGKMDATSYSSIASEFGVRGYPTIKLLKGDLAYNYRGPRTKDDIIEFAHRVSGALIRPLPSQQMFEHMQKRHRVFFVYVGGESPLKEKYIDAASELIVYTYFFSASEEVVPEYVTLKEMPAVLVFKDETYFVYDEYEDGDLSSWINRERFQNYLAMDGFLLYELGDTGKLVALAVIDEKNTSVEHTRLKSIIQEVARDYRDLFHRDFQFGHMDGNDYINTLLMDELTVPTVVVLNTSNQQYFLLDRQIKNVEDMVQFINNILDGTVEAQGGDSILQRLKRIVFDAKSTIVSIFKSSP

SEQ ID NO: 1981 - protein, 166 aa, synthetic construct
  REGION 1..166: note = TMX4 (Q9H1E5) ECD
TAGPEEAALPPEQSRVQPMTASNWTLVMEGEWMLKFYAPWCPSCQQTDSEWEAFAKNGEILQISVGKVDVIQEPGLSGRFFVTTLPAFFHAKDGIFRRYRGPGIFEDLQNYILEKKWQSVEPLTGWKSPASLTMSGMAGLFSISGKIWHLHNYFTVTLGIPAWCSY

SEQ ID NO: 1982 - protein, 216 aa, synthetic construct
  REGION 1..216: note = TNFRSF10A (O00220) ECD
ASGTEAAAATPSKVWGSSAGRIEPRGGGRGALPTSMGQHGPSARARAGRAPGPRPAREASPRLRVHKTFKFVVVGVLLQVVPSSAATIKLHDQSIGTQQWEHSPLGELCPPGSHRSEHPGACNRCTEGVGYTNASNNLFACLPCTACKSDEEERSPCTTTRNTACQCKPGTFRNDNSAEMCRKCSRGCPRGMVKVKDCTPWSDIECVHKESGNGHN

SEQ ID NO: 1983 - protein, 156 aa, synthetic construct
  REGION 1..156: note = TNFRSF10D (Q9UBN6) ECD
ATIPRQDEVPQQTVAPQQQRRSLKEEECPAGSHRSEYTGACNPCTEGVDYTIASNNLPSCLLCTVCKSGQTNKSSCTTTRDTVCQCEKGSFQDKNSPEMCRTCRTGCPRGMVKVSNCTPRSDIKCKNESAASSTGKTPAAEETVTTILGMLASPYH

SEQ ID NO: 1984 - protein, 183 aa, synthetic construct
  REGION 1..183: note = TNFRSF11A (Q9Y6Q6) ECD
IAPPCTSEKHYEHLGRCCNKCEPGKYMSSKCTTTSDSVCLPCGPDEYLDSWNEEDKCLLHKVCDTGKALVAVVAGNSTTPRRCACTAGYHWSQDCECCRRNTECAPGLGAQHPLQLNKDTVCKPCLAGYFSDAFSSTDKCRPWTNCTFLGKRVEHHGTEKSDAVCSSSLPARKPPNEPHVYLP

SEQ ID NO: 1985 - protein, 164 aa, synthetic construct [sequence omitted]

SEQ ID NO: 1986 - protein, 137 aa, synthetic construct
  REGION 1..137: note = TNFRSF18 (Q9Y5U5) ECD
QRPTGGPGCGPGRLLLGTGTDARCCRVHTTRCCRDYPGEECCSEWDCMCVQPEFHCGDPCCTTCRHHPCPPGQGVQSQGKFSFGFQCIDCASGTFSGGHEGHCKPWTDCTQFGFLTVFPGNKTHNAVCVPGSPPAEP

SEQ ID NO: 1987 - protein, 141 aa, synthetic construct
  REGION 1..141: note = TNFRSF19 (Q9NS68) ECD
ESGDCRQQEFRDRSGNCVPCNQCGPGMELSKECGFGYGEDAQCVTCRLHRFKEDWGFQKCKPCLDCAVVNRFQKANCSATSDAICGDCLPGFYRKTKLVGFQDMECVPCGDPPPPYEPHCASKVNLVKIASTASSPRDTAL

SEQ ID NO: 1988 - protein, 182 aa, synthetic construct
  REGION 1..182: note = TNFRSF1A (P19438) ECD
LVPHLGDREKRDSVCPQGKYIHPQNNSICCTKCHKGTYLYNDCPGPGQDTDCRECESGSFTASENHLRHCLSCSKCRKEMGQVEISSCTVDRDTVCGCRKNQYRHYWSENLFQCFNCSLCLNGTVHLSCQEKQNTVCTCHAGFFLRENECVSCSNCKKSLECTKLCLPQIENVKGTEDSGTT

SEQ ID NO: 1989 - protein, 235 aa, synthetic construct
  REGION 1..235: note = TNFRSF1B (P20333) ECD
LPAQVAFTPYAPEPGSTCRLREYYDQTAQMCCSKCSPGQHAKVFCTKTSDTVCDSCEDSTYTQLWNWVPECLSCGSRCSSDQVETQACTREQNRICTCRPGWYCALSKQEGCRLCAPLRKCRPGFGVARPGTETSDVVCKPCAPGTFSNTTSSTDICRPHQICNVVAIPGNASMDAVCTSTSPTRSMAPGAVHLPQPVSTRSQHTQPTPEPSTAPSTSFLLPMGPSPPAEGSTGD

SEQ ID NO: 1990 - protein, 308 aa, synthetic construct
  REGION 1..308: note = TNFRSF21 (O75509) ECD
QPEQKASNLIGTYRHVDRATGQVLTCDKCPAGTYVSEHCTNTSLRVCSSCPVGTFTRHENGIEKCHDCSQPCPWPMIEKLPCAALTDRECTCPPGMFQSNATCAPHTVCPVGWGVRKKGTETEDVRCKQCARGTFSDVPSSVMKCKAYTDCLSQNLVVIKPGTKETDNVCGTLPSFSSSTSPSPGTAIFPRPEHMETHEVPSSTYVPKGMNSTESNSSASVRPKVLSSIQEGTVPDNTSSARGKEDVNKTLPNLQVVNHQQGPHHRHILKLLPSMEATGGEKSSTPIKGPKRGHPRQNLHKHFDINEH

SEQ ID NO: 1991 - protein, 175 aa, synthetic construct
  REGION 1..175: note = TNFRSF25 (Q93038) ECD
QGGTRSPRCDCAGDFHKKIGLFCCRGCPAGHYLKAPCTEPCGNSTCLVCPQDTFLAWENHHNSECARCQACDEQASQVALENCSAVADTRCGCKPGWFVECQVSQCVSSSPFYCQPCLDCGALHRHTRLLCSRRDTDCGTCLPGFYEHGDGCVSCPTSTLGSCPERCAAVCGWRQ

SEQ ID NO: 1992 - protein, 186 aa, synthetic construct [sequence omitted]

SEQ ID NO: 1993 - protein, 367 aa, synthetic construct
  REGION 1..367: note = TNFRSF8 (P28908) ECD
FPQDRPFEDTCHGNPSHYYDKAVRRCCYRCPMGLFPTQQCPQRPTDCRKQCEPDYYLDEADRCTACVTCSRDDLVEKTPCAWNSSRVCECRPGMFCSTSAVNSCARCFFHSVCPAGMIVKFPGTAQKNTVCEPASPGVSPACASPENCKEPSSGTIPQAKPTPVSPATSSASTMPVRGGTRLAQEAASKLTRAPDSPSSVGRPSSDPGLSPTQPCPEGSGDCRKQCEPDYYLDEAGRCTACVSCSRDDLVEKTPCAWNSSRTCECRPGMICATSATNSCARCVPYPICAAETVTKPQDMAEKDTTFEAPPLGTQPDCNPTPENGEAPASTSPTQSLLVDSQASKTLPIPTSAPVALSSTGKPVLDAG

SEQ ID NO: 1994 - protein, 163 aa, synthetic construct
  REGION 1..163: note = TNFRSF9 (Q07011) ECD
LQDPCSNCPAGTFCDNNRNQICSPCPPNSFSSAGGQRTCDICRQCKGVFRTRKECSSTSNAECDCTPGFHCLGAGCSMCEQDCKQGQELTKKGCKDCCFGTFNDQKRGICRPWTNCSLDGKSVLVNGTKERDVVCGPSPADLSPGASSVTPPAPAREPGHSPQ

SEQ ID NO: 1995 - protein, 282 aa, synthetic construct
  REGION 1..282: note = TP53I13 (Q8NBR0) ECD
GPAEEAGAHCPESLWPLPPQVSPRVTYTRVSPGQAEDVTFLYHPCAHPWLKLQLALLAYACMANPSLTPDFSLTQDRPLVLTAWGLALEMAWVEPAWAAHWLMRRRRRKQRKKKAWIYCESLSGPAPSEPTPGRGRLCRRGCVQALALAFALRSWRPPGTEVTSQGPRQPSSSGAKRRRLRAALGPQPTRSALRFPSASPGSLKAKQSMAGIPGRESNAPSVPTVSLLPGAPGGNASSRTEAQVPNGQGSPGGCVCSSQASPAPRAAAPPRAARGPTPRTEE

SEQ ID NO: 1996 - protein, 324 aa, synthetic construct
  REGION 1..324: note = TPBG (Q13641) ECD
SSPTSSASSFSSSAPFLASAVSAQPPLPDQCPALCECSEAARTVKCVNRNLTEVPTDLPAYVRNLFLTGNQLAVLPAGAFARRPPLAELAALNLSGSRLDEVRAGAFEHLPSLRQLDLSHNPLADLSPFAFSGSNASVSAPSPLVELILNHIVPPEDERQNRSFEGMVVAALLAGRALQGLRRLELASNHFLYLPRDVLAQLPSLRHLDLSNNSLVSLTYVSFRNLTHLESLHLEDNALKVLHNGTLAELQGLPHIRVFLDNNPWVCDCHMADMVTWLKETEVVQGKDRLTCAYPEKMRNRVLLELNSADLDCDPILPPSLQTS

SEQ ID NO: 1997 - protein, 281 aa, synthetic construct
  REGION 1..281: note = TPBGL (P0DKB5) ECD
CPFQCYCFGGPKLLLRCASGAELRQPPRDVPPDARNLTIVGANLTVLRAAAFAGGDGDGDQAAGVRLPLLSALRLTHNHIEVVEDGAFDGLPSLAALDLSHNPLRALGGGAFRGLPALRSLQLNHALVRGGPALLAALDAALAPLAELRLLGLAGNALSRLPPAALRLARLEQLDVRLNALAGLDPDELRALERDGGLPGPRLLLADNPLRCGCAARPLLAWLRNATERVPDSRRLRCAAPRALLDRPLLDLDGARLRCADSGADARGEEAEAAGPELEAS

SEQ ID NO: 1998 - protein, 828 aa, synthetic construct
  REGION 1..828: note = TPO (P07202) ECD
FFPFISRGKELLWGKPEESRVSSVLEESKRLVDTAMYATMQRNLKKRGILSPAQLLSFSKLPEPTSGVIARAAEIMETSIQAMKRKVNLKTQQSQHPTDALSEDLLSIIANMSGCLPYMLPPKCPNTCLANKYRPITGACNNRDHPRWGASNTALARWLPPVYEDGFSQPRGWNPGFLYNGFPLPPVREVTRHVIQVSNEVVTDDDRYSDLLMAWGQYIDHDIAFTPQSTSKAAFGGGADCQMTCENQNPCFPIQLPEEARPAAGTACLPFYRSSAACGTGDQGALFGNLSTANPRQQMNGLTSFLDASTVYGSSPALERQLRNWTSAEGLLRVHARLRDSGRAYLPFVPPRAPAACAPEPGIPGETRGPCFLAGDGRASEVPSLTALHTLWLREHNRLAAALKALNAHWSADAVYQEARKVVGALHQIITLRDYIPRILGPEAFQQYVGPYEGYDSTANPTVSNVFSTAAFRFGHATIHPLVRRLDASFQEHPDLPGLWLHQAFFSPWTLLRGGGLDPLIRGLLARPAKLQVQDQLMNEELTERLFVLSNSSTLDLASINLQRGRDHGLPGYNEWREFCGLPRLETPADLSTAIASRSVADKILDLYKHPDNIDVWLGGLAENFLPRARTGPLFACLIGKQMKALRDGDWFWWENSHVFTDAQRRELEKHSLSRVICDNTGLTRVPMDAFQVGKFPEDFESCDSITGMNLEAWRETFPQDDKCGFPESVENGDFVHCEESGRRVLVYSCRHGYELQGREQLTCTQEGWDFQPPLCKDVNECADGAHPPCHASARCRNTKGGFQCLCADPYELGDDGRTCVDSGRLPR

SEQ ID NO: 1999 - protein, 264 aa, synthetic construct
  REGION 1..264: note = TPSG1 (Q9NRR2) ECD
RTLQPGCGRPQVSDAGGRIVGGHAAPAGAWPWQASLRLRRMHVCGGSLLSPQWVLTAAHCFSGSLNSSDYQVHLGELEITLSPHFSTVRQIILHSSPSGQPGTSGDIALVELSVPVTLSSRILPVCLPEASDDFCPGIRCWVTGWGYTREGEPLPPPYSLREVKVSVVDTETCRRDYPGPGGSILQPDMLCARGPGDACQDDSGGPLVCQVNGAWVQAGTVSWGEGCGRPNRPGVYTRVPAYVNWIRRHITASGGSESGYPRLP

SEQ ID NO: 2000 - protein, 458 aa, synthetic construct
  REGION 1..458: note = TRABD2A (Q86V40) ECD
ASRRGAPGTANCELKPQQSELNSFLWTIKRDPPSYFFGTIHVPYTRVWDFIPDNSKEAFLQSSIVYFELDLTDPYTISALTSCQMLPQGENLQDVLPRDIYCRLKRHLEYVKLMMPLWMTPDQRGKGLYADYLFNAIAGNWERKRPVWVMLMVNSLTEVDIKSRGVPVLDLFLAQEAERLRKQTGAVEKVEEQCHPLNGLNFSQVIFALNQTLLQQESLRAGSLQIPYTTEDLIKHYNCGDLSSVILSHDSSQVPNFINATLPPQERITAQEIDSYLRRELIYKRNERIGKRVKALLEEFPDKGFFFAFGAGHFMGNNTVLDVLRREGYEVEHAPAGRPIHKGKSKKTSTRPTLSTIFAPKVPTLEVPAPEAVSSGHSTLPPLVSRPGSADTPSEAEQRFRKKRRRSQRRPRLRQFSDLWVRLEESDIVPQLQVPVLDRHISTELRLPRRGHSHHSQM

SEQ ID NO: 2001 - protein, 475 aa, synthetic construct
  REGION 1..475: note = TRABD2B (A6NFA1) ECD
RPQPPDGGQCRPPGSQRDLNSFLWTIRRDPPAYLFGTIHVPYTRVWDFIPDNSKAAFQASTRVYFELDLTDPYTISALASCQLLPHGENLQDVLPHELYWRLKRHLDYVKLMMPSWMTPAQRGKGLYADYLFNAIAGNWERKRPVWVMLMVNSLTERDVRFRGVPVLDLYLAQQAEKMKKTTGAVEQVEEQCHPLNNGLNFSQVLFALNQTLLQQESVRAGSLQASYTTEDLIKHYNCGDLSAVIFNHDTSQLPNFINTTLPPHEQVTAQEIDSYFRQELIYKRNERMGKRVMALLRENEDKICFFAFGAGHFLGNNTVIDILRQAGLEVDHTPAGQAIHSPAPQSPAPSPEGTSTSPAPVTPAAAVPEAPSVTPTAPPEDEDPALSPHLLLPDSLSQLEEFGRQRKWHKRQSTHQRPRQFNDLWVRIEDSTTASPPPLPLQPTHSSGTAKPPFQLSDQLQQQDPPGPASSSAPT

SEQ ID NO: 2002 - protein, 185 aa, synthetic construct
  REGION 1..185: note = TREM1 (Q9NP99) ECD
ATKLTEEKYELKEGQTLDVKCDYTLEKFASSQKAWQIIRDGEMPKTLACTERPSKNSHPVQVGRIILEDYHDHGLLRVRMVNLQVEDSGLYQCVIYQPPKEPHMLFDRIRLVVTKGFSGTPGSNENSTQNVYKIPPTTTKALCPLYTSPRTVTQAPPKSTADVSTPDSEINLTNVTDIIRVPVFN

SEQ ID NO: 2003 - protein, 156 aa, synthetic construct [sequence omitted]

SEQ ID NO: 2004 - protein, 250 aa, synthetic construct
  REGION 1..250: note = TREML2 (Q5T2D2) ECD
GPSADSVYTKVRLLEGETLSVQCSYKGYKNRVEGKVWCKIRKKKCEPGFARVWVKGPRYLLQDDAQAKVVNITMVALKLQDSGRYWCMRNTSGILYPLMGFQLDVSPAPQTERNIPFTHLDNILKSGTVTTGQAPTSGPDAPFTTGVMVFTPGLITLPRLLASTRPASKTGYSFTATSTTSQGPRRTMGSQTVTASPSNARDSSAGPESISTKSGDLSTRSPTTGLCLTSRSLLNRLPSMPSIRHQDVYS

SEQ ID NO: 2005 - protein, 671 aa, synthetic construct
  REGION 1..671: note = TRIL (Q7L0X0) ECD
VCPERCDCQHPQHLLCTNRGLRVVPKTSSLPSPHDVLTYSLGGNFITNITAFDFHRLGQLRRLDLQYNQIRSLHPKTFEKLSRLEELYLGNNLLQALAPGTLAPLRKLRILYANGNEISRLSRGSFEGLESLVKLRLDGNALGALPDAVFAPLGNLLYLHLESNRIRFLGKNAFAQLGKLRFLNLSANELQPSLRHAATFAPLRSLSSLILSANNLQHLGPRIFQHLPRLGLLSLRGNQLTHLAPEAFWGLEALRELRLEGNRLSQLPTALLEPLHSLEALDLSGNELSALHPATFGHLGRLRELSLRNNALSALSGDIFAASPALYRLDLDGNGWTCDCRLRGLKRWMGDWHSQGRLLTVFVQCRHPPALRGKYLDYLDDQQLQNGSCADPSPSASLTADRRRQPLPTAAGEEMTPPAGLAEELPPQPQLQQQGRFLAGVAWDGAARELVGNRSALRLSRRGPGLQQPSPSVAAAAGPAPQSLDLHKKPQRGRPTRADPALAEPTPTASPGSAPSPAGDPWQRATKHRLGTEHQERAAQSDGGAGLPPLVSDPCDFNKFILCNLTVEAVGADSASVRWAVREHRSPRPLGGARFRLLFDRFGQQPKFHRFVYLPESSDSATLRELRGDTPYLVCVEGVLGGRVCPVAPRDHCAGLVTLPEAGSRGGVDYQ

SEQ ID NO: 2006 - protein, 289 aa, synthetic construct
  REGION 1..289: note = TXNDC15 (Q96J42) ECD
VEVAEESGRLWSEEQPAHPLQVGAVYLGEEELLHDPMGQDRAAEEANAVLGLDTQGDHMVMLSVIPGEAEDKVSSEPSGVTCGAGGAEDSRCNVRESLFSLDGAGAHFPDREEEYYTEPEVAESDAAPTEDSNNTESLKSPKVNCEERNITGLENFTLKILNMSQDLMDFLNPNGSDCTLVLFYTPWCRFSASLAPHFNSLPRAFPALHFLALDASQHSSLSTRFGTVAVPNILLFQGAKPMARFNHTDRTLETLKIFIFNQTGIEAKKNVVVTQADQIGPLPSTLIKS

SEQ ID NO: 2007 - protein, 458 aa, synthetic construct
  REGION 1..458: note = TYR (P14679) ECD
HFPRACVSSKNLMEKECCPPWSGDRSPCGQLSGRGSCQNILLSNAPLGPQFPFTGVDDRESWPSVFYNRTCQCSGNFMGFNCGNCKFGFWGPNCTERRLLVRRNIFDLSAPEKDKFFAYLTLAKHTISSDYVIPIGTYGQMKNGSTPMFNDINIYDLFVWMHYYVSMDALLGGSEIWRDIDFAHEAPAFLPWHRLFLLRWEQEIQKLTGDENFTIPYWDWRDAEKCDICTDEYMGGQHPTNPNLLSPASFFSSWQIVCSRLEEYNSHQSLCNGTPEGPLRRNPGNHDKSRTPRLPSSADVEFCLSLTQYESGSMDKAANFSFRNTLEGFASPLTGIADASQSSMHNALHIYMNGTMSQVQGSANDPIFLLHHAFVDSIFEQWLRRHRPLQEVYPEANAPIGHNRESYMVPFIPLYRNGDFFISSKDLGYDYSYLQDSDPDSFQDYIKSYLEQASRIWS

SEQ ID NO: 2008 - protein, 389 aa, synthetic construct
  REGION 1..389: note = TYRO3 (Q06418) ECD
AGLKLMGAPVKLTVSQGQPVKLNCSVEGMEEPDIQWVKDGAVVQNLDQLYIPVSEQHWIGFLSLKSVERSDAGRYWCQVEDGGETEISQPVWLTVEGVPFFTVEPKDLAVPPNAPFQLSCEAVGPPEPVTIVWWRGTTKIGGPAPSPSVLNVTGVTQSTMFSCEAHNLKGLASSRTATVHLQALPAAPFNITVTKLSSSNASVAWMPGADGRALLQSCTVQVTQAPGGWEVLAVVVPVPPFTCLLRDLVPATNYSLRVRCANALGPSPYADWVPFQTKGLAPASAPQNLHAIRTDSGLILEWEEVIPEAPLEGPLGPYKLSWVQDNGTQDELTVEGTRANLTGWDPQKDLIVRVCVSNAVGCGPWSQPLVVSSHDRAGQQGPPHSRTSW

SEQ ID NO: 2009 - protein, 453 aa, synthetic construct
  REGION 1..453: note = TYRP1 (P17643) ECD
QFPRQCATVEALRSGMCCPDLSPVSGPGTDRCGSSSGRGRCEAVTADSRPHSPQYPHDGRDDREVWPLRFFNRTCHCNGNFSGHNCGTCRPGWRGAACDQRVLIVRRNLLDLSKEEKNHFVRALDMAKRTTHPLFVIATRRSEEILGPDGNTPQFENISIYNYFVWTHYYSVKKTFLGVGQESFGEVDFSHEGPAFLTWHRYHLLRLEKDMQEMLQEPSFSLPYWNFATGKNVCDICTDDLMGSRSNFDSTLISPNSVFSQWRVVCDSLEDYDTLGTLCNSTEDGPIRRNPAGNVARPMVQRLPEPQDVAQCLEVGLFDTPPFYSNSTNSFRNTVEGYSDPTGKYDPAVRSLHNLAHLFLNGTGGQTHLSPNDPIFVLLHTFTDAVFDEWLRRYNADISTFPLENAPIGHNRQYNMVPFWPPVTNTEMFVTAPDNLGYTYEIQWPSREFSVPE

SEQ ID NO: 2010 - protein, 451 aa, synthetic construct
  REGION 1..451: note = UGT8 (Q16880) ECD
AKIIIVPPIMFESHMYIFKTLASALHERGHHTVFLLSEGRDIAPSNHYSLQRYPGIFNSTTSDAFLQSKMRNIFSGRLTAIELFDILDHYTKNCDLMVGNHALIQGLKKEKFDLLLVDPNDMCGFVIAHLLGVKYAVFSTGLWYPAEVGAPAPLAYVPEFNSLLTDRMNLLQRMKNTGVYLISRLGVSFLVLPKYERIMQKYNLLPEKSMYDLVHGSSLWMLCTDVALEFPRPTLPNVVYVGGILTKPASPLPEDLQRWVNGANEHGFVLVSFGAGVKYLSEDIANKLAGALGRLPQKVIWRFSGPKPKNLGNNTKLIEWLPQNDLLGHSKIKAFLSHGGLNSIFETIYHGVPVVGIPLFGDHYDTMTRVQAKGMGILLEWKTVTEKELYEALVKVINNPSYRQRAQKLSEIHKDQPGHPVNRTIYWIDYIIRHNGAHHLRAAVHQISFCQ

SEQ ID NO: 2011 - protein, 1251 aa, synthetic construct
  REGION 1..1251: note = UMODL1 (Q5DID0) ECD
SGFTEKGLSLLGYQLCSHRVTHTVQKVEAVQTSYTSYVSCGGWIPWRRCPKMVYRTQYLVVEVPESRNVTDCCEGYEQLGLYCVLPLNQSGQFTSRPGACPAEGPEPSTSPCSLDIDCPGLEKCCPWSGGRYCMAPAPQAPERDPVGSWYNVTILVKMDFKELQQVDPRLLNHMRLLHSLVTSALQPMASTVHHLHSAPGNASTTVSRLLLGLPRPLPVADVSTLLGDIAKRVYEVISVQVQDVNECFYEELNACSGRELCANLEGSYWCVCHQEAPATSPRKLNLEWEDCPPVSDYVVLNVTSDSFQVSWRLNSTQNHTFHVRVYRGMELLRSARTQSQALAVAGLEAGVLYRVKTSYQGCGADVSTTLTIKTNAQVFEVTIKIVNHNLTEKLLNRSSVEYQDFSRQLLHEVESSFPPVVSDLYRSGKLRMQIVSLQAGSVVVRLKLTVQDPGFPMGISTLAPILQPLLASTVFQIDRQGTRVQDWDECVDSAEHDCSPAAWCINLEGSYTCQCRTTRDATPSRAGRACEGDLVSPMGGGLSAATGVTVPGLGTGTAALGLENFTLSPSPGYPQGTPAAGQAWTPEPSPRRGGSNVVGYDRNNTGKGVEQELQGNSIMEPPSWPSPTEDPTGHFLWHATRSTRETLLNPTWLRNEDSGPSGSVDLPLTSTLTALKTPACVPVSIGRIMVSNVTSTGFHLAWEADLAMDSTFQLTLTSMWSPAVVLETWNTSVTLSGLEPGVLHLVEIMAKACGKEGARAHLKVRTAARKLIGKVRIKNVRYSESFRNASSQEYRDFLELFFRMVRGSLPATMCQHMDAGGVRMEVVSVTNGSIVVEFHLLIIADVDVQEVSAAFLTAFQTVPLLEVIRGDTFIQDYDECERKEDDCVPGTSCRNTLGSFTCSCEGGAPDFPVEYSERPCEGDSPGNETWATSPERPLTTAGTKAAFVQGTSPTPQGLPQRLNLTGAVRVLCEIEKVVVAIQKRFLQQESIPESSLYLSHPSCNVSHSNGTHVLLEAGWSECGTLMQSNMTNTVVRTTLRNDLSQEGIIHHLKILSPIYCAFQNDLLTSSGFTLEWGVYTIIEDLHGAGNFVTEMQLFIGDSPIPQNYSVSASDDVRIEVGLYRQKSNLKVVLTECWATPSSNARDPITFSFINNSCPVPNTYTNVIENGNSNKAQFKLRIFSFINDSIVYLHCKLRVCMESPGATCKINCNNFRLLQNSETSATHQMSWGPLIRSEGEPPHAEAGLGAGY

SEQ ID NO: 2012 - protein, 281 aa, synthetic construct
  REGION 1..281: note = UNC5A (Q6ZN44) ECD
QQSATVANPVPGANPDLLPHFLVEPEDVYIVKNKPVLLVCKAVPATQIFFKCNGEWVRQVDHVIERSTDGSSGLPTMEVRINVSRQQVEKVFGLEEYWCQCVAWSSSGTTKSQKAYIRIAYLRKNFEQEPLAKEVSLEQGIVLPCRPPEGIPPAEVEWLRNEDLVDPSLDPNVYITREHSLVVRQARLADTANYTCVAKNIVARRRSASAAVIVYVDGSWSPWSKWSACGLDCTHWRSRECSDPAPRNGGEECQGTDLDTRNCTSDLCVHTASGPEDVALY

SEQ ID NO: 2013 - protein, 351 aa, synthetic construct
  REGION 1..351: note = UNC5B (Q8IZJ1) ECD
GTDSGSEVLPDSFPSAPAEPLPYFLQEPQDAYIVKNKPVELRCRAFPATQIYFKCNGEWVSQNDHVTQEGLDEATGLRVREVQIEVSRQQVEELFGLEDYWCQCVAWSSAGTTKSRRAYVRIAYLRKNFDQEPLGKEVPLDHEVLLQCRPPEGVPVAEVEWLKNEDVIDPTQDTNFLLTIDHNLIIRQARLSDTANYTCVAKNIVAKRRSTTATVIVYVNGGWSSWAEWSPCSNRCGRGWQKRTRTCTNPAPLNGGAFCEGQAFQKTACTTICPVDGAWTEWSKWSACSTECAHWRSRECMAPPPQNGGRDCSGTLLDSKNCTDGLCMQNKKTLSDPNSHLLEASGDAALY

SEQ ID NO: 2014 - protein, 340 aa, synthetic construct
  REGION 1..340: note = UNC5C (O95185) ECD
QDDDFFHELPETFPSDPPEPLPHFLIEPEEAYIVKNKPVNLYCKASPATQIYFKCNSEWVHQKDHIVDERVDETSGLIVREVSIEISRQQVEELFGPEDYWCQCVAWSSAGTTKSRKAYVRIAYLRKTFEQEPLGKEVSLEQEVLLQCRPPEGIPVAEVEWLKNEDIIDPVEDRNFYITIDHNLIIKQARLSDTANYTCVAKNIVAKRKSTTATVIVYVNGGWSTWTEWSVCNSRCGRGYQKRTRTCTNPAPLNGGAFCEGQSVQKIACTTLCPVDGRWTPWSKWSTCGTECTHWRRRECTAPAPKNGGKDCDGLVLQSKNCTDGLCMQTAPDSDDVALY

SEQ ID NO: 2015 - protein, 347 aa, synthetic construct
  REGION 1..347: note = UNC5D (Q6UXZ4) ECD
ARGTDNGEALPESIPSAPGTLPHFIEEPDDAYIIKSNPIALRCKARPAMQIFFKCNGEWVHQNEHVSEETLDESSGLKVREVFINVTRQQVEDFHGPEDYWCQCVAWSHLGTSKSRKASVRIAYLRKNFEQDPQGREVPIEGMIVLHCRPPEGVPAAEVEWLKNEEPIDSEQDENIDTRADHNLIIRQARLSDSGNYTCMAANIVAKRRSLSATVVVYVNGGWSSWTEWSACNVRCGRGWQKRSRTCTNPAPLNGGAFCEGMSVQKITCTSLCPVDGSWEVWSEWSVCSPECEHLRIRECTAPPPRNGGKFCEGLSQESENCTDGLCILDKKPLHEIKPQSIENASD

SEQ ID NO: 2016 - protein, 71 aa, synthetic construct
  REGION 1..71: note = UPK2 (O00526) ECD
ELVSVVDSGAGFTVTRLSAYQVTNLVPGTKFYISYLVKKGTATESSREIPMSTLPRRNMESIGLGMARTGG

SEQ ID NO: 2017 - protein, 189 aa, synthetic construct
  REGION 1..189: note = UPK3A (O75631) ECD
VNLQPQLASVTFATNNPTLTTVALEKPLCMFDSKEALTGTHEVYLYVLVDSAISRNASVQDSTNTPLGSTFLQTEGGRTGPYKAVAFDLIPCSDLPSLDAIGDVSKASQILNAYLVRVGANGTCLWDPNFQGLCNAPLSAATEYRFKYVLVNMSTGLVEDQTLWSDPIRTNQLTPYSTIDTWPGRRSGG

SEQ ID NO: 2018 - protein, 211 aa, synthetic construct
  REGION 1..211: note = UPK3B (Q9BT76) ECD
EWGSWMDASSQTQGAGGPAGVIGPWAPAPLRLGEAAPGTPTPVSVAHLLSPVATELVPYTPQITAWDLEGKVTATTFSLEQPRCVFDGLASASDTVWLVVAFSNASRGFQNPETLADIPASPQLLTDGHYMTLPLSPDQLPCGDPMAGSGGAPVLRVGHDHGCHQQPFCNAPLPGPGPYREDPRIHRHLARAAKWQHDRHYLHPLFSGRPP

SEQ ID NO: 2019 - protein, 171 aa, synthetic construct
  REGION 1..171: note = UPK3BL (B0FP48) ECD
GTDVAAPEHISYVPQLSNDTLAGRLTLSTFTLEQPLGQFSSHNISDLDTIWLVVALSNATQSFTAPRTNQDIPAPANFSQRGYYLTLRANRVLYQTRGQLHVLRVGNDTHCQPTKIGCNHPLPGPGPYRVKFLVMNDEGPVAETKWSSDTRLQQAQALRAVPGPQSPGTVV

SEQ ID NO: 2020 - protein, 5011 aa, synthetic construct
  REGION 1..5011: note = USH2A (O75445) ECD
ESRGLFPRLENVGAFKKVSIVPTQAVCGLPDRSTFCHSSAAAESIQFCTQRFCIQDCPYRSSHPTYTALFSAGLSSCITPDKNDLHPNAHSNSASFIFGNHKSCFSSPPSPKLMASFTLAVWLKPEQQGVMCVIEKTVDGQIVFKLTISEKETMFYYRTVNGLQPPIKVMTLGRILVKKWIHLSVQVHQTKISFFINGVEKDHTPFNARTLSGSITDFASGTVQIGQSLNGLEQFVGRMQDFRLYQVALTNREILEVFSGDLLRLHAQSHCRCPGSHPRVHPLAQRYCIPNDAGDTADNRVSRLNPEAHPLSFVNDNDVGTSWVSNVFTNITQLNQGVTISVDLENGQYQVFYIIIQFFSPQPTEIRIQRKKENSLDWEDWQYFARNCGAFGMKNNGDLEKPDSVNCLQLSNFTPYSRGNVTFSILTPGPNYRPGYNNFYNTPSLQEFVKATQIRFHFHGQYYTTETAVNLRHRYYAVDEITISGRCQCHGHADNCDTTSQPYRCLCSQESFTEGLHCDRCLPLYNDKPFRQGDQVYAFNCKPCQCNSHSKSCHYNISVDPFPFEHFRGGGGVCDDCEHNTTGRNCELCKDYFFRQVGADPSAIDVCKPCDCDTVGTRNGSILCDQIGGQCNCKRHVSGRQCNQCQNGFYNLQELDPDGCSPCNCNTSGTVDGDITCHQNSGQCKCKANVIGLRCDHCNFGFKFLRSFNDVGCEPCQCNLHGSVNKFCNPHSGQCECKKEAKGLQCDTCRENFYGLDVTNCKACDCDTAGSLPGTVCNAKTGQCICKPNVEGRQCNKCLEGNFYLRQNNSFLCLPCNCDKTGTINGSLLCNKSTGQCPCKLGVTGLRCNQCEPHRYNLTIDNFQHCQMCECDSLGTLPGTICDPISGQCLCVPNRQGRRCNQCQPGFYISPGNATGCLPCSCHTTGAVNHICNSLTGQCVCQDASIAGQRCDQCKDHYFGFDPQTGRCQPCNCHLSGALNETCHLVTGQCFCKQFVTGSKCDACVPSASHLDVNNLLGCSKTPFQQPPPRGQVQSSSAINLSWSPPDSPNAHWLTYSLLRDGFEIYTTEDQYPYSIQYFLDTDLLPYTKYSYYIETTNVHGSTRSVAVTYKTKPGVPEGNLTLSYIIPIGSDSVTLTWTTLSNQSGPIEKYILSCAPLAGGQPCVSYEGHETSATIWNLVPFAKYDFSVQACTSGGCLHSLPITVTTAQAPPQRLSPPKMQKISSTELHVEWSPPAELNGIIIRYELYMRRLRSTKETTSEESRVFQSSGWLSPHSFVESANENALKPPQTMTTITGLEPYTKYEFRVLAVNMAGSVSSAWVSERTGESAPVFMIPPSVFPLSSYSLNISWEKPADNVTRGKVVGYDINMLSEQSPQQSIPMAFSQLLHTAKSQELSYTVEGLKPYRIYEFTITLCNSVGCVTSASGAGQTLAAAPAQLRPPLVKGINSTTIHLRWFPPEELNGPSPIYQLERRESSLPALMTTMMKGIRFIGNGYCKFPSSTHPVNTDFTGIKASFRTKVPEGLIVFAASPGNQEEYFALQLKKGRLYFLFDPQGSPVEVTTTNDHGKQYSDGKWHEIIAIRHQAFGQITLDGIYTGSSAILNGSTVIGDNTGVFLGGLPRSYTILRKDPEIIQKGFVGCLKDVHFMKNYNPSAIWEPLDWQSSEEQINVYNSWEGCPASLNEGAQFLGAGFLELHPYMFHGGMNFEISFKFRTDQLNGLLLFVYNKDGPDFLAMELKSGILTFRLNTSLAFTQVDLLLGLSYCNGKWNKVIIKKEGSFISASVNGLMKHASESGDQPLVVNSPVYVGGIPQELLNSYQHLCLEQGFGGCMKDVKFTRGAVVNLASVSSGAVRVNLDGCLSTDSAVNCRGNDSILVYQGKEQSVYEGGLQPFTEYLYRVIASHEGGSVYSDWSRGRTTGAAPQSVPTPSRVRSLNGYSIEVTWDEPVVRGVIEKYILKAYSEDSTRPPRMPSASAEFVNTSNLTGILTGLLPFKNYAVTLTACTLAGCTESSHALNISTPQEAPQEVQPPVAKSLPSSLLLSWNPPKKANGIITQYCLYMDGRLIYSGSEENYIVTDLAVFTPHQFLLSACTHVGCTNSSWVLLYTAQLPPEHVDSPVLTVLDSRTIHIQWKQPRKISGILERYVLYMSNHTHDFTIWSVIYNSTELFQDHMLQYVLPGNKYLIKLGACTGGGCTVSEASEALTDEDIPEGVPAPKAHSYSPDSFNVSWTEPEYPNGVITSYGLYLDGILIHNSSELSYRAYGFAPWSLHSFRVQACTAKGCALGPLVENRTLEAPPEGTVNVFVKTQGSRKAHVRWEAPFRPNGLLTHSVLFTGIFYVDPVGNNYTLLNVTKVMYSGEETNLWVLIDGLVPFTNYTVQVNISNSQGSLITDPITIAMPPGAPDGVLPPRLSSATPTSLQVVWSTPARNNAPGSPRYQLQMRSGDSTHGFLELFSNPSASLSYEVSDLQPYTEYMFRLVASNGFGSAHSSWIPFMTAEDKPGPVVPPILLDVKSRMMLVTWQHPRKSNGVITHYNIYLHGRLYLRTPGNVTNCTVMHLHPYTAYKFQVEACTSKGCSLSPESQTVWTLPGAPEGIPSPELFSDTPTSVIISWQPPTHPNGLVENFTIERRVKGKEEVTTLVTLPRSHSMRFIDKTSALSPWTKYEYRVLMSTLHGGTNSSAWVEVTTRPSRPAGVQPPVVTVLEPDAVQVTWKPPLIQNGDILSYEIHMPDPHITLTNVTSAVLSQKVTHLIPFTNYSVTIVACSGGNGYLGGCTESLPTYVTTHPTVPQNVGPLSVIPLSESYVVISWQPPSKPNGPNLRYELLRRKIQQPLASNPPEDLNRWHNIYSGTQWLYEDKGLSRFTTYEYMLFVHNSVGFTPSREVTVTTLAGLPERGANLTASVLNHTAIDVRWAKPTVQDLQGEVEYYTLFWSSATSNDSLKILPDVNSHVIGHLKPNTEYWIFISVFNGVHSINSAGLHATTCDGEPQGMLPPEVVIINSTAVRVIWTSPSNPNGVVTEYSIYVNNKLYKTGMNVPGSFILRDLSPFTIYDIQVEVCTIYACVKSNGTQITTVEDTPSDIPTPTIRGITSRSLQIDWVSPRKPNGIILGYDLLWKTWYPCAKTQKLVQDQSDELCKAVRCQKPESICGHICYSSEAKVCCNGVLYNPKPGHRCCEEKYIPFVLNSTGVCCGGRIQEAQPNHQCCSGYYARILPGEVCCPDEQHNRVSVGIGDSCCGRMPYSTSGNQICCAGRLHDGHGQKCCGRQIVSNDLECCGGEEGVVYNRLPGMFCCGQDYVNMSDTICCSASSGESKAHIKKNDPVPVKCCETELIPKSQKCCNGVGYNPLKYVCSDKISTGMMMKETKECRILCPASMEATEHCGRCDFNFTSHICTVIRGSHNSTGKASIEEMCSSAEETIHTGSVNTYSYTDVNLKPYMTYEYRISAWNSYGRGLSKAVRARTKEDVPQGVSPPTWTKIDNLEDTIVLNWRKPIQSNGPIIYYILLRNGIERFRGTSLSFSDKEGIQPFQEYSYQLKACTVAGCATSSKVVAATTQGVPESILPPSITALSAVALHLSWSVPEKSNGVIKEYQIRQVGKGLIHTDTTDRRQHTVTGLQPYTNYSFTLTACTSAGCTSSEPFLGQTLQAAPEGVWVTPRHIIINSTTVELYWSLPEKPNGLVSQYQLSRNGNLLFLGGSEEQNFTDKNLEPNSRYTYKLEVKTGGGSSASDDYIVQTPMSTPEEIYPPYNITVIGPYSIFVAWIPPGILIPEIPVEYNVLLNDGSVTPLAFSVGHHQSTLLENLTPFTQYEIRIQACQNGSCGVSSRMFVKTPEAAPMDLNSPVLKALGSACIEIKWMPPEKPNGIIINYFIYRRPAGIEEESVLFVWSEGALEFMDEGDTLRPFTLYEYRVRACNSKGSVESLWSLTQTLEAPPQDFPAPWAQATSAHSVLLNWTKPESPNGIISHYRVVYQERPDDPTFNSPTVHAFTVKGTSHQAHLYGLEPFTTYRIGVVAANHAGEILSPWTLIQTLESSPSGLRNFIVEQKENGRALLLQWSEPMRTNGVIKTYNIFSDGFLEYSGLNRQFLFRRLDPFTLYTLTLEACTRAGCAHSAPQPLWTDEAPPDSQLAPTVHSVKSTSVELSWSEPVNPNGKIIRYEVIRRCFEGKAWGNQTIQADEKIVFTEYNTERNTFMYNDTGLQPWTQCEYKIYTWNSAGHTCSSWNVVRTLQAPPEGLSPPVISYVSMNPQKLLISWIPPEQSNGIIQSYRLQRNEMLYPFSFDPVTFNYTDEELLPFSTYSYALQACTSGGCSTSKPTSITTLEAAPSEVSPPDLWAVSATQMNVCWSPPTVQNGKITKYLVRYDNKESLAGQGLCLLVSHLQPYSQYNFSLVACTNGGCTASVSKSAWTMEALPENMDSPTLQVTGSESIEITWKPPRNPNGQIRSYELRRDGTIVYTGLETRYRDFTLTPGVEYSYTVTASNSQGGILSPLVKDRTSPSAPSGMEPPKLQARGPQEILVNWDPPVRTNGDIINYTLFIRELFERETKIIHINTTHNSFGMQSYIVNQLKPFHRYEIRIQACTTLGCASSDWTFIQTPEIAPLMQPPPHLEVQMAPGGFQPTVSLLWTGPLQPNGKVLYYELYRRQIATQPRKSNPVLIYNGSSTSFIDSELLPFTEYEYQVWAVNSAGKAPSSWTWCRTGPAPPEGLRAPTFHVISSTQAVVNISAPGKPNGIVSLYRLFSSSAHGAETVLSEGMATQQTLHGLQAFTNYSIGVEACTCFNCCSKGPTAELRTHPAPPSGLSSPQIGTLASRTASFRWSPPMFPNGVIHSYELQFHVACPPDSALPCTPSQIETKYTGLGQKASLGGLQPYTTYKLRVVAHNEVGSTASEWISFTTQKELPQYRAPFSVDSNLSVVCVNWSDTFLLNGQLKEYVLTDGGRRVYSGLDTTLYIPRTADKTFFFQVICTTDEGSVKTPLIQYDTSTGLGLVLTTPGKKKGSRSKSTEFYSELW

SEQ ID NO: 2021 - protein, 552 aa, synthetic construct
  REGION 1..552: note = VASN (Q6EMK4) ECD
CPSGCQCSQPQTVFCTARQGTTVPRDVPPDTVGLYVFENGITMLDAGSFAGLPGLQLLDLSQNQIASLPSGVFQPLANLSNLDLTANRLHEITNETFRGLRRLERLYLGKNRIRHIQPGAFDTLDRLLELKLQDNELRALPPLRLPRLLLLDLSHNSLLALEPGILDTANVEALRLAGLGLQQLDEGLFSRLRNLHDLDVSDNQLERVPPVIRGLRGLTRLRLAGNTRIAQLRPEDLAGLAALQELDVSNLSLQALPGDLSGLFPRLRLLAAARNPFNCVCPLSWFGPWVRESHVTLASPEETRCHFPPKNAGRLLLELDYADFGCPATTTTATVPTTRPVVREPTALSSSLAPTWLSPTEPATEAPSPPSTAPPTVGPVPQPQDCPPSTCLNGGTCHLGTRHHLACLCPEGFTGLYCESQMGQGTRPSPTPVTPRPPRSLTLGIEPVSPTSLRVGLQRYLQGSSVQLRSLRLTYRNLSGPDKRLVTLRLPASLAEYTVTQLRPNATYSVCVMPLGPGRVPEGEEACGEAHTPPAVHSNHAPVTQAREGNLP

SEQ ID NO: 2022 - protein, 674 aa, synthetic construct
  REGION 1..674: note = VCAM1 (P19320) ECD
FKIETTPESRYLAQIGDSVSLTCSTTGCESPFFSWRTQIDSPLNGKVTNEGTTSTLTMNPVSFGNEHSYLCTATCESRKLEKGIQVEIYSFPKDPEIHLSGPLEAGKPITVKCSVADVYPFDRLEIDLLKGDHLMKSQEFLEDADRKSLETKSLEVTFTPVIEDIGKVLVCRAKLHIDEMDSVPTVRQAVKELQVYISPKNTVISVNPSTKLQEGGSVTMTCSSEGLPAPEIFWSKKLDNGNLQHLSGNATLTLIAMRMEDSGIYVCEGVNLIGKNRKEVELIVQEKPFTVEISPGPRIAAQIGDSVMLTCSVMGCESPSFSWRTQIDSPLSGKVRSEGTNSTLTLSPVSFENEHSYLCTVTCGHKKLEKGIQVELYSFPRDPEIEMSGGLVNGSSVTVSCKVPSVYPLDRLEIELLKGETILENIEFLEDTDMKSLENKSLEMTFIPTIEDTGKALVCQAKLHIDDMEFEPKQRQSTQTLYVNVAPRDTTVLVSPSSILEEGSSVNMTCLSQGFPAPKILWSRQLPNGELQPLSENATLTLISTKMEDSGVYLCEGINQAGRSRKEVELIIQVTPKDIKLTAFPSESVKEGDTVIISCTCGNVPETWIILKKKAETGDTVLKSIDGAYTIRKAQLKDAGVYECESKNKVGSQLRSLTLDVQGRENNKDYFSPE

SEQ ID NO: 2023 - protein, 770 aa, synthetic construct
  REGION 1..770: note = VLDLR (P98155) ECD
GRKAKCEPSQFQCTNGRCITLLWKCDGDEDCVDGSDEKNCVKKTCAESDFVCNNGQCVPSRWKCDGDPDCEDGSDESPEQCHMRTCRIHEISCGAHSTQCIPVSWRCDGENDCDSGEDEENCGNITCSPDEFTCSSGRCISRNFVCNGQDDCSDGSDELDCAPPTCGAHEFQCSTSSCIPISWVCDDDADCSDQSDESLEQCGRQPVIHTKCPASEIQCGSGECIHKKWRCDGDPDCKDGSDEVNCPSRTCRPDQFECEDGSCIHGSRQCNGIRDCVDGSDEVNCKNVNQCLGPGKFKCRSGECIDISKVCNQEQDCRDWSDEPLKECHINECLVNNGGCSHICKDLVIGYECDCAAGFELIDRKTCGDIDECQNPGICSQICINLKGGYKCECSRGYQMDLATGVCKAVGKEPSLIFTNRRDIRKIGLERKEYIQLVEQLRNTVALDADIAAQKLFWADLSQKAIFSASIDDKVGRHVKMIDNVYNPAAIAVDWVYKTIYWTDAASKTISVATLDGTKRKFLFNSDLREPASIAVDPLSGFVYWSDWGEPAKIEKAGMNGFDRRPLVTADIQWPNGITLDLIKSRLYWLDSKLHMLSSVDLNGQDRRIVLKSLEFLAHPLALTIFEDRVYWIDGENEAVYGANKFTGSELATLVNNLNDAQDIIVYHELVQPSGKNWCEEDMENGGCEYLCLPAPQINDHSPKYTCSCPSGYNVEENGRDCQSTATTVTYSETKDTNTTEISATSGLVPGGINVTTAVSEVSVPPKGTS

SEQ ID NO: 2024 - protein, 211 aa, synthetic construct
  REGION 1..211: note = VSIG1 (Q86XK7) ECD
VQVTIPDGFVNVTVGSNVTLICIYTTTVASREQLSIQWSFFHKKEMEPISIYFSQGGQAVAIGQFKDRITGSNDPGNASITISHMQPADSGIYICDVNNPPDFLGQNQGILNVSVLVKPSKPLCSVQGRPETGHTISLSCLSALGTPSPVYYWHKLEGRDIVPVKENFNPTTGILVIGNLTNFEQGYYQCTAINRLGNSSCEIDLTSSHPE

SEQ ID NO: 2025 - protein, 383 aa, synthetic construct
  REGION 1..383: note = VSIG10 (Q8N0Z9) ECD
VVIGEVHENVTLHCGNISGLRGQVTWYRNNSEPVFLLSSNSSLRPAEPRFSLVDATSLHIESLSLGDEGIYTCQEILNVTQWFQVWLQVASGPYQIEVHIVATGTLPNGTLYAARGSQVDFSCNSSSRPPPVVEWWFQALNSSSESFGHNLTVNFFSLLLISPNLQGNYTCLALNQLSKRHRKVTTELLVYYPPPSAPQCWAQMASGSFMLQLTCRWDGGYPDPDFLWIEEPGGVIVGKSKLGVEMLSESQLSDGKKFKCVTSHIVGPESGASCMVQIRGPSLLSEPMKTCFTGGNVTLTCQVSGAYPPAKILWLRNLTQPEVIIQPSSRHLITQDGQNSTLTIHNCSQDLDEGYYICRADSPVGVREMEIWLSVKEPLNIGG

SEQ ID NO: 2026 - protein, 749 aa, synthetic construct
  REGION 1..749: note = VSIG10L (Q86VR7) ECD
LQQTNFSSAFSSDSKSSSQGLGVEVPSIKPPSWKVPDQFLDSKASAGISDSSWFPEALSSNMSGSFWSNVSAEGQDLSPVSPFSETPGSEVFPDISDPQVPAKDPKPSFTVKTPASNISTQVSHTKLSVEAPDSKFSPDDMDLKLSAQSPESKFSAETHSAASFPQQVGGPLAVLVGTTIRLPLVPIPNPGPPTSLVVWRRGSKVLAAGGLGPGAPLISLDPAHRDHLRFDQARGVLELASAQLDDAGVYTAEVIRAGVSQQTHEFTVGVYEPLPQLSVQPKAPETEEGAAELRLRCLGWGPGRGELSWSRDGRALEAAESEGAETPRMRSEGDQLLIVRPVRSDHARYTCRVRSPFGHREAAADVSVFYGPDPPTITVSSDRDAAPARFVTAGSNVTLRCAAASRPPADITWSLADPAEAAVPAGSRLLLPAVGPGHAGTYACLAANPRTGRRRRSLLNLTVADLPPGAPQCSVEGGPGDRSLRFRCSWPGGAPAASLQFQGLPEGIRAGPVSSVLLAAVPAHPRLSGVPITCLARHLVATRTCTVTPEAPREVLLHPLVAETRLGEAEVALEASGCPPPSRASWAREGRPLAPGGGSRLRLSQDGRKLHIGNFSLDWDLGNYSVLCSGALGAGGDQITLIGPSISSWRLQRARDAAVLTWDVERGALISSFEIQAWPDGPALGRTSTYRDWVSLLILGPQERSAVVPLPPRNPGTWTFRILPILGGQPGTPSQSRVYRAGPTLSHGA

SEQ ID NO: 2027 - protein, 220 aa, synthetic construct
  REGION 1..220: note = VSIG2 (Q96IQ7) ECD
VEVKVPTEPLSTPLGKTAELTCTYSTSVGDSFALEWSFVQPGKPISESHPILYFTNGHLYPTGSKSKRVSLLQNPPTVGVATLKLTDVHPSDTGTYLCQVNNPPDFYTNGLGLINLTVLVPPSNPLCSQSGQTSVGGSTALRCSSSEGAPKPVYNWVRLGTFPTPSPGSMVQDEVSGQLILTNLSLTSSGTYRCVATNQMGSASCELTLSVTEPSQGRVA

SEQ ID NO: 2028 - protein, 119 aa, synthetic construct
  REGION 1..119: note = VSTM1 (Q6UX27) ECD
YEDEKKNEKPPKPSLHAWPSSVVEAESNVTLKCQAHSQNVTFVLRKVNDSGYKQEQSSAENEAEFPFTDLKPKDAGRYFCAYKTTASHEWSESSEHLQLVVTDKHDELEAPSMKTDTRT

SEQ ID NO: 2029 - protein, 157 aa, synthetic construct
  REGION 1..157: note = VSTM4 (Q8IW00) ECD
LNVTVSPGPVVDYLEGENATLLCHVSQKRRKDSLLAVRWFFAHSFDSQEALMVKMTKLRVVQYYGNFSRSAKRRRLRLLEEQRGALYRLSVLTLQPSDQGHYVCRVQEISRHRNKWTAWSNGSSATEMRVISLKASEESSFEKTKETWAFFEDLYVY

SEQ ID NO: 2030 - protein, 119 aa, synthetic construct
  REGION 1..119: note = VSTM5 (A8MXK1) ECD
LQSQGVSLYIPQATINATVKEDILLSVEYSCHGVPTIEWTYSSNWGTQKIVEWKPGTQANISQSHKDRVCTFDNGSIQLFSVGVRDSGYYVITVTERLGSSQFGTIVLHVSEILYEDLH

SEQ ID NO: 2031 - protein, 235 aa, synthetic construct
  REGION 1..235: note = VTCN1 (Q7Z7D3) ECD
LIIGFGISGRHSITVTTVASAGNIGEDGILSCTFEPDIKLSDIVIQWLKEGVLGLVHEFKEGKDELSEQDEMFRGRTAVFADQVIVGNASLRLKNVQLTDAGTYKCYIITSKGKGNANLEYKTGAFSMPEVNVDYNASSETLRCEAPRWFPQPTVVWASQVDQGANFSEVSNTSFELNSENVTMKVVSVLYNVTINNTYSCMIENDIAKATGDIKVTESEIKRRSHLQLLNSKAS

SEQ ID NO: 2032 - protein, 2740 aa, synthetic construct
  REGION 1..2740: note = ZAN (Q9Y493) ECD
RKEKPPDQKLVVRSSRDNYVLTQCDFEDDAKPLCDWSQVSADDEDWVRASGPSPTGSTGAPGGYPNGEGSYLHMESNSFHRGGVARLLSPDLWEQGPLCVHFAHHMFGLSWGAQLRLLLLSGEEGRRPDVLWKHWNTQRPSWMLTTVTVPAGFTLPTRLMFEGTRGSTAYLDIALDALSIRRGSCNRVCMMQTCSFDIPNDLCDWTWIPTASGAKWTQKKGSSGKPGVGPDGDFSSPGSGCYMLLDPKNARPGQKAVLLSPVSLSSGCLSFSFHYILRGQSPGAALHIYASVLGSIRKHTLFSGQPGPNWQAVSVNYTAVGRIQFAVVGVFGKTPEPAVAVDATSIAPCGEGFPQCDFEDNAHPFCDWVQTSGDGGHWALGHKNGPVHGMGPAGGFPNAGGHYIYLEADEFSQAGQSVRLVSRPFCAPGDICVEFAYHMYGLGEGTMLELLLGSPAGSPPIPLWKRVGSQRPYWQNTSVTVPSGHQQPMQLIFKGIQGSNTASVVAMGFILINPGTCPVKVLPELPPVSPVSSTGPSETTGLTENPTISTKKPTVSIEKPSVTTEKPTVPKEKPTIPTEKPTISTEKPTIPSEKPNMPSEKPTIPSEKPTILTEKPTIPSEKPTIPSEKPTISTEKPTVPTEEPTTPTEETTTSMEEPVIPTEKPSIPTEKPSIPTEKPTISMEETIISTEKPTISPEKPTIPTEKPTIPTEKSTISPEKPTTPTEKPTIPTEKPTISPEKPTTPTEKPTISPEKLTIPTEKPTIPTEKPTIPTEKPTISTEEPTTPTEETTISTEKPSIPMEKPTLPTEETTTSVEETTISTEKLTIPMEKPTISTEKPTIPTEKPTISPEKLTIPTEKLTIPTEKPTIPIEETTISTEKLTIPTEKPTISPEKPTISTEKPTIPTEKPTIPTEETTISTEKLTIPTEKPTISPEKLTIPTEKPTISTEKPTIPTEKLTIPTEKPTIPTEKPTIPTEKLTALRPPHPSPTATGLAALVMSPHAPSTPMTSVILGTTTTSRSSTERCPPNARYESCACPASCKSPRPSCGPLCREGCVCNPGFLFSDNHCIQASSCNCFYNNDYYEPGAEWFSPNCTEHCRCWPGSRVECQISQCGTHTVCQLKNGQYGCHPYAGTATCLVYGDPHYVTFDGRHFGFMGKCTYILAQPCGNSTDPFFRVTAKNEEQGQEGVSCLSKVYVTLPESTVTLLKGRRTLVGGQQVTLPAIPSKGVFLGASGRFVELQTEFGLRVRWDGDQQLYVTVSSTYSGKLCGLCGNYDGNSDNDHLKLDGSPAGDKEELGNSWQTDQDEDQECQKYQVVNSPSCDSSLQSSMSGPGFCGRLVDTHGPFETCLLHVKAASFFDSCMLDMCGFQGLQHLLCTHMSTMTTTCQDAGHAVKPWREPHFCPMACPPNSKYSLCAKPCPDTCHSGFSGMFCSDRCVEACECNPGFVLSGLECIPRSQCGCLHPAGSYFKVGERWYKPGCKELCVCESNNRIRCQPWRCRAQEFCGQQDGIYGCHAQGAATCTASGDPHYLTFDGALHHFMGTCTYVLTRPCWSRSQDSYFVVSATNENRGGILEVSYIKAVHVTVFDLSISLLRGCKVMLNGHRVALPVWLAQGRVTIRLSSNLVLLYTNFGLQVRYDGSHLVEVTVPSSYGGQLCGLCGNYNNNSLDDNLRPDRKLAGDSMQLGAAWKLPESSEPGCFLVGGKPSSCQENSMADAWNKNCAILINPQGPFSQCHQVVPPQSSFASCVHGQCGTKGDTTALCRSLQAYASLCAQAGQAPAWRNRTFCPMRCPPGSSYSPCSSPCPDTCSSINNPRDCPKALPCAESCECQKGHILSGTSCVPLGQCGCTDPAGSYHPVGERWYTENTCTRLCTCSVHNNITCFQSTCKPNQICWALDGLLHCRASGVGVCQLPGESHYVSFDGSNHSIPDACTLVLVKVCHPAMALPFFKISAKHEKEEGGTEAFRLHEVYIDIYDAQVTLQKGHRVLINSKQVTLPAISQIPGVSVKSSSIYSIVNIKIGVQVKFDGNHLLEIEIPTTYYGKVCGMCGNFNDEEEDELMMPSDEVANSDSEFVNSWKDKDIDPSCQSLLVDEQQIPAEQQENPSGNCRAADLRRAREKCEAALRAPVWAQCASRIDLTPFLVDCANTLCEFGGLYQALCQALQAFGATCQSQGLKPPLWRNSSFCPLECPAYSSYTNCLPSCSPSCWDLDGRCEGAKVPSACAEGCICQPGYVLSEDKCVPRSQCGCKDAHGGSIPLGKSWVSSGCTEKCVCTGGAIQCGDFRCPSGSHCQLTSDNSNSNCVSDKSEQCSVYGDPRYLTFDGFSYRLQGRMTYVLIKTVDVLPEGVEPLLVEGRNKMDPPRSSIFLQEVITTVYGYKVQLQAGLELVVNNQKMAVPYRPNEHLRVTLWGQRLYLVTDFELVVSFGGRKNAVISLPSMYEGLVSGLCGNYDKNRKNDMMLPSGALTQNLNTFGNSWEVKTEDALLRFPRAIPAEEEGQGAELGLRTGLQVSECSPEQLASNSTQACRVLADPQGPFAACHQTVAPEPFQEHCVLDLCSAQDPREQEELRCQVLSGHGVSSRYHISELYDTLPSILCQPGRPRGLRGPLRGRLRQHPRLCLQWHPEPPLADCGCTSNGIYYQLGSSFLTEDCSQRCTCASSRILLCEPFSCRAGEVCTLGNHTQGCFPESPCLQNPCQNDGQCREQGATFTCECEVGYGGGLCMEPRDAPPPRKPAS

SEQ ID NO: 2033 - protein, 223 aa, synthetic construct
  REGION 1..223: note = ZNRF4 (Q8WWF5) ECD
VIPTQLPSRPGHRPPGRPRRCPKASCLPPPVGPSSTQTAKRVTMGWPRPGRALVAVKALLVLSLLQVPAQAVVRAVLEDNSSSVDFADLPALFGVPLAPEGIRGYLMEVKPANACHPIEAPRLGNRSLGAIVLIRRYDCTFDLKVLNAQRAGFEAAIVHNVHSDDLVSMTHVYEDLRGQIAIPSVFVSEAASQDLRVILGCNKSAHALLLPDDPPCHDLGCHP

SEQ ID NO: 2034 - protein, 576 aa, synthetic construct
  REGION 1..576: note = ZP1 (P60852) ECD
RWLQPDPGLPGLRHSYDCGIKGMQLLVFPRPGQTLRFKVVDEFGNRFDVNNCSICYHWVTSRPQEPAVFSADYRGCHVLEKDGRFHLRVFMEAVLPNGRVDVAQDATLICPKPDPSRTLDSQLAPPAMFSVSTPQTLSFLPTSGHTSQGSGHAFPSPLDPGHSSVHPTPALPSPGPGPTLATLAQPHWGTLEHWDVNKRDYIGTHLSQEQCQVASGHLPCIVRRTSKEACQQAGCCYDNTREVPCYYGNTATVQCFRDGYFVLVVSQEMALTHRITLANIHLAYAPTSCSPTQHTEAFVVFYFPLTHCGTTMQVAGDQLIYENWLVSGIHIQKGPQGSITRDSTFQLHVRCVFNASDFLPIQASIFPPPSPAPMTQPGPLRLELRIAKDETFSSYYGEDDYPIVRLLREPVHVEVRLLQRTDPNLVLLLHQCWGAPSANPFQQPQWPILSDGCPFKGDSYRTQMVALDGATPFQSHYQRFTVATFALLDSGSQRALRGLVYLFCSTSACHTSGLETCSTACSTGTTRQRRSSGHRNDTARPQDIVSSPGPVGFEDSYGQEPTLGPTDSNGNSSLRP

SEQ ID NO: 2035 - protein, 678 aa, synthetic construct
  REGION 1..678: note = ZP2 (Q05996) ECD
IDVSQLVNPAFPGTVTCDEREITVEFPSSPGTKKWHASVVDPLGLDMPNCTYILDPEKLTLRATYDNCTRRVHGGHQMTIRVMNNSAALRHGAVMYQFFCPAMQVEETQGLSASTICQKDFMSFSLPRVFSGLADDSKGTKVQMGWSIEVGDGARAKTLTLPEAMKEGFSLLIDNHRMTFHVPFNATGVTHYVQGNSHLYMVSLKLTFISPGQKVIFSSQAICAPDPVTCNATHMTLTIPEFPGKLKSVSFENQNIDVSQLHDNGIDLEATNGMKLHFSKTLLKTKLSEKCLLHQFYLASLKLTFLLRPETVSMVIYPECLCESPVSIVTGELCTQDGFMDVEVYSYQTQPALDLGTLRVGNSSCQPVFEAQSQGLVRFHIPLNGCGTRYKFEDDKVVYENEIHALWTDFPPSKISRDSEFRMTVKCSYSRNDMLLNINVESLTPPVASVKLGPFTLILQSYPDNSYQQPYGENEYPLVRFLRQPIYMEVRVLNRDDPNIKLVLDDCWATSTMDPDSFPQWNVVVDGCAYDLDNYQTTFHPVGSSVTHPDHYQRFDMKAFAFVSEAHVLSSLVYFHCSALICNRLSPDSPLCSVTCPVSSRHRRATGATEAEKMTVSLPGPILLLSDDSSFRGVGSSDLKASGSSGEKSRSETGEEVGSRGAMDTKGHKTAGDVGSKA

SEQ ID NO: 2036 - protein, 365 aa, synthetic construct
  REGION 1..365: note = ZP3 (P21754) ECD
QPLWLLQGGASHPETSVQPVLVECQEATLMVMVSKDLFGTGKLIRAADLTLGPEACEPLVSMDTEDVVRFEVGLHECGNSMQVTDDALVYSTFLLHDPRPVGNLSIVRTNRAEIPIECRYPRQGNVSSQAILPTWLPFRTTVFSEEKLTFSLRLMEENWNAEKRSPTFHLGDAAHLQAEIHTGSHVPLRLFVDHCVATPTPDQNASPYHTIVDFHGCLVDGLTDASSAFKVPRPGPDTLQFTVDVFHFANDSRNMIYITCHLKVTLAEQDPDELNKACSFSKPSNSWFPVEGSADICQCCNKGDCGTPSHSRRQPHVMSQWSRSASRNRRHVTEEADVTVGPLIFLDRRGDHEVEQWALPSDTSV

SEQ ID NO: 2037 - protein, 487 aa, synthetic construct
  REGION 1..487: note = ZP4 (Q12836) ECD
GQHKPEAPDYSSVLHCGPWSFQFAVNLNQEATSPPVLIAWDNQGLLHELQNDSDCGTWIRKGPGSSVVLEATYSSCYVTEWDSHYIMPVGVEGAGAAEHKVVTERKLLKCPMDLLARDAPDTDWCDSIPARDRLPCAPSPISRGDCEGLGCCYSSEEVNSCYYGNTVTLHCTREGHFSIAVSRNVTSPPLLLDSVRLALRNDSACNPVMATQAFVLFQFPFTSCGTTRQITGDRAVYENELVATRDVKNGSRGSVTRDSIFRLHVSCSYSVSSNSLPINVQVFTLPPPFPETQPGPLTLELQIAKDKNYGSYYGVGDYPVVKLLRDPIYVEVSILHRTDPYLGLLLQQCWATPSTDPLSQPQWPILVKGCPYIGDNYQTQLIPVQKALDLPFPSHHQRFSIFTFSFVNPTVEKQALRGPVHLHCSVSVCQPAETPSCVVTCPDLSRRRNFDNSSQNTTASVSSKGPMILLQATKDPPEKLRVPVDSK

SEQ ID NO: 2038 - protein, 353 aa, synthetic construct
  REGION 1..353: note = ZPLD1 (Q8TCW7) ECD
QFNGYNCDANLHSRFPAERDISVYCGVQAITMKINFCTVLFSGYSETDLALNGRHGDSHCRGFINNNTFPAVVIFIINLSTLEGCGNNLVVSTIPGVSAYGNATSVQVGNISGYIDTPDPPTIISYLPGLLYKFSCSYPLEYLVNNTQLASSSAAISVRENNGTFVSTLNLLLYNDSTYNQQLIIPSIGLPLKTKVFAAVQATNLDGRWNVLMDYCYTTPSGNPNDDIRYDLFLSCDKDPQTTVIENGRSQRGRFSFEVFRFVKHKNQKMSTVFLHCVTKLCRADDCPFLMPICSHRERRDAGRRTTWSPQSSSGSAVLSAGPIITRSDETPTNNSQLGSPSMPPFQLNAITS

SEQ ID NO: 2039 - protein, 1256 aa, synthetic construct
  REGION 1..1256: note = ACE (P12821) SP+PP+ECD
MGAASGRRGPGLLLPLPLLLLLPPQPALALDPGLQPGNFSADEAGAQLFAQSYNSSAEQVLFQSVAASWAHDTNITAENARRQEEAALLSQEFAEAWGQKAKELYEPIWQNFTDPQLRRIIGAVRTLGSANLPLAKRQQYNALLSNMSRIYSTAKVCLPNKTATCWSLDPDLTNILASSRSYAMLLFAWEGWHNAAGIPLKPLYEDFTALSNEAYKQDGFTDTGAYWRSWYNSPTFEDDLEHLYQQLEPLYLNLHAFVRRALHRRYGDRYINLRGPIPAHLLGDMWAQSWENIYDMVVPFPDKPNLDVTSTMLQQGWNATHMFRVAEEFFTSLELSPMPPEFWEGSMLEKPADGREVVCHASAWDFYNRKDFRIKQCTRVTMDQLSTVHHEMGHIQYYLQYKDLPVSLRRGANPGFHEAIGDVLALSVSTPEHLHKIGLLDRVTNDTESDINYLLKMALEKIAFLPFGYLVDQWRWGVFSGRTPPSRYNFDWWYLRTKYQGICPPVTRNETHFDAGAKFHVPNVTPYIRYFVSFVLQFQFHEALCKEAGYEGPLHQCDIYRSTKAGAKLRKVLQAGSSRPWQEVLKDMVGLDALDAQPLLKYFQPVTQWLQEQNQQNGEVLGWPEYQWHPPLPDNYPEGIDLVTDEAEASKFVEEYDRTSQVVWNEYAEANWNYNTNITTETSKILLQKNMQIANHTLKYGTQARKFDVNQLQNTTIKRIIKKVQDLERAALPAQELEEYNKILLDMETTYSVATVCHPNGSCLQLEPDLTNVMATSRKYEDLLWAWEGWRDKAGRAILQFYPKYVELINQAARLNGYVDAGDSWRSMYETPSLEQDLERLFQELQPLYLNLHAYVRRALHRHYGAQHINLEGPIPAHLLGNMWAQTWSNIYDLVVPFPSAPSMDTTEAMLKQGWTPRRMFKEADDFFTSLGLLPVPPEFWNKSMLEKPTDGREVVCHASAWDFYNGKDFRIKQCTTVNLEDLVVAHHEMGHIQYFMQYKDLPVALREGANPGFHEAIGDVLALSVSTPKHLHSLNLLSSEGGSDEHDINFLMKMALDKIAFIPFSYLVDQWRWRVFDGSITKENYNQEWWSLRLKYQGLCPPVPRTQGDFDPGAKFHIPSSVPYIRYFVSFIIQFQFHEALCQAAGHTGPLHKCDIYQSKEAGQRLATAMKLGFSRPWPEAMQLITGQPNMSASAMLSYFKPLLDWLRTENELHGEKLGWPQYNWTPNSARSEGPLPDSGRVSFLGLDLDAQQAR

SEQ ID NO: 2040 - protein, 740 aa, synthetic construct
  REGION 1..740: note = ACE2 (Q9BYF1) SP+PP+ECD
MSSSSWLLLSLVAVTAAQSTIEEQAKTFLDKFNHEAEDLFYQSSLASWNYNTNITEENVQNMNNAGDKWSAFLKEQSTLAQMYPLQEIQNLTVKLQLQALQQNGSSVLSEDKSKRLNTILNTMSTIYSTGKVCNPDNPQECLLLEPGLNEIMANSLDYNERLWAWESWRSEVGKQLRPLYEEYVVLKNEMARANHYEDYGDYWRGDYEVNGVDGYDYSRGQLIEDVEHTFEEIKPLYEHLHAYVRAKLMNAYPSYISPIGCLPAHLLGDMWGRFWTNLYSLTVPFGQKPNIDVTDAMVDQAWDAQRIFKEAEKFFVSVGLPNMTQGFWENSMLTDPGNVQKAVCHPTAWDLGKGDFRILMCTKVTMDDFLTAHHEMGHIQYDMAYAAQPFLLRNGANEGFHEAVGEIMSLSAATPKHLKSIGLLSPDFQEDNETEINFLLKQALTIVGTLPFTYMLEKWRWMVFKGEIPKDQWMKKWWEMKREIVGVVEPVPHDETYCDPASLFHVSNDYSFIRYYTRTLYQFQFQEALCQAAKHEGPLHKCDISNSTEAGQKLFNMLRLGKSEPWTLALENVVGAKNMNVRPLLNYFEPLFTWLKDQNKNSFVGWSTDWSPYADQSIKVRISLKSALGDKAYEWNDNEMYLFRSSVAYAMRQYFLKVKNQMILFGEEDVRVANLKPRISFNFFVTAPKNVSDIIPRTEVEKAIRMSRSRINDAFRLNDNSLEFLGIQPTLGPPNQPPVS

SEQ ID NO: 2041 - protein, 380 aa, synthetic construct
  REGION 1..380: note = ACP2 (P11117) SP+PP+ECD
MAGKRSGWSRAALLQLLLGVNLVVMPPTRARSLRFVTLLYRHGDRSPVKTYPKDPYQEEEWPQGFGQLTKEGMLQHWELGQALRQRYHGFLNTSYHRQEVYVRSTDFDRTLMSAEANLAGLFPPNGMQRFNPNISWQPIPVHTVPITEDRLLKFPLGPCPRYEQLQNETRQTPEYQNESSRNAQFLDMVANETGLTDLTLETVWNVYDTLFCEQTHGLRLPPWASPQTMQRLSRLKDFSFRFLFGIYQQAEKARLQGGVLLAQIRKNLTLMATTSQLPKLLVYSAHDTTLVALQMALDVYNGEQAPYASCHIFELYQEDSGNFSVEMYFRNESDKAPWPLSLPGCPHRCPLQDFLRLTEPVVPKDWQQECQLASGPADTE

SEQ ID NO: 2042 - protein, 393 aa, synthetic construct
  REGION 1..393: note = ACPT (Q9BZG2) SP+PP+ECD
MAGLGFWGHPAGPLLLLLLLVLPPRALPEGPLVFVALVFRHGDRAPLASYPMDPHKEVASTLWPRGLGQLTTEGVRQQLELGRFLRSRYEAFLSPEYRREEVYIRSTDFDRTLESAQANLAGLFPEAAPGSPEARWRPIPVHTVPVAEDKLLRFPMRSCPRYHELLREATEAAEYQEALEGWTGFLSRLENFTGLSLVGEPLRRAWKVLDTLMCQQAHGLPLPAWASPDVLRTLAQISALDIGAHVGPPRAAEKAQLTGGILLNAILANFSRVQRLGLPLKMVMYSAHDSTLLALQGALGLYDGHTPPYAACLGFEFRKHLGNPAKDGGNVTVSLFYRNDSAHLPLPLSLPGCPAPCPLGRFYQLTAPARPPAHGVSCHGPYEAAIPPAPVVP

SEQ ID NO: 2043 - protein, 123 aa, synthetic construct
  REGION 1..123: note = ACVR1 (Q04771) SP+PP+ECD
MVDGVMILPVLIMIALPSPSMEDEKPKVNPKLYMCVCEGLSCGNEDHCEGQQCFSSLSINDGFHVYQKGCFQVYEQGKMTCKTPPSPGQAVECCQGDWCNRNITAQLPTKGKSFPGTQNFHLE

SEQ ID NO: 2044 - protein, 126 aa, synthetic construct
  REGION 1..126: note = ACVR1B (P36896) SP+PP+ECD
MAESAGASSFFPLVVLLLAGSGGSGPRGVQALLCACTSCLQANYTCETDGACMVSIFNLDGMEHHVRTCIPKVELVPAGKPFYCLSSEDLRNTHCCYTDYCNRIDLRVPSGHLKEPEHPSMWGPVE

SEQ ID NO: 2045 - protein, 113 aa, synthetic construct
  REGION 1..113: note = ACVR1C (Q8NER5) SP+PP+ECD
MTRALCSALRQALLLLAAAAELSPGLKCVCLLCDSSNFTCQTEGACWASVMLTNGKEQVIKSCVSLPELNAQVFCHSSNNVTKTECCFTDFCNNITLHLPTASPNAPKLGPME

SEQ ID NO: 2046 - protein, 135 aa, synthetic construct
  REGION 1..135: note = ACVR2A (P27037) SP+PP+ECD
MGAAAKLAFAVFLISCSSGAILGRSETQECLFFNANWEKDRTNQTGVEPCYGDKDKRRHCFATWKNISGSIEIVKQGCWLDDINCYDRTDCVEKKDSPEVYFCCCEGNMCNEKFSYFPEMEVTQPTSNPVTPKPP

SEQ ID NO: 2047 - protein, 137 aa, synthetic construct
  REGION 1..137: note = ACVR2B (Q13705) SP+PP+ECD
MTAPWVALALLWGSLCAGSGRGEAETRECIYYNANWELERTNQSGLERCEGEQDKRLHCYASWRNSSGTIELVKKGCWLDDFNCYDRQECVATEENPQVYFCCCEGNFCNERFTHLPEAGGPEVTYEPPPTAPTLLT

SEQ ID NO: 2048 - protein, 118 aa, synthetic construct
  REGION 1..118: note = ACVRL1 (P37023) SP+PP+ECD
MTLGSPRKGLLMLLMALVTQGDPVKPSRGPLVTCTCESPHCKGPTCRGAWCTVVLVREEGRHPQEHRGCGNLHRELCRGRPTEFVNHYCCDSHLCNHNVSLVLEATQPPSEQPGTDGQ

SEQ ID NO: 2049 - protein, 672 aa, synthetic construct
  REGION 1..672: note = ADAM10 (O14672) SP+PP+ECD
MVLLRVLILLLSWAAGMGGQYGNPLNKYIRHYEGLSYNVDSLHQKHQRAKRAVSHEDQFLRLDFHAHGRHFNLRMKRDTSLFSDEFKVETSNKVLDYDTSHIYTGHIYGEEGSFSHGSVIDGRFEGFIQTRGGTFYVEPAERYIKDRTLPFHSVIYHEDDINYPHKYGPQGGCADHSVFERMRKYQMTGVEEVTQIPQEEHAANGPELLRKKRTTSAEKNTCQLYIQTDHLFFKYYGTREAVIAQISSHVKAIDTIYQTTDFSGIRNISFMVKRIRINTTADEKDPTNPFRFPNIGVEKFLELNSEQNHDDYCLAYVFTDRDFDDGVLGLAWVGAPSGSSGGICEKSKLYSDGKKKSLNTGIITVQNYGSHVPPKVSHITFAHEVGHNFGSPHDSGTECTPGESKNLGQKENGNYIMYARATSGDKLNNNKFSLCSIRNISQVLEKKRNNCFVESGQPICGNGMVEQGEECDCGYSDQCKDECCFDANQPEGRKCKLKPGKQCSPSQGPCCTAQCAFKSKSEKCRDDSDCAREGICNGFTALCPASDPKPNFTDCNRHTQVCINGQCAGSICEKYGLEECTCASSDGKDDKELCHVCCMKKMDPSTCASTGSVQWSRHFSGRTITLQPGSPCNDFRGYCDVFMRCRLVDADGPLARLKKAIFSPELYENIAE

SEQ ID NO: 2050 - protein, 734 aa, synthetic construct
  REGION 1..734: note = ADAM11 (O75078) SP+PP+ECD
MRLLRRWAFAALLLSLLPTPGLGTQGPAGALRWGGLPQLGGPGAPEVTEPSRLVRESSGGEVRKQQLDTRVRQEPPGGPPVHLAQVSFVIPAFNSNFTLDLELNHHLLSSQYVERHFSREGTTQHSTGAGDHCYYQGKLRGNPHSFAALSTCQGLHGVFSDGNLTYIVEPQEVAGPWGAPQGPLPHLIYRTPLLPDPLGCREPGCLFAVPAQSAPPNRPRLRRKRQVRRGHPTVHSETKYVELIVINDHQLFEQMRQSVVLTSNFAKSVVNLADVIYKEQLNTRIVLVAMETWADGDKIQVQDDLLETLARLMVYRREGLPEPSDATHLFSGRTFQSTSSGAAYVGGICSLSHGGGVNEYGNMGAMAVTLAQTLGQNLGMMWNKHRSSAGDCKCPDIWLGCIMEDTGFYLPRKFSRCSIDEYNQFLQEGGGSCLFNKPLKLLDPPECGNGFVEAGEECDCGSVQECSRAGGNCCKKCTLTHDAMCSDGLCCRRCKYEPRGVSCREAVNECDIAETCTGDSSQCPPNLHKLDGYYCDHEQGRCYGGRCKTRDRQCQVLWGHAAADRFCYEKLNVEGTERGSCGRKGSGWVQCSKQDVLCGFLLCVNISGAPRLGDLVGDISSVTFYHQGKELDCRGGHVQLADGSDLSYVEDGTACGPNMLCLDHRCLPASAFNFSTCPGSGERRICSHHGVCSNEGKCICQPDWTGKDCSIHNPLPTSPPTGETERYKGPSGTN

SEQ ID NO: 2051 - protein, 708 aa, synthetic construct
  REGION 1..708: note = ADAM12 (O43184) SP+PP+ECD
MAARPLPVSPARALLLALAGALLAPCEARGVSLWNQGRADEVVSASVGSGDLWIPVKSFDSKNHPEVLNIRLQRESKELIINLERNEGLIASSFTETHYLQDGTDVSLARNYTVILGHCYYHGHVRGYSDSAVSLSTCSGLRGLIVFENESYVLEPMKSATNRYKLFPAKKLKSVRGSCGSHHNTPNLAAKNVFPPPSQTWARRHKRETLKATKYVELVIVADNREFQRQGKDLEKVKQRLIEIANHVDKFYRPLNIRIVLVGVEVWNDMDKCSVSQDPFTSLHEFLDWRKMKLLPRKSHDNAQLVSGVYFQGTTIGMAPIMSMCTADQSGGIVMDHSDNPLGAAVTLAHELGHNFGMNHDTLDRGCSCQMAVEKGGCIMNASTGYPFPMVFSSCSRKDLETSLEKGMGVCLFNLPEVRESFGGQKCGNRFVEEGEECDCGEPEECMNRCCNATTCTLKPDAVCAHGLCCEDCQLKPAGTACRDSSNSCDLPEFCTGASPHCPANVYLHDGHSCQDVDGYCYNGICQTHEQQCVTLWGPGAKPAPGICFERVNSAGDPYGNCGKVSKSSFAKCEMRDAKCGKIQCQGGASRPVIGTNAVSIETNIPLQQGGRILCRGTHVYLGDDMPDPGLVLAGTKCADGKICLNRQCQNISVFGVHECAMQCHGRGVCNNRKNCHCEAHWAPPFCDKFGFGGSTDSGPIRQADNQG

SEQ ID NO: 2052 - protein, 696 aa, synthetic construct
  REGION 1..696: note = ADAM15 (Q13444) SP+PP+ECD
MRLALLWALGLLGAGSPLPSWPLPNIGGTEEQQAESEKAPREPLEPQVLQDDLPISLKKVLQTSLPEPLRIKLELDGDSHILELLQNRELVPGRPTLVWYQPDGTRVVSEGHTLENCCYQGRVRGYAGSWVSICTCSGLRGLVVLTPERSYTLEQGPGDLQGPPIISRIQDLHLPGHTCALSWRESVHTQKPPEHPLGQRHIRRRRDVVTETKTVELVIVADHSEAQKYRDFQHLLNRTLEVALLLDTFFRPLNVRVALVGLEAWTQRDLVEISPNPAVTLENFLHWRRAHLLPRLPHDSAQLVTGTSFSGPTVGMAIQNSICSPDFSGGVNMDHSTSILGVASSIAHELGHSLGLDHDLPGNSCPCPGPAPAKTCIMEASTDFLPGLNFSNCSRRALEKALLDGMGSCLFERLPSLPPMAAFCGNMFVEPGEQCDCGFLDDCVDPCCDSLTCQLRPGAQCASDGPCCQNCQLRPSGWQCRPTRGDCDLPEFCPGDSSQCPPDVSLGDGEPCAGGQAVCMHGRCASYAQQCQSLWGPGAQPAAPLCLQTANTRGNAFGSCGRNPSGSYVSCTPRDAICGQLQCQTGRTQPLLGSIRDLLWETIDVNGTELNCSWVHLDLGSDVAQPLLTLPGTACGPGLVCIDHRCQRVDLLGAQECRSKCHGHGVCDSNRHCYCEEGWAPPDCTTQLKATSSLTT

SEQ ID NO: 2053 - protein, 671 aa, synthetic construct
  REGION 1..671: note = ADAM17 (P78536) SP+PP+ECD
MRQSLLFLTSVVPFVLAPRPPDDPGFGPHQRLEKLDSLLSDYDILSLSNIQQHSVRKRDLQTSTHVETLLTFSALKRHFKLYLTSSTERFSQNFKVVVVDGKNESEYTVKWQDFFTGHVVGEPDSRVLAHIRDDDVIIRINTDGAEYNIEPLWRFVNDTKDKRMLVYKSEDIKNVSRLQSPKVCGYLKVDNEELLPKGLVDREPPEELVHRVKRRADPDPMKNTCKLLVVADHRFYRYMGRGEESTTTNYLIELIDRVDDIYRNTSWDNAGFKGYGIQIEQIRILKSPQEVKPGEKHYNMAKSYPNEEKDAWDVKMLLEQFSFDIAEEASKVCLAHLFTYQDFDMGTLGLAYVGSPRANSHGGVCPKAYYSPVGKKNIYLNSGLTSTKNYGKTILTKEADLVTTHELGHNFGAEHDPDGLAECAPNEDQGGKYVMYPIAVSGDHENNKMFSNCSKQSIYKTIESKAQECFQERSNKVCGNSRVDEGEECDPGIMYLNNDTCCNSDCTLKEGVQCSDRNSPCCKNCQFETAQKKCQEAINATCKGVSYCTGNSSECPPPGNAEDDTVCLDLGKCKDGKCIPFCEREQQLESCACNETDNSCKVCCRDLSGRCVPYVDAEQKNLFLRKGKPCTVGFCDMNGKCEKRVQDVIERFWDFIDQLSINTFGKFLADN

SEQ ID NO: 2054 - protein, 687 aa, synthetic construct
  REGION 1..687: note = ADAM18 (Q9Y3Q7) SP+PP+ECD
MFLLLALLTELGRLQAHEGSEGIFLHVTVPRKIKSNDSEVSERKMIYIITIDGQPYTLHLGKQSFLPQNFLVYTYNETGSLHSVSPYFMMHCHYQGYAAEFPNSFVTLSICSGLRGFLQFENISYGIEPVESSARFEHIIYQMKNNDPNVSILAVNYSHIWQKDQPYKVPLNSQIKNLSKLLPQYLEIYIIVEKALYDYMGSEMMAVTQKIVQVIGLVNTMFTQFKLTVILSSLELWSNENQISTSGDADDILQRFLAWKRDYLILRPHDIAYLLVYRKHPKYVGATFPGTVCNKSYDAGIAMYPDAIGLEGFSVIIAQLLGLNVGLTYDDITQCFCLRATCIMNHEAVSASGRKIFSNCSMHDYRYFVSKFETKCLQKLSNLQPLHQNQPVCGNGILESNEECDCGNKNECQFKKCCDYNTCKLKGSVKCGSGPCCTSKCELSIAGTPCRKSIDPECDFTEYCNGTSSNCVPDTYALNGRLCKLGTAYCYNGQCQTTDNQCAKIFGKGAQGAPFACFKEVNSLHERSENCGFKNSQPLPCERKDVLCGKLACVQPHKNANKSDAQSTVYSYIQDHVCVSIATGSSMRSDGTDNAYVADGTMCGPEMYCVNKTCRKVHLMGYNCNATTKCKGKGICNNFGNCQCFPGHRPPDCKFQFGSPGGSIDDGNFQKSGDFYTEKGYNTHWNN

SEQ ID NO: 2055 - protein, 699 aa, synthetic construct
  REGION 1..699: note = ADAM19 (Q9H013) SP+PP+ECD
MPGGAGAARLCLLAFALQPLRPRAAREPGWTRGSEEGSPKLQHELIIPQWKTSESPVREKHPLKAELRVMAEGRELILDLEKNEQLFAPSYTETHYTSSGNPQTTTRKLEDHCFYHGTVRETELSSVTLSTCRGIRGLITVSSNLSYVIEPLPDSKGQHLIYRSEHLKPPPGNCGFEHSKPTTRDWALQFTQQTKKRPRRMKREDLNSMKYVELYLVADYLEFQKNRRDQDATKHKLIEIANYVDKFYRSLNIRIALVGLEVWTHGNMCEVSENPYSTLWSFLSWRRKLLAQKYHDNAQLITGMSFHGTTIGLAPLMAMCSVYQSGGVNMDHSENAIGVAATMAHEMGHNFGMTHDSADCCSASAADGGCIMAAATGHPFPKVFNGCNRRELDRYLQSGGGMCLSNMPDTRMLYGGRRCGNGYLEDGEECDCGEEEECNNPCCNASNCTLRPGAECAHGSCCHQCKLLAPGTLCREQARQCDLPEFCTGKSPHCPTNFYQMDGTPCEGGQAYCYNGMCLTYQEQCQQLWGPGARPAPDLCFEKVNVAGDTFGNCGKDMNGEHRKCNMRDAKCGKIQCQSSEARPLESNAVPIDTTIIMNGRQIQCRGTHVYRGPEEEGDMLDPGLVMTGTKCGYNHICFEGQCRNTSFFETEGCGKKCNGHGVCNNNQNCHCLPGWAPPFCNTPGHGGSIDSGPMPPES

SEQ ID NO: 2056 - protein, 686 aa, synthetic construct
  REGION 1..686: note = ADAM2 (Q99965) SP+PP+ECD
MWRVLFLLSGLGGLRMDSNFDSLPVQITVPEKIRSIIKEGIESQASYKIVIEGKPYTVNLMQKNFLPHNFRVYSYSGTGIMKPLDQDFQNFCHYQGYIEGYPKSVVMVSTCTGLRGVLQFENVSYGIEPLESSVGFEHVIYQVKHKKADVSLYNEKDIESRDLSFKLQSVEPQQDFAKYIEMHVIVEKQLYNHMGSDTTVVAQKVFQLIGLTNAIFVSFNITIILSSLELWIDENKIATTGEANELLHTFLRWKTSYLVLRPHDVAFLLVYREKSNYVGATFQGKMCDANYAGGVVLHPRTISLESLAVILAQLLSLSMGITYDDINKCQCSGAVCIMNPEAIHFSGVKIFSNCSFEDFAHFISKQKSQCLHNQPRLDPFFKQQAVCGNAKLEAGEECDCGTEQDCALIGETCCDIATCRFKAGSNCAEGPCCENCLFMSKERMCRPSFEECDLPEYCNGSSASCPENHYVQTGHPCGLNQWICIDGVCMSGDKQCTDTFGKEVEFGPSECYSHLNSKTDVSGNCGISDSGYTQCEADNLQCGKLICKYVGKFLLQIPRATIIYANISGHLCIAVEFASDHADSQKMWIKDGTSCGSNKVCRNQRCVSSSYLGYDCTTDKCNDRGVCNNKKHCHCSASYLPPDCSVQSDLWPGGSIDSGNFPPVAIPARLPERRYIENIYHSKPMR

SEQ ID NO: 2057 - protein, 693 aa, synthetic construct
  REGION 1..693: note = ADAM20 (O43506) SP+PP+ECD
MAVGEPLVHIRVTLLLLWFGMFLSISGHSQARPSQYFTSPEVVIPLKVISRGRGAKAPGWLSYSLRFGGQRYIVHMRVNKLLFAAHLPVFTYTEQHALLQDQPFIQDDCYYHGYVEGVPESLVALSTCSGGFLGMLQINDLVYEIKPISVSATFEHLVYKIDSDDTQFPPMRCGLTEEKIAHQMELQLSYNFTLKQSSFVGWWTHQRFVELVVVVDNIRYLFSQSNATTVQHEVFNVVNIVDSFYHPLEVDVILTGIDIWTASNPLPTSGDLDNVLEDFSIWKNYNLNNRLQHDVAHLFIKDTQGMKLGVAYVKGICQNPFNTGVDVFEDNRLVVFAITLGHELGHNLGMQHDTQWCVCELQWCIMHAYRKVTTKFSNCSYAQYWDSTISSGLCIQPPPYPGNIFRLKYCGNLVVEEGEECDCGTIRQCAKDPCCLLNCTLHPGAACAFGICCKDCKFLPSGTLCRQQVGECDLPEWCNGTSHQCPDDVYVQDGISCNVNAFCYEKTCNNHDIQCKEIFGQDARSASQSCYQEINTQGNRFGHCGIVGTTYVKCWTPDIMCGRVQCENVGVIPNLIEHSTVQQFHLNDTTCWGTDYHLGMAIPDIGEVKDGTVCGPEKICIRKKCASMVHLSQACQPKTCNMRGICNNKQHCHCNHEWAPPYCKDKGYGGSADSGPPPKNNMEGLNVMGKLRY

SEQ ID NO: 2058 - protein, 681 aa, synthetic construct
  REGION 1..681: note = ADAM21 (Q9UKJ8) SP+PP+ECD
MAVDGTLVYIRVTLLLLWLGVFLSISGYCQAGPSQHFTSPEVVIPLKVISRGRSAKAPGWLSYSLRFGGQKHVVHMRVKKLLVSRHLPVFTYTDDRALLEDQLFIPDDCYYHGYVEAAPESLVVFSACFGGFRGVLKISGLTYEIEPIRHSATFEHLVYKINSNETQFPAMRCGLTEKEVARQQLEFEEAENSALEPKSAGDWWTHAWFLELVVVVNHDFFIYSQSNISKVQEDVFLVVNIVDSMYKQLGTYIILIGIEIWNQGNVFPMTSIEQVLNDFSQWKQISLSQLQHDAAHMFIKNSLISILGLAYVAGICRPPIDCGVDNFQGDTWSLFANTVAHELGHTLGMQHDEEFCFCGERGCIMNTFRVPAEKFTNCSYADFMKTTLNQGSCLHNPPRLGEIFMLKRCGNGVVEREEQCDCGSVQQCEQDACCLLNCTLRPGAACAFGLCCKDCKFMPSGELCRQEVNECDLPEWCNGTSHQCPEDRYVQDGIPCSDSAYCYQKRCNNHDQHCREIFGKDAKSASQNCYKEINSQGNRFGHCGINGTTYLKCHISDVFCGRVQCENVRDIPLLQDHFTLQHTHINGVTCWGIDYHLRMNISDIGEVKDGTVCGPGKICIHKKCVSLSVLSHVCLPETCNMKGICNNKHHCHCGYGWSPPYCQHRGYGGSIDSGPASAKRG

SEQ ID NO: 2059 - protein, 736 aa, synthetic construct
  REGION 1..736: note = ADAM22 (Q9P0K1) SP+PP+ECD
MQAAVAVSVPFLLLCVLGTCPPARCGQAGDASLMELEKRKENRFVERQSIVPLRLIYRSGGEDESRHDALDTRVRGDLGGPQLTHVDQASFQVDAFGTSFILDVVLNHDLLSSEYIERHIEHGGKTVEVKGGEHCYYQGHIRGNPDSFVALSTCHGLHGMFYDGNHTYLIEPEENDTTQEDFHFHSVYKSRLFEFSLDDLPSEFQQVNITPSKFILKPRPKRSKRQLRRYPRNVEEETKYIELMIVNDHLMFKKHRLSVVHTNTYAKSVVNMADLIYKDQLKTRIVLVAMETWATDNKFAISENPLITLREFMKYRRDFIKEKSDAVHLFSGSQFESSRSGAAYIGGICSLLKGGGVNEFGKTDLMAVTLAQSLAHNIGIISDKRKLASGECKCEDTWSGCIMGDTGYYLPKKFTQCNIEEYHDFLNSGGGACLFNKPSKLLDPPECGNGFIETGEECDCGTPAECVLEGAECCKKCTLTQDSQCSDGLCCKKCKFQPMGTVCREAVNDCDIRETCSGNSSQCAPNIHKMDGYSCDGVQGICFGGRCKTRDRQCKYIWGQKVTASDKYCYEKLNIEGTEKGNCGKDKDTWIQCNKRDVLCGYLLCTNIGNIPRLGELDGEITSTLVVQQGRTLNCSGGHVKLEEDVDLGYVEDGTPCGPQMMCLEHRCLPVASFNFSTCLSSKEGTICSGNGVCSNELKCVCNRHWIGSDCNTYFPHNDDAKTGITLSGNGVAGTN

SEQ ID NO: 2060 - protein, 792 aa, synthetic construct
  REGION 1..792: note = ADAM23 (O75077) SP+PP+ECD
MKPPGSSSRQPPLAGCSLAGASCGPQRGPAGSVPASAPARTPPCRLLLVLLLLPPLAASSRPRAWGAAAPSAPHWNETAEKNLGVLADEDNTLQQNSSSNISYSNAMQKEITLPSRLIYYINQDSESPYHVLDTKARHQQKHNKAVHLAQASFQIEAFGSKFILDLILNNGLLSSDYVEIHYENGKPQYSKGGEHCYYHGSIRGVKDSKVALSTCNGLHGMFEDDTFVYMIEPLELVHDEKSTGRPHIIQKTLAGQYSKQMKNLTMERGDQWPFLSELQWLKRRKRAVNPSRGIFEEMKYLELMIVNDHKTYKKHRSSHAHTNNFAKSVVNLVDSIYKEQLNTRVVLVAVETWTEKDQIDITTNPVQMLHEFSKYRQRIKQHADAVHLISRVTFHYKRSSLSYFGGVCSRTRGVGVNEYGLPMAVAQVLSQSLAQNLGIQWEPSSRKPKCDCTESWGGCIMEETGVSHSRKFSKCSILEYRDFLQRGGGACLFNRPTKLFEPTECGNGYVEAGEECDCGFHVECYGLCCKKCSLSNGAHCSDGPCCNNTSCLFQPRGYECRDAVNECDITEYCTGDSGQCPPNLHKQDGYACNQNQGRCYNGECKTRDNQCQYIWGTKAAGSDKFCYEKLNTEGTEKGNCGKDGDRWIQCSKHDVFCGFLLCTNLTRAPRIGQLQGEIIPTSFYHQGRVIDCSGAHVVLDDDTDVGYVEDGTPCGPSMMCLDRKCLQIQALNMSSCPLDSKGKVCSGHGVCSNEATCICDFTWAGTDCSIRDPVRNLHPPKDEGPKGPSATN

SEQ ID NO: 2061 - protein, 665 aa, synthetic construct
  REGION 1..665: note = ADAM28 (Q9UKQ2) SP+PP+ECD
MLQGLLPVSLLLSVAVSAIKELPGVKKYEVVYPIRLHPLHKREAKEPEQQEQFETELKYKMTINGKIAVLYLKKNKNLLAPGYTETYYNSTGKEITTSPQIMDDCYYQGHILNEKVSDASISTCRGLRGYFSQGDQRYFIEPLSPIHRDGQEHALFKYNPDEKNYDSTCGMDGVLWAHDLQQNIALPATKLVKLKDRKVQEHEKYIEYYLVLDNGEFKRYNENQDEIRKRVFEMANYVNMLYKKLNTHVALVGMEIWTDKDKIKITPNASFTLENFSKWRGSVLSRRKRHDIAQLITATELAGTTVGLAFMSTMCSPYSVGVVQDHSDNLLRVAGTMAHEMGHNFGMFHDDYSCKCPSTICVMDKALSFYIPTDFSSCSRLSYDKFFEDKLSNCLFNAPLPTDIISTPICGNQLVEMGEDCDCGTSEECTNICCDAKTCKIKATFQCALGECCEKCQFKKAGMVCRPAKDECDLPEMCNGKSGNCPDDRFQVNGFPCHHGKGHCLMGTCPTLQEQCTELWGPGTEVADKSCYNRNEGGSKYGYCRRVDDTLIPCKANDTMCGKLFCQGGSDNLPWKGRIVTFLTCKTFDPEDTSQEIGMVANGTKCGDNKVCINAECVDIEKAYKSTNCSSKCKGHAVCDHELQCQCEEGWIPPDCDDSSVVFHF

SEQ ID NO: 2062 - protein, 674 aa, synthetic construct
  REGION 1..674: note = ADAM29 (Q9UKF5) SP+PP+ECD
MKMLLLLHCLGVFLSCSGHIQDEHPQYHSPPDVVIPVRITGTTRGMTPPGWLSYILPFGGQKHIIHIKVKKLLFSKHLPVFTYTDQGAILEDQPFVQNNCYYHGYVEGDPESLVSLSTCFGGFQGILQINDFAYEIKPLAFSTTFEHLVYKMDSEEKQFSTMRSGFMQNEITCRMEFEEIDNSTQKQSSYVGWWIHFRIVEIVVVIDNYLYIRYERNDSKLLEDLYVIVNIVDSILDVIGVKVLLFGLEIWTNKNLIVVDDVRKSVHLYCKWKSENITPRMQHDTSHLFTTLGLRGLSGIGAFRGMCTPHRSCAIVTFMNKTLGTFSIAVAHHLGHNLGMNHDEDTCRCSQPRCIMHEGNPPITKFSNCSYGDFWEYTVERTKCLLETVHTKDIFNVKRCGNGVVEEGEECDCGPLKHCAKDPCCLSNCTLTDGSTCAFGLCCKDCKFLPSGKVCRKEVNECDLPEWCNGTSHKCPDDFYVEDGIPCKERGYCYEKSCHDRNEQCRRIFGAGANTASETCYKELNTLGDRVGHCGIKNATYIKCNISDVQCGRIQCENVTEIPNMSDHTTVHWARFNDIMCWSTDYHLGMKGPDIGEVKDGTECGIDHICIHRHCVHITILNSNCSPAFCNKRGICNNKHHCHCNYLWDPPNCLIKGYGGSVDSGPPPKRKKKK

SEQ ID NO: 2063 - protein, 687 aa, synthetic construct
  REGION 1..687: note = ADAM30 (Q9UKF2) SP+PP+ECD
MRSVQIFLSQCRLLLLLVPTMLLKSLGEDVIFHPEGEFDSYEVTIPEKLSFRGEVQGVVSPVSYLLQLKGKKHVLHLWPKRLLLPRHLRVFSFTEHGELLEDHPYIPKDCNYMGSVKESLDSKATISTCMGGLRGVFNIDAKHYQIEPLKASPSFEHVVYLLKKEQFGNQVCGLSDDEIEWQMAPYENKARLRDFPGSYKHPKYLELILLFDQSRYRFVNNNLSQVIHDAILLTGIMDTYFQDVRMRIHLKALEVWTDFNKIRVGYPELAEVLGRFVIYKKSVLNARLSSDWAHLYLQRKYNDALAWSFGKVCSLEYAGSVSTLLDTNILAPATWSAHELGHAVGMSHDEQYCQCRGRLNCIMGSGRTGFSNCSYISFFKHISSGATCLNNIPGLGYVLKRCGNKIVEDNEECDCGSTEECQKDRCCQSNCKLQPGANCSIGLCCHDCRFRPSGYVCRQEGNECDLAEYCDGNSSSCPNDVYKQDGTPCKYEGRCFRKGCRSRYMQCQSIFGPDAMEAPSECYDAVNLIGDQFGNCEITGIRNFKKCESANSICGRLQCINVETIPDLPEHTTIISTHLQAENLMCWGTGYHLSMKPMGIPDLGMINDGTSCGEGRVCFKKNCVNSSVLQFDCLPEKCNTRGVCNNRKNCHCMYGWAPPFCEEVGYGGSIDSGPPGLLRGAIPSSIW

SEQ ID NO: 2064 - protein, 682 aa, synthetic construct
  REGION 1..682: note = ADAM32 (Q8TC27) SP+PP+ECD
MFRLWLLLAGLCGLLASRPGFQNSLLQIVIPEKIQTNTNDSSEIEYEQISYIIPIDEKLYTVHLKQRYFLADNFMIYLYNQGSMNTYSSDIQTQCYYQGNIEGYPDSMVTLSTCSGLRGILQFENVSYGIEPLESAVEFQHVLYKLKNEDNDIAIFIDRSLKEQPMDDNIFISEKSEPAVPDLFPLYLEMHIVVDKTLYDYWGSDSMIVTNKVIEIVGLANSMFTQFKVTIVLSSLELWSDENKISTVGEADELLQKFLEWKQSYLNLRPHDIAYLLIYMDYPRYLGAVFPGTMCITRYSAGVALYPKEITLEAFAVIVTQMLALSLGISYDDPKKCQCSESTCIMNPEVVQSNGVKTFSSCSLRSFQNFISNVGVKCLQNKPQMQKKSPKPVCGNGRLEGNEICDCGTEAQCGPASCCDFRTCVLKDGAKCYKGLCCKDCQILQSGVECRPKAHPECDIAENCNGTSPECGPDITLINGLSCKNNKFICYDGDCHDLDARCESVFGKGSRNAPFACYEEIQSQSDRFGNCGRDRNNKYVFCGWRNLICGRLVCTYPTRKPFHQENGDVIYAFVRDSVCITVDYKLPRTVPDPLAVKNGSQCDIGRVCVNRECVESRIIKASAHVCSQQCSGHGVCDSRNKCHCSPGYKPPNCQIRSKGFSIFPEEDMGSIMERASGKTENT

SEQ ID NO: 2065 - protein, 701 aa, synthetic construct
  REGION 1..701: note = ADAM33 (Q9BZ11) SP+PP+ECD
MGWRPRRARGTPLLLLLLLLLLWPVPGAGVLQGHIPGQPVTPHWVLDGQPWRTVSLEEPVSKPDMGLVALEAEGQELLLELEKNHRLLAPGYIETHYGPDGQPVVLAPNHTDHCHYQGRVRGFPDSWVVLCTCSGMSGLITLSRNASYYLRPWPPRGSKDFSTHEIFRMEQLLTWKGTCGHRDPGNKAGMTSLPGGPQSRGRREARRTRKYLELYIVADHTLFLTRHRNLNHTKQRLLEVANYVDQLLRTLDIQVALTGLEVWTERDRSRVTQDANATLWAFLQWRRGLWAQRPHDSAQLLTGRAFQGATVGLAPVEGMCRAESSGGVSTDHSELPIGAAATMAHEIGHSLGLSHDPDGCCVEAAAESGGCVMAAATGHPFPRVFSACSRRQLRAFFRKGGGACLSNAPDPGLPVPPALCGNGFVEAGEECDCGPGQECRDLCCFAHNCSLRPGAQCAHGDCCVRCLLKPAGALCRQAMGDCDLPEFCTGTSSHCPPDVYLLDGSPCARGSGYCWDGACPTLEQQCQQLWGPGSHPAPEACFQVVNSAGDAHGNCGQDSEGHFLPCAGRDALCGKLQCQGGKPSLLAPHMVPVDSTVHLDGQEVTCRGALALPSAQLDLLGLGLVEPGTQCGPRMVCQSRRCRKNAFQELQRCLTACHSHGVCNSNHNCHCAPGWAPPFCDKPGFGGSMDSGPVQAENHDT

SEQ ID NO: 2066 - protein, 668 aa, synthetic construct
  REGION 1..668: note = ADAM7 (Q9H2U9) SP+PP+ECD
MLPGCIFLMILLIPQVKEKFILGVEGQQLVRPKKLPLIQKRDTGHTHDDDILKTYEEELLYEIKLNRKTLVLHLLRSREFLGSNYSETFYSMKGEAFTRHPQIMDHCFYQGSIVHEYDSAASISTCNGLRGFFRINDQRYLIEPVKYSDEGEHLVFKYNLRVPYGANYSCTELNFTRKTVPGDNESEEDSKIKGIHDEKYVELFIVADDTVYRRNGHPHNKLRNRIWGMVNFVNMIYKTLNIHVTLVGIEIWTHEDKIELYSNIETTLLRFSFWQEKILKTRKDFDHVVLLSGKWLYSHVQGISYPGGMCLPYYSTSIIKDLLPDTNIIANRMAHQLGHNLGMQHDEFPCTCPSGKCVMDSDGSIPALKFSKCSQNQYHQYLKDYKPTCMLNIPFPYNFHDFQFCGNKKLDEGEECDCGPAQECTNPCCDAHTCVLKPGFTCAEGECCESCQIKKAGSICRPAKDECDFPEMCTGHSPACPKDQFRVNGFPCKNSEGYCFMGKCPTREDQCSELFDDEAIESHDICYKMNTKGNKFGYCKNKENRFLPCEEKDVRCGKIYCTGGELSSLLGEDKTYHLKDPQKNATVKCKTIFLYHDSTDIGLVASGTKCGEGMVCNNGECLNMEKVYISTNCPSQCNENPVDGHGLQCHCEEGQAPVACEETLHVTN

SEQ ID NO: 2067 - protein, 655 aa, synthetic construct
  REGION 1..655: note = ADAM8 (P78325) SP+PP+ECD
MRGLGLWLLGAMMLPAIAPSRPWALMEQYEVVLPWRLPGPRVRRALPSHLGLHPERVSYVLGATGHNFTLHLRKNRDLLGSGYTETYTAANGSEVTEQPRGQDHCFYQGHVEGYPDSAASLSTCAGLRGFFQVGSDLHLIEPLDEGGEGGRHAVYQAEHLLQTAGTCGVSDDSLGSLLGPRTAAVFRPRPGDSLPSRETRYVELYVVVDNAEFQMLGSEAAVRHRVLEVVNHVDKLYQKLNFRVVLVGLEIWNSQDRFHVSPDPSVTLENLLTWQARQRTRRHLHDNVQLITGVDFTGTTVGFARVSAMCSHSSGAVNQDHSKNPVGVACTMAHEMGHNLGMDHDENVQGCRCQERFEAGRCIMAGSIGSSFPRMFSDCSQAYLESFLERPQSVCLANAPDLSHLVGGPVCGNLFVERGEQCDCGPPEDCRNRCCNSTTCQLAEGAQCAHGTCCQECKVKPAGELCRPKKDMCDLEEFCDGRHPECPEDAFQENGTPCSGGYCYNGACPTLAQQCQAFWGPGGQAAEESCFSYDILPGCKASRYRADMCGVLQCKGGQQPLGRAICIVDVCHALTTEDGTAYEPVPEGTRCGPEKVCWKGRCQDLHVYRSSNCSAQCHNHGVCNHKQECHCHAGWAPPHCAKLLTEVHAASGSLP

SEQ ID NO: 2068 - protein, 697 aa, synthetic construct
  REGION 1..697: note = ADAM9 (Q13443) SP+PP+ECD
MGSGARFPSGTLRVRWLLLLGLVGPVLGAARPGFQQTSHLSSYEIITPWRLTRERREAPRPYSKQVSYVIQAEGKEHIIHLERNKDLLPEDFVVYTYNKEGTLITDHPNIQNHCHYRGYVEGVHNSSIALSDCFGLRGLLHLENASYGIEPLQNSSHFEHIIYRMDDVYKEPLKCGVSNKDIEKETAKDEEEEPPSMTQLLRRRRAVLPQTRYVELFIVVDKERYDMMGRNQTAVREEMILLANYLDSMYIMLNIRIVLVGLEIWTNGNLINIVGGAGDVLGNFVQWREKFLITRRRHDSAQLVLKKGFGGTAGMAFVGTVCSRSHAGGINVFGQITVETFASIVAHELGHNLGMNHDDGRDCSCGAKSCIMNSGASGSRNFSSCSAEDFEKLTLNKGGNCLLNIPKPDEAYSAPSCGNKLVDAGEECDCGTPKECELDPCCEGSTCKLKSFAECAYGDCCKDCRFLPGGTLCRGKTSECDVPEYCNGSSQFCQPDVFIQNGYPCQNNKAYCYNGMCQYYDAQCQVIFGSKAKAAPKDCFIEVNSKGDRFGNCGFSGNEYKKCATGNALCGKLQCENVQEIPVFGIVPAIIQTPSRGTKCWGVDFQLGSDVPDPGMVNEGTKCGAGKICRNFQCVDASVLNYDCDVQKKCHGHGVCNSNKNCHCENGWAPPNCETKGYGGSVDSGPTYNEMNTALRD

SEQ ID NO: 2069 - protein, 342 aa, synthetic construct
  REGION 1..342: note = AGER (Q15109) SP+PP+ECD
MAAGTAVGAWVLVLSLWGAVVGAQNITARIGEPLVLKCKGAPKKPPQRLEWKLNTGRTEAWKVLSPQGGGPWDSVARVLPNGSLFLPAVGIQDEGIFRCQAMNRNGKETKSNYRVRVYQIPGKPEIVDSASELTAGVPNKVGTCVSEGSYPAGTLSWHLDGKPLVPNEKGVSVKEQTRRHPETGLFTLQSELMVTPARGGDPRPTFSCSFSPGLPRHRALRTAPIQPRVWEPVPLEEVQLVVEPEGGAVAPGGTVTLTCEVPAQPSPQIHWMKDGVPLPLPPSPVLILPEIGPQDQGTYSCVATHSSHGPQESRAVSISIIEPGEEGPTAGSVGGSGLGTLA

SEQ ID NO: 2070 - protein, 527 aa, synthetic construct
  REGION 1..527: note = ALCAM (Q13740) SP+PP+ECD
MESKGASSCRLLFCLLISATVFRPGLGWYTVNSAYGDTIIIPCRLDVPQNLMFGKWKYEKPDGSPVFIAFRSSTKKSVQYDDVPEYKDRLNLSENYTLSISNARISDEKRFVCMLVTEDNVFEAPTIVKVFKQPSKPEIVSKALFLETEQLKKLGDCISEDSYPDGNITWYRNGKVLHPLEGAVVIIFKKEMDPVTQLYTMTSTLEYKTTKADIQMPFTCSVTYYGPSGQKTIHSEQAVFDIYYPTEQVTIQVLPPKNAIKEGDNITLKCLGNGNPPPEEFLFYLPGQPEGIRSSNTYTLTDVRRNATGDYKCSLIDKKSMIASTAITVHYLDLSLNPSGEVTRQIGDALPVSCTISASRNATVVWMKDNIRLRSSPSFSSLHYQDAGNYVCETALQEVEGLKKRESLTLIVEGKPQIKMTKKTDPSGLSKTIICHVEGFPKPAIQWTITGSGSVINQTEESPYINGRYYSKIIISPEENVTLTCTAENQLERTVNSLNVSAISIPEHDEADEISDENREKVNDQAK

SEQ ID NO: 2071 - protein, 1038 aa, synthetic construct
  REGION 1..1038: note = ALK (Q9UM73) SP+PP+ECD
MGAIGLLWLLPLLLSTAAVGSGMGTGQRAGSPAAGPPLQPREPLSYSRLQRKSLAVDFVVPSLFRVYARDLLLPPSSSELKAGRPEARGSLALDCAPLLRLLGPAPGVSWTAGSPAPAEARTLSRVLKGGSVRKLRRAKQLVLELGEEAILEGCVGPPGEAAVGLLQFNLSELFSWWIRQGEGRLRIRLMPEKKASEVGREGRLSAAIRASQPRLLFQIFGTGHSSLESPTNMPSPSPDYFTWNLTWIMKDSFPFLSHRSRYGLECSFDFPCELEYSPPLHDLRNQSWSWRRIPSEEASQMDLLDGPGAERSKEMPRGSFLLLNTSADSKHTILSPWMRSSSEHCTLAVSVHRHLQPSGRYIAQLLPHNEAAREILLMPTPGKHGWTVLQGRIGRPDNPFRVALEYISSGNRSLSAVDFFALKNCSEGTSPGSKMALQSSFTCWNGTVLQLGQACDFHQDCAQGEDESQMCRKLPVGFYCNFEDGFCGWTQGTLSPHTPQWQVRTLKDARFQDHQDHALLLSTTDVPASESATVTSATFPAPIKSSPCELRMSWLIRGVLRGNVSLVLVENKTGKEQGRMVWHVAAYEGLSLWQWMVLPLLDVSDRFWLQMVAWWGQGSRAIVAFDNISISLDCYLTISGEDKILQNTAPKSRNLFERNPNKELKPGENSPRQTPIFDPTVHWLFTTCGASGPHGPTQAQCNNAYQNSNLSVEVGSEGPLKGIQIWKVPATDTYSISGYGAAGGKGGKNTMMRSHGVSVLGIFNLEKDDMLYILVGQQGEDACPSTNQLIQKVCIGENNVIEEEIRVNRSVHEWAGGGGGGGGATYVFKMKDGVPVPLIIAAGGGGRAYGAKTDTFHPERLENNSSVLGLNGNSGAAGGGGGWNDNTSLLWAGKSLQEGATGGHSCPQAMKKWGWETRGGFGGGGGGCSSGGGGGGYIGGNAASNNDPEMDGEDGVSFISPLGILYTPALKVMEGHGEVNIKHYLNCSHCEVDECHMDPESHKVICFCDHGTVLAEDGVSCIVSPTPEPHLPLSLILS

SEQ ID NO: 2072 - protein, 149 aa, synthetic construct
  REGION 1..149: note = AMHR2 (Q16671) SP+PP+ECD
MLGSLGLWALLPTAVEAPPNRRTCVFFEAPGVRGSTKTLGELLDTGTELPRAIRCLYSRCCFGIWNLTQDRAQVEMQGCRDSDEPGCESLHCDPSPRAHPSPGSTLFTCSCGTDFCNANYSHLPPPGSPGTPGSQGPQAAPGESIWMAL

SEQ ID NO: 2073 - protein, 275 aa, synthetic construct
  REGION 1..275: note = AMICA1 (Q86YT9) SP+PP+ECD
MFCPLKLILLPVLLDYSLGLNDLNVSPPELTVHVGDSALMGCVFQSTEDKCIFKIDWTLSPGEHAKDEYVLYYYSNLSVPIGRFQNRVHLMGDILCNDGSLLLQDVQEADQGTYICEIRLKGESQVFKKAVVLHVLPEEPKELMVHVGGLIQMGCVFQSTEVKHVTKVEWIFSGRRAKEEIVFRYYHKLRMSVEYSQSWGHFQNRVNLVGDIFRNDGSIMLQGVRESDGGNYTCSIHLGNLVFKKTIVLHVSPEEPRTLVTPAALRPLVLGGNQL

SEQ ID NO: 2074 - protein, 372 aa, synthetic construct
  REGION 1..372: note = AMIGO1 (Q86WK6) SP+PP+ECD
MHPHRDPRGLWLLLPSLSLLLFEVARAGRAVVSCPAACLCASNILSCSKQQLPNVPHSLPSYTALLDLSHNNLSRLRAEWTPTRLTQLHSLLLSHNHLNFISSEAFSPVPNLRYLDLSSNQLRTLDEFLFSDLQVLEVLLLYNNHIMAVDRCAFDDMAQLQKLYLSQNQISRFPLELVKEGAKLPKLTLLDLSSNKLKNLPLPDLQKLPAWIKNGLYLHNNPLNCDCELYQLFSHWQYRQLSSVMDFQEDLYCMNSKKLHNVFNLSFLNCGEYKERAWEAHLGDTLIIKCDTKQQGMTKVWVTPSNERVLDEVTNGTVSVSKDGSLLFQQVQVEDGGVYTCYAMGETFNETLSVELKVHNFTLHGHHDTLNT

SEQ ID NO: 2075 - protein, 398 aa, synthetic construct
  REGION 1..398: note = AMIGO2 (Q86SJ2) SP+PP+ECD
MSLRVHTLPTLLGAVVRPGCRELLCLLMITVTVGPGASGVCPTACICATDIVSCTNKNLSKVPGNLFRLIKRLDLSYNRIGLLDSEWIPVSFAKLNTLILRHNNITSISTGSFSTTPNLKCLDLSSNKLKTVKNAVFQELKVLEVLLLYNNHISYLDPSAFGGLSQLQKLYLSGNFLTQFPMDLYVGRFKLAELMFLDVSYNRIPSMPMHHINLVPGKQLRGIYLHGNPFVCDCSLYSLLVFWYRRHFSSVMDFKNDYTCRLWSDSRHSRQVLLLQDSFMNCSDSIINGSFRALGFIHEAQVGERLMVHCDSKTGNANTDFIWVGPDNRLLEPDKEMENFYVFHNGSLVIESPRFEDAGVYSCIAMNKQRLLNETVDVTINVSNFTVSRSHAHEAFNT

SEQ ID NO: 2076 - protein, 383 aa, synthetic construct
  REGION 1..383: note = AMIGO3 (Q86WK7) SP+PP+ECD
MTWLVLLGTLLCMLRVGLGTPDSEGFPPRALHNCPYKCICAADLLSCTGLGLQDVPAELPAATADLDLSHNALQRLRPGWLAPLFQLRALHLDHNELDALGRGVFVNASGLRLLDLSSNTLRALGRHDLDGLGALEKLLLFNNRLVHLDEHAFHGLRALSHLYLGCNELASFSFDHLHGLSATHLLTLDLSSNRLGHISVPELAALPAFLKNGLYLHNNPLPCDCRLYHLLQRWHQRGLSAVRDFAREYVCLAFKVPASRVRFFQHSRVFENCSSAPALGLERPEEHLYALVGRSLRLYCNTSVPAMRIAWVSPQQELLRAPGSRDGSIAVLADGSLAIGNVQEQHAGLFVCLATGPRLHHNQTHEYNVSVHFPRPEPEAFNT

SEQ ID NO: 2077 - protein, 357 aa, synthetic construct
  REGION 1..357: note = AMN (Q9BXJ7) SP+PP+ECD
MGVLGRVLLWLQLCALTQAVSKLWVPNTDFDVAANWSQNRTPCAGGAVEFPADKMVSVLVQEGHAVSDMLLPLDGELVLASGAGFGVSDVGSHLDCGAGEPAVFRDSDRFSWHDPHLWRSGDEAPGLFFVDAERVPCRHDDVFFPPSASFRVGLGPGASPVRVRSISALGRTFTRDEDLAVFLASRAGRLRFHGPGALSVGPEDCADPSGCVCGNAEAQPWICAALLQPLGGRCPQAACHSALRPQGQCCDLCGAVVLLTHGPAFDLERYRARILDTFLGLPQYHGLQVAVSKVPRSSRLREADTEIQVVLVENGPETGGAGRLARALLADVAENGEALGVLEATMRESGAHVWGSS

SEQ ID NO: 2078 - protein, 321 aa, synthetic construct
  REGION 1..321: note = ANTXR1 (Q9H6X2) SP+PP+ECD
MATAERRALGIGFQWLSLATLVLICAGQGGRREDGGPACYGGFDLYFILDKSGSVLHHWNEIYYFVEQLAHKFISPQLRMSFIVFSTRGTTLMKLTEDREQIRQGLEELQKVLPGGDTYMHEGFERASEQIYYENRQGYRTASVIIALTDGELHEDLFFYSEREANRSRDLGAIVYCVGVKDFNETQLARIADSKDHVFPVNDGFQALQGIIHSILKKSCIEILAAEPSTICAGESFQVVVRGNGFRHARNVDRVLCSFKINDSVTLNEKPFSVEDTYLLCPAPILKEVGMKAALQVSMNDGLSFISSSVIITTTHCSDGS

SEQ ID NO: 2079 - protein, 318 aa, synthetic construct
  REGION 1..318: note = ANTXR2 (P58335) SP+PP+ECD
MVAERSPARSPGSWLFPGLWLLVLSGPGGLLRAQEQPSCRRAFDLYFVLDKSGSVANNWIEIYNFVQQLAERFVSPEMRLSFIVFSSQATIILPLTGDRGKISKGLEDLKRVSPVGETYIHEGLKLANEQIQKAGGLKTSSIIIALTDGKLDGLVPSYAEKEAKISRSLGASVYCVGVLDFEQAQLERIADSKEQVFPVKGGFQALKGIINSILAQSCTEILELQPSSVCVGEEFQIVLSGRGFMLGSRNGSVLCTYTVNETYTTSVKPVSVQLNSMLCPAPILNKAGETLDVSVSFNGGKSVISGSLIVTATECSNG

SEQ ID NO: 2080 - protein, 353 aa, synthetic construct
  REGION 1..353: note = ANTXRL (A6NF34) SP+PP+ECD
MGSHESLGPYFLVFLLLLLLPPPLFRAGSLRYHGPDWRIFHRLALGSRRAHHHHGPGWRQHWRQGQAGHRCQGSFDLYFILDKSGSVNNNWIDLYMWVEETVARFQSPNIRMCFITYSTDGQTVLPLTSDKNRIKNGLDQLQKIVPDGHTFMQAGFRKAIQQIESFNSGNKVPSMIIAMTDGELVAHAFQDTLREAQKARKLGANVYTLGVADYNLDQITAIADSPGHVFAVENGFKALRSTIDALTSKVCLDVTSVEPSSECVGEPYHVVIHGNGFQNLKKRDEVICRFIFNESTIIDEKPTSIDNNSMNCPGPKLEKPGEEYSIEVSLNKGKTFFKSNVSITSTTCGIFRN

SEQ ID NO: 2081 - protein, 492 aa, synthetic construct
  REGION 1..492: note = APCDD1 (Q8J025) SP+PP+ECD
MSWPRRLLLRYLFPALLLHGLGEGSALLHPDSRSHPRSLEKSAWRAFKESQCHHMLKHLHNGARITVQMPPTIEGHWVSTGCEVRSGPEFITRSYRFYHNNTFKAYQFYYGSNRCTNPTYTLIIRGKIRLRQASWIIRGGTEADYQLHNVQVICHTEAVAEKLGQQVNRTCPGFLADGGPWVQDVAYDLWREENGCECTKAVNFAMHELQLIRVEKQYLHHNLDHLVEELFLGDIHTDATQRMFYRPSSYQPPLQNAKNHDHACIACRIIYRSDEHHPPILPPKADLTIGLHGEWVSQRCEVRPEVLFLTRHFIFHDNNNTWEGHYYHYSDPVCKHPTFSIYARGRYSRGVLSSRVMGGTEFVFKVNHMKVTPMDAATASLLNVFNGNECGAEGSWQVGIQQDVTHTNGCVALGIKLPHTEYEIFKMEQDARGRYLLFNGQRPSDGSSPDRPEKRATSYQMPLVQCASSSPRAEDLAEDSGSSLYGRAPGRH

SEQ ID NO: 2082 - protein, 580 aa, synthetic construct
  REGION 1..580: note = APLP1 (P51693) SP+PP+ECD
MGPASPAARGLSRRPGQPPLPLLLPLLLLLLRAQPAIGSLAGGSPGAAEAPGSAQVAGLCGRLTLHRDLRTGRWEPDPQRSRRCLRDPQRVLEYCRQMYPELQIARVEQATQAIPMERWCGGSRSGSCAHPHHQVVPFRCLPGEFVSEALLVPEGCRFLHQERMDQCESSTRRHQEAQEACSSQGLILHGSGMLLPCGSDRFRGVEYVCCPPPGTPDPSGTAVGDPSTRSWPPGSRVEGAEDEEEEESFPQPVDDYFVEPPQAEEEEETVPPPSSHTLAVVGKVTPTPRPTDGVDIYFGMPGEISEHEGFLRAKMDLEERRMRQINEVMREWAMADNQSKNLPKADRQALNEHFQSILQTLEEQVSGERQRLVETHATRVIALINDQRRAALEGFLAALQADPPQAERVLLALRRYLRAEQKEQRHTLRHYQHVAAVDPEKAQQMRFQVHTHLQVIEERVNQSLGLLDQNPHLAQELRPQIQELLHSEHLGPSELEAPAPGGSSEDKGGLQPPDSKDDTPMTLPKGSTEQDAASPEKEKMNPLEQYERKVNASVPRGFPFHSSEIQRDELAPAGTGVSRE

SEQ ID NO: 2083 - protein, 692 aa, synthetic construct
  REGION 1..692: note = APLP2 (Q06481) SP+PP+ECD
MAATGTAAAAATGRLLLLLLVGLTAPALALAGYIEALAANAGTGFAVAEPQIAMFCGKLNMHVNIQTGKWEPDPTGTKSCFETKEEVLQYCQEMYPELQITNVMEANQRVSIDNWCRRDKKQCKSRFVTPFKCLVGEFVSDVLLVPEKCQFFHKERMEVCENHQHWHTVVKEACLTQGMTLYSYGMLLPCGVDQFHGTEYVCCPQTKIIGSVSKEEEEEDEEEEEEEDEEEDYDVYKSEFPTEADLEDFTEAAVDEDDEDEEEGEEVVEDRDYYYDTFKGDDYNEENPTEPGSDGTMSDKEITHDVKAVCSQEAMTGPCRAVMPRWYFDLSKGKCVRFIYGGCGGNRNNFESEDYCMAVCKAMIPPTPLPTNDVDVYFETSADDNEHARFQKAKEQLEIRHRNRMDRVKKEWEEAELQAKNLPKAERQTLIQHFQAMVKALEKEAASEKQQLVETHLARVEAMLNDRRRMALENYLAALQSDPPRPHRILQALRRYVRAENKDRLHTIRHYQHVLAVDPEKAAQMKSQVMTHLHVIEERRNQSLSLLYKVPYVAQEIQEEIDELLQEQRADMDQFTASISETPVDVRVSSEESEEIPPFHPFHPFPALPENEDTQPELYHPMKKGSGVGEQDGGLIGAEEKVINSKNKVDENMVIDETLDVKEMIFNAERVGGLEEERESVGPLREDFSLSS

SEQ ID NO: 2084 - protein, 701 aa, synthetic construct
  REGION 1..701: note = APP (P05067) SP+PP+ECD
MLPGLALLLLAAWTARALEVPTDGNAGLLAEPQIAMFCGRLNMHMNVQNGKWDSDPSGTKTCIDTKEGILQYCQEVYPELQITNVVEANQPVTIQNWCKRGRKQCKTHPHFVIPYRCLVGEFVSDALLVPDKCKFLHQERMDVCETHLHWHTVAKETCSEKSTNLHDYGMLLPCGIDKFRGVEFVCCPLAEESDNVDSADAEEDDSDVWWGGADTDYADGSEDKVVEVAEEEEVAEVEEEEADDDEDDEDGDEVEEEAEEPYEEATERTTSIATTTTTTTESVEEVVREVCSEQAETGPCRAMISRWYFDVTEGKCAPFFYGGCGGNRNNFDTEEYCMAVCGSAMSQSLLKTTQEPLARDPVKLPTTAASTPDAVDKYLETPGDENEHAHFQKAKERLEAKHRERMSQVMREWEEAERQAKNLPKADKKAVIQHFQEKVESLEQEAANERQQLVETHMARVEAMLNDRRRLALENYITALQAVPPRPRHVFNMLKKYVRAEQKDRQHTLKHFEHVRMVDPKKAAQIRSQVMTHLRVIYERMNQSLSLLYNVPAVAEEIQDEVDELLQKEQNYSDDVLANMISEPRISYGNDALMPSLTETKTTVELLPVNGEFSLDDLQPWHSFGADSVPANTENEVEPVDARPAADRGLTTRPGSGLTNIKTEEISEVKMDAEFRHDSGYEVHHQKLVFFAEDVGSNKGA

SEQ ID NO: 2085 - protein, 198 aa, synthetic construct
  REGION 1..198: note = AREG (P15514) SP+PP+ECD
MRAPLLPPAPVVLSLLILGSGHYAAGLDLNDTYSGKREPFSGDHSADGFEVTSRSEMSSGSEISPVSEMPSSSEPSSGADYDYSEEYDNEPQIPGYIVDDSVRVEQVVKPPQNKTESENTSDKPKRKKKGGKNGKNRRNRKKKNPCNAEFQNFCIHGECKYIEHLEAVTCKCQQEYFGERCGEKSMKTHSMIDSSLSK

SEQ ID NO: 2086 - protein, 199 aa, synthetic construct
  REGION 1..199: note = ATRAID (Q6UW56) SP+PP+ECD
MAPHDPGSLTTLVPWAAALLLALGVERALALPEICTQCPGSVQNLSKVAFYCKTTRELMLHARCCLNQKGTILGLDLQNCSLEDPGPNFHQAHTTVIIDLQANPLKGDLANTFRGFTQLQTLILPQHVNCPGGINAWNTITSYIDNQICQGQKNLCNNTGDPEMCPENGSCVPDGPGLLQCVCADGFHGYKCMRQGSFS

SEQ ID NO: 2087 - protein, 1279 aa, synthetic construct
  REGION 1..1279: note = ATRN (O75882) SP+PP+ECD
MVAAAAATEARLRRRTAATAALAGRSGGPHWDWDVTRAGRPGLGAGLRLPRLLSPPLRPRLLLLLLLLSPPLLLLLLPCEAEAAAAAAAVSGSAAAEAKECDRPCVNGGRCNPGTGQCVCPAGWVGEQCQHCGGRFRLTGSSGFVTDGPGNYKYKTKCTWLIEGQPNRIMRLRFNHFATECSWDHLYVYDGDSIYAPLVAAFSGLIVPERDGNETVPEVVATSGYALLHFFSDAAYNLTGFNITYSFDMCPNNCSGRGECKISNSSDTVECECSENWKGEACDIPHCTDNCGFPHRGICNSSDVRGCSCFSDWQGPGCSVPVPANQSFWTREEYSNLKLPRASHKAVVNGNIMWVVGGYMFNHSDYNMVLAYDLASREWLPLNRSVNNVVVRYGHSLALYKDKIYMYGGKIDSTGNVTNELRVFHIHNESWVLLTPKAKEQYAVVGHSAHIVTLKNGRVVMLVIFGHCPLYGYISNVQEYDLDKNTWSILHTQGALVQGGYGHSSVYDHRTRALYVHGGYKAFSANKYRLADDLYRYDVDTQMWTILKDSRFFRYLHTAVIVSGTMLVFGGNTHNDTSMSHGAKCFSSDFMAYDIACDRWSVLPRPDLHHDVNRFGHSAVLHNSTMYVFGGFNSLLLSDILVFTSEQCDAHRSEAACLAAGPGIRCVWNTGSSQCISWALATDEQEEKLKSECFSKRTLDHDRCDQHTDCYSCTANTNDCHWCNDHCVPRNHSCSEGQISIFRYENCPKDNPMYYCNKKTSCRSCALDQNCQWEPRNQECIALPENICGIGWHLVGNSCLKITTAKENYDNAKLFCRNHNALLASLTTQKKVEFVLKQLRIMQSSQSMSKLTLTPWVGLRKINVSYWCWEDMSPFTNSLLQWMPSEPSDAGFCGILSEPSTRGLKAATCINPLNGSVCERPANHSAKQCRTPCALRTACGDCTSGSSECMWCSNMKQCVDSNAYVASFPFGQCMEWYTMSTCPPENCSGYCTCSHCLEQPGCGWCTDPSNTGKGKCIEGSYKGPVKMPSQAPTGNFYPQPLLNSSMCLEDSRYNWSFIHCPACQCNGHSKCINQSICEKCENLTTGKHCETCISGFYGDPTNGGKCQPCKCNGHASLCNTNTGKCFCTTKGVKGDECQLCEVENRYQGNPLRGTCYYTLLIDYQFTFSLSQEDDRYYTAINFVATPDEQNRDLDMFINASKNFNLNITWAASFSAGTQAGEEMPVVSKTNIKEYKDSFSNEKFDFRNHPNITFFVYVSNFTWPIKIQIAFSQHSNFMDL

SEQ ID NO: 2088 - protein, 1230 aa, synthetic construct
  REGION 1..1230: note = ATRNL1 (Q5VV63) SP+PP+ECD
METGGRARTGTPQPAAPGVWRARPAGGGGGGASSWLLDGNSWLLCYGFLYLALYAQVSQSKPCERTGSCFSGRCVNSTCLCDPGWVGDQCQHCQGRFKLTEPSGYLTDGPINYKYKTKCTWLIEGYPNAVLRLRFNHFATECSWDHMYVYDGDSIYAPLIAVLSGLIVPEIRGNETVPEVVTTSGYALLHFFSDAAYNLTGFNIFYSINSCPNNCSGHGKCTTSVSVPSQVYCECDKYWKGEACDIPYCKANCGSPDHGYCDLTGEKLCVCNDSWQGPDCSLNVPSTESYWILPNVKPFSPSVGRASHKAVLHGKFMWVIGGYTFNYSSFQMVLNYNLESSIWNVGTPSRGPLQRYGHSLALYQENIFMYGGRIETNDGNVTDELWVFNIHSQSWSTKTPTVLGHGQQYAVEGHSAHIMELDSRDVVMIIIFGYSAIYGYTSSIQEYHISSNTWLVPETKGAIVQGGYGHTSVYDEITKSIYVHGGYKALPGNKYGLVDDLYKYEVNTKTWTILKESGFARYLHSAVLINGAMLIFGGNTHNDTSLSNGAKCFSADFLAYDIACDEWKILPKPNLHRDVNRFGHSAVVINGSMYIFGGFSSVLLNDILVYKPPNCKAFRDEELCKNAGPGIKCVWNKNHCESWESGNTNNILRAKCPPKTAASDDRCYRYADCASCTANTNGCQWCDDKKCISANSNCSMSVKNYTKCHVRNEQICNKLTSCKSCSLNLNCQWDQRQQECQALPAHLCGEGWSHIGDACLRVNSSRENYDNAKLYCYNLSGNLASLTTSKEVEFVLDEIQKYTQQKVSPWVGLRKINISYWGWEDMSPFTNTTLQWLPGEPNDSGFCAYLERAAVAGLKANPCTSMANGLVCEKPVVSPNQNARPCKKPCSLRTSCSNCTSNGMECMWCSSTKRCVDSNAYIISFPYGQCLEWQTATCSPQNCSGLRTCGQCLEQPGCGWCNDPSNTGRGHCIEGSSRGPMKLIGMHHSEMVLDTNLCPKEKNYEWSFIQCPACQCNGHSTCINNNVCEQCKNLTTGKQCQDCMPGYYGDPTNGGQCTACTCSGHANICHLHTGKCFCTTKGIKGDQCQLCDSENRYVGNPLRGTCYYSLLIDYQFTFSLLQEDDRHHTAINFIANPEQSNKNLDISINASNNFNLNITWSVGSTAGTISGEETSIVSKNNIKEYRDSFSYEKFNFRSNPNITFYVYVSNFSWPIKIQIAFSQHNTIMDL

SEQ ID NO: 2089 - protein, 451 aa, synthetic construct
  REGION 1..451: note = AXL (P30530) SP+PP+ECD
MAWRCPRMGRVPLAWCLALCGWACMAPRGTQAEESPFVGNPGNITGARGLTGTLRCQLQVQGEPPEVHWLRDGQILELADSTQTQVPLGEDEQDDWIVVSQLRITSLQLSDTGQYQCLVFLGHQTFVSQPGYVGLEGLPYFLEEPEDRTVAANTPFNLSCQAQGPPEPVDLLWLQDAVPLATAPGHGPQRSLHVPGLNKTSSFSCEAHNAKGVTTSRTATITVLPQQPRNLHLVSRQPTELEVAWTPGLSGIYPLTHCTLQAVLSDDGMGIQAGEPDPPEEPLTSQASVPPHQLRLGSLHPHTPYHIRVACTSSQGPSSWTHWLPVETPEGVPLGPPENISATRNGSQAFVHWQEPRAPLQGTLLGYRLAYQGQDTPEVLMDIGLRQEVTLELQGDGSVSNLTVCVAAYTAAGDGPWSLPVPLEAWRPGQAQPVHQLVKEPSTPAFSWPWW

SEQ ID NO: 2090 - protein, 457 aa, synthetic construct
  REGION 1..457: note = BACE1 (P56817) SP+PP+ECD
MAQALPWLLLWMGAGVLPAHGTQHGIRLPLRSGLGGAPLGLRLPRETDEEPEEPGRRGSFVEMVDNLRGKSGQGYYVEMTVGSPPQTLNILVDTGSSNFAVGAAPHPFLHRYYQRQLSSTYRDLRKGVYVPYTQGKWEGELGTDLVSIPHGPNVTVRANIAAITESDKFFINGSNWEGILGLAYAEIARPDDSLEPFFDSLVKQTHVPNLFSLQLCGAGFPLNQSEVLASVGGSMIIGGIDHSLYTGSLWYTPIRREWYYEVIIVRVEINGQDLKMDCKEYNYDKSIVDSGTTNLRLPKKVFEAAVKSIKAASSTEKFPDGFWLGEQLVCWQAGTTPWNIFPVISLYLMGEVTNQSFRITILPQQYLRPVEDVATSQDDCYKFAISQSSTGTVMGAVIMEGFYVVFDRARKRIGFAVSACHVHDEFRTAAVEGPFVTLDMEDCGYNIPQTDESTLMT

SEQ ID NO: 2091 - protein, 473 aa, synthetic construct
  REGION 1..473: note = BACE2 (Q9Y5Z0) SP+PP+ECD
MGALARALLLPLLAQWLLRAAPELAPAPFTLPLRVAAATNRVVAPTPGPGTPAERHADGLALALEPALASPAGAANFLAMVDNLQGDSGRGYYLEMLIGTPPQKLQILVDTGSSNFAVAGTPHSYIDTYFDTERSSTYRSKGFDVTVKYTQGSWTGFVGEDLVTIPKGFNTSFLVNIATIFESENFFLPGIKWNGILGLAYATLAKPSSSLETFFDSLVTQANIPNVFSMQMCGAGLPVAGSGTNGGSLVLGGIEPSLYKGDIWYTPIKEEWYYQIEILKLEIGGQSLNLDCREYNADKAIVDSGTTLLRLPQKVFDAVVEAVARASLIPEFSDGFWTGSQLACWTNSETPWSYFPKISIYLRDENSSRSFRITILPQLYIQPMMGAGLNYECYRFGISPSTNALVIGATVMEGFYVIFDRAQKRVGFAASPCAEIAGAAVSEISGPFSTEDVASNCVPAQSLSEPILWIVSY

SEQ ID NO: 2092 - protein, 152 aa, synthetic construct
  REGION 1..152: note = BAMBI (Q13145) SP+PP+ECD
MDRHSSYIFIWLQLELCAMAVLLTKGEIRCYCDAAHCVATGYMCKSELSACFSRLLDPQNSNSPLTHGCLDSLASTTDICQAKQARNHSGTTIPTLECCHEDMCNYRGLHDVLSPPRGEASGQGNRYQHDGSRNLITKVQELTSSKELWFRA

SEQ ID NO: 2093 - protein, 547 aa, synthetic construct
  REGION 1..547: note = BCAM (P50895) SP+PP+ECD
MEPPDAPAQARGAPRLLLLAVLLAAHPDAQAEVRLSVPPLVEVMRGKSVILDCTPTGTHDHYMLEWFLTDRSGARPRLASAEMQGSELQVTMHDTRGRSPPYQLDSQGRLVLAEAQVGDERDYVCVVRAGAAGTAEATARLNVFAKPEATEVSPNKGTLSVMEDSAQEIATCNSRNGNPAPKITWYRNGQRLEVPVEMNPEGYMTSRTVREASGLLSLTSTLYLRLRKDDRDASFHCAAHYSLPEGRHGRLDSPTFHLTLHYPTEHVQFWVGSPSTPAGWVREGDTVQLLCRGDGSPSPEYTLFRLQDEQEEVLNVNLEGNLTLEGVTRGQSGTYGCRVEDYDAADDVQLSKTLELRVAYLDPLELSEGKVLSLPLNSSAVVNCSVHGLPTPALRWTKDSTPLGDGPMLSLSSITFDSNGTYVCEASLPTVPVLSRTQNFTLLVQGSPELKTAEIEPKADGSWREGDEVTLICSARGHPDPKLSWSQLGGSPAEPIPGRQGWVSSSLTLKVTSALSRDGISCEASNPHGNKRHVFHFGTVSPQTSQA

SEQ ID NO: 2094 - protein, 152 aa, synthetic construct
  REGION 1..152: note = BMPR1A (P36894) SP+PP+ECD
MPQLYIYIRLLGAYLFIISRVQGQNLDSMLHGTGMKSDSDQKKSENGVTLAPEDTLPFLKCYCSGHCPDDAINNTCITNGHCFAIIEEDDQGETTLASGCMKYEGSDFQCKDSPKAQLRRTIECCRTNLCNQYLQPTLPPVVIGPFFDGSIR

SEQ ID NO: 2095 - protein, 150 aa, synthetic construct
  REGION 1..150: note = BMPR2 (Q13873) SP+PP+ECD
MTSSLQRPWRVPWLPWTILLVSTAAASQNQERLCAFKDPYQQDLGIGESRISHENGTILCSKGSTCYGLWEKSKGDINLVKQGCWSHIGDPQECHYEECVVTTTPPSIQNGTYRFCCCSTDLCNVNFTENFPPPDTTPLSPPHSFNRDET

SEQ ID NO: 2096 - protein, 855 aa, synthetic construct
  REGION 1..855: note = BOC (Q9BWV1) SP+PP+ECD
MLRGTMTAWRGMRPEVTLACLLLATAGCFADLNEVPQVTVQPASTVQKPGGTVILGCVVEPPRMNVTWRLNGKELNGSDDALGVLITHGTLVITALNNHTVGRYQCVARMPAGAVASVPATVTLANLQDFKLDVQHVIEVDEGNTAVIACHLPESHPKAQVRYSVKQEWLEASRGNYLIMPSGNLQIVNASQEDEGMYKCAAYNPVTQEVKTSGSSDRLRVRRSTAEAARIIYPPEAQTIIVTKGQSLILECVASGIPPPRVTWAKDGSSVTGYNKTRFLLSNLLIDTTSEEDSGTYRCMADNGVGQPGAAVILYNVQVFEPPEVTMELSQLVIPWGQSAKLTCEVRGNPPPSVLWLRNAVPLISSQRLRLSRRALRVLSMGPEDEGVYQCMAENEVGSAHAVVQLRTSRPSITPRLWQDAELATGTPPVSPSKLGNPEQMLRGQPALPRPPTSVGPASPQCPGEKGQGAPAEAPIILSSPRTSKTDSYELVWRPRHEGSGRAPILYYVVKHRKVTNSSDDWTISGIPANQHRLTLTRLDPGSLYEVEMAAYNCAGEGQTAMVTFRTGRRPKPEIMASKEQQIQRDDPGASPQSSSQPDHGRLSPPEAPDRPTISTASETSVYVTWIPRGNGGFPIQSFRVEYKKLKKVGDWILATSAIPPSRLSVEITGLEKGTSYKFRVRALNMLGESEPSAPSRPYVVSGYSGRVYERPVAGPYITFTDAVNETTIMLKWMYIPASNNNTPIHGFYIYYRPTDSDNDSDYKKDMVEGDKYWHSISHLQPETSYDIKMQCFNEGGESEFSNVMICETKARKSSGQPGRLPPPTLAPPQPPLPETIERPVGTGAMVARSSDLPY

SEQ ID NO: 2097 - protein, 323 aa, synthetic construct
  REGION 1..323: note = BSG (P35613) SP+PP+ECD
MAAALFVLLGFALLGTHGASGAAGFVQAPLSQQRWVGGSVELHCEAVGSPVPEIQWWFEGQGPNDTCSQLWDGARLDRVHIHATYHQHAASTISIDTLVEEDTGTYECRASNDPDRNHLTRAPRVKWVRAQAVVLVLEPGTVFTTVEDLGSKILLTCSLNDSATEVTGHRWLKGGVVLKEDALPGQKTEFKVDSDDQWGEYSCVFLPEPMGTANIQLHGPPRVKAVKSSEHINEGETAMLVCKSESVPPVTDWAWYKITDSEDKALMNGSESRFFVSSSQGRSELHIENLNMEADPGQYRCNGTSSKGSDQAIITLRVRSHLA

SEQ ID NO: 2098 - protein, 118 aa, synthetic construct
  REGION 1..118: note = BTC (P35070) SP+PP+ECD
MDRAARCSGASSLPLLLALALGLVILHCVVADGNSTRSPETNGLLCGDPEENCAATTTQSKRKGHFSRCPKQYKHYCIKGRCRFVVAEQTPSCVCDEGYIGARCERVDLFYLRGDRGQ

SEQ ID NO: 2099 - protein, 157 aa, synthetic construct
  REGION 1..157: note = BTLA (Q7Z6A9) SP+PP+ECD
MKTLPAMLGTGKLFWVFFLIPYLDIWNIHGKESCDVQLYIKRQSEHSILAGDPFELECPVKYCANRPHVTWCKLNGTTCVKLEDRQTSWKEEKNISFFILHFEPVLPNDNGSYRCSANFQSNLIESHSTTLYVTDVKSASERPSKDEMASRPWLLYR

SEQ ID NO: 2100 - protein, 242 aa, synthetic construct
  REGION 1..242: note = BTN1A1 (Q13410) SP+PP+ECD
MAVFPSSGLPRCLLTLILLQLPKLDSAPFDVIGPPEPILAVVGEDAELPCRLSPNASAEHLELRWFRKKVSPAVLVHRDGREQEAEQMPEYRGRATLVQDGIAKGRVALRIRGVRVSDDGEYTCFFREDGSYEEALVHLKVAALGSDPHISMQVQENGEICLECTSVGWYPEPQVQWRTSKGEKFPSTSESRNPDEEGLFTVAASVIIRDTSAKNVSCYIQNLLLGQEKKVEISIPASSLPR

SEQ ID NO: 2101 - protein, 248 aa, synthetic construct
  REGION 1..248: note = BTN2A1 (Q7KYR7) SP+PP+ECD
MESAAALHFSRPASLLLLLLSLCALVSAQFIVVGPTDPILATVGENTTLRCHLSPEKNAEDMEVRWFRSQFSPAVFVYKGGRERTEEQMEEYRGRTTFVSKDISRGSVALVIHNITAQENGTYRCYFQEGRSYDEAILHLVVAGLGSKPLISMRGHEDGGIRLECISRGWYPKPLTVWRDPYGGVAPALKEVSMPDADGLFMVTTAVIIRDKSVRNMSCSINNTLLGQKKESVIFIPESFMPSVSPCA

SEQ ID NO: 2102 - protein, 265 aa, synthetic construct
  REGION 1..265: note = BTN2A2 (Q8WVV5) SP+PP+ECD
MEPAAALHFSLPASLLLLLLLLLLSLCALVSAQFTVVGPANPILAMVGENTTLRCHLSPEKNAEDMEVRWFRSQFSPAVFVYKGGRERTEEQMEEYRGRITFVSKDINRGSVALVIHNVTAQENGIYRCYFQEGRSYDEAILRLVVAGLGSKPLIEIKAQEDGSIWLECISGGWYPEPLTVWRDPYGEVVPALKEVSIADADGLFMVTTAVIIRDKYVRNVSCSVNNTLLGQEKETVIFIPESFMPSASPWMVALAVILTASPWM

SEQ ID NO: 2103 - protein, 246 aa, synthetic construct
  REGION 1..246: note = BTN2A3P (Q96KV6) SP+PP+ECD
MEPAAALHFSRPASLLLLLSLCALVSAQVTVVGPTDPILAMVGENTTLRCCLSPEENAEDMEVRWFQSQFSPAVFVYKGGRERTEEQKEEYRGRTTFVSKDSRGSVALIIHNVTAEDNGIYQCYFQEGRSCNEAILHLVVAGLDSEPVIEMRDHEDGGIQLECISGGWYPKPLTVWRDPYGEVVPALKEVSTPDADSLFMVTTAVIIRDKSVRNVSCSINDTLLGQKKESVIFIPESFMPSRSPCV

SEQ ID NO: 2104 - protein, 254 aa, synthetic construct
  REGION 1..254: note = BTN3A1 (O00481) SP+PP+ECD
MKMASFLAFLLLNFRVCLLLLQLLMPHSAQFSVLGPSGPILAMVGEDADLPCHLFPTMSAETMELKWVSSSLRQVVNVYADGKEVEDRQSAPYRGRTSILRDGITAGKAALRIHNVTASDSGKYLCYFQDGDFYEKALVELKVAALGSDLHVDVKGYKDGGIHLECRSTGWYPQPQIQWSNNKGENIPTVEAPVVADGVGLYAVAASVIMRGSSGEGVSCTIRSSLLGLEKTASISIADPFFRSAQRWIAALAG

SEQ ID NO: 2105 - protein, 248 aa, synthetic construct
  REGION 1..248: note = BTN3A2 (P78410) SP+PP+ECD
MKMASSLAFLLLNFHVSLLLVQLLTPCSAQFSVLGPSGPILAMVGEDADLPCHLFPTMSAETMELKWVSSSLRQVVNVYADGKEVEDRQSAPYRGRTSILRDGITAGKAALRIHNVTASDSGKYLCYFQDGDFYEKALVELKVAALGSNLHVEVKGYEDGGIHLECRSTGWYPQPQIQWSNAKGENIPAVEAPVVADGVGLYEVAASVIMRGGSGEGVSCIIRNSLLGLEKTASISIADPFFRSAQPW

SEQ ID NO: 2106 - protein, 248 aa, synthetic construct
  REGION 1..248: note = BTN3A3 (O00478) SP+PP+ECD
MKMASSLAFLLLNFHVSLFLVQLLTPCSAQFSVLGPSGPILAMVGEDADLPCHLFPTMSAETMELRWVSSSLRQVVNVYADGKEVEDRQSAPYRGRTSILRDGITAGKAALRIHNVTASDSGKYLCYFQDGDFYEKALVELKVAALGSDLHIEVKGYEDGGIHLECRSTGWYPQPQIKWSDTKGENIPAVEAPVVADGVGLYAVAASVIMRGSSGGGVSCIIRNSLLGLEKTASISIADPFFRSAQPW

SEQ ID NO: 2107 - protein, 254 aa, synthetic construct
  REGION 1..254: note = BTNL10 (A8MVZ5) SP+PP+ECD
MAVTCDPEAFLSICFVTLVFLQLPLASIWKADFDVTGPHAPILAMAGGHVELQCQLFPNISAEDMELRWYRCQPSLAVHMHERGMDMDGEQKWQYRGRTTFMSDHVARGKAMVRSHRVTTFDNRTYCCRFKDGVKFGEATVQVQVAGLGREPRIQVTDQQDGVRAECTSAGCFPKSWVERRDFRGQARPAVTNLSASATTRLWAVASSLTLWDRAVEGLSCSISSPLLPERRKVAESHLPATFSRSSQFTAWKA

SEQ ID NO: 2108 - protein, 237 aa, synthetic construct
  REGION 1..237: note = BTNL3 (Q6UXE8) SP+PP+ECD
MAFVLILVLSFYELVSGQWQVTGPGKFVQALVGEDAVFSCSLFPETSAEAMEVRFFRNQFHAVVHLYRDGEDWESKQMPQYRGRTEFVKDSIAGGRVSLRLKNITPSDIGLYGCWFSSQIYDEEATWELRVAALGSLPLISIVGYVDGGIQLLCLSSGWFPQPTAKWKGPQGQDLSSDSRANADGYSLYDVEISIIVQENAGSILCSIHLAEQSHEVESKVLIGETFFQPSPWRLAS

SEQ ID NO: 2109 - protein, 256 aa, synthetic construct
  REGION 1..256: note = BTNL9 (Q6UXG8) SP+PP+ECD
MVDLSVSPDSLKPVSLTSSLVFLMHLLLLQPGEPSSEVKVLGPEYPILALVGEEVEFPCHLWPQLDAQQMEIRWFRSQTFNVVHLYQEQQELPGRQMPAFRNRTKLVKDDIAYGSVVLQLHSIIPSDKGTYGCRFHSDNFSGEALWELEVAGLGSDPHLSLEGFKEGGIQLRLRSSGWYPKPKVQWRDHQGQCLPPEFEAIVWDAQDLFSLETSVVVRAGALSNVSVSIQNLLLSQKKELVVQIADVFVPGASAWK

SEQ ID NO: 2110 - protein, 194 aa, synthetic construct
  REGION 1..194: note = C10orf54 (Q9H7M9) SP+PP+ECD
MGVPTALEAGSWRWGSLLFALFLAASLGPVAAFKVATPYSLYVCPEGQNVTLTCRLLGPVDKGHDVTFYKTWYRSSRGEVQTCSERRPIRNLTFQDLHLHHGGHQAANTSHDLAQRHGLESASDHHGNFSITMRNLTLLDSGLYCCLVVEIRHHHSEHRVHGAMELQVQTGKDAPSNCVVYPSSSQDSENITAA

SEQ ID NO: 2111 - protein, 400 aa, synthetic construct
  REGION 1..400: note = C11orf24 (Q96F05) SP+PP+ECD
MWTALVLIWIFSLSLSESHAASNDPRNFVPNKMWKGLVKRNASVETVDNKTSEDVTMAAASPVTLTKGTSAAHLNSMEVTTEDTSRTDVSEPATSGGAADGVTSIAPTAVASSTTAASITTAASSMTVASSAPTTAASSTTVASIAPTTAASSMTAASSTPMTLALPAPTSTSTGRTPSTTATGHPSLSTALAQVPKSSALPRTATLATLATRAQTVATTANTSSPMSTRPSPSKHMPSDTAASPVPPMRPQAQGPISQVSVDQPVVNTTNKSTPMPSNTTPEPAPTPTVVTTTKAQAREPTASPVPVPHTSPIPEMEAMSPTTQPSPMPYTQRAAGPGTSQAPEQVETEATPGTDSTGPTPRSSGGTKMPATDSCQPSTQGQYMVVTTEPLTQAVVDKT

SEQ ID NO: 2112 - protein, 61 aa, synthetic construct
  REGION 1..61: note = C11orf87 (Q6NUJ2) SP+PP+ECD
MSARAPKELRLALPPCLLNRTFASPNASGSGNTGARGPGAVGSGTCITQVGQQLFQSFSST

SEQ ID NO: 2113 - protein, 57 aa, synthetic construct; identical to SEQ ID NO: 1009
  REGION 1..57: note = C14orf132 (Q9NPU4) SP+PP+ECD

SEQ ID NO: 2114 - protein, 714 aa, synthetic construct
  REGION 1..714: note = C14orf37 (Q86TY3) SP+PP+ECD
MRGPIVLHICLAFCSLLLFSVATQCLAFPKIERRREIAHVHAEKGQSDKMNTDDLENSSVTSKQTPQLVVSEDPMMMSAVPSATSLNKAFSINKETQPGQAGLMQTERPGVSTPTESGVPSAEEVFGSSQPERISPESGLAKAMLTIAITATPSLTVDEKEELLTSTNFQPIVEEITETTKGFLKYMDNQSFATESQEGVGLGHSPSSYVNTKEMLTTNPKTEKFEADTDHRTTSFPGAESTAGSEPGSLTPDKEKPSQMTADNTQAAATKQPLETSEYTLSVEPETDSLLGAPEVTVSVSTAVPAASALSDEWDDTKLESVSRIRTPKLGDNEETQVRTEMSQTAQVSHEGMEGGQPWTEAAQVALGLPEGETHTGTALLIAHGNERSPAFTDQSSFTPTSLMEDMKVSIVNLLQSTGDFTESTKENDALFFLETTVSVSVYESEADQLLGNTMKDIITQEMTTAVQEPDATLSMVTQEQVATLELIRDSGKTEEEKEDPSPVSDVPGVTQLSRRWEPLATTISTTVVPLSFEVTPTVEEQMDTVTGPNEEFTPVLGSPVTPPGIMVGEPSISPALPALEASSERRTVVPSITRVNTAASYGLDQLESEEGQEDEDEEDEEDEDEEEEDEEEDEEDKDADSLDEGLDGDTELPGFTLPGITSQEPGLEEGNMDLLEGATYQVPDALEWEQQNQGLVRSWMEKLKDKAGYMSGM

SEQ ID NO: 2115 - protein, 100 aa, synthetic construct
  REGION 1..100: note = C19orf18 (Q8NEA5) SP+PP+ECD
MDKVQSGFLILFLFLMECQLHLCLPYADGLHPTGNITGLPGSKRSQPPRNITKEPKVFFHKTQLPGIQGAASRSTAASPTNPMKFLRNKAIIRHRPALVK

SEQ ID NO: 2116 - protein, 903 aa, synthetic construct
  REGION 1..903: note = C1orf101 (Q5SY80) SP+PP+ECD
MSAREVAVLLLWLSCYGSALWRYSTNSPNYRIFSTRSTIKLEYEGTLFTEWSVPETCFVLNKSSPTTELRCSSPGVHAIKPIVTGPDEEERYLFVESSHTCFLWYYRVRHFFNNFTQLITVWAYDPESADPDELLGNAEEPSINSIVLSTQMATLGQKPVIHTVLKRKVYSSNEKMRRGTWRIVVPMTKDDALKEIRGNQVTFQDCFIADFLILLTFPLLTIPEIPGYLPISSPRGSQLMASWDACVVASAVLVTDMETFHTTDSFKSWTRIRVPPDILSDDERRSVAHVILSRDGIVFLINGVLYIKSFRGFIRLGGIVNLPDGGITGISSRKWCWVNYLLKAKGRRSTFAVWTENEIYLGSILLKFARLVTTTELKNILSLSVTATLTIDRVEYTGHPLEIAVFLNYCTVCNVTKKIFLVIYNEDTKQWVSQDFTLDAPIDSVTMPHFTFSALPGLLLWNKHSIYYCYHNFTFTGILQTPAGHGNLSMLSNDSIIHEVFIDYYGDILVKMENNVIFYSKINTRDAVKLHLWTNYTTRAFIFLSTSGQTYFLYALDDGTIQIQDYPLHLEAQSIAFTTKDKCPYMAFHNNVAHVFYFLDKGEALTVWTQIVYPENTGLYVIVESYGPKILQESHEISFEAAFGYCTKTLTLTFYQNVDYERISDYFETQDKHTGLVLVQFRPSEYSKACPIAQKVFQIAVGCDDKKFIAIKGFSKKGCHHHDFSYVIEKSYLRHQPSKNLRVRYIWGEYGCPLRLDFTEKFQPVVQLFDDNGYVKDVEANFIVWEIHGRDDYSFNNTMAQSGCLHEAQTWKSMIELNKHLPLEEVWGPENYKHCFSYAIGKPGDLNQPYEIINSSNGNHIFWPMGHSGMYVFRVKILDPNYSFCNLTAMFAIETFGLIPSPS

SEQ ID NO: 2117 - protein, 147 aa, synthetic construct
  REGION 1..147: note = C1orf159 (Q96HA4) SP+PP+ECD
MALRHLALLAGLLVGVASKSMENTVTRNSTAVINTQAEGTLSPPGLSSLPVVREWALTHTAQLPECCVDVVGVNASCPGASLCGPGCYRRWNADGSASCVRCGNGTLPAYNGSECRSFAGPGAPFPMNRSSGTPGRPHPGAPRVAAS

SEQ ID NO: 2118 - protein, 182 aa, synthetic construct
  REGION 1..182: note = C1orf233 (F2Z333) SP+PP+ECD
MRAPPLLLLLAACAPPPCAAAAPTPPGWEPTPDAPWCPYKVLPEGPEAGGGRLCFRSPARGFRCQAPGCVLHAPAGRSLRASVLRNRSVLLQWRLAPAAARRVRAFALNCSWRGAYTRFPCERVLLGASCRDYLLPDVHDSVLYRLCLQPLPLRAGPAAAAPETPEPAECVEFTAEPAGMQD

SEQ ID NO: 2119 - protein, 372 aa, synthetic construct
  REGION 1..372: note = C1orf85 (Q8WWB7) SP+PP+ECD
MRGSVECTWGWGHCAPSPLLLWTLLLFAAPFGLLGEKTRQVSLEVIPNWLGPLQNLLHIRAVGTNSTLHYVWSSLGPLAVVMVATNTPHSTLSVNWSLLLSPEPDGGLMVLPKDSIQFSSALVFTRLLEFDSTNVSDTAAKPLGRPYPPYSLADFSWNNITDSLDPATLSATFQGHPMNDPTRTFANGSLAFRVQAFSRSSRPAQPPRLLHTADTCQLEVALIGASPRGNRSLFGLEVATLGQGPDCPSMQEQHSIDDEYAPAVFQLDQLLWGSLPSGFAQWRPVAYSQKPGGRESALPCQASPLHPALAYSLPQSPIVRAFFGSQNNFCAFNLTFGASTGPGYWDQHYLSWSMLLGVGFPPVDGLSPLVLG

SEQ ID NO: 2120 - protein, 81 aa, synthetic construct
  REGION 1..81: note = C3orf80 (F5H4A9) SP+PP+ECD
MWGPGVTAEGLSVAPAPPPLLPLLLLLALALVAPSRGGGGCAELACGERERCCDATNATAVRCCKLPLHAFLDNVGWFVRK

SEQ ID NO: 2121 - protein, 301 aa, synthetic construct
  REGION 1..301: note = CA12 (O43570) SP+PP+ECD
MPRRSLHAAAVLLLVILKEQPSSPAPVNGSKWTYFGPDGENSWSKKYPSCGGLLQSPIDLHSDILQYDASLTPLEFQGYNLSANKQFLLTNNGHSVKLNLPSDMHIQGLQSRYSATQLHLHWGNPNDPHGSEHTVSGQHFAAELHIVHYNSDLYPDASTASNKSEGLAVLAVLIEMGSFNPSYDKIFSHLQHVKYKGQEAFVPGFNIEELLPERTAEYYRYRGSLTTPPCNPTVLWTVFRNPVQISQEQLLALETALYCTHMDDPSPREMINNFRQVQKFDERLVYTSFSQVQVCTAAGLS

SEQ ID NO: 2122 - protein, 290 aa, synthetic construct
  REGION 1..290: note = CA14 (Q9ULX7) SP+PP+ECD
MLFSALLLEVIWILAADGGQHWTYEGPHGQDHWPASYPECGNNAQSPIDIQTDSVTFDPDLPALQPHGYDQPGTEPLDLHNNGHTVQLSLPSTLYLGGLPRKYVAAQLHLHWGQKGSPGGSEHQINSEATFAELHIVHYDSDSYDSLSEAAERPQGLAVLGILIEVGETKNIAYEHILSHLHEVRHKDQKTSVPPFNLRELLPKQLGQYFRYNGSLTTPPCYQSVLWTVFYRRSQISMEQLEKLQGTLFSTEEEPSKLLVQNYRALQPLNQRMVFASFIQAGSSYTTGEM

SEQ ID NO: 2123 - protein, 1095 aa, synthetic construct
  REGION 1..1095: note = CACHD1 (Q5VU97) SP+PP+ECD
MARQPEEEETAVARARRPPLWLLCLVACWLLGAGAEADFSILDEAQVLASQMRRLAAEELGVVTMQRIFNSFVYTEKISNGESEVQQLAKKIREKFNRYLDVVNRNKQVVEASYTAHLTSPLTAIQDCCTIPPSMMEFDGNFNTNVSRTISCDRLSTTVNSRAFNPGRDLNSVLADNLKSNPGIKWQYFSSEEGIFTVFPAHKFRCKGSYEHRSRPIYVSTVRPQSKHIVVILDHGASVTDTQLQIAKDAAQVILSAIDEHDKISVLTVADTVRTCSLDQCYKTFLSPATSETKRKMSTFVSSVKSSDSPTQHAVGFQKAFQLIRSTNNNTKFQANTDMVIIYLSAGITSKDSSEEDKKATLQVINEENSFLNNSVMILTYALMNDGVTGLKELAFLRDLAEQNSGKYGVPDRMALPVIKGSMMVLNQLSNLETTVGRFYTNLPNRMIDEAVFSLPFSDEMGDGLIMTVSKPCYFGNLLLGIVGVDVNLAYILEDVTYYQDSLASYTFLIDDKGYTLMHPSLTRPYLLSEPPLHTDIIHYENIPKFELVRQNILSLPLGSQIIAVPVNSSLSWHINKLRETGKEAYNVSYAWKMVQDTSFILCIVVIQPEIPVKQLKNLNTVPSSKLLYHRLDLLGQPSACLHFKQLATLESPTIMLSAGSFSSPYEHLSQPETKRMVEHYTAYLSDNTRLIANPGLKFSVRNEVMATSHVTDEWMTQMEMSSLNTYIVRRYIATPNGVLRIYPGSLMDKAFDPTRRQWYLHAVANPGLISLTGPYLDVGGAGYVVTISHTIHSSSTQLSSGHTVAVMGIDFTLRYFYKVLMDLLPVCNQDGGNKIRCFIMEDRGYLVAHPTLIDPKGHAPVEQQHITHKEPLVANDILNHPNFVKKNLCNSFSDRTVQRFYKFNTSLAGDLTNLVHGSHCSKYRLARIPGTNAFVGIVNETCDSLAFCACSMVDRLCLNCHRMEQNECECPCECPLEVNECTGNLTNAENRNPSCEVHQEPVTYTAIDPGLQDALHQCVNSRCSQRLESGDCFGVLDCEWCMVDSDGKTHLDKPYCAPQKECFGGIVGAKSPYVDDMGAIGDEVITLNMIKSAP

SEQ ID NO: 2124 - protein, 374 aa, synthetic construct
  REGION 1..374: note = CADM1 (Q9BY67) SP+PP+ECD
MASVVLPSGSQCAAAAAAAAPPGLRLRLLLLLFSAAALIPTGDGQNLFTKDVTVIEGEVATISCQVNKSDDSVIQLLNPNRQTIYFRDFRPLKDSRFQLLNFSSSELKVSLTNVSISDEGRYFCQLYTDPPQESYTTITVLVPPRNLMIDIQKDTAVEGEEIEVNCTAMASKPATTIRWFKGNTELKGKSEVEEWSDMYTVTSQLMLKVHKEDDGVPVICQVEHPAVTGNLQTQRYLEVQYKPQVHIQMTYPLQGLTREGDALELTCEAIGKPQPVMVTWVRVDDEMPQHAVLSGPNLFINNLNKTDNGTYRCEASNIVGKAHSDYMLYVYDPPTTIPPPTTTTTTTTTTTTTILTIITDSRAGEEGSIRAVDH

SEQ ID NO: 2125 - protein, 367 aa, synthetic construct
  REGION 1..367: note = CADM2 (Q8N3J6) SP+PP+ECD
MIWKRSAVLRFYSVCGLLLQGSQGQFPLTQNVTVVEGGTAILTCRVDQNDNTSLQWSNPAQQTLYFDDKKALRDNRIELVRASWHELSISVSDVSLSDEGQYTCSLFTMPVKTSKAYLTVLGVPEKPQISGFSSPVMEGDLMQLTCKTSGSKPAADIRWFKNDKEIKDVKYLKEEDANRKTFTVSSTLDFRVDRSDDGVAVICRVDHESLNATPQVAMQVLEIHYTPSVKIIPSTPFPQEGQPLILTCESKGKPLPEPVLWTKDGGELPDPDRMVVSGRELNILFLNKTDNGTYRCEATNTIGQSSAEYVLIVHDVPNTLLPTTIIPSLTTATVTTTVAITTSPTTSATTSSIRDPNALAGQNGPDH

SEQ ID NO: 2126 - protein, 330 aa, synthetic construct
  REGION 1..330: note = CADM3 (Q8N126) SP+PP+ECD
MGAPAASLLLLLLLFACCWAPGGANLSQDDSQPWTSDETVVAGGTVVLKCQVKDHEDSSLQWSNPAQQTLYFGEKRALRDNRIQLVTSTPHELSISISNVALADEGEYTCSIFTMPVRTAKSLVTVLGIPQKPIITGYKSSLREKDTATLNCQSSGSKPAARLTWRKGDQELHGEPTRIQEDPNGKTFTVSSSVTFQVTREDDGASIVCSVNHESLKGADRSTSQRIEVLYTPTAMIRPDPPHPREGQKLLLHCEGRGNPVPQQYLWEKEGSVPPLKMTQESALIFPFLNKSDSGTYGCTATSNMGSYKAYYTLNVNDPSPVPSSSSTYH

SEQ ID NO: 2127 - protein, 324 aa, synthetic construct
  REGION 1..324: note = CADM4 (Q8NFZ8) SP+PP+ECD
MGRARRFQWPLLLLWAAAAGPGAGQEVQTENVTVAEGGVAEITCRLHQYDGSIVVIQNPARQTLFFNGTRALKDERFQLEEFSPRRVRIRLSDARLEDEGGYFCQLYTEDTHHQIATLTVLVAPENPVVEVREQAVEGGEVELSCLVPRSRPAATLRWYRDRKELKGVSSSQENGKVWSVASTVRFRVDRKDDGGIIICEAQNQALPSGHSKQTQYVLDVQYSPTARIHASQAVVREGDTLVLTCAVTGNPRPNQIRWNRGNESLPERAEAVGETLTLPGLVSADNGTYTCEASNKHGHARALYVLVVYDPGAVVEAQTSVPYA

SEQ ID NO: 2128 - protein, 718 aa, synthetic construct
  REGION 1..718: note = CATSPERD (Q86XM0) SP+PP+ECD
MLMLMLVAAVTMWLRPLVTAQLCRSRTVRTGKVFNLIQDVQGDRLYFHPTTTRLIKHPCEKNIALYLGKQVFFTMDNFETSLLPFTIPTSMQVGVPEVTSAHFAGSLLLLVVDQKVYIYDYENNSWSMSLGIKHPVTHVSGDNCCYTGSLFCVHVSNLVFAYFRGDQISQTYIYYSNTGGFSFWKYHYDRQAEIIGSLGGIFHFFSLSQVAMLVVNQGKGMFKYSDHPLNRSFGLSFDYNGTLDILIAPGQRGILLLWFENSLLFSHNAGQLVDTVRVKKGDQTLFSSIFEAKITIHNIAVTENELAVITREDNLYYGNLGIVPSSIIKFADQYIWSEDVALMFRSPGTLEILTPLRDTAFPAFDFQKCLVNIQALLMDPELHVGKCKIEFLTGEFIYRMYTIDMHSQLELTASLIPQPGTSLIPLVMVSNPHSLGFQATFYENGYTSDGNTKYKLDIFLKQQQHWGRTDSNFTSSLKKATMSTLTVDIANKEISCVDIKPLSTLISVGCDLDKKIVIQNKVSACSMGILDPLTLQDNYSFIIEKEFYDPGFQGQQSSEDLHVFYSYQQLGCPLLVYYDTLWKPVVELWRKDSFQEVIDAEYVLLEVNGQFSYSYSLTAQSAMCTSQPQNWTTMIKEFGGPFFWNRENYVSCHDPNNNAPLRWPDVQYQILGGRTANQIIFGHNGFYVFYISIVDPYYSYCQLETIFSIYVYGAFPVQ

SEQ ID NO: 2129 - protein, 1066 aa, synthetic construct
  REGION 1..1066: note = CATSPERG (Q6ZRH7) SP+PP+ECD
MCGPAMFPAGPPWPRVRVVQVLWALLAVLLASWRLWAIKDFQECTWQVVLNEFKRVGESGVSDSFFEQEPVDTVSSLFHMLVDSPIDPSEKYLGFPYYLKINYSCEEKPSEDLVRMGHLTGLKPLVLVTFQSPVNFYRWKIEQLQIQMEAAPFRSKEPCMAEEVCSMSWYTPMPIKKGSVVMRVDISSNGLGTFIPDKRFQMNINGFLKRDRDNNIQFTVGEELFNLMPQYFVGVSSRPLWHTVDQSPVLILGGIPNEKYVLMTDTSFKDFSLVELSIDSCWVGSFYCPHSGFTATIYDTIATESTLFIRQNQLVYYFTGTYTTLYERNRGSGSWIRVLASECIKKLCPVYFHSNGSEYIMALTTGKHEGYVHFGTIRDGQVSFEMLPRQWSVCEQIGVTTCSIIWSEYIAGEYTLLLLVESGYGNASKRFQVVSYNTASDDLELLYHIPEFIPEARGLEFLMILGTESYTSTAMAPKGIFCNPYNNLIFIWGNFLLQSSNKENFIYLADFPKELSIKYMARSFRGAVAIVTETEEIWYLLEGSYRVYQLFPSKGWQVHISLKLMQQSSLYASNETMLTLFYEDSKLYQLVYLMNNQKGQLVKRLVPVEQLLMYQQHTSHYDLERKGGYLMLSFIDFCPFSVMRLRSLPSPQRYTRQERYRARPPRVLERSGFHNENSLAIYQGLVYYLLWLHSVYDKPYADPVHDPTWRWWANNKQDQDYYFFLASNWRSAGGVSIEMDSYEKIYNLESAYELPERIFLDKGTEYSFAIFLSAQGHSFRTQSELGTAFQLHSQVDVGVVLADPGCIEASVKQEVLINRNSVLFSITLKDKKLCYDQGISGHHLMETSMTVNVVGSSGLCFQETHLGPHMQGNLMVPVFIGCPPGKRLAFDITYTLEYSRLKNKHYFDCVNVNPEMPCFLFRDIFYPFFLIQDLVTGDSGSFQGSYVLLVVGGGPTLDSLKDYSEDEIYRFNSPLDKTNSLIWTTRTTRTTKDSAFHIMSHESPGIEWLCLENAPCYDNVPQGIFAPEFFFKVLVSNRGVDTSTYCNYQLTFLLHIHGLPLSPKRA

SEQ ID NO: 2130 - protein, 954 aa, synthetic construct
  REGION 1..954: note = CD101 (Q93033) SP+PP+ECD
MAGISYVASFFLLLTKLSIGQREVTVQKGPLFRAEGYPVSIGCNVTGHQGPSEQHFQWSVYLPTNPTQEVQIISTKDAAFSYAVYTQRVRSGDVYVERVQGNSVLLHISKLQMKDAGEYECHTPNTDEKYYGSYSAKTNLIVIPDTLSATMSSQTLGKEEGEPLALTCEASKATAQHTHLSVTWYLTQDGGGSQATEIISLSKDFILVPGPLYTERFAASDVQLNKLGPTTFRLSIERLQSSDQGQLFCEATEWIQDPDETWMFITKKQTDQTTLRIQPAVKDFQVNITADSLFAEGKPLELVCLVVSSGRDPQLQGIWFFNGTEIAHIDAGGVLGLKNDYKERASQGELQVSKLGPKAFSLKIFSLGPEDEGAYRCVVAEVMKTRTGSWQVLQRKQSPDSHVHLRKPAARSVVMSTKNKQQVVWEGETLAFLCKAGGAESPLSVSWWHIPRDQTQPEFVAGMGQDGIVQLGASYGVPSYHGNTRLEKMDWATFQLEITFTAITDSGTYECRVSEKSRNQARDLSWTQKISVTVKSLESSLQVSLMSRQPQVMLTNTFDLSCVVRAGYSDLKVPLTVTWQFQPASSHIFHQLIRITHNGTIEWGNFLSRFQKKTKVSQSLFRSQLLVHDATEEETGVYQCEVEVYDRNSLYNNRPPRASAISHPLRIAVTLPESKLKVNSRSQVQELSINSNTDIECSILSRSNGNLQLAIIWYFSPVSTNASWLKILEMDQTNVIKTGDEFHTPQRKQKFHTEKVSQDLFQLHILNVEDSDRGKYHCAVEEWLLSTNGTWHKLGEKKSGLTELKLKPTGSKVRVSKVYWTENVTEHREVAIRCSLESVGSSATLYSVMWYWNRENSGSKLLVHLQHDGLLEYGEEGLRRHLHCYRSSSTDFVLKLHQVEMEDAGMYWCRVAEWQLHGHPSKWINQASDESQRMVLTVLPSEPTLPSRICSSAP

SEQ ID NO: 2131 - protein, 1050 aa, synthetic construct
  REGION 1..1050: note = CD163 (Q86VB7) SP+PP+ECD
MSKLRMVLLEDSGSADFRRHFVNLSPFTITVVLLLSACFVTSSLGGTDKELRLVDGENKCSGRVEVKVQEEWGTVCNNGWSMEAVSVICNQLGCPTAIKAPGWANSSAGSGRIWMDHVSCRGNESALWDCKHDGWGKHSNCTHQQDAGVTCSDGSNLEMRLTRGGNMCSGRIEIKFQGRWGTVCDDNFNIDHASVICRQLECGSAVSFSGSSNFGEGSGPIWFDDLICNGNESALWNCKHQGWGKHNCDHAEDAGVICSKGADLSLRLVDGVTECSGRLEVRFQGEWGTICDDGWDSYDAAVACKQLGCPTAVTAIGRVNASKGFGHIWLDSVSCQGHEPAIWQCKHHEWGKHYCNHNEDAGVTCSDGSDLELRLRGGGSRCAGTVEVEIQRLLGKVCDRGWGLKEADVVCRQLGCGSALKTSYQVYSKIQATNTWLFLSSCNGNETSLWDCKNWQWGGLTCDHYEEAKITCSAHREPRLVGGDIPCSGRVEVKHGDTWGSICDSDFSLEAASVLCRELQCGTVVSILGGAHFGEGNGQIWAEEFQCEGHESHLSLCPVAPRPEGTCSHSRDVGVVCSRYTEIRLVNGKTPCEGRVELKTLGAWGSLCNSHWDIEDAHVLCQQLKCGVALSTPGGARFGKGNGQIWRHMFHCTGTEQHMGDCPVTALGASLCPSEQVASVICSGNQSQTLSSCNSSSLGPTRPTIPEESAVACIESGQLRLVNGGGRCAGRVEIYHEGSWGTICDDSWDLSDAHVVCRQLGCGEAINATGSAHFGEGTGPIWLDEMKCNGKESRIWQCHSHGWGQQNCRHKEDAGVICSEFMSLRLTSEASREACAGRLEVFYNGAWGTVGKSSMSETTVGVVCRQLGCADKGKINPASLDKAMSIPMWVDNVQCPKGPDTLWQCPSSPWEKRLASPSEETWITCDNKIRLQEGPTSCSGRVEIWHGGSWGTVCDDSWDLDDAQVVCQQLGCGPALKAFKEAEFGQGTGPIWLNEVKCKGNESSLWDCPARRWGHSECGHKEDAAVNCTDISVQKTPQKATTGRSSRQSS

SEQ ID NO: 2132 - protein, 1359 aa, synthetic construct
  REGION 1..1359: note = CD163L1 (Q9NR16) SP+PP+ECD
MMLPQNSWHIDFGRCCCHQNLFSAVVTCILLLNSCFLISSFNGTDLELRLVNGDGPCSGTVEVKFQGQWGTVCDDGWNTTASTVVCKQLGCPFSFAMFRFGQAVTRHGKIWLDDVSCYGNESALWECQHREWGSHNCYHGEDVGVNCYGEANLGLRLVDGNNSCSGRVEVKFQERWGTICDDGWNLNTAAVVCRQLGCPSSFISSGVVNSPAVLRPIWLDDILCQGNELALWNCRHRGWGNHDCSHNEDVTLTCYDSSDLELRLVGGTNRCMGRVELKIQGRWGTVCHHKWNNAAADVVCKQLGCGTALHFAGLPHLQSGSDVVWLDGVSCSGNESFLWDCRHSGTVNFDCLHQNDVSVICSDGADLELRLADGSNNCSGRVEVRIHEQWWTICDQNWKNEQALVVCKQLGCPFSVFGSRRAKPSNEARDIWINSISCTGNESALWDCTYDGKAKRTCFRRSDAGVICSDKADLDLRLVGAHSPCYGRLEVKYQGEWGTVCHDRWSTRNAAVVCKQLGCGKPLHVFGMTYFKEASGPIWLDDVSCIGNESNIWDCEHSGWGKHNCVHREDVIVTCSGDATWGLRLVGGSNRCSGRLEVYFQGRWGTVCDDGWNSKAAAVVCSQLDCPSSIIGMGLGNASTGYGKIWLDDVSCDGDESDLWSCRNSGWGNNDCSHSEDVGVICSDASDMELRLVGGSSRCAGKVEVNVQGAVGILCANGWGMNIAEVVCRQLECGSAIRVSREPHFTERTLHILMSNSGCTGGEASLWDCIRWEWKQTACHLNMEASLICSAHRQPRLVGADMPCSGRVEVKHADTWRSVCDSDFSLHAANVLCRELNCGDAISLSVGDHFGKGNGLTWAEKFQCEGSETHLALCPIVQHPEDTCIHSREVGVVCSRYTDVRLVNGKSQCDGQVEINVLGHWGSLCDTHWDPEDARVLCRQLSCGTALSTTGGKYIGERSVRVWGHRFHCLGNESLLDNCQMTVLGAPPCIHGNTVSVICTGSLTQPLFPCLANVSDPYLSAVPEGSALICLEDKRLRLVDGDSRCAGRVEIYHDGFWGTICDDGWDLSDAHVVCQKLGCGVAFNATVSAHFGEGSGPIWLDDLNCTGMESHLWQCPSRGWGQHDCRHKEDAGVICSEFTALRLYSETETESCAGRLEVFYNGTWGSVGRRNITTAIAGIVCRQLGCGENGVVSLAPLSKTGSGFMWVDDIQCPKTHISIWQCLSAPWERRISSPAEETWITCEDRIRVRGGDTECSGRVEIWHAGSWGTVCDDSWDLAEAEVVCQQLGCGSALAALRDASFGQGTGTIWLDDMRCKGNESFLWDCHAKPWGQSDCGHKEDAGVRCSGQSLKSLNASSGH

SEQ ID NO: 2133 - protein, 162 aa, synthetic construct
  REGION 1..162: note = CD164 (Q04900) SP+PP+ECD
MSRLSRSLLWAATCLGVLCVLSADKNTTQHPNVTTLAPISNVTSAPVTSLPLVTTPAPETCEGRNSCVSCFNVSVVNTTCFWIECKDESYCSHNSTVSDCQVGNTTDFCSVSTATPVPTANSTAKPTVQPSPSTTSKTVTTSGTTNNTVTPTSQPVRKSTFD

SEQ ID NO: 2134 - protein, 141 aa, synthetic construct
  REGION 1..141: note = CD164L2 (Q6UWJ8) SP+PP+ECD
MEAPGPRALRTALCGGCCCLLLCAQLAVAGKGARGFGRGALIRLNIWPAVQGACKQLEVCEHCVEGDGARNLSSCVWEQCRPEEPGHCVAQSEVVKEGCSIYNRSEACPAAHHHPTYEPKTVTTGSPPVPEAHSPGFDGAS

SEQ ID NO: 2135 - protein, 626 aa, synthetic construct
  REGION 1..626: note = CD180 (Q99467) SP+PP+ECD
MAFDVSCFFWVVLFSAGCKVITSWDQMCIEKEANKTYNCENLGLSEIPDTLPNTTEFLEFSFNFLPTIHNRTFSRLMNLTFLDLTRCQINWIHEDTFQSHHQLSTLVLTGNPLIFMAETSLNGPKSLKHLFLIQTGISNLEFIPVHNLENLESLYLGSNHISSIKFPKDFPARNLKVLDFQNNAIHYISREDMRSLEQAINLSLNFNGNNVKGIELGAFDSTIFQSLNFGGTPNLSVIFNGLQNSTTQSLWLGTFEDIDDEDISSAMLKGLCEMSVESLNLQEHRFSDISSTTFQCFTQLQELDLTATHLKGLPSGMKGLNLLKKLVLSVNHFDQLCQISAANFPSLTHLYIRGNVKKLHLGVGCLEKLGNLQTLDLSHNDIEASDCCSLQLKNLSHLQTLNLSHNEPLGLQSQAFKECPQLELLDLAFTRLHINAPQSPFQNLHFLQVLNLTYCFLDTSNQHLLAGLPVLRHLNLKGNHFQDGTITKTNLLQTVGSLEVLILSSCGLLSIDQQAFHSLGKMSHVDLSHNSLTCDSIDSLSHLKGIYLNLAANSINIISPRLLPILSQQSTINLSHNPLDCTCSNIHFLTWYKENLHKLEGSEETTCANPPSLRGVKLSDVKLSCG

SEQ ID NO: 2136 - protein, 291 aa, synthetic construct
  REGION 1..291: note = CD19 (P15391) SP+PP+ECD
MPPPRLLFFLLFLTPMEVRPEEPLVVKVEEGDNAVLQCLKGTSDGPTQQLTWSRESPLKPFLKLSLGLPGLGIHMRPLAIWLFIFNVSQQMGGFYLCQPGPPSEKAWQPGWTVNVEGSGELFRWNVSDLGGLGCGLKNRSSEGPSSPSGKLMSPKLYVWAKDRPEIWEGEPPCLPPRDSLNQSLSQDLTMAPGSTLWLSCGVPPDSVSRGPLSWTHVHPKGPKSLLSLELKDDRPARDMWVMETGLLLPRATAQDAGKYYCHRGNLTMSFHLEITARPVLWHWLLRTGGWK

SEQ ID NO: 2137 - protein, 300 aa, synthetic construct
  REGION 1..300: note = CD1A (P06126) SP+PP+ECD
MLFLLLPLLAVLPGDGNADGLKEPLSFHVTWIASFYNHSWKQNLVSGWLSDLQTHTWDSNSSTIVFLCPWSRGNFSNEEWKELETLFRIRTIRSFEGIRRYAHELQFEYPFEIQVTGGCELHSGKVSGSFLQLAYQGSDFVSFQNNSWLPYPVAGNMAKHFCKVLNQNQHENDITHNLLSDTCPRFILGLLDAGKAHLQRQVKPEAWLSHGPSPGPGHLQLVCHVSGFYPKPVWVMWMRGEQEQQGTQRGDILPSADGTWYLRATLEVAAGEAADLSCRVKHSSLEGQDIVLYWEHHSSV

SEQ ID NO: 2138 - protein, 303 aa, synthetic construct
  REGION 1..303: note = CD1B (P29016) SP+PP+ECD
MLLLPFQLLAVLFPGGNSEHAFQGPTSFHVIQTSSFTNSTWAQTQGSGWLDDLQIHGWDSDSGTAIFLKPWSKGNFSDKEVAELEEIFRVYIFGFAREVQDFAGDFQMKYPFEIQGIAGCELHSGGAIVSFLRGALGGLDFLSVKNASCVPSPEGGSRAQKFCALIIQYQGIMETVRILLYETCPRYLLGVLNAGKADLQRQVKPEAWLSSGPSPGPGRLQLVCHVSGFYPKPVWVMWMRGEQEQQGTQLGDILPNANWTWYLRATLDVADGEAAGLSCRVKHSSLEGQDIILYWRNPTSIGS

SEQ ID NO: 2139 - protein, 302 aa, synthetic construct
  REGION 1..302: note = CD1C (P29017) SP+PP+ECD
MLFLQFLLLALLLPGGDNADASQEHVSFHVIQIFSFVNQSWARGQGSGWLDELQTHGWDSESGTIIFLHNWSKGNFSNEELSDLELLFRFYLFGLTREIQDHASQDYSKYPFEVQVKAGCELHSGKSPEGFFQVAFNGLDLLSFQNTTWVPSPGCGSLAQSVCHLLNHQYEGVTETVYNLIRSTCPRFLLGLLDAGKMYVHRQVRPEAWLSSRPSLGSGQLLLVCHASGFYPKPVWVTWMRNEQEQLGTKHGDILPNADGTWYLQVILEVASEEPAGLSCRVRHSSLGGQDIILYWGHHFSM

SEQ ID NO: 2140 - protein, 301 aa, synthetic construct
  REGION 1..301: note = CD1D (P15813) SP+PP+ECD
MGCLLFLLLWALLQAWGSAEVPQRLFPLRCLQISSFANSSWTRTDGLAWLGELQTHSWSNDSDTVRSLKPWSQGTFSDQQWETLQHIFRVYRSSFTRDVKEFAKMLRLSYPLELQVSAGCEVHPGNASNNFFHVAFQGKDILSFQGTSWEPTQEAPLWVNLAIQVLNQDKWTRETVQWLLNGTCPQFVSGLLESGKSELKKQVKPKAWLSRGPSPGPGRLLLVCHVSGFYPKPVWVKWMRGEQEQQGTQPGDILPNADETWYLRATLDVVAGEAAGLSCRVKHSSLEGQDIVLYWGGSYTS

SEQ ID NO: 2141 - protein, 304 aa, synthetic construct
  REGION 1..304: note = CD1E (P15812) SP+PP+ECD
MLLLFLLFEGLCCPGENTAAPQALQSYHLAAEEQLSFRMLQTSSFANHSWAHSEGSGWLGDLQTHGWDTVLGTIRFLKPWSHGNFSKQELKNLQSLFQLYFHSFIQIVQASAGQFQLEYPFEIQILAGCRMNAPQIFLNMAYQGSDFLSFQGISWEPSPGAGIRAQNICKVLNRYLDIKEILQSLLGHTCPRFLAGLMEAGESELKRKVKPEAWLSCGPSPGPGRLQLVCHVSGFYPKPVWVMWMRGEQEQRGTQRGDVLPNADETWYLRATLDVAAGEAAGLSCRVKHSSLGGHDLIIHWGGY

SEQ ID NO: 2142 - protein, 209 aa, synthetic construct
  REGION 1..209: note = CD2 (P06729) SP+PP+ECD
MSFPCKFVASFLLIFNVSSKGAVSKEITNALETWGALGQDINLDIPSFQMSDDIDDIKWEKTSDKKKIAQFRKEKETFKEKDTYKLFKNGTLKIKHLKTDDQDIYKVSIYDTKGKNVLEKIFDLKIQERVSKPKISWTCINTTLTCEVMNGTDPELNLYQDGKHLKLSQRVITHKWTTSLSAKFKCTAGNKVSKESSVEPVSCPEKGLD

SEQ ID NO: 2143 - protein, 232 aa, synthetic construct
  REGION 1..232: note = CD200 (P41217) SP+PP+ECD
MERLVIRMPFSHLSTYSLVWVMAAVVLCTAQVQVVTQDEREQLYTPASLKCSLQNAQEALIVTWQKKKAVSPENMVTFSENHGVVIQPAYKDKINITQLGLQNSTITFWNITLEDEGCYMCLFNTFGFGKISGTACLTVYVQPIVSLHYKFSEDHLNITCSATARPAPMVFWKVPRSGIENSTVTLSHPNGTTSVTSILHIKDPKNQVGKEVICQVLHLGTVTDFKQTVNKG

SEQ ID NO: 2144 - protein, 243 aa, synthetic construct
  REGION 1..243: note = CD200R1 (Q8TD46) SP+PP+ECD
MLCPWRTANLGLLLILTIFLVAASSSLCMDEKQITQNYSKVLAEVNTSWPVKMATNAVLCCPPIALRNLIIITWEIILRGQPSCTKAYRKETNETKETNCTDERITWVSRPDQNSDLQIRPVAITHDGYYRCIMVTPDGNFHRGYHLQVLVTPEVTLFQNRNRTAVCKAVAGKPAAQISWIPEGDCATKQEYWSNGTVTVKSTCHWEVHNVSTVTCHVSHLTGNKSLYIELLPVPGAKKSAKL

SEQ ID NO: 2145 - protein, 239 aa, synthetic construct
  REGION 1..239: note = CD200R1L (Q6Q8B3) SP+PP+ECD
MSAPRLLISIIIMVSASSSSCMGGKQMTQNYSTIFAEGNISQPVLMDINAVLCCPPIALRNLIIITWEIILRGQPSCTKAYKKETNETKETNCTVERITWVSRPDQNSDLQIRPVDTTHDGYYRGIVVTPDGNFHRGYHLQVLVTPEVNLFQSRNITAVCKAVTGKPAAQISWIPEGSILATKQEYWGNGTVTVKSTCPWEGHKSTVTCHVSHLTGNKSLSVKLNSGLRTSGSPALSLL

SEQ ID NO: 2146 - protein, 687 aa, synthetic construct
  REGION 1..687: note = CD22 (P20273) SP+PP+ECD
MHLLGPWLLLLVLEYLAFSDSSKWVFEHPETLYAWEGACVWIPCTYRALDGDLESFILFHNPEYNKNTSKFDGTRLYESTKDGKVPSEQKRVQFLGDKNKNCTLSIHPVHLNDSGQLGLRMESKTEKWMERIHLNVSERPFPPHIQLPPEIQESQEVTLTCLLNFSCYGYPIQLQWLLEGVPMRQAAVTSTSLTIKSVFTRSELKFSPQWSHHGKIVTCQLQDADGKFLSNDTVQLNVKHTPKLEIKVTPSDAIVREGDSVTMTCEVSSSNPEYTTVSWLKDGTSLKKQNTFTLNLREVTKDQSGKYCCQVSNDVGPGRSEEVFLQVQYAPEPSTVQILHSPAVEGSQVEFLCMSLANPLPTNYTWYHNGKEMQGRTEEKVHIPKILPWHAGTYSCVAENILGTGQRGPGAELDVQYPPKKVTTVIQNPMPIREGDTVTLSCNYNSSNPSVTRYEWKPHGAWEEPSLGVLKIQNVGWDNTTIACAACNSWCSWASPVALNVQYAPRDVRVRKIKPLSEIHSGNSVSLQCDFSSSHPKEVQFFWEKNGRLLGKESQLNFDSISPEDAGSYSCWVNNSIGQTASKAWTLEVLYAPRRLRVSMSPGDQVMEGKSATLTCESDANPPVSHYTWFDWNNQSLPYHSQKLRLEPVKVQHSGAYWCQGTNSVGKGRSPLSTLTVYYSPETIGRR

SEQ ID NO: 2147 - protein, 254 aa, synthetic construct
  REGION 1..254: note = CD226 (Q15762) SP+PP+ECD
MDYPTLLLALLHVYRALCEEVLWHTSVPFAENMSLECVYPSMGILTQVEWFKIGTQQDSIAIFSPTHGMVIRKPYAERVYFLNSTMASNNMTLFFRNASEDDVGYYSCSLYTYPQGTWQKVIQVVQSDSFEAAVPSNSHIVSEPGKNVTLTCQPQMTWPVQAVRWEKIQPRQIDLLTYCNLVHGRNFTSKFPRQIVSNCSHGRWSVIVIPDVTVSDSGLYRCYLQASAGENETFVMRLTVAEGKTDNQYTLFVA

SEQ ID NO: 2148 - protein, 229 aa, synthetic construct
  REGION 1..229: note = CD244 (Q9BZW8) SP+PP+ECD
MLGQVVTLILLLLLKVYQGKGCQGSADHVVSISGVPLQLQPNSIQTKVDSIAWKKLLPSQNGFHHILKWENGSLPSNTSNDRFSFIVKNLSLLIKAAQQQDSGLYCLEVTSISGKVQTATFQVFVFESLLPDKVEKPRLQGQGKILDRGRCQVALSCLVSRDGNVSYAWYRGSKLIQTAGNLTYLDEEVDINGTHTYTCNVSNPVSWESHTLNLTQDCQNAHQEFRFWP

SEQ ID NO: 2149 - protein, 687 aa, synthetic construct
  REGION 1..687: note = CD248 (Q9HCU0) SP+PP+ECD
MLLRLLLAWAAAGPTLGQDPWAAEPRAACGPSSCYALFPRRRTFLEAWRACRELGGDLATPRTPEEAQRVDSLVGAGPASRLLWIGLQRQARQCQLQRPLRGFTWTTGDQDTAFTNWAQPASGGPCPAQRCVALEASGEHRWLEGSCTLAVDGYLCQFGFEGACPALQDEAGQAGPAVYTTPFHLVSTEFEWLPFGSVAAVQCQAGRGASLLCVKQPEGGVGWSRAGPLCLGTGCSPDNGGCEHECVEEVDGHVSCRCTEGFRLAADGRSCEDPCAQAPCEQQCEPGGPQGYSCHCRLGFRPAEDDPHRCVDTDECQIAGVCQQMCVNYVGGFECYCSEGHELEADGISCSPAGAMGAQASQDLGDELLDDGEDEEDEDEAWKAFNGGWTEMPGILWMEPTQPPDFALAYRPSFPEDREPQIPYPEPTWPPPLSAPRVPYHSSVLSVTRPVVVSATHPTLPSAHQPPVIPATHPALSRDHQIPVIAANYPDLPSAYQPGILSVSHSAQPPAHQPPMISTKYPELFPAHQSPMFPDTRVAGTQTTTHLPGIPPNHAPLVTTLGAQLPPQAPDALVLRTQATQLPIIPTAQPSLTTTSRSPVSPAHQISVPAATQPAALPTLLPSQSPTNQTSPISPTHPHSKAPQIPREDGPSPKLALWLPSPAPTAAPTALGEAGLAEHSQRDDRWL

SEQ ID NO: 2150 - protein, 191 aa, synthetic construct
  REGION 1..191: note = CD27 (P26842) SP+PP+ECD
MARPHPWWLCVLGTLVGLSATPAPKSCPERHYWAQGKLCCQMCEPGTFLVKDCDQHRKAAQCDPCIPGVSFSPDHHTRPHCESCRHCNSGLLVRNCTITANAECACRNGWQCRDKECTECDPLPNPSLTARSSQALSPHPQPTHLPYVSEMLEARTAGHMQTLADFRQLPARTLSTHWPPQRSLCSSDFIR

SEQ ID NO: 2151 - protein, 238 aa, synthetic construct
  REGION 1..238: note = CD274 (Q9NZQ7) SP+PP+ECD
MRIFAVFIFMTYWHLLNAFTVTVPKDLYVVEYGSNMTIECKFPVEKQLDLAALIVYWEMEDKNIIQFVHGEEDLKVQHSSYRQRARLLKDQLSLGNAALQITDVKLQDAGVYRCMISYGGADYKRITVKVNAPYNKINQRILVVDPVTSEHELTCQAEGYPKAEVIWTSSDHQVLSGKTTTTNSKREEKLFNVTSTLRINTTTNEIFYCTFRRLDPEENHTAELVIPELPLAHPPNER

SEQ ID NO: 2152 - protein, 466 aa, synthetic construct
  REGION 1..466: note = CD276 (Q5ZPR3) SP+PP+ECD
MLRRRGSPGMGVHVGAALGALWFCLTGALEVQVPEDPVVALVGTDATLCCSFSPEPGFSLAQLNLIWQLTDTKQLVHSFAEGQDQGSAYANRTALFPDLLAQGNASLRLQRVRVADEGSFTCFVSIRDFGSAAVSLQVAAPYSKPSMTLEPNKDLRPGDTVTITCSSYQGYPEAEVFWQDGQGVPLTGNVTTSQMANEQGLFDVHSILRVVLGANGTYSCLVRNPVLQQDAHSSVTITPQRSPTGAVEVQVPEDPVVALVGTDATLRCSFSPEPGFSLAQLNLIWQLTDTKQLVHSFTEGRDQGSAYANRTALFPDLLAQGNASLRLQRVRVADEGSFTCFVSIRDFGSAAVSLQVAAPYSKPSMTLEPNKDLRPGDTVTITCSSYRGYPEAEVFWQDGQGVPLTGNVTTSQMANEQGLFDVHSVLRVVLGANGTYSCLVRNPVLQQDAHGSVTITGQPMTFPPEA

SEQ ID NO: 2153 - protein, 152 aa, synthetic construct
  REGION 1..152: note = CD28 (P10747) SP+PP+ECD
MLRLLLALNLFPSIQVTGNKILVKQSPMLVAYDNAVNLSCKYSYNLFSREFRASLHKGLDSAVEVCVVYGNYSQQLQVYSKTGFNCDGKLGNESVTFYLQNLYVNQTDIYFCKIEVMYPPPYLDNEKSNGTIIHVKGKHLCPSPLFPGPSKP

SEQ ID NO: 2154 - protein, 180 aa, synthetic construct
  REGION 1..180: note = CD300A (Q9UGN4) SP+PP+ECD
MWLPWALLLLWVPGCFALSKCRTVAGPVGGSLSVQCPYEKEHRTLNKYWCRPPQIFLCDKIVETKGSAGKRNGRVSIRDSPANLSFTVTLENLTEEDAGTYWCGVDTPWLRDFHDPVVEVEVSVFPASTSMTPASITAAKTSTITTAFPPVSSTTLFAVGATHSASIQEETEEVVNSQLP

SEQ ID NO: 2155 - protein, 183 aa, synthetic construct
  REGION 1..183: note = CD300C (Q08708) SP+PP+ECD
MTARAWASWRSSALLLLLVPGYFPLSHPMTVAGPVGGSLSVQCRYEKEHRTLNKFWCRPPQILRCDKIVETKGSAGKRNGRVSIRDSPANLSFTVTLENLTEEDAGTYWCGVDTPWLRDFHDPIVEVEVSVFPAGTTTASSPQSSMGTSGPPTKLPVHTWPSVTRKDSPEPSPHPGSLFSNVR

SEQ ID NO: 2156 - protein, 173 aa, synthetic construct
  REGION 1..173: note = CD300E (Q496F6) SP+PP+ECD
MWLLPALLLLCLSGCLSLKGPGSVTGTAGDSLTVWCQYESMYKGYNKYWCRGQYDTSCESIVETKGEEKVERNGRVSIRDHPEALAFTVTMQNLNEDDAGSYWCKIQTVWVLDSWSRDPSDLVRVYVSPAITTPRRTTHPATPPIFLVVNPGRNLSTGEVLTQNSGFRLSSPH

SEQ ID NO: 2157 - protein, 165 aa, synthetic construct
  REGION 1..165: note = CD300LD (Q6UXZ3) SP+PP+ECD
MWLSPSLLLLILPGYSIAAKITGPTTVNGSEQGSLTVQCAYGSGWETYLKWRCQGADWNYCNILVKTNGSEQEVKKNRVSIRDNQKNHVFTVTMENLKRDDADSYWCGTERPGIDLGVKVQVTINPGTQTAVSEWTTTTASLAFTAAATQKTSSPLTRSPLKSTH

SEQ ID NO: 2158 - protein, 156 aa, synthetic construct
  REGION 1..156: note = CD300LF (Q8TDQ1) SP+PP+ECD
MPLLTLYLLLFWLSGYSIVTQITGPTTVNGLERGSLTVQCVYRSGWETYLKWWCRGAIWRDCKILVKTSGSEQEVKRDRVSIKDNQKNRTFTVTMEDLMKTDADTYWCGIEKTGNDLGVTVQVTIDPAPVTQEETSSSPTLTGHHLDNRHKLLKLS

SEQ ID NO: 2159 - protein, 247 aa, synthetic construct
  REGION 1..247: note = CD300LG (Q6UXG3) SP+PP+ECD
MRLLVLLWGCLLLPGYEALEGPEEISGFEGDTVSLQCTYREELRDHRKYWCRKGGILFSRCSGTIYAEEEGQETMKGRVSIRDSRQELSLIVTLWNLTLQDAGEYWCGVEKRGPDESLLISLFVFPGPCCPPSPSPTFQPLATTRLQPKAKAQQTQPPGLTSPGLYPAATTAKQGKTGAEAPPLPGTSQYGHERTSQYTGTSPHPATSPPAGSSRPPMQLDSTSAEDTSPALSSGSSKPRVSIPMVR

SEQ ID NO: 2160 - protein, 168 aa, synthetic construct
  REGION 1..168: note = CD302 (Q8IX05) SP+PP+ECD
MLRAALPALLLPLLGLAAAAVADCPSSTWIQFQDSCYIFLQEAIKVESIEDVRNQCTDHGADMISIHNEEENAFILDTLKKQWKGPDDILLGMFYDTDDASFKWFDNSNMTFDKWTDQDDDEDLVDTCAFLHIKTGEWKKGNCEVSSVEGTLCKTAIPYKRKYLSDNH

SEQ ID NO: 2161 - protein, 229 aa, synthetic construct
  REGION 1..229: note = CD320 (Q9NPF0) SP+PP+ECD
MSGGWMAQVGAWRTGALGLALLLLLGLGLGLEAAASPLSTPTSAQAAGPSSGSCPPTKFQCRTSGLCVPLTWRCDRDLDCSDGSDEEECRIEPCTQKGQCPPPPGLPCPCTGVSDCSGGTDKKLRNCSRLACLAGELRCTLSDDCIPLTWRCDGHPDCPDSSDELGCGTNEILPEGDATTMGPPVTLESVTSLRNATTMGPPVTLESVPSVGNATSSSAGDQSGSPTAY

SEQ ID NO: 2162 - protein, 259 aa, synthetic construct
  REGION 1..259: note = CD33 (P20138) SP+PP+ECD
MPLLLLLPLLWAGALAMDPNFWLQVQESVTVQEGLCVLVPCTFFHPIPYYDKNSPVHGYWFREGAIISRDSPVATNKLDQEVQEETQGRFRLLGDPSRNNCSLSIVDARRRDNGSYFFRMERGSTKYSYKSPQLSVHVTDLTHRPKILIPGTLEPGHSKNLTCSVSWACEQGTPPIFSWLSAAPTSLGPRTTHSSVLIITPRPQDHGTNLTCQVKFAGAGVTTERTIQLNVTYVPQNPTTGIFPGDGSGKQETRAGVVH

SEQ ID NO: 2163 - protein, 290 aa, synthetic construct
  REGION 1..290: note = CD34 (P28906) SP+PP+ECD
MLVRRGARAGPRMPRGWTALCLLSLLPSGFMSLDNNGTATPELPTQGTFSNVSTNVSYQETTTPSTLGSTSLHPVSQHGNEATTNITETTVKFTSTSVITSVYGNTNSSVQSQTSVISTVFTTPANVSTPETTLKPSLSPGNVSDLSTTSTSLATSPTKPYTSSSPILSDIKAEIKCSGIREVKLTQGICLEQNKTSSCAEFKKDRGEGLARVLCGEEQADADAGAQVCSLLLAQSEVRPQCLLLVLANRTEISSKLQLMKKHQSDLKKLGILDFTEQDVASHQSYSQKT

SEQ ID NO: 2164 - protein, 105 aa, synthetic construct
  REGION 1..105: note = CD3D (P04234) SP+PP+ECD
MEHSTFLSGLVLATLLSQVSPFKIPIEELEDRVFVNCNTSITWVEGTVGTLLSDITRLDLGKRILDPRGIYRCNGTDIYKDKESTVQVHYRMCQSCVELDPATVA

SEQ ID NO: 2165 - protein, 116 aa, synthetic construct
  REGION 1..116: note = CD3G (P09693) SP+PP+ECD
MEQGKGLAVLILAIILLQGTLAQSIKGNHLVKVYDYQEDGSVLLTCDAEAKNITWFKDGKMIGFLTEDKKKWNLGSNAKDPRGMYQCKGSQNKSKPLQVYYRMCQNCIELNAATIS

SEQ ID NO: 2166 - protein, 396 aa, synthetic construct
  REGION 1..396: note = CD4 (P01730) SP+PP+ECD
MNRGVPFRHLLLVLQLALLPAATQGKKVVLGKKGDTVELTCTASQKKSIQFHWKNSNQIKILGNQGSFLTKGPSKLNDRADSRRSLWDQGNFPLIIKNLKIEDSDTYICEVEDQKEEVQLLVFGLTANSDTHLLQGQSLTLTLESPPGSSPSVQCRSPRGKNIQGGKTLSVSQLELQDSGTWTCTVLQNQKKVEFKIDIVVLAFQKASSIVYKKEGEQVEFSFPLAFTVEKLTGSGELWWQAERASSSKSWITFDLKNKEVSVKRVTQDPKLQMGKKLPLHLTLPQALPQYAGSGNLTLALEAKTGKLHQEVNLVVMRATQLQKNLTCEVWGPTSPKLMLSLKLENKEAKVSKREKAVWVLNPEAGMWQCLLSDSGQVLLESNIKVLPTWSTPVQP

SEQ ID NO: 2167 - protein, 193 aa, synthetic construct
  REGION 1..193: note = CD40 (P25942) SP+PP+ECD
MVRLPLQCVLWGCLLTAVHPEPPTACREKQYLINSQCCSLCQPGQKLVSDCTEFTETECLPCGESEFLDTWNRETHCHQHKYCDPNLGLRVQQKGTSETDTICTCEEGWHCTSEACESCVLHRSCSPGFGVKQIATGVSDTICEPCPVGFFSNVSSAFEKCHPWTSCETKDLVVQQAGTNKTDVVCGPQDRLR

SEQ ID NO: 2168 - protein, 649 aa, synthetic construct
  REGION 1..649: note = CD44 (P16070) SP+PP+ECD
MDKFWWHAAWGLCLVPLSLAQIDLNITCRFAGVFHVEKNGRYSISRTEAADLCKAFNSTLPTMAQMEKALSIGFETCRYGFIEGHVVIPRIHPNSICAANNTGVYILTSNTSQYDTYCFNASAPPEEDCTSVTDLPNAFDGPITITIVNRDGTRYVQKGEYRTNPEDIYPSNPTDDDVSSGSSSERSSTSGGYIFYTFSTVHPIPDEDSPWITDSTDRIPATTLMSTSATATETATKRQETWDWFSWLFLPSESKNHLHTTTQMAGTSSNTISAGWEPNEENEDERDRHLSFSGSGIDDDEDFISSTISTTPRAFDHTKQNQDWTQWNPSHSNPEVLLQTTTRMTDVDRNGTTAYEGNWNPEAHPPLIHHEHHEEEETPHSTSTIQATPSSTTEETATQKEQWFGNRWHEGYRQTPKEDSHSTTGTAAASAHTSHPMQGRTTPSPEDSSWTDFFNPISHPMGRGHQAGRRMDMDSSHSITLQPTANPNTGLVEDLDRTGPLSMTTQQSNSQSFSTSHEGLEEDKDHPTTSTLTSSNRNDVTGGRRDPNHSEGSTTLLEGYTSHYPHTKESRTFIPVTSAKTGSFGVTAVTVGDSNSNVNRSLSGDQDTFHPSGGSHTTHGSESDGHSHGSQEGGANTTSGPIRTPQIPE

SEQ ID NO: 2169 - protein, 343 aa, synthetic construct
  REGION 1..343: note = CD46 (P15529) SP+PP+ECD
MEPPGRRECPFPSWRFPGLLLAAMVLLLYSFSDACEEPPTFEAMELIGKPKPYYEIGERVDYKCKKGYFYIPPLATHTICDRNHTWLPVSDDACYRETCPYIRDPLNGQAVPANGTYEFGYQMHFICNEGYYLIGEEILYCELKGSVAIWSGKPPICEKVLCTPPPKIKNGKHTFSEVEVFEYLDAVTYSCDPAPGPDPFSLIGESTIYCGDNSVWSRAAPECKVVKCRFPVVENGKQISGFGKKFYYKATVMFECDKGFYLDGSDTIVCDSNSTWDPPVPKCLKVLPPSSTKPPALSHSVSTSSTTKSPASSASGPRPTYKPPVSNYPGYPKPEEGILDSLD

SEQ ID NO: 2170 - protein, 372 aa, synthetic construct
  REGION 1..372: note = CD5 (P06127) SP+PP+ECD
MPMGSLQPLATLYLLGMLVASCLGRLSWYDPDFQARLTRSNSKCQGQLEVYLKDGWHMVCSQSWGRSSKQWEDPSQASKVCQRLNCGVPLSLGPFLVTYTPQSSIICYGQLGSFSNCSHSRNDMCHSLGLTCLEPQKTTPPTTRPPPTTTPEPTAPPRLQLVAQSGGQHCAGVVEFYSGSLGGTISYEAQDKTQDLENFLCNNLQCGSFLKHLPETEAGRAQDPGEPREHQPLPIQWKIQNSSCTSLEHCFRKIKPQKSGRVLALLCSGFQPKVQSRLVGGSSICEGTVEVRQGAQWAALCDSSSARSSLRWEEVCREQQCGSVNSYRVLDAGDPTSRGLFCPHQKLSQCHELWERNSYCKKVFVTCQDPNP

SEQ ID NO: 2171 - protein, 215 aa, synthetic construct
  REGION 1..215: note = CD58 (P19256) SP+PP+ECD
MVAGSDAGRALGVLSVVCLLHCFGFISCFSQQIYGVVYGNVTFHVPSNVPLKEVLWKKQKDKVAELENSEFRAFSSFKNRVYLDTVSGSLTIYNLTSSDEDEYEMESPNITDTMKFFLYVLESLPSPTLTCALTNGSIEVQCMIPEHYNSHRGLIMYSWDCPMEQCKRNSTSIYFKMENDLPQKIQCTLSNPLFNTTSSIILTTCIPSSGHSRHR

SEQ ID NO: 2172 - protein, 402 aa, synthetic construct
  REGION 1..402: note = CD6 (P30203) SP+PP+ECD
MWLFFGITGLLTAALSGHPSPAPPDQLNTSSAESELWEPGERLPVRLTNGSSSCSGTVEVRLEASWEPACGALWDSRAAEAVCRALGCGGAEAASQLAPPTPELPPPPAAGNTSVAANATLAGAPALLCSGAEWRLCEVVEHACRSDGRRARVTCAENRALRLVDGGGACAGRVEMLEHGEWGSVCDDTWDLEDAHVVCRQLGCGWAVQALPGLHFTPGRGPIHRDQVNCSGAEAYLWDCPGLPGQHYCGHKEDAGAVCSEHQSWRLTGGADRCEGQVEVHFRGVWNTVCDSEWYPSEAKVLCQSLGCGTAVERPKGLPHSLSGRMYYSCNGEELTLSNCSWRFNNSNLCSQSLAARVLCSASRSLHNLSTPEVPASVQTVTIESSVTVKIENKESRELMLL

SEQ ID NO: 2173 - protein, 319 aa, synthetic construct
  REGION 1..319: note = CD68 (P34810) SP+PP+ECD
MRLAVLFSGALLGLLAAQGTGNDCPHKKSATLLPSFTVTPTVTESTGTTSHRTTKSHKTTTHRTTTTGTTSHGPTTATHNPTTTSHGNVTVHPTSNSTATSQGPSTATHSPATTSHGNATVHPTSNSTATSPGFTSSAHPEPPPPSPSPSPTSKETIGDYTWTNGSQPCVHLQAQIQIRVMYTTQGGGEAWGISVLNPNKTKVQGSCEGAHPHLLLSFPYGHLSFGFMQDLQQKVVYLSYMAVEYNVSFPHAAQWTFSAQNASLRDLQAPLGQSFSCSNSSIILSPAVHLDLLSLRLQAAQLPHTGVFGQSFSCPSDRS

SEQ ID NO: 2174 - protein, 180 aa, synthetic construct
  REGION 1..180: note = CD7 (P09564) SP+PP+ECD
MAGPPRLLLLPLLLALARGLPGALAAQEVQQSPHCTTVPVGASVNITCSTSGGLRGIYLRQLGPQPQDIIYYEDGVVPTTDRRFRGRIDFSGSQDNLTITMHRLQLSDTGTYTCQAITEVNVYGSGTLVLVTEEQSQGWHRCSDAPPRASALPAPPTGSALPDPQTASALPDPPAASALP

SEQ ID NO: 2175 - protein, 143 aa, synthetic construct
  REGION 1..143: note = CD79A (P11912) SP+PP+ECD
MPGGPGVLQALPATIFLLFLLSAVYLGPGCQALWMHKVPASLMVSLGEDAHFQCPHNSSNNANVTWWRVLHGNYTWPPEFLGPGEDPNGTLIIQNVNKSHGGIYVCRVQEGNESYQQSCGTYLRVRQPPPRPFLDMGEGTKNR

SEQ ID NO: 2176 - protein, 159 aa, synthetic construct
  REGION 1..159: note = CD79B (P40259) SP+PP+ECD
MARLALSPVPSHWMVALLLLLSAEPVPAARSEDRYRNPKGSACSRIWQSPRFIARKRGFTVKMHCYMNSASGNVSWLWKQEMDENPQQLKLEKGRMEESQNESLATLTIQGIRFEDNGIYFCQQKCNNTSEVYQGCGTELRVMGFSTLAQLKQRNTLKD

SEQ ID NO: 2177 - protein, 242 aa, synthetic construct
  REGION 1..242: note = CD80 (P33681) SP+PP+ECD
MGHTRRQGTSPSKCPYLNFFQLLVLAGLSHFCSGVIHVTKEVKEVATLSCGHNVSVEELAQTRIYWQKEKKMVLTMMSGDMNIWPEYKNRTIFDITNNLSIVILALRPSDEGTYECVVLKYEKDAFKREHLAEVTLSVKADFPTPSISDFEIPTSNIRRIICSTSGGFPEPHLSWLENGEELNAINTTVSQDPETELYAVSSKLDFNMTTNHSFMCLIKYGHLRVNQTFNWNTTKQEHFPDN

SEQ ID NO: 2178 - protein, 144 aa, synthetic construct
  REGION 1..144: note = CD83 (Q01151) SP+PP+ECD
MSRGLQLLLLSCAYSLAPATPEVKVACSEDVDLPCTAPWDPQVPYTVSWVKLLEGGEERMETPQEDHLRGQHYHQKGQNGSFDAPNERPYSLKIRNTTSCNSGTYRCTLQDPDGQRNLSGKVILRVTGCPAQRKEETFKKYRAE

SEQ ID NO: 2179 - protein, 225 aa, synthetic construct
  REGION 1..225: note = CD84 (Q9UIB8) SP+PP+ECD
MAQHHLWILLLCLQTWPEAAGKDSEIFTVNGILGESVTFPVNIQEPRQVKIIAWTSKTSVAYVTPGDSETAPVVTVTHRNYYERIHALGPNYNLVISDLRMEDAGDYKADINTQADPYTTTKRYNLQIYRRLGKPKITQSLMASVNSTCNVTLTCSVEKEEKNVTYNWSPLGEEGNVLQIFQTPEDQELTYTCTAQNPVSNNSDSISARQLCADIAMGFRTHHTG

SEQ ID NO: 2180 - protein, 247 aa, synthetic construct
  REGION 1..247: note = CD86 (P42081) SP+PP+ECD
MDPQCTMGLSNILFVMAFLLSGAAPLKIQAYFNETADLPCQFANSQNQSLSELVVFWQDQENLVLNEVYLGKEKFDSVHSKYMGRTSFDSDSWTLRLHNLQIKDKGLYQCIIHHKKPTGMIRIHQMNSELSVLANFSQPEIVPISNITENVYINLTCSSIHGYPEPKKMSVLLRTKNSTIEYDGVMQKSQDNVTELYDVSISLSVSFPDVTSNMTIFCILETDKTRLLSSPFSIELEDPQPPPDHIP

SEQ ID NO: 2181 - protein, 182 aa, synthetic construct
  REGION 1..182: note = CD8A (P01732) SP+PP+ECD
MALPVTALLLPLALLLHAARPSQFRVSPLDRTWNLGETVELKCQVLLSNPTSGCSWLFQPRGAAASPTFLLYLSQNKPKAAEGLDTQRFSGKRLGDTFVLTLSDFRRENEGYYFCSALSNSIMYFSHFVPVFLPAKPTTTPAPRPPTPAPTIASQPLSLRPEACRPAAGGAVHTRGLDFACD

SEQ ID NO: 2182 - protein, 170 aa, synthetic construct
  REGION 1..170: note = CD8B (P10966) SP+PP+ECD
MRPRLWLLLAAQLTVLHGNSVLQQTPAYIKVQTNKMVMLSCEAKISLSNMRIYWLRQRQAPSSDSHHEFLALWDSAKGTIHGEEVEQEKIAVFRDASRFILNLTSVKPEDSGIYFCMIVGSPELTFGKGTQLSVVDFLPTTAQPTKKSTLKKRVCRLPRPETQKGPLCSP

SEQ ID NO: 2183 - protein, 170 aa, synthetic construct
  REGION 1..170: note = CD8BP (A6NJW9) SP+PP+ECD
MRPRLWLLLAAQLTVLHGNSVLQQTPAYIKVQTNKMVMLSCEAKISLSNMCIYWLRQRQAPSSDSHHEFLTLWDSAKGTIHGEEVEQEKIAVFRDASRFILNLTSVKPEDSGIYFCMIVGSPELTFGKGTQLSVVDFLPTTAQPTKKSTLKKRVCRLPRPETQKGPLCSP

SEQ ID NO: 2184 - protein, 580 aa, synthetic construct
  REGION 1..580: note = CD93 (Q9NPY3) SP+PP+ECD
MATSMGLLLLLLLLLTQPGAGTGADTEAVVCVGTACYTAHSGKLSAAEAQNHCNQNGGNLATVKSKEEAQHVQRVLAQLLRREAALTARMSKFWIGLQREKGKCLDPSLPLKGFSWVGGGEDTPYSNWHKELRNSCISKRCVSLLLDLSQPLLPSRLPKWSEGPCGSPGSPGSNIEGFVCKFSFKGMCRPLALGGPGQVTYTTPFQTTSSSLEAVPFASAANVACGEGDKDETQSHYFLCKEKAPDVFDWGSSGPLCVSPKYGCNFNNGGCHQDCFEGGDGSFLCGCRPGFRLLDDLVTCASRNPCSSSPCRGGATCVLGPHGKNYTCRCPQGYQLDSSQLDCVDVDECQDSPCAQECVNTPGGFRCECWVGYEPGGPGEGACQDVDECALGRSPCAQGCTNTDGSFHCSCEEGYVLAGEDGTQCQDVDECVGPGGPLCDSLCFNTQGSFHCGCLPGWVLAPNGVSCTMGPVSLGPPSGPPDEEDKGEKEGSTVPRAATASPTRGPEGTPKATPTTSRPSLSSDAPITSAPLKMLAPSGSPGVWREPSIHHATAASGPQEPAGGDSSVATQNNDGTDGQK

SEQ ID NO: 2185 - protein, 519 aa, synthetic construct
  REGION 1..519: note = CD96 (P40200) SP+PP+ECD
MEKKWKYCAVYYIIQIHFVKGVWEKTVNTEENVYATLGSDVNLTCQTQTVGFFVQMQWSKVTNKIDLIAVYHPQYGFYCAYGRPCESLVTFTETPENGSKWTLHLRNMSCSVSGRYECMLVLYPEGIQTKIYNLLIQTHVTADEWNSNHTIEIEINQTLEIPCFQNSSSKISSEFTYAWSVENSSTDSWVLLSKGIKEDNGTQETLISQNHLISNSTLLKDRVKLGTDYRLHLSPVQIFDDGRKFSCHIRVGPNKILRSSTTVKVFAKPEIPVIVENNSTDVLVERRFTCLLKNVFPKANITWFIDGSFLHDEKEGIYITNEERKGKDGFLELKSVLTRVHSNKPAQSDNLTIWCMALSPVPGNKVWNISSEKITFLLGSEISSTDPPLSVTESTLDTQPSPASSVSPARYPATSSVTLVDVSALRPNTTPQPSNSSMTTRGFNYPWTSSGTDTKKSVSRIPSETYSSSPSGAGSTLHDNVFTSTARAFSEVPTTANGSTKTNHVHITGIVVNKPKDGM

SEQ ID NO: 2186 - protein, 667 aa, synthetic construct
  REGION 1..667: note = CDCP1 (Q9H5V8) SP+PP+ECD
MAGLNCGVSIALLGVLLLGAARLPRGAEAFEIALPRESNITVLIKLGTPTLLAKPCYIVISKRHITMLSIKSGERIVFTFSCQSPENHFVIEIQKNIDCMSGPCPFGEVQLQPSTSLLPTLNRTFIWDVKAHKSIGLELQFSIPRLRQIGPGESCPDGVTHSISGRIDATVVRIGTFCSNGTVSRIKMQEGVKMALHLPWFHPRNVSGFSIANRSSIKRLCIIESVFEGEGSATLMSANYPEGFPEDELMTWQFVVPAHLRASVSFLNFNLSNCERKEERVEYYIPGSTTNPEVFKLEDKQPGNMAGNFNLSLQGCDQDAQSPGILRLQFQVLVQHPQNESNKIYVVDLSNERAMSLTIEPRPVKQSRKFVPGCFVCLESRTCSSNLTLTSGSKHKISFLCDDLTRLWMNVEKTISCTDHRYCQRKSYSLQVPSDILHLPVELHDFSWKLLVPKDRLSLVLVPAQKLQQHTHEKPCNTSFSYLVASAIPSQDLYFGSFCPGGSIKQIQVKQNISVTLRTFAPSFQQEASRQGLTVSFIPYFKEEGVFTVTPDTKSKVYLRTPNWDRGLPSLTSVSWNISVPRDQVACLTFFKERSGVVCQTGRAFMIIQEQRTRAEEIFSLDEDVLPKPSFHHHSFWVNISNCSPTSGKQLDLLFSVTLTPRTVDLT

SEQ ID NO: 2187 - protein, 709 aa, synthetic construct
  REGION 1..709: note = CDH1 (P12830) SP+PP+ECD
MGPWSRSLSALLLLLQVSSWLCQEPEPCHPGFDAESYTFTVPRRHLERGRVLGRVNFEDCTGRQRTAYFSLDTRFKVGTDGVITVKRPLRFHNPQIHFLVYAWDSTYRKFSTKVTLNTVGHHHRPPPHQASVSGIQAELLTFPNSSPGLRRQKRDWVIPPISCPENEKGPFPKNLVQIKSNKDKEGKVFYSITGQGADTPPVGVFIIERETGWLKVTEPLDRERIATYTLFSHAVSSNGNAVEDPMEILITVTDQNDNKPEFTQEVFKGSVMEGALPGTSVMEVTATDADDDVNTYNAAIAYTILSQDPELPDKNMFTINRNTGVISVVTTGLDRESFPTYTLVVQAADLQGEGLSTTATAVITVTDTNDNPPIFNPTTYKGQVPENEANVVITTLKVTDADAPNTPAWEAVYTILNDDGGQFVVTTNPVNNDGILKTAKGLDFEAKQQYILHVAVTNVVPFEVSLTTSTATVTVDVLDVNEAPIFVPPEKRVEVSEDFGVGQEITSYTAQEPDTFMEQKITYRIWRDTANWLEINPDTGAISTRAELDREDFEHVKNSTYTALIIATDNGSPVATGTGTLLLILSDVNDNAPIPEPRTIFFCERNPKPQVINIIDADLPPNTSPFTAELTHGASANWTIQYNDPTQESIILKPKMALEVGDYKINLKLMDNQNKDQVTTLEVSVCDCEGAAGVCRKAQPVEAGLQIPA

SEQ ID NO: 2188 - protein, 613 aa, synthetic construct
  REGION 1..613: note = CDH10 (Q9Y6N8) SP+PP+ECD
MTIHQFLLLFLFWVCLPHFCSPEIMFRRTPVPQQRILSSRVPRSDGKILHRQKRGWMWNQFFLLEEYTGSDYQYVGKLHSDQDKGDGSLKYILSGDGAGTLFIIDEKTGDIHATRRIDREEKAFYTLRAQAINRRTLRPVEPESEFVIKIHDINDNEPTFPEEIYTASVPEMSVVGTSVVQVTATDADDPSYGNSARVIYSILQGQPYFSVEPETGIIRTALPNMNRENREQYQVVIQAKDMGGQMGGLSGTTTVNITLTDVNDNPPRFPQNTIHLRVLESSPVGTAIGSVKATDADTGKNAEVEYRIIDGDGTDMFDIVTEKDTQEGIITVKKPLDYESRRLYTLKVEAENTHVDPRFYYLGPFKDTTIVKISIEDVDEPPVFSRSSYLFEVHEDIEVGTIIGTVMARDPDSISSPIRFSLDRHTDLDRIFNIHSGNGSLYTSKPLDRELSQWHNLTVIAAEINNPKETTRVAVFVRILDVNDNAPQFAVFYDTFVCENARPGQLIQTISAVDKDDPLGGQKFFFSLAAVNPNFTVQDNEDNTARILTRKNGFNRHEISTYLLPVVISDNDYPIQSSTGTLTIRVCACDSQGNMQSCSAEALLLPAGLSTGA

SEQ ID NO: 2189 - protein, 617 aa, synthetic construct
  REGION 1..617: note = CDH11 (P55287) SP+PP+ECD
MKENYCLQAALVCLGMLCHSHAFAPERRGHLRPSFHGHHEKGKEGQVLQRSKRGWVWNQFFVIEEYTGPDPVLVGRLHSDIDSGDGNIKYILSGEGAGTIFVIDDKSGNIHATKTLDREERAQYTLMAQAVDRDTNRPLEPPSEFIVKVQDINDNPPEFLHETYHANVPERSNVGTSVIQVTASDADDPTYGNSAKLVYSILEGQPYFSVEAQTGIIRTALPNMDREAKEEYHVVIQAKDMGGHMGGLSGTTKVTITLTDVNDNPPKFPQSVYQMSVSEAAVPGEEVGRVKAKDPDIGENGLVTYNIVDGDGMESFEITTDYETQEGVIKLKKPVDFETKRAYSLKVEAANVHIDPKFISNGPFKDTVTVKISVEDADEPPMFLAPSYIHEVQENAAAGTVVGRVHAKDPDAANSPIRYSIDRHTDLDRFFTINPEDGFIKTTKPLDREETAWLNITVFAAEIHNRHQEAKVPVAIRVLDVNDNAPKFAAPYEGFICESDQTKPLSNQPIVTISADDKDDTANGPRFIFSLPPEIIHNPNFTVRDNRDNTAGVYARRGGFSRQKQDLYLLPIVISDGGIPPMSSTNTLTIKVCGCDVNGALLSCNAEAYILNAGLST

SEQ ID NO: 2190 - protein, 609 aa, synthetic construct
  REGION 1..609: note = CDH12 (P55289) SP+PP+ECD
MLTRNCLSLLLWVLFDGGLLTPLQPQPQQTLATEPRENVIHLPGQRSHFQRVKRGWVWNQFFVLEEYVGSEPQYVGKLHSDLDKGEGTVKYTLSGDGAGTVFTIDETTGDIHAIRSLDREEKPFYTLRAQAVDIETRKPLEPESEFIIKVQDINDNEPKFLDGPYVATVPEMSPVGAYVLQVKATDADDPTYGNSARVVYSILQGQPYFSIDPKTGVIRTALPNMDREVKEQYQVLIQAKDMGGQLGGLAGTTIVNITLTDVNDNPPRFPKSIFHLKVPESSPIGSAIGRIRAVDPDFGQNAEIEYNIVPGDGGNLFDIVTDEDTQEGVIKLKKPLDFETKKAYTFKVEASNLHLDHRFHSAGPFKDTATVKISVLDVDEPPVFSKPLYTMEVYEDTPVGTIIGAVTAQDLDVGSSAVRYFIDWKSDGDSYFTIDGNEGTIATNELLDRESTAQYNFSIIASKVSNPLLTSKVNILINVLDVNEFPPEISVPYETAVCENAKPGQIIQIVSAADRDLSPAGQQFSFRLSPEAAIKPNFTVRDFRNNTAGIETRRNGYSRRQQELYFLPVVIEDSSYPVQSSTNTMTIRVCRCDSDGTILSCNVEAIFLP

SEQ ID NO: 2191 - protein, 606 aa, synthetic construct
  REGION 1..606: note = CDH15 (P55291) SP+PP+ECD
MDAAFLLVLGLLAQSLCLSLGVPGWRRPTTLYPWRRAPALSRVRRAWVIPPISVSENHKRLPYPLVQIKSDKQQLGSVIYSIQGPGVDEEPRGVFSIDKFTGKVFLNAMLDREKTDRFRLRAFALDLGGSTLEDPTDLEIVVVDQNDNRPAFLQEAFTGRVLEGAVPGTYVTRAEATDADDPETDNAALRFSILQQGSPELFSIDELTGEIRTVQVGLDREVVAVYNLTLQVADMSGDGLTATASAIITLDDINDNAPEFTRDEFFMEAIEAVSGVDVGRLEVEDRDLPGSPNWVARFTILEGDPDGQFTIRTDPKTNEGVLSIVKALDYESCEHYELKVSVQNEAPLQAAALRAERGQAKVRVHVQDTNEPPVFQENPLRTSLAEGAPPGTLVATFSARDPDTEQLQRLSYSKDYDPEDWLQVDAATGRIQTQHVLSPASPFLKGGWYRAIVLAQDDASQPRTATGTLSIEILEVNDHAPVLAPPPPGSLCSEPHQGPGLLLGATDEDLPPHGAPFHFQLSPRLPELGRNWSLSQVNVSHARLRPRHQVPEGLHRLSLLLRDSGQPPQQREQPLNVTVCRCGKDGVCLPGAAALLAGGTGLSLGA

SEQ ID NO: 2192 - protein, 786 aa, synthetic construct
  REGION 1..786: note = CDH16 (O75309) SP+PP+ECD
MVPAWLWLLCVSVPQALPKAQPAELSVEVPENYGGNFPLYLTKLPLPREGAEGQIVLSGDSGKATEGPFAMDPDSGFLLVTRALDREEQAEYQLQVTLEMQDGHVLWGPQPVLVHVKDENDQVPHFSQAIYRARLSRGTRPGIPFLFLEASDRDEPGTANSDLRFHILSQAPAQPSPDMFQLEPRLGALALSPKGSTSLDHALERTYQLLVQVKDMGDQASGHQATATVEVSIIESTWVSLEPIHLAENLKVLYPHHMAQVHWSGGDVHYHLESHPPGPFEVNAEGNLYVTRELDREAQAEYLLQVRAQNSHGEDYAAPLELHVLVMDENDNVPICPPRDPTVSIPELSPPGTEVTRLSAEDADAPGSPNSHVVYQLLSPEPEDGVEGRAFQVDPTSGSVTLGVLPLRAGQNILLLVLAMDLAGAEGGFSSTCEVEVAVTDINDHAPEFITSQIGPISLPEDVEPGTLVAMLTAIDADLEPAFRLMDFAIERGDTEGTFGLDWEPDSGHVRLRLCKNLSYEAAPSHEVVVVVQSVAKLVGPGPGPGATATVTVLVERVMPPPKLDQESYEASVPISAPAGSFLLTIQPSDPISRTLRFSLVNDSEGWLCIEKFSGEVHTAQSLQGAQPGDTYTVLVEAQDTDEPRLSASAPLVIHFLKAPPAPALTLAPVPSQYLCTPRQDHGLIVSGPSKDPDLASGHGPYSFTLGPNPTVQRDWRLQTLNGSHAYLTLALHWVEPREHIIPVVVSHNAQMWQLLVRVIVCRCNVEGQCMRKVGRMKGMPTKLSA

SEQ ID NO: 2193 - protein, 787 aa, synthetic construct
  REGION 1..787: note = CDH17 (Q12864) SP+PP+ECD
MILQAHLHSLCLLMLYLATGYGQEGKFSGPLKPMTFSIYEGQEPSQIIFQFKANPPAVTFELTGETDNIFVIEREGLLYYNRALDRETRSTHNLQVAALDANGIIVEGPVPITIKVKDINDNRPTFLQSKYEGSVRQNSRPGKPFLYVNATDLDDPATPNGQLYYQIVIQLPMINNVMYFQINNKTGAISLTREGSQELNPAKNPSYNLVISVKDMGGQSENSFSDTTSVDIIVTENIWKAPKPVEMVENSTDPHPIKITQVRWNDPGAQYSLVDKEKLPRFPFSIDQEGDIYVTQPLDREEKDAYVFYAVAKDEYGKPLSYPLEIHVKVKDINDNPPTCPSPVTVFEVQENERLGNSIGTLTAHDRDEENTANSFLNYRIVEQTPKLPMDGLFLIQTYAGMLQLAKQSLKKQDTPQYNLTIEVSDKDFKTLCFVQINVIDINDQIPIFEKSDYGNLTLAEDTNIGSTILTIQATDADEPFTGSSKILYHIIKGDSEGRLGVDTDPHTNTGYVIIKKPLDFETAAVSNIVFKAENPEPLVFGVKYNASSFAKFTLIVTDVNEAPQFSQHVFQAKVSEDVAIGTKVGNVTAKDPEGLDISYSLRGDTRGWLKIDHVTGEIFSVAPLDREAGSPYRVQVVATEVGGSSLSSVSEFHLILMDVNDNPPRLAKDYTGLFFCHPLSAPGSLIFEATDDDQHLFRGPHFTFSLGSGSLQNDWEVSKINGTHARLSTRHTEFEEREYVVLIRINDGGRPPLEGIVSLPVTFCSCVEGSCFRPAGHQTGIPTVGM

SEQ ID NO: 2194 - protein, 608 aa, synthetic construct
  REGION 1..608: note = CDH18 (Q13634) SP+PP+ECD
MKITSTSCICPVLVCLCFVQRCYGTAHHSSIKVMRNQTKHIEGETEVHHRPKRGWVWNQFFVLEEHMGPDPQYVGKLHSNSDKGDGSVKYILTGEGAGTIFIIDDTTGDIHSTKSLDREQKTHYVLHAQAIDRRTNKPLEPESEFIIKVQDINDNAPKFTDGPYIVTVPEMSDMGTSVLQVTATDADDPTYGNSARVVYSILQGQPYFSVDPKTGVIRTALHNMDREAREHYSVVIQAKDMAGQVGGLSGSTTVNITLTDVNDNPPRFPQKHYQLYVPESAQVGSAVGKIKANDADTGSNADMTYSIINGDGMGIFSISTDKETREGILSLKKPLNYEKKKSYTLNIEGANTHLDFRFSHLGPFKDATMLKIIVGDVDEPPLFSMPSYLMEVYENAKIGTVVGTVLAQDPDSTNSLVRYFINYNVEDDRFFNIDANTGTIRTTKVLDREETPWYNITVTASEIDNPDLLSHVTVGIRVLDVNDNPPELAREYDIIVCENSKPGQVIHTISATDKDDFANGPRFNFFLDERLPVNPNFTLKDNEDNTASILTRRRRFSRTVQDVYYLPIMISDGGIPSLSSSSTLTIRVCACERDGRVRTCHAEAFLSS

SEQ ID NO: 2195 - protein, 596 aa, synthetic construct
  REGION 1..596: note = CDH19 (Q9H159) SP+PP+ECD
MNCYLLLRFMLGIPLLWPCLGATENSQTKKVKQPVRSHLRVKRGWVWNQFFVPEEMNTTSHHIGQLRSDLDNGNNSFQYKLLGAGAGSTFIIDERTGDIYAIQKLDREERSLYILRAQVIDIATGRAVEPESEFVIKVSDINDNEPKFLDEPYEAIVPEMSPEGTLVIQVTASDADDPSSGNNARLLYSLLQGQPYFSVEPTTGVIRISSKMDRELQDEYWVIIQAKDMIGQPGALSGTTSVLIKLSDVNDNKPIFKESLYRLTVSESAPTGTSIGTIMAYDNDIGENAEMDYSIEEDDSQTFDIITNHETQEGIVILKKKVDFEHQNHYGIRAKVKNHHVPEQLMKYHTEASTTFIKIQVEDVDEPPLFLLPYYVFEVFEETPQGSFVGVVSATDPDNRKSPIRYSITRSKVFNINDNGTITTSNSLDREISAWYNLSITATEKYNIEQISSIPLYVQVLNINDHAPEFSQYYETYVCENAGSGQVIQTISAVDRDESIEEHHFYFNLSVEDTNNSSFTIIDNQDNTAVILTNRTGFNLQEEPVFYISILIADNGIPSLTSTNTLTIHVCDCGDSGSTQTCQYQELVLSMGFKTE

SEQ ID NO: 2196 - protein, 724 aa, synthetic construct
  REGION 1..724: note = CDH2 (P19022) SP+PP+ECD
MCRIAGALRTLLPLLAALLQASVEASGEIALCKTGFPEDVYSAVLSKDVHEGQPLLNVKFSNCNGKRKVQYESSEPADFKVDEDGMVYAVRSFPLSSEHAKFLIYAQDKETQEKWQVAVKLSLKPTLTEESVKESAEVEEIVFPRQFSKHSGHLQRQKRDWVIPPINLPENSRGPFPQELVRIRSDRDKNLSLRYSVTGPGADQPPTGIFIINPISGQLSVTKPLDREQIARFHLRAHAVDINGNQVENPIDIVINVIDMNDNRPEFLHQVWNGTVPEGSKPGTYVMTVTAIDADDPNALNGMLRYRIVSQAPSTPSPNMFTINNETGDIITVAAGLDREKVQQYTLIIQATDMEGNPTYGLSNTATAVITVTDVNDNPPEFTAMTFYGEVPENRVDIIVANLTVTDKDQPHTPAWNAVYRISGGDPTGRFAIQTDPNSNDGLVTVVKPIDFETNRMFVLTVAAENQVPLAKGIQHPPQSTATVSVTVIDVNENPYFAPNPKIIRQEEGLHAGTMLTTFTAQDPDRYMQQNIRYTKLSDPANWLKIDPVNGQITTIAVLDRESPNVKNNIYNATFLASDNGIPPMSGTGTLQIYLLDINDNAPQVLPQEAETCETPDPNSINITALDYDIDPNAGPFAFDLPLSPVTIKRNWTITRLNGDFAQLNLKIKFLEAGIYEVPIIITDSGNPPKSNISILRVKVCQCDSNGDCTDVDRIVGAGLGTGA

SEQ ID NO: 2197 - protein, 619 aa, synthetic construct
  REGION 1..619: note = CDH20 (Q9HBT6) SP+PP+ECD
MWTSGRMSNAKNWLGLGMSLYFWGLMDLTTTVLSDTPTPQGELEALLSDKPQSHQRTKRSWVWNQFFVLEEYTGTDPLYVGKLHSDMDRGDGSIKYILSGEGAGIVFTIDDTTGDIHAIQRLDREERAQYTLRAQALDRRTGRPMEPESEFIIKIQDINDNEPKFLDGPYVATVPEMSPVGTSVIQVTATDADDPTYGNSARVVYSILQGQPYFSVDSKTGVIRTALMNMDREAKEYYEVIIQAKDMGGQLGGLAGTTTVNITLSDVNDNPPRFPQKHYQMSVLESAPISSTVGRVFAKDLDEGINAEMKYTIVDGDGADAFDISTDPNFQVGIITVKKPLSFESKKSYTLKVEGANPHLEMRFLNLGPFQDTTTVHISVEDVDEPPVFEPGFYFVEVPEDVAIGTTIQIISAKDPDVTNNSIRYSIDRSSDPGRFFYVDITTGALMTARPLDREEFSWHNITVLAMEMNNPSQVGSVPVTIKVLDVNDNAPEFPRFYEAFVCENAKAGQLIQTVSAVDQDDPRNGQHFYYSLAPEAANNPNFTIRDNQDNTARILTRRSGFRQQEQSVFHLPILIADSGQPVLSSTGTLTIQVCSCDDDGHVMSCSPEAYMLPVSLSR

SEQ ID NO: 2198 - protein, 624 aa, synthetic construct
  REGION 1..624: note = CDH22 (Q9UJ99) SP+PP+ECD
MRPRPEGRGLRAGVALSPALLLLLLLPPPPTLLGRLWAAGTPSPSAPGARQDGALGAGRVKRGWVWNQFFVVEEYTGTEPLYVGKIHSDSDEGDGAIKYTISGEGAGTIFLIDELTGDIHAMERLDREQKTFYTLRAQARDRATNRLLEPESEFIIKVQDINDSEPRFLHGPYIGSVAELSPTGTSVMQVMASDADDPTYGSSARLVYSVLDGEHHFTVDPKTGVIRTAVPDLDRESQERYEVVIQATDMAGQLGGLSGSTTVTIVVTDVNDNPPRFPQKMYQFSIQESAPIGTAVGRVKAEDSDVGENTDMTYHLKDESSSGGDVFKVTTDSDTQEAIIVVQKRLDFESQPVHTVILEALNKFVDPRFADLGTFRDQAIVRVAVTDVDEPPEFRPPSGLLEVQEDAQVGSLVGVVTARDPDAANRPVRYAIDRESDLDQIFDIDADTGAIVTGKGLDRETAGWHNITVLAMEADNHAQLSRASLRIRILDVNDNPPELATPYEAAVCEDAKPGQLIQTISVVDRDEPQGGHRFYFRLVPEAPSNPHFSLLDIQDNTAAVHTQHVGFNRQEQDVFFLPILVVDSGPPTLSSTGTLTIRICGCDSSGTIQSCNTTAFVMAASLSP

SEQ ID NO: 2199 - protein, 3064 aa, synthetic construct
  REGION 1..3064: note = CDH23 (Q9H251) SP+PP+ECD
MGRHVATSCHVAWLLVLISGCWGQVNRLPFFTNHFFDTYLLISEDTPVGSSVTQLLAQDMDNDPLVFGVSGEEASRFFAVEPDTGVVWLRQPLDRETKSEFTVEFSVSDHQGVITRKVNIQVGDVNDNAPTFHNQPYSVRIPENTPVGTPIFIVNATDPDLGAGGSVLYSFQPPSQFFAIDSARGIVTVIRELDYETTQAYQLTVNATDQDKTRPLSTLANLAIIITDVQDMDPIFINLPYSTNIYEHSPPGTTVRIITAIDQDKGRPRGIGYTIVSGNTNSIFALDYISGVLTLNGLLDRENPLYSHGFILTVKGTELNDDRTPSDATVTTTFNILVIDINDNAPEFNSSEYSVAITELAQVGFALPLFIQVVDKDENLGLNSMFEVYLVGNNSHHFIISPTSVQGKADIRIRVAIPLDYETVDRYDFDLFANESVPDHVGYAKVKITLINENDNRPIFSQPLYNISLYENVTVGTSVLTVLATDNDAGTFGEVSYFFSDDPDRFSLDKDTGLIMLIARLDYELIQRFTLTIIARDGGGEETTGRVRINVLDVNDNVPTFQKDAYVGALRENEPSVTQLVRLRATDEDSPPNNQITYSIVSASAFGSYFDISLYEGYGVISVSRPLDYEQISNGLIYLTVMAMDAGNPPLNSTVPVTIEVFDENDNPPTFSKPAYFVSVVENIMAGATVLFLNATDLDRSREYGQESIIYSLEGSTQFRINARSGEITTTSLLDRETKSEYILIVRAVDGGVGHNQKTGIATVNITLLDINDNHPTWKDAPYYINLVEMTPPDSDVTTVVAVDPDLGENGTLVYSIQPPNKFYSLNSTTGKIRTTHAMLDRENPDPHEAELMRKIVVSVTDCGRPPLKATSSATVFVNLLDLNDNDPTFQNLPFVAEVLEGIPAGVSIYQVVAIDLDEGLNGLVSYRMPVGMPRMDFLINSSSGVVVTTTELDRERIAEYQLRVVASDAGTPTKSSTSTLTIHVLDVNDETPTFFPAVYNVSVSEDVPREFRVVWLNCTDNDVGLNAELSYFITGGNVDGKFSVGYRDAVVRTVVGLDRETTAAYMLILEAIDNGPVGKRHTGTATVFVTVLDVNDNRPIFLQSSYEASVPEDIPEGHSILQLKATDADEGEFGRVWYRILHGNHGNNFRIHVSNGLLMRGPRPLDRERNSSHVLIVEAYNHDLGPMRSSVRVIVYVEDINDEAPVFTQQQYSRLGLRETAGIGTSVIVVQATDRDSGDGGLVNYRILSGAEGKFEIDESTGLIITVNYLDYETKTSYMMNVSATDQAPPFNQGFCSVYITLLNELDEAVQFSNASYEAAILENLALGTEIVRVQAYSIDNLNQITYRFNAYTSTQAKALFKIDAITGVITVQGLVDREKGDFYTLTVVADDGGPKVDSTVKVYITVLDENDNSPRFDFTSDSAVSIPEDCPVGQRVATVKAWDPDAGSNGQVVFSLASGNIAGAFEIVTTNDSIGEVFVARPLDREELDHYILQVVASDRGTPPRKKDHILQVTILDINDNPPVIESPFGYNVSVNENVGGGTAVVQVRATDRDIGINSVLSYYITEGNKDMAFRMDRISGEIATRPAPPDRERQSFYHLVATVEDEGTPTLSATTHVYVTIVDENDNAPMFQQPHYEVLLDEGPDTLNTSLITIQALDLDEGPNGTVTYAIVAGNIVNTFRIDRHMGVITAAKELDYEISHGRYTLIVTATDQCPILSHRLTSTTTVLVNVNDINDNVPTFPRDYEGPFEVTEGQPGPRVWTFLAHDRDSGPNGQVEYSIMDGDPLGEFVISPVEGVLRVRKDVELDRETIAFYNLTICARDRGMPPLSSTMLVGIRVLDINDNDPVLLNLPMNITISENSPVSSFVAHVLASDADSGCNARLTFNITAGNRERAFFINATTGIVTVNRPLDRERIPEYKLTISVKDNPENPRIARRDYDLLLIFLSDENDNHPLFTKSTYQAEVMENSPAGTPLTVLNGPILALDADQDIYAVVTYQLLGAQSGLFDINSSTGVVTVRSGVIIDREAFSPPILELLLLAEDIGLLNSTAHLLITILDDNDNRPTFSPATLTVHLLENCPPGFSVLQVTATDEDSGLNGELVYRIEAGAQDRFLIHLVTGVIRVGNATIDREEQESYRLTVVATDRGTVPLSGTAIVTILIDDINDSRPEFLNPIQTVSVLESAEPGTVIANITAIDHDLNPKLEYHIVGIVAKDDTDRLVPNQEDAFAVNINTGSVMVKSPMNRELVATYEVTLSVIDNASDLPERSVSVPNAKLTVNVLDVNDNTPQFKPFGITYYMERILEGATPGTTLIAVAAVDPDKGLNGLVTYTLLDLVPPGYVQLEDSSAGKVIANRTVDYEEVHWLNFTVRASDNGSPPRAAEIPVYLEIVDINDNNPIFDQPSYQEAVFEDVPVGTIILTVTATDADSGNFALIEYSLGDGESKFAINPTTGDIYVLSSLDREKKDHYILTALAKDNPGDVASNRRENSVQVVIQVLDVNDCRPQFSKPQFSTSVYENEPAGTSVITMMATDQDEGPNGELTYSLEGPGVEAFHVDMDSGLVTTQRPLQSYEKFSLTVVATDGGEPPLWGTTMLLVEVIDVNDNRPVFVRPPNGTILHIREEIPLRSNVYEVYATDKDEGLNGAVRYSFLKTAGNRDWEFFIIDPISGLIQTAQRLDRESQAVYSLILVASDLGQPVPYETMQPLQVALEDIDDNEPLFVRPPKGSPQYQLLTVPEHSPRGTLVGNVTGAVDADEGPNAIVYYFIAAGNEEKNFHLQPDGCLLVLRDLDREREAIFSFIVKASSNRSWTPPRGPSPTLDLVADLTLQEVRVVLEDINDQPPRFTKAEYTAGVATDAKVGSELIQVLALDADIGNNSLVFYSILAIHYFRALANDSEDVGQVFTMGSMDGILRTFDLFMAYSPGYFVVDIVARDLAGHNDTAIIGIYILRDDQRVKIVINEIPDRVRGFEEEFIHLLSNITGAIVNTDNVQFHVDKKGRVNFAQTELLIHVVNRDTNRILDVDRVIQMIDENKEQLRNLFRNYNVLDVQPAISVRLPDDMSA

SEQ ID NO: 2200 - protein, 641 aa, synthetic construct
  REGION 1..641: note = CDH24 (Q86UP0) SP+PP+ECD
MWGLVRLLLAWLGGWGCMGLAAPARAWAGSREHPGPALLRTRRSSWVWNQFFVIEEYAGPEPVLIGKLHSDVDRGEGRTKYLLTGEGAGTVFVIDEATGNIHVTKSLDREEKAQYVLLAQAVDRASNRPLEPPSEFIIKVQDINDNPPIFPLGPYHATVPEMSNVGTSVIQVTAHDADDPSYGNSAKLVYTVLDGLPFFSVDPQTGVVRTAIPNMDRETQEEFLVVIQAKDMGGHMGGLSGSTTVTVTLSDVNDNPPKFPQSLYQFSVVETAGPGTLVGRLRAQDPDLGDNALMAYSILDGEGSEAFSISTDLQGRDGLLTVRKPLDFESQRSYSFRVEATNTLIDPAYLRRGPFKDVASVRVAVQDAPEPPAFTQAAYHLTVPENKAPGTLVGQISAADLDSPASPIRYSILPHSDPERCFSIQPEEGTIHTAAPLDREARAWHNLTVLATELGWSWGPERGWVPLLVAEWSAPAAPPQRSPVGSAVGIPQDSSAQASRVQVAIQTLDENDNAPQLAEPYDTFVCDSAAPGQLIQVIRALDRDEVGNSSHVSFQGPLGPDANFTVQDNRDGSASLLLPSRPAPPRHAPYLVPIELWDWGQPALSSTATVTVSVCRCQPDGSVASCWPEAHLSAAGLSTGA

SEQ ID NO: 2201 - protein, 614 aa, synthetic construct
  REGION 1..614: note = CDH26 (Q8IXH8) SP+PP+ECD
MAMRSGRHPSLLLLLVLLLWLLQVSIIDSVQQETDDLTKQTKEKIYQPLRRSKRRWVITTLELEEEDPGPFPKLIGELFNNMSYNMSLMYLISGPGVDEYPEIGLFSLEDHENGRIYVHRPVDREMTPSFTVYFDVVERSTGKIVDTSLIFNIRISDVNDHAPQFPEKEFNITVQENQSAGQPIFQMLAVDLDEENTPNSQVLYFLISQTPLLKESGFRVDRLSGEIRLSGCLDYETAPQFTLLIRARDCGEPSLSSTTTVHVDVQEGNNHRPAFTQENYKVQIPEGRASQGVLRLLVQDRDSPFTSAWRAKFNILHGNEEGHFDISTDPETNEGILNVIKPLDYETRPAQSLIIVVENEERLVFCERGKLQPPRKAAASATVSVQVTDANDPPAFHPQSFIVNKEEGARPGTLLGTFNAMDPDSQIRYELVHDPANWVSVDKNSGVVITVEPIDRESPHVNNSFYVIIIHAVDDGFPPQTATGTLMLFLSDINDNVPTLRPRSRYMEVCESAVHEPLHIEAEDPDLEPFSDPFTFELDNTWGNAEDTWKLGRNWGQSVELLTLRSLPRGNYLVPLFIGDKQGLSQKQTVHVRICPCASGLTCVELADAEVGLH

SEQ ID NO: 2202 - protein, 654 aa, synthetic construct
  REGION 1..654: note = CDH3 (P22223) SP+PP+ECD
MGLPRGPLASLLLLQVCWLQCAASEPCRAVFREAEVTLEAGGAEQEPGQALGKVFMGCPGQEPALFSTDNDDFTVRNGETVQERRSLKERNPLKIFPSKRILRRHKRDWVVAPISVPENGKGPFPQRLNQLKSNKDRDTKIFYSITGPGADSPPEGVFAVEKETGWLLLNKPLDREEIAKYELFGHAVSENGASVEDPMNISIIVTDQNDHKPKFTQDTFRGSVLEGVLPGTSVMQVTATDEDDAIYTYNGVVAYSIHSQEPKDPHDLMFTIHRSTGTISVISSGLDREKVPEYTLTIQATDMDGDGSTTTAVAVVEILDANDNAPMFDPQKYEAHVPENAVGHEVQRLTVTDLDAPNSPAWRATYLIMGGDDGDHFTITTHPESNQGILTTRKGLDFEAKNQHTLYVEVTNEAPFVLKLPTSTATIVVHVEDVNEAPVFVPPSKVVEVQEGIPTGEPVCVYTAEDPDKENQKISYRILRDPAGWLAMDPDSGQVTAVGTLDREDEQFVRNNIYEVMVLAMDNGSPPTTGTGTLLLTLIDVNDHGPVPEPRQITICNQSPVRQVLNITDKDLSPHTSPFQAQLTDDSDIYWTAEVNEEGDTVVLSLKKFLKQDTYDVHLSLSDHGNKEQLTVIRATVCDCHGHVETCPGPWKGG

SEQ ID NO: 2203 - protein, 734 aa, synthetic construct
  REGION 1..734: note = CDH4 (P55283) SP+PP+ECD
MTAGAGVLLLLLSLSGALRAHNEDLTTRETCKAGFSEDDYTALISQNILEGEKLLQVKFSSCVGTKGTQYETNSMDFKVGADGTVFATRELQVPSEQVAFTVTAWDSQTAEKWDAVVRLLVAQTSSPHSGHKPQKGKKVVALDPSPPPKDTLLPWPQHQNANGLRRRKRDWVIPPINVPENSRGPFPQQLVRIRSDKDNDIPIRYSITGVGADQPPMEVFSIDSMSGRMYVTRPMDREEHASYHLRAHAVDMNGNKVENPIDLYIYVIDMNDNRPEFINQVYNGSVDEGSKPGTYVMTVTANDADDSTTANGMVRYRIVTQTPQSPSQNMFTINSETGDIVTVAAGLDREKVQQYTVIVQATDMEGNLNYGLSNTATAIITVTDVNDNPPEFTASTFAGEVPENRVETVVANLTVMDRDQPHSPNWNAVYRIISGDPSGHFSVRTDPVTNEGMVTVVKAVDYELNRAFMLTVMVSNQAPLASGIQMSFQSTAGVTISIMDINEAPYFPSNHKLIRLEEGVPPGTVLTTFSAVDPDRFMQQAVRYSKLSDPASWLHINATNGQITTAAVLDRESLYTKNNVYEATFLAADNGIPPASGTGTLQIYLIDINDNAPELLPKEAQICEKPNLNAINITAADADVDPNIGPYVFELPFVPAAVRKNWTITRLNGDYAQLSLRILYLEAGMYDVPIIVTDSGNPPLSNTSIIKVKVCPCDDNGDCTTIGAVAAAGLGTGA

SEQ ID NO: 2204 - protein, 599 aa, synthetic construct
  REGION 1..599: note = CDH5 (P33151) SP+PP+ECD
MQRLMMLLATSGACLGLLAVAAVAAAGANPAQRDTHSLLPTHRRQKRDWIWNQMHIDEEKNTSLPHHVGKIKSSVSRKNAKYLLKGEYVGKVFRVDAETGDVFAIERLDRENISEYHLTAVIVDKDTGENLETPSSFTIKVHDVNDNWPVFTHRLFNASVPESSAVGTSVISVTAVDADDPTVGDHASVMYQILKGKEYFAIDNSGRIITITKSLDREKQARYEIVVEARDAQGLRGDSGTATVLVTLQDINDNFPFFTQTKYTFVVPEDTRVGTSVGSLFVEDPDEPQNRMTKYSILRGDYQDAFTIETNPAHNEGIIKPMKPLDYEYIQQYSFIVEATDPTIDLRYMSPPAGNRAQVIINITDVDEPPIFQQPFYHFQLKENQKKPLIGTVLAMDPDAARHSIGYSIRRTSDKGQFFRVTKKGDIYNEKELDREVYPWYNLTVEAKELDSTGTPTGKESIVQVHIEVLDENDNAPEFAKPYQPKVCENAVHGQLVLQISAIDKDITPRNVKFKFILNTENNFTLTDNHDNTANITVKYGQFDREHTKVHFLPVVISDNGMPSRTGTSTLTVAVCKCNEQGEFTFCEDMAAQVGVSIQ

SEQ ID NO: 2205 - protein, 615 aa, synthetic construct
  REGION 1..615: note = CDH6 (P55285) SP+PP+ECD
MRTYRYFLLLFWVGQPYPTLSTPLSKRTSGFPAKKRALELSGNSKNELNRSKRSWMWNQFFLLEEYTGSDYQYVGKLHSDQDRGDGSLKYILSGDGAGDLFIINENTGDIQATKRLDREEKPVYILRAQAINRRTGRPVEPESEFIIKIHDINDNEPIFTKEVYTATVPEMSDVGTFVVQVTATDADDPTYGNSAKVVYSILQGQPYFSVESETGIIKTALLNMDRENREQYQVVIQAKDMGGQMGGLSGTTTVNITLTDVNDNPPRFPQSTYQFKTPESSPPGTPIGRIKASDADVGENAEIEYSITDGEGLDMFDVITDQETQEGIITVKKLLDFEKKKVYTLKVEASNPYVEPRFLYLGPFKDSATVRIVVEDVDEPPVFSKLAYILQIREDAQINTTIGSVTAQDPDAARNPVKYSVDRHTDMDRIFNIDSGNGSIFTSKLLDRETLLWHNITVIATEINNPKQSSRVPLYIKVLDVNDNAPEFAEFYETFVCEKAKADQLIQTLHAVDKDDPYSGHQFSFSLAPEAASGSNFTIQDNKDNTAGILTRKNGYNRHEMSTYLLPVVISDNDYPVQSSTGTVTVRVCACDHHGNMQSCHAEALIHPTGLSTGA

SEQ ID NO: 2206 - protein, 607 aa, synthetic construct
  REGION 1..607: note = CDH7 (Q9ULB5) SP+PP+ECD
MKLGKVEFCHFLQLIALFLCFSGMSQAELSRSRSKPYFQSGRSRTKRSWVWNQFFVLEEYMGSDPLYVGKLHSDVDKGDGSIKYILSGEGASSIFIIDENTGDIHATKRLDREEQAYYTLRAQALDRLTNKPVEPESEFVIKIQDINDNEPKFLDGPYTAGVPEMSPVGTSVVQVTATDADDPTYGNSARVVYSILQGQPYFSVEPKTGVIKTALPNMDREAKDQYLLVIQAKDMVGQNGGLSGTTSVTVTLTDVNDNPPRFPRRSYQYNVPESLPVASVVARIKAADADIGANAEMEYKIVDGDGLGIFKISVDKETQEGIITIQKELDFEAKTSYTLRIEAANKDADPRFLSLGPFSDTTTVKIIVEDVDEPPVFSSPLYPMEVSEATQVGNIIGTVAAHDPDSSNSPVRYSIDRNTDLERYFNIDANSGVITTAKSLDRETNAIHNITVLAMESQNPSQVGRGYVAITILDINDNAPEFAMDYETTVCENAQPGQVIQKISAVDKDEPSNGHQFYFSLTTDATNNHNFSLKDNKDNTASILTRRNGFRRQEQSVYYLPIFIVDSGSPSLSSTNTLTIRVCDCDADGVAQTCNAEAYVLPAGLST

SEQ ID NO: 2207 - protein, 621 aa, synthetic construct
  REGION 1..621: note = CDH8 (P55286) SP+PP+ECD
MPERLAEMLLDLWTPLIILWITLPPCIYMAPMNQSQVLMSGSPLELNSLGEEQRILNRSKRGWVWNQMFVLEEFSGPEPILVGRLHTDLDPGSKKIKYILSGDGAGTIFQINDVTGDIHAIKRLDREEKAEYTLTAQAVDWETSKPLEPPSEFIIKVQDINDNAPEFLNGPYHATVPEMSILGTSVTNVTATDADDPVYGNSAKLVYSILEGQPYFSIEPETAIIKTALPNMDREAKEEYLVVIQAKDMGGHSGGLSGTTTLTVTLTDVNDNPPKFAQSLYHFSVPEDVVLGTAIGRVKANDQDIGENAQSSYDIIDGDGTALFEITSDAQAQDGIIRLRKPLDFETKKSYTLKVEAANVHIDPRFSGRGPFKDTATVKIVVEDADEPPVFSSPTYLLEVHENAALNSVIGQVTARDPDITSSPIRFSIDRHTDLERQFNINADDGKITLATPLDRELSVWHNITIIATEIRNHSQISRVPVAIKVLDVNDNAPEFASEYEAFLCENGKPGQVIQTVSAMDKDDPKNGHYFLYSLLPEMVNNPNFTIKKNEDNSLSILAKHNGFNRQKQEVYLLPIIISDSGNPPLSSTSTLTIRVCGCSNDGVVQSCNVEAYVLPIGLSM

SEQ ID NO: 2208 - protein, 615 aa, synthetic construct
  REGION 1..615: note = CDH9 (Q9ULB4) SP+PP+ECD
MRTYHYIPLFIWTYMFHTVDTILLQEKPNSYLSSKKIAGLTKDDGKMLRRTKRGWMWNQFFLLEEYTGTDTQYVGKLHTDQDKGDGNLKYILTGDGAGSLFVIDENTGDIHAAKKLDREEKSLYILRAKAIDRKTGRQVEPESEFIIKIHDINDNEPKFTKDLYTASVPEMSGVGTSVIQVTATDADDANYGNSAKVVYSILQGQPYFSVDPESGIIKTALPDMSRENREQYQVVIQAKDMGGQMGGLSGTTTVNITLTDVNNNPPRFPQSTYQFNSPESVPLGTHLGRIKANDPDVGENAEMEYSIAEGDGADMFDVITDKDTQEGIITVKQNLDFENQMLYTLRVDASNTHPDPRFLHLGPFKDTAVVKISVEDIDEPPVFTKVSYLIEVDEDVKEGSIIGQVTAYDPDARNNLIKYSVDRHTDMDRIFGIHSENGSIFTLKALDRESSPWHNITVTATEINNPKQSSHIPVFIRILDINDHAPEFAMYYETFVCENAKPGQLIQTVSVMDKDDPPRGHKFFFEPVPEFTLNPNFTIVDNKDNTAGIMTRKDGYSRNKMSTYLLPILIFDNDYPIQSSTGTLTIRVCACDNQGNMQSCTAEALILSAGLSTGA

SEQ ID NO: 2209 - protein, 700 aa, synthetic construct
  REGION 1..700: note = CDHR1 (Q96JP9) SP+PP+ECD
MRRCRWAALALGLLRLCLAQANFAPHFFDNGVGSTNGNMALFSLPEDTPVGSHVYTLNGTDPEGDPISYHISFDPSTRSVFSVDPTFGNITLVEELDREREDEIEAIISISDGLNLVAEKVVILVTDANDEAPRFIQEPYVALVPEDIPAGSIIFKVHAVDRDTGSGGSVTYFLQNLHSPFAVDRHSGVLRLQAGATLDYERSRTHYITVVAKDGGGRLHGADVVFSATTTVTVNVEDVQDMAPVFVGTPYYGYVYEDTLPGSEVLKVVAMDGDRGKPNRILYSLVNGNDGAFEINETSGAISITQSPAQLQREVYELHVQVTEMSPAGSPAAQATVPVTIRIVDLNNHPPTFYGESGPQNRFELSMNEHPPQGEILRGLKITVNDSDQGANAKFNLQLVGPRGIFRVVPQTVLNEAQVTIIVENSAAIDFEKSKVLTFKLLAVEVNTPEKFSSTADVVIQLLDTNDNVPKFDSLYYVARIPENAPGGSSVVAVTAVDPDTGPWGEVKYSTYGTGADLFLIHPSTGLIYTQPWASLDAEATARYNFYVKAEDMEGKYSVAEVFITLLDVNDHPPQFGKSVQKKTMVLGTPVKIEAIDEDAEEPNNLVDYSITHAEPANVFDINSHTGEIWLKNSIRSLDALHNITPGRDCLWSLEVQAKDRGSPSFSTTALLKIDITDAETLSRSPMAAFLIQTKDNPMK

SEQ ID NO: 2210 - protein, 1154 aa, synthetic construct
  REGION 1..1154: note = CDHR2 (Q9BYE9) SP+PP+ECD
MAQLWLSCFLLPALVVSVAANVAPKFLANMTSVILPEDLPVGAQAFWLVAEDQDNDPLTYGMSGPNAYFFAVTPKTGEVKLASALDYETLYTFKVTISVSDPYIQVQREMLVIVEDRNDNAPVFQNTAFSTSINETLPVGSVVFSVLAVDKDMGSAGMVVYSIEKVIPSTGDSEHLFRILANGSIVLNGSLSYNNKSAFYQLELKACDLGGMYHNTFTIQCSLPVFLSISVVDQPDLDPQFVREFYSASVAEDAAKGTSVLTVEAVDGDKGINDPVIYSISYSTRPGWFDIGADGVIRVNGSLDREQLLEADEEVQLQVTATETHLNIYGQEAKVSIWVTVRVMDVNDHKPEFYNCSLPACTFTPEEAQVNFTGYVDEHASPRIPIDDLTMVVYDPDKGSNGTFLLSLGGPDAEAFSVSPERAVGSASVQVLVRVSALVDYERQTAMAVQVVATDSVSQNFSVAMVTIHLRDINDHRPTFPQSLYVLTVPEHSATGSVVTDSIHATDPDTGAWGQITYSLLPGNGADLFQVDPVSGTVTVRNGELLDRESQAVYYLTLQATDGGNLSSSTTLQIHLLDINDNAPVVSGSYNIFVQEEEGNVSVTIQAHDNDEPGTNNSRLLFNLLPGPYSHNFSLDPDTGLLRNLGPLDREAIDPALEGRIVLTVLVSDCGEPVLGTKVNVTITVEDINDNLPIFNQSSYNFTVKEEDPGVLVGVVKAWDADQTEANNRISFSLSGSGANYFMIRGLVLGAGWAEGYLRLPPDVSLDYETQPVFNLTVSAENPDPQGGETIVDVCVNVKDVNDNPPTLDVASLRGIRVAENGSQHGQVAVVVASDVDTSAQLEIQLVNILCTKAGVDVGSLCWGWFSVAANGSVYINQSKAIDYEACDLVTLVVRACDLATDPGFQAYSNNGSLLITIEDVNDNAPYFLPENKTFVIIPELVLPNREVASVRARDDDSGNNGVILFSILRVDFISKDGATIPFQGVFSIFTSSEADVFAGSIQPVTSLDSTLQGTYQVTVQARDRPSLGPFLEATTTLNLFTVDQSYRSRLQFSTPKEEVGANRQAINAALTQATRTTVYIVDIQDIDSAARARPHSYLDAYFVFPNGSALTLDELSVMIRNDQDSLTQLLQLGLVVLGSQESQESDLSKQLIS

SEQ ID NO: 2211 - protein, 713 aa, synthetic construct
  REGION 1..713: note = CDHR3 (Q6ZTQ4) SP+PP+ECD
MQEAIILLALLGAMSGGEALHLILLPATGNVAENSPPGTSVHKFSVKLSASLSPVIPGFPQIVNSNPLTEAFRVNWLSGTYFEVVTTGMEQLDFETGPNIFDLQIYVKDEVGVTDLQVLTVQVTDVNEPPQFQGNLAEGLHLYIVERANPGFIYQVEAFDPEDTSRNIPLSYFLISPPKSFRMSANGTLFSTTELDFEAGHRSFHLIVEVRDSGGLKASTELQVNIVNLNDEVPRFTSPTRVYTVLEELSPGTIVANITAEDPDDEGFPSHLLYSITTVSKYFMINQLTGTIQVAQRIDRDAGELRQNPTISLEVLVKDRPYGGQENRIQITFIVEDVNDNPATCQKFTFSIMVPERTAKGTLLLDLNKFCFDDDSEAPNNRFNFTMPSGVGSGSRFLQDPAGSGKIVLIGDLDYENPSNLAAGNKYTVIIQVQDVAPPYYKNNVYVYILTSPENEFPLIFDRPSYVFDVSERRPARTRVGQVRATDKDLPQSSLLYSISTGGASLQYPNVFWINPKTGELQLVTKVDCETTPIYILRIQATNNEDTSSVTVTVNILEENDEKPICTPNSYFLALPVDLKVGTNIQNFKLTCTDLDSSPRSFRYSIGPGNVNNHFTFSPNAGSNVTRLLLTSRFDYAGGFDKIWDYKLLVYVTDDNLMSDRKKAEALVETGTVTLSIKVIPHPTTIITTTPRPRVTYQVLRKNVYSPSAWYVP

SEQ ID NO: 2212 - protein, 686 aa, synthetic construct
  REGION 1..686: note = CDHR4 (A6H8M9) SP+PP+ECD
MVLLRLLVFLFAPVVSDLCSLPCFINVSESQGPGTVLQFLSFNCSSYTPTPTLELLNVQPPTTFFNPPSLARWQGTYVGKLTLSSSAQLDALMVNHYKVQLKFTCGNHVMEGSLSVDVQRDLSHIQCAGQFASPAGEMIQVPETVTPGARLYTLLLPGLELHGAQMSIISAQDLPHFPGPFSINEQGWLQAPSQGLLGQAQKVFQLQISVSFGQRQSCQGMVIVKVLPVPSSQVSFLEQAQNITIPENLAPGSEVVQVQARGVDLRYEILSPVPSPLFSIGRADGVVRTTTPLELARTSGTAVSRLQVKAFEQGQLWASAKLNLTMNVQLVNLWPPRCLPALLVSQIPETAPVGTVLNTLTCEDPDSVGATLDYKLWFRSSSNPASLCLYDRVLEVNATLDCDTPGACFQHAASILVLDGGQPQMTTEVPVLVMVTPINEFSPACAPRTFRVQEDAAPHTLLGSVVGTDMDYPHDNIEYYTSGGPTTFAVDRLSGEVHLLGPLDYEQQRLYRLTVLVIDHGQDQNPNHHLSGSCTITIEVEDVNDHAPECEPPFQELTIYAPLGRSVEVTKMSCQIPQEPQRLIYSYSIVGGNSQNRFILQGAILVHSDLVLGPFWPEQPRTYELLICVADAGPSTPHLSTTATIIVHLVPRRASTVATSTHRTTVPSTMTPMLVTDTEAFWQPQP

SEQ ID NO: 2213 - protein, 669 aa, synthetic construct
  REGION 1..669: note = CDHR5 (Q9HBB8) SP+PP+ECD
MGSWALLWPPLLFTGLLVRPPGTMAQAQYCSVNKDIFEVEENTNVTEPLVDIHVPEGQEVTLGALSTPFAFRIQGNQLFLNVTPDYEEKSLLEAQLLCQSGGTLVTQLRVFVSVLDVNDNAPEFPFKTKEIRVEEDTKVNSTVIPETQLQAEDRDKDDILFYTLQEMTAGASDYFSLVSVNRPALRLDRPLDFYERPNMTFWLLVRDTPGENVEPSHTATATLVLNVVPADLRPPWFLPCTFSDGYVCIQAQYHGAVPTGHILPSPLVLRPGPIYAEDGDRGINQPIIYSIFRGNVNGTFIIHPDSGNLTVARSVPSPMTFLLLVKGQQADLARYSVTQVTVEAVAAAGSPPRFPQRLYRGTVARGAGAGVVVKDAAAPSQPLRIQAQDPEFSDLNSAITYRITNHSHFRMEGEVVLTTTTLAQAGAFYAEVEAHNTVTSGTATTVIEIQVSEQEPPSTDVPPSPEAGGTTGPWTSTTSEVPRPPEPSQGPSTTSSGGGTGPHPPSGTTLRPPTSSTPGGPPGAENSTSHQPATPGGDTAQTPKPGTSQPMPPGVGTSTSHQPATPSGGTAQTPEPGTSQPMPPSMGTSTSHQPATPGGGTAQTPEAGTSQPMPPGMGTSTSHQPTTPGGGTAQTPEPGTSQPMPLSKSTPSSGGGPSEDKRFSVVDMA

SEQ ID NO: 2214 - protein, 963 aa, synthetic construct
  REGION 1..963: note = CDON (Q4KMG0) SP+PP+ECD
MHPDLGPLCTLLYVTLTILCSSVSSDLAPYFTSEPLSAVQKLGGPVVLHCSAQPVTTRISWLHNGKTLDGNLEHVKIHQGTLTILSLNSSLLGYYQCLANNSIGAIVSGPATVSVAVLGDFGSSTKHVITAEEKSAGFIGCRVPESNPKAEVRYKIRGKWLEHSTENYLILPSGNLQILNVSLEDKGSYKCAAYNPVTHQLKVEPIGRKLLVSRPSSDDVHILHPTHSQALAVLSRSPVTLECVVSGVPAPQVYWLKDGQDIAPGSNWRRLYSHLATDSVDPADSGNYSCMAGNKSGDVKYVTYMVNVLEHASISKGLQDQIVSLGATVHFTCDVHGNPAPNCTWFHNAQPIHPSARHLTAGNGLKISGVTVEDVGMYQCVADNGIGFMHSTGRLEIENDGGFKPVIITAPVSAKVADGDFVTLSCNASGLPVPVIRWYDSHGLITSHPSQVLRSKSRKSQLSRPEGLNLEPVYFVLSQAGASSLHIQAVTQEHAGKYICEAANEHGTTQAEASLMVVPFETNTKAETVTLPDAAQNDDRSKRDGSETGLLSSFPVKVHPSAVESAPEKNASGISVPDAPIILSPPQTHTPDTYNLVWRAGKDGGLPINAYFVKYRKLDDGVGMLGSWHTVRVPGSENELHLAELEPSSLYEVLMVARSAAGEGQPAMLTFRTSKEKTASSKNTQASSPPVGIPKYPVVSEAANNNFGVVLTDSSRHSGVPEAPDRPTISTASETSVYVTWIPRANGGSPITAFKVEYKRMRTSNWLVAAEDIPPSKLSVEVRSLEPGSTYKFRVIAINHYGESFRSSASRPYQVVGFPNRFSSRPITGPHIAYTEAVSDTQIMLKWTYIPSSNNNTPIQGFYIYYRPTDSDNDSDYKRDVVEGSKQWHMIGHLQPETSYDIKMQCFNEGGESEFSNVMICETKVKRVPGASEYPVKDLSTPPNSLGSGGNVGPATSPARSSD

SEQ ID NO: 2215 - protein, 428 aa, synthetic construct
  REGION 1..428: note = CEACAM1 (P13688) SP+PP+ECD
MGHLSAPLHRVRVPWQGLLLTASLLTFWNPPTTAQLTTESMPFNVAEGKEVLLLVHNLPQQLFGYSWYKGERVDGNRQIVGYAIGTQQATPGPANSGRETIYPNASLLIQNVTQNDTGFYTLQVIKSDLVNEEATGQFHVYPELPKPSISSNNSNPVEDKDAVAFTCEPETQDTTYLWWINNQSLPVSPRLQLSNGNRTLTLLSVTRNDTGPYECEIQNPVSANRSDPVTLNVTYGPDTPTISPSDTYYRPGANLSLSCYAASNPPAQYSWLINGTFQQSTQELFIPNITVNNSGSYTCHANNSVTGCNRTTVKTIIVTELSPVVAKPQIKASKTTVTGDKDSVNLTCSTNDTGISIRWFFKNQSLPSSERMKLSQGNTTLSINPVKREDAGTYWCEVFNPISKNQSDPIMLNVNYNALPQENGLSPG

SEQ ID NO: 2216 - protein, 157 aa, synthetic construct
  REGION 1..157: note = CEACAM19 (Q7Z692) SP+PP+ECD
MEIPMGTQGCFSKSLLLSASILVLWMLQGSQAALYIQKIPEQPQKNQDLLLSVQGVPDTFQDFNWYLGEETYGGTRLFTYIPGIQRPQRDGSAMGQRDIVGFPNGSMLLRRAQPTDSGTYQVAITINSEWTMKAKTEVQVAEKNKELPSTHLPTNAG

SEQ ID NO: 2217 - protein, 450 aa, synthetic construct
  REGION 1..450: note = CEACAM20 (Q6UY09) SP+PP+ECD
MGPADSWGHHWMGILLSASLCTVWSPPAAAQLTLNANPLDATQSEDVVLPVFGTPRTPQIHGRSRELAKPSIAVSPGTAIEQKDMVTFYCTTKDVNITIHWVSNNLSIVFHERMQLSKDGKILTILIVQREDSGTYQCEARDALLSQRSDPIFLDVKYGPDPVEIKLESGVASGEVVEVMEGSSMTFLAETKSHPPCAYTWFLLDSILSHTTRTFTIHAVSREHEGLYRCLVSNSATHLSSLGTLKVRVLETLTMPQVVPSSLNLVENARSVDLTCQTVNQSVNVQWFLSGQPLLPSEHLQLSADNRTLIIHGLQRNDTGPYACEVWNWGSRARSEPLELTINYGPDQVHITRESASEMISTIEAELNSSLTLQCWAESKPGAEYRWTLEHSTGEHLGEQLIIRALTWEHDGIYNCTASNSLTGLARSTSVLVKVVGPQSSSLSSGAIAG

SEQ ID NO: 2218 - protein, 240 aa, synthetic construct
  REGION 1..240: note = CEACAM21 (Q3KPI0) SP+PP+ECD
MGPPSACPHRECIPWQGLLLTASLLTFWNAPTTAWLFIASAPFEVAEGENVHLSVVYLPENLYSYGWYKGKTVEPNQLIAAYVIDTHVRTPGPAYSGRETISPSGDLHFQNVTLEDTGYYTLQVTYRNSQIEQASHHLRVYESVAQPSIQASSTTVTEKGSVVLTCHTNNTGTSFQWIFNNQRLQVTKRMKLSWFNHMLTIDPIRQEDAGEYQCEVSNPVSSNRSDPLKLTVKSDDNTLG

SEQ ID NO: 2219 - protein, 155 aa, synthetic construct
  REGION 1..155: note = CEACAM3 (P40198) SP+PP+ECD
MGPPSASPHRECIPWQGLLLTASLLNFWNPPTTAKLTIESMPLSVAEGKEVLLLVHNLPQHLFGYSWYKGERVDGNSLIVGYVIGTQQATPGAAYSGRETIYTNASLLIQNVTQNDIGFYTLQVIKSDLVNEEATGQFHVYQENAPGLPVGAVAG

SEQ ID NO: 2220 - protein, 155 aa, synthetic construct
  REGION 1..155: note = CEACAM4 (O75871) SP+PP+ECD
MGPPSAAPRGGHRPWQGLLITASLLTFWHPPTTVQFTIEALPSSAAEGKDVLLLACNISETIQAYYWHKGKTAEGSPLIAGYITDIQANIPGAAYSGRETVYPNGSLLFQNITLEDAGSYTLRTINASYDSDQATGQLHVHQNNVPGLPVGAVAG

SEQ ID NO: 2221 - protein, 1082 aa, synthetic construct
  REGION 1..1082: note = CHL1 (O00533) SP+PP+ECD
MEPLLLGRGLIVYLMFLLLKFSKAIEIPSSVQQVPTIIKQSKVQVAFPFDEYFQIECEAKGNPEPTFSWTKDGNPFYFTDHRIIPSNNSGTFRIPNEGHISHFQGKYRCFASNKLGIAMSEEIEFIVPSVPKFPKEKIDPLEVEEGDPIVLPCNPPKGLPPLHIYWMNIELEHIEQDERVYMSQKGDLYFANVEEKDSRNDYCCFAAFPRLRTIVQKMPMKLTVNSSNSIKQRKPKLLLPPTESGSESSITILKGEILLLECFAEGLPTPQVDWNKIGGDLPKGRETKENYGKTLKIENVSYQDKGNYRCTASNFLGTATHDFHVIVEEPPRWTKKPQSAVYSTGSNGILLCEAEGEPQPTIKWRVNGSPVDNHPFAGDVVFPREISFTNLQPNHTAVYQCEASNVHGTILANANIDVVDVRPLIQTKDGENYATVVGYSAFLHCEFFASPEAVVSWQKVEEVKPLEGRRYHIYENGTLQINRTTEEDAGSYSCWVENAIGKTAVTANLDIRNATKLRVSPKNPRIPKLHMLELHCESKCDSHLKHSLKLSWSKDGEAFEINGTEDGRIIIDGANLTISNVTLEDQGIYCCSAHTALDSAADITQVTVLDVPDPPENLHLSERQNRSVRLTWEAGADHNSNISEYIVEFEGNKEEPGRWEELTRVQGKKTTVILPLAPFVRYQFRVIAVNEVGRSQPSQPSDHHETPPAAPDRNPQNIRVQASQPKEMIIKWEPLKSMEQNGPGLEYRVTWKPQGAPVEWEEETVTNHTLRVMTPAVYAPYDVKVQAINQLGSGPDPQSVTLYSGEDYPDTAPVIHGVDVINSTLVKVTWSTVPKDRVHGRLKGYQINWWKTKSLLDGRTHPKEVNILRFSGQRNSGMVPSLDAFSEFHLTVLAYNSKGAGPESEPYIFQTPEGVPEQPTFLKVIKVDKDTATLSWGLPKKLNGNLTGYLLQYQIINDTYEIGELNDINITTPSKPSWHLSNLNATTKYKFYLRACTSQGCGKPITEESSTLGEGSKGIGKISGVNLTQKTHPIEVFEPGAEHIVRLMTKNWGDNDSIFQDVIETRGREYAGLYDDISTQGW

SEQ ID NO: 2222 - protein, 216 aa, synthetic construct
  REGION 1..216: note = CHODL (Q9H9P2) SP+PP+ECD
MSRVVSLLLGAALLCGHGAFCRRVVSGQKVCFADFKHPCYKMAYFHELSSRVSFQEARLACESEGGVLLSLENEAEQKLIESMLQNLTKPGTGISDGDFWIGLWRNGDGQTSGACPDLYQWSDGSNSQYRNWYTDEPSCGSEKCVVMYHQPTANPGLGGPYLYQWNDDRCNMKHNYICKYEPEINPTAPVEKPYLTNQPGDTHQNVVVTEAGIIPN

SEQ ID NO: 2223 - protein, 901 aa, synthetic construct
  REGION 1..901: note = CLCA2 (Q9UQC9) SP+PP+ECD
MTQRSIAGPICNLKFVTLLVALSSELPFLGAGVQLQDNGYNGLLIAINPQVPENQNLISNIKEMITEASFYLFNATKRRVFFRNIKILIPATWKANNNSKIKQESYEKANVIVTDWYGAHGDDPYTLQYRGCGKEGKYIHFTPNFLLNDNLTAGYGSRGRVFVHEWAHLRWGVFDEYNNDKPFYINGQNQIKVTRCSSDITGIFVCEKGPCPQENCIISKLFKEGCTFIYNSTQNATASIMFMQSLSSVVEFCNASTHNQEAPNLQNQMCSLRSAWDVITDSADFHHSFPMNGTELPPPPTFSLVQAGDKVVCLVLDVSSKMAEADRLLQLQQAAEFYLMQIVEIHTFVGIASFDSKGEIRAQLHQINSNDDRKLLVSYLPTTVSAKTDISICSGLKKGFEVVEKLNGKAYGSVMILVTSGDDKLLGNCLPTVLSSGSTIHSIALGSSAAPNLEELSRLTGGLKFFVPDISNSNSMIDAFSRISSGTGDIFQQHIQLESTGENVKPHHQLKNTVTVDNTVGNDTMFLVTWQASGPPEIILFDPDGRKYYTNNFITNLTFRTASLWIPGTAKPGHWTYTLNNTHHSLQALKVTVTSRASNSAVPPATVEAFVERDSLHFPHPVMIYANVKQGFYPILNATVTATVEPETGDPVTLRLLDDGAGADVIKNDGIYSRYFFSFAANGRYSLKVHVNHSPSISTPAHSIPGSHAMYVPGYTANGNIQMNAPRKSVGRNEEERKWGFSRVSSGGSFSVLGVPAGPHPDVFPPCKIIDLEAVKVEEELTLSWTAPGEDFDQGQATSYEIRMSKSLQNIQDDFNNAILVNTSKRNPQQAGIREIFTFSPQISTNGPEHQPNGETHESHRIYVAIRAMDRNSLQSAVSNIAQAPLFIPPNSDPVPARDYL

SEQ ID NO: 2224 - protein, 894 aa, synthetic construct
  REGION 1..894: note = CLCA4 (Q14CN2) SP+PP+ECD
MGLFRGFVFLLVLCLLHQSNTSFIKLNNNGFEDIVIVIDPSVPEDEKIIEQIEDMVTTASTYLFEATEKRFFFKNVSILIPENWKENPQYKRPKHENHKHADVIVAPPTLPGRDEPYTKQFTECGEKGEYIHFTPDLLLGKKQNEYGPPGKLFVHEWAHLRWGVFDEYNEDQPFYRAKSKKIEATRCSAGISGRNRVYKCQGGSCLSRACRIDSTTKLYGKDCQFFPDKVQTEKASIMFMQSIDSVVEFCNEKTHNQEAPSLQNIKCNFRSTWEVISNSEDFKNTIPMVTPPPPPVFSLLKISQRIVCLVLDKSGSMGGKDRLNRMNQAAKHFLLQTVENGSWVGMVHFDSTATIVNKLIQIKSSDERNTLMAGLPTYPLGGTSICSGIKYAFQVIGELHSQLDGSEVLLLTDGEDNTASSCIDEVKQSGAIVHFIALGRAADEAVIEMSKITGGSHFYVSDEAQNNGLIDAFGALTSGNTDLSQKSLQLESKGLTLNSNAWMNDTVIIDSTVGKDTFFLITWNSLPPSISLWDPSGTIMENFTVDATSKMAYLSIPGTAKVGTWAYNLQAKANPETLTITVTSRAANSSVPPITVNAKMNKDVNSFPSPMIVYAEILQGYVPVLGANVTAFIESQNGHTEVLELLDNGAGADSFKNDGVYSRYFTAYTENGRYSLKVRAHGGANTARLKLRPPLNRAAYIPGWVVNGEIEANPPRPEIDEDTQTTLEDFSRTASGGAFVVSQVPSLPLPDQYPPSQITDLDATVHEDKIILTWTAPGDNFDVGKVQRYIIRISASILDLRDSFDDALQVNTTDLSPKEANSKESFAFKPENISEENATHIFIAIKSIDKSNLTSKVSNIAQVTLFIPQANPDDIDPTPTPTPTPTPDKSHNSG

SEQ ID NO: 2225 - protein, 397 aa, synthetic construct
  REGION 1..397: note = CLEC14A (Q86T13) SP+PP+ECD
MRPAFALCLLWQALWPGPGGGEHPTADRAGCSASGACYSLHHATMKRQAAEEACILRGGALSTVRAGAELRAVLALLRAGPGPGGGSKDLLFWVALERRRSHCTLENEPLRGFSWLSSDPGGLESDTLQWVEEPQRSCTARRCAVLQATGGVEPAGWKEMRCHLRANGYLCKYQFEVLCPAPRPGAASNLSYRAPFQLHSAALDFSPPGTEVSALCRGQLPISVTCIADEIGARWDKLSGDVLCPCPGRYLRAGKCAELPNCLDDLGGFACECATGFELGKDGRSCVTSGEGQPTLGGTGVPTRRPPATATSPVPQRTWPIRVDEKLGETPLVPEQDNSVTSIPEIPRWGSQSTMSTLQMSLQAESKATITPSGSVISKFNSTTSSATPQAFDSSSA

SEQ ID NO: 2226 - protein, 235 aa, synthetic construct
  REGION 1..235: note = CLMP (Q9H6B4) SP+PP+ECD
MSLLLLLLLVSYYVGTLGTHTEIKRVAEEKVTLPCHHQLGLPEKDTLDIEWLLTDNEGNQKVVITYSSRHVYNNLTEEQKGRVAFASNFLAGDASLQIEPLKPSDEGRYTCKVKNSGRYVWSHVILKVLVRPSKPKCELEGELTEGSDLTLQCESSSGTEPIVYYWQRIREKEGEDERLPPKSRIDYNHPGRVLLQNLTMSYSGLYQCTAGNEAGKESCVVRVTVQYVQSIGMVA

SEQ ID NO: 2227 - protein, 859 aa, synthetic construct
  REGION 1..859: note = CLSTN1 (O94985) SP+PP+ECD
MLRRPAPALAPAARLLLAGLLCGGGVWAARVNKHKPWLEPTYHGIVTENDNTVLLDPPLIALDKDAPLRFAESFEVTVTKEGEICGFKIHGQNVPFDAVVVDKSTGEGVIRSKEKLDCELQKDYSFTIQAYDCGKGPDGTNVKKSHKATVHIQVNDVNEYAPVFKEKSYKATVIEGKQYDSILRVEAVDADCSPQFSQICSYEIITPDVPFTVDKDGYIKNTEKLNYGKEHQYKLTVTAYDCGKKRATEDVLVKISIKPTCTPGWQGWNNRIEYEPGTGALAVFPNIHLETCDEPVASVQATVELETSHIGKGCDRDTYSEKSLHRLCGAAAGTAELLPSPSGSLNWTMGLPTDNGHDSDQVFEFNGTQAVRIPDGVVSVSPKEPFTISVWMRHGPFGRKKETILCSSDKTDMNRHHYSLYVHGCRLIFLFRQDPSEEKKYRPAEFHWKLNQVCDEEWHHYVLNVEFPSVTLYVDGTSHEPFSVTEDYPLHPSKIETQLVVGACWQEFSGVENDNETEPVTVASAGGDLHMTQFFRGNLAGLTLRSGKLADKKVIDCLYTCKEGLDLQVLEDSGRGVQIQAHPSQLVLTLEGEDLGELDKAMQHISYLNSRQFPTPGIRRLKITSTIKCFNEATCISVPPVDGYVMVLQPEEPKISLSGVHHFARAASEFESSEGVFLFPELRIISTITREVEPEGDGAEDPTVQESLVSEEIVHDLDTCEVTVEGEELNHEQESLEVDMARLQQKGIEVSSSELGMTFTGVDTMASYEEVLHLLRYRNWHARSLLDRKFKLICSELNGRYISNEFKVEVNVIHTANPMEHANHMAAQPQFVHPEHRSFVDLSGHNLANPHPFAVVPST

SEQ ID NO: 2228 - protein, 831 aa, synthetic construct
  REGION 1..831: note = CLSTN2 (Q9H4D0) SP+PP+ECD
MLPGRLCWVPLLLALGVGSGSGGGGDSRQRRLLAAKVNKHKPWIETSYHGVITENNDTVILDPPLVALDKDAPVPFAGEICAFKIHGQELPFEAVVLNKTSGEGRLRAKSPIDCELQKEYTFIIQAYDCGAGPHETAWKKSHKAVVHIQVKDVNEFAPTFKEPAYKAVVTEGKIYDSILQVEAIDEDCSPQYSQICNYEIVTTDVPFAIDRNGNIRNTEKLSYDKQHQYEILVTAYDCGQKPAAQDTLVQVDVKPVCKPGWQDWTKRIEYQPGSGSMPLFPSIHLETCDGAVSSLQIVTELQTNYIGKGCDRETYSEKSLQKLCGASSGIIDLLPSPSAATNWTAGLLVDSSEMIFKFDGRQGAKVPDGIVPKNLTDQFTITMWMKHGPSPGVRAEKETILCNSDKTEMNRHHYALYVHNCRLVFLLRKDFDQADTFRPAEFHWKLDQICDKEWHYYVINVEFPVVTLYMDGATYEPYLVTNDWPIHPSHIAMQLTVGACWQGGEVTKPQFAQFFHGSLASLTIRPGKMESQKVISCLQACKEGLDINSLESLGQGIKYHFNPSQSILVMEGDDIGNINRALQKVSYINSRQFPTAGVRRLKVSSKVQCFGEDVCISIPEVDAYVMVLQAIEPRITLRGTDHFWRPAAQFESARGVTLFPDIKIVSTFAKTEAPGDVKTTDPKSEVLEEMLHNLDFCDILVIGGDLDPRQECLELNHSELHQRHLDATNSTAGYSIYGVGSMSRYEQVLHHIRYRNWRPASLEARRFRIKCSELNGRYTSNEFNLEVSILHEDQVSDKEHVNHLIVQPPFLQSVHHPESRSSIQHSSVVPS

SEQ ID NO: 2229 - protein, 847 aa, synthetic construct
  REGION 1..847: note = CLSTN3 (Q9BQT9) SP+PP+ECD
MTLLLLPLLLASLLASCSCNKANKHKPWIEAEYQGIVMENDNTVLLNPPLFALDKDAPLRYAGEICGFRLHGSGVPFEAVILDKATGEGLIRAKEPVDCEAQKEHTFTIQAYDCGEGPDGANTKKSHKATVHVRVNDVNEFAPVFVERLYRAAVTEGKLYDRILRVEAIDGDCSPQYSQICYYEILTPNTPFLIDNDGNIENTEKLQYSGERLYKFTVTAYDCGKKRAADDAEVEIQVKPTCKPSWQGWNKRIEYAPGAGSLALFPGIRLETCDEPLWNIQATIELQTSHVAKGCDRDNYSERALRKLCGAATGEVDLLPMPGPNANWTAGLSVHYSQDSSLIYWFNGTQAVQVPLGGPSGLGSGPQDSLSDHFTLSFWMKHGVTPNKGKKEEETIVCNTVQNEDGFSHYSLTVHGCRIAFLYWPLLESARPVKFLWKLEQVCDDEWHHYALNLEFPTVTLYTDGISFDPALIHDNGLIHPPRREPALMIGACWTEEKNKEKEKGDNSTDTTQGDPLSIHHYFHGYLAGFSVRSGRLESREVIECLYACREGLDYRDFESLGKGMKVHVNPSQSLLTLEGDDVETFNHALQHVAYMNTLRFATPGVRPLRLTTAVKCFSEESCVSIPEVEGYVVVLQPDAPQILLSGTAHFARPAVDFEGTNGVPLFPDLQITCSISHQVEAKKDESWQGTVTDTRMSDEIVHNLDGCEISLVGDDLDPERESLLLDTTSLQQRGLELTNTSAYLTIAGVESITVYEEILRQARYRLRHGAALYTRKFRLSCSEMNGRYSSNEFIVEVNVLHSMNRVAHPSHVLSSQQFLHRGHQPPPEMAGHSLASSHRNSMIPSA

SEQ ID NO: 2230 - protein, 1283 aa, synthetic construct
  REGION 1..1283: note = CNTNAP1 (P78357) SP+PP+ECD
MMHLRLFCILLAAVSGAEGWGYYGCDEELVGPLYARSLGASSYYSLLTAPRFARLHGISGWSPRIGDPNPWLQIDLMKKHRIRAVATQGSFNSWDWVTRYMLLYGDRVDSWTPFYQRGHNSTFFGNVNESAVVRHDLHFHFTARYIRIVPLAWNPRGKIGLRLGLYGCPYKADILYFDGDDAISYRFPRGVSRSLWDVFAFSFKTEEKDGLLLHAEGAQGDYVTLELEGAHLLLHMSLGSSPIQPRPGHTTVSAGGVLNDQHWHYVRVDRFGRDVNFTLDGYVQRFILNGDFERLNLDTEMFIGGLVGAARKNLAYRHNFRGCIENVIFNRVNIADLAVRRHSRITFEGKVAFRCLDPVPHPINFGGPHNFVQVPGFPRRGRLAVSFRFRTWDLTGLLLFSRLGDGLGHVELTLSEGQVNVSIAQSGRKKLQFAAGYRLNDGFWHEVNFVAQENHAVISIDDVEGAEVRVSYPLLIRTGTSYFFGGCPKPASRWDCHSNQTAFHGCMELLKVDGQLVNLTLVEGRRLGFYAEVLFDTCGITDRCSPNMCEHDGRCYQSWDDFICYCELTGYKGETCHTPLYKESCEAYRLSGKTSGNFTIDPDGSGPLKPFVVYCDIRENRAWTVVRHDRLWTTRVTGSSMERPFLGAIQYWNASWEEVSALANASQHCEQWIEFSCYNSRLLNTAGGYPYSFWIGRNEEQHFYWGGSQPGIQRCACGLDRSCVDPALYCNCDADQPQWRTDKGLLTFVDHLPVTQVVIGDTNRSTSEAQFFLRPLRCYGDRNSWNTISFHTGAALRFPPIRANHSLDVSFYFRTSAPSGVFLENMGGPYCQWRRPYVRVELNTSRDVVFAFDVGNGDENLTVHSDDFEFNDDEWHLVRAEINVKQARLRVDHRPWVLRPMPLQTYIWMEYDQPLYVGSAELKRRPFVGCLRAMRLNGVTLNLEGRANASEGTSPNCTGHCAHPRLPCFHGGRCVERYSYYTCDCDLTAFDGPYCNHDIGGFFEPGTWMRYNLQSALRSAAREFSHMLSRPVPGYEPGYIPGYDTPGYVPGYHGPGYRLPDYPRPGRPVPGYRGPVYNVTGEEVSFSFSTSSAPAVLLYVSSFVRDYMAVLIKDDGTLQLRYQLGTSPYVYQLTTRPVTDGQPHSINITRVYRNLFIQVDYFPLTEQKFSLLVDSQLDSPKALYLGRVMETGVIDPEIQRYNTPGFSGCLSGVRFNNVAPLKTHFRTPRPMTAELAEALRVQGELSESNCGAMPRLVSEVPPELDPWYLPPDFPYYHDEGWVA

SEQ ID NO: 2231 - protein, 1262 aa, synthetic construct
  REGION 1..1262: note = CNTNAP2 (Q9UHC6) SP+PP+ECD
MQAAPRAGCGAALLLWIVSSCLCRAWTAPSTSQKCDEPLVSGLPHVAFSSSSSISGSYSPGYAKINKRGGAGGWSPSDSDHYQWLQVDFGNRKQISAIATQGRYSSSDWVTQYRMLYSDTGRNWKPYHQDGNIWAFPGNINSDGVVRHELQHPIIARYVRIVPLDWNGEGRIGLRIEVYGCSYWADVINFDGHVVLPYRFRNKKMKTLKDVIALNFKTSESEGVILHGEGQQGDYITLELKKAKLVLSLNLGSNQLGPIYGHTSVMTGSLLDDHHWHSVVIERQGRSINLTLDRSMQHFRTNGEFDYLDLDYEITFGGIPFSGKPSSSSRKNFKGCMESINYNGVNITDLARRKKLEPSNVGNLSFSCVEPYTVPVFFNATSYLEVPGRLNQDLFSVSFQFRTWNPNGLLVFSHFADNLGNVEIDLTESKVGVHINITQTKMSQIDISSGSGLNDGQWHEVRFLAKENFAILTIDGDEASAVRTNSPLQVKTGEKYFFGGFLNQMNNSSHSVLQPSFQGCMQLIQVDDQLVNLYEVAQRKPGSFANVSIDMCAIIDRCVPNHCEHGGKCSQTWDSFKCTCDETGYSGATCHNSIYEPSCEAYKHLGQTSNYYWIDPDGSGPLGPLKVYCNMTEDKVWTIVSHDLQMQTPVVGYNPEKYSVTQLVYSASMDQISAITDSAEYCEQYVSYFCKMSRLLNTPDGSPYTWWVGKANEKHYYWGGSGPGIQKCACGIERNCTDPKYYCNCDADYKQWRKDAGFLSYKDHLPVSQVVVGDTDRQGSEAKLSVGPLRCQGDRNYWNAASFPNPSSYLHFSTFQGETSADISFYFKTLTPWGVFLENMGKEDFIKLELKSATEVSFSFDVGNGPVEIVVRSPTPLNDDQWHRVTAERNVKQASLQVDRLPQQIRKAPTEGHTRLELYSQLFVGGAGGQQGFLGCIRSLRMNGVTLDLEERAKVTSGFISGCSGHCTSYGTNCENGGKCLERYHGYSCDCSNTAYDGTFCNKDVGAFFEEGMWLRYNFQAPATNARDSSSRVDNAPDQQNSHPDLAQEEIRFSFSTTKAPCILLYISSFTTDFLAVLVKPTGSLQIRYNLGGTREPYNIDVDHRNMANGQPHSVNITRHEKTIFLKLDHYPSVSYHLPSSSDTLFNSPKSLFLGKVIETGKIDQEIHKYNTPGFTGCLSRVQFNQIAPLKAALRQTNASAHVHIQGELVESNCGASPLTLSPMSSATDPWHLDHLDSASADFPYNPGQGQAIRNGVNRNSA

SEQ ID NO: 2232 - protein, 1245 aa, synthetic construct
  REGION 1..1245: note = CNTNAP3 (Q9BZ76) SP+PP+ECD
MASVAWAVLKVLLLLPTQTWSPVGAGNPPDCDAPLASALPRSSFSSSSELSSSHGPGFSRLNRRDGAGGWTPLVSNKYQWLQIDLGERMEVTAVATQGGYGSSDWVTSYLLMFSDGGRNWKQYRREESIWGFPGNTNADSVVHYRLQPPFEARFLRFLPLAWNPRGRIGMRIEVYGCAYKSEVVYFDGQSALLYRLDKKPLKPIRDVISLKFKAMQSNGILLHREGQHGNHITLELIKGKLVFFLNSGNAKLPSTIAPVTLTLGSLLDDQHWHSVLIELLDTQVNFTVDKHTHHFQAKGDSSYLDLNFEISFGGIPTPGRSRAFRRKSFHGCLENLYYNGVDVTELAKKHKPQILMMGNVSFSCPQPQTVPVTFLSSRSYLALPGNSGEDKVSVTFQFRTWNRAGHLLFGELRRGSGSFVLFLKDGKLKLSLFQPGQSPRNVTAGAGLNDGQWHSVSFSAKWSHMNVVVDDDTAVQPLVAVLIDSGDTYYFGGCLDNSSGSGCKSPLGGFQGCLRLITIGDKAVDPILVQQGALGSFRDLQIDSCGITDRCLPSYCEHGGECSQSWDTFSCDCLGTGYTGETCHSSLYEQSCEAHKHRGNPSGLYYIDADGSGPLGPFLVYCNMTADAAWTVVQHGGPDAVTLRGAPSGHPRSAVSFAYAAGAGQLRSAVNLAERCEQRLALRCGTARRPDSRDGTPLSWWVGRTNETHTSWGGSLPDAQKCTCGLEGNCIDSQYYCNCDAGRNEWTSDTIVLSQKEHLPVTQIVMTDAGRPHSEAAYTLGPLLCRGDQSFWNSASFNTETSYLHFPAFHGELTADVCFFFKTTVSSGVFMENLGITDFIRIELRAPTEVTFSFDVGNGPCEVTVQSPTPFNDNQWHHVRAERNVKGASLQVDQLPQKMQPAPADGHVRLQLNSQLFIGGTATRQRGFLGCIRSLQLNGVALDLEERATVTPGVEPGCAGHCSTYGHLCRNGGRCREKRRGVTCDCAFSAYDGPFCSNEISAYFATGSSMTYHFQEHYTLSENSSSLVSSLHRDVTLTREMITLSFRTTRTPSLLLYVSSFYEEYLSVILANNGSLQIRYKLDRHQNPDAFTFDFKNMADGQLHQVKINREEAVVMVEVNQSTKKQVILSSGTEFNAVKSLILGKVLEAAGADPDTRRAATSGFTGCLSAVRFGRAAPLKAALRPSGPSRVTVRGHVAPMARCAAGAASGSPARELAPRLAGGAGRSGPADEGEPLVNADRRDSA

SEQ ID NO: 2233 - protein, 1245 aa, synthetic construct
  REGION 1..1245: note = CNTNAP3B (Q96NU0) SP+PP+ECD
MASVAWAVLKVLLLLPTQTWSPVGAGNPPDCDSPLASALPRSSFSSSSELSSSHGPGFSRLNRRDGAGGWTPLVSNKYQWLQIDLGERMEVTAVATQGGYGSSDWVTSYLLMFSDGGRNWKQYRREESIWGFPGNTNADSVVHYRLQPPFEARFLRFLPLAWNPRGRIGMRIEVYGCAYKSEVVYFDGQSALLYTLDKKPLKPIRDVISLKFKAMQSNGILLHREGQHGNHITLELIKGKLVFFLNSGNAKLPSTIAPVTLTLGSLLDDQHWHSVLIELLDTQVNFTVDKHTHHFQAKGDSSNLDLNFEISFGGILSPGRSRAFTRKSFHGCLENLYYNGVDVTELAKKHKPQILMMGNVSFSCPQPQTVPVTFLSSRSYLALPGNSGEDKVSVTFQFRTWNRAGHLLFGELQRGSGSFVLFLKDGKLKLSLFQAGQSPRNVTAGAGLNDGQWHSVSFSAKWSHMNVVVDDDTAVQPLVAVLIDSGDTYYFGGCLGNSSGSGCKSPLGGFQGCLRLITIGDKAVDPILVQQGALGSFRDLQIDSCGITDRCLPSYCEHGGECSQSWDTFSCDCLGTGYTGETCHSSLYEQSCEAHKHRGNPSGLYYIDADGSGPLGPFLVYCNMTADSAWTVVRHGGPDAVTLRGAPSGHPLSAVSFAYAAGAGQLRAAVNLAERCEQRLALRCGTARRPDSRDGTPLSWWVGRTNETHTSWGGSLPDAQKCTCGLEGNCIDSQYYCNCDAGQNEWTSDTIVLSQKEHLPVTQIVMTDTGQPHSEADYTLGPLLCRGDKSFWNSASFNTETSYLHFPAFHGELTADVCFFFKTTVSSGVFMENLGITDFIRIELRAPTEVTFSFDVGNGPCEVTVQSPTPFNDNQWHHVRAERNVKGASLQVDQLPQKMQPAPADGHVRLQLNSQLFIGGTATRQRGFLGCIRSLQLNGVALDLEERATVTPGVEPGCAGHCSTYGHLCRNGGRCREKRRGVTCDCAFSAYDGPFCSNEISAYFATGSSMTYHFQEHYTLSENSSSLVSSLHRDVTLTREMITLSFRTTRTPSLLLYVSSFYEEYLSVILANNGSLQIRYKLDRHQNPDAFTFDFKNMADGQLHQVKINREEAVVMVEVNQSAKKQVILSSGTEFNAVKSLILGKVLEAAGADPDTRRAATSGFTGCLSAVRFGCAAPLKAALRPSGPSRVTVRGHVAPMARCAAGAASGSPARELAPRLAGGAGRSGPVDEGEPLVNADRRDSA

SEQ ID NO: 2234 - protein, 1241 aa, synthetic construct
  REGION 1..1241: note = CNTNAP4 (Q9C0A0) SP+PP+ECD
MGSVTGAVLKTLLLLSTQNWNRVEAGNSYDCDDPLVSALPQASFSSSSELSSSHGPGFARLNRRDGAGGWSPLVSNKYQWLQIDLGERMEVTAVATQGGYGSSNWVTSYLLMFSDSGWNWKQYRQEDSIWGFSGNANADSVVYYRLQPSIKARFLRFIPLEWNPKGRIGMRIEVFGCAYRSEVVDLDGKSSLLYRFDQKSLSPIKDIISLKFKTMQSDGILLHREGPNGDHITLQLRRARLFLLINSGEAKLPSTSTLVNLTLGSLLDDQHWHSVLIQRLGKQVNFTVDEHRHHFHARGEFNLMNLDYEISFGGIPAPGKSVSFPHRNFHGCLENLYYNGVDIIDLAKQQKPQIIAMGNVSFSCSQPQSMPVTFLSSRSYLALPDFSGEEEVSATFQFRTWNKAGLLLFSELQLISGGILLFLSDGKLKSNLYQPGKLPSDITAGVELNDGQWHSVSLSAKKNHLSVAVDGQMASAAPLLGPEQIYSGGTYYFGGCPDKSFGSKCKSPLGGFQGCMRLISISGKVVDLISVQQGSLGNFSDLQIDSCGISDRCLPNYCEHGGECSQSWSTFHCNCTNTGYRGATCHNSIYEQSCEAYKHRGNTSGFYYIDSDGSGPLEPFLLYCNMTETAWTIIQHNGSDLTRVRNTNPENPYAGFFEYVASMEQLQATINRAEHCEQEFTYYCKKSRLVNKQDGTPLSWWVGRTNETQTYWGGSSPDLQKCTCGLEGNCIDSQYYCNCDADRNEWTNDTGLLAYKEHLPVTKIVITDTGRLHSEAAYKLGPLLCQGDRSFWNSASFDTEASYLHFPTFHGELSADVSFFFKTTASSGVFLENLGIADFIRIELRSPTVVTFSFDVGNGPFEISVQSPTHFNDNQWHHVRVERNMKEASLQVDQLTPKTQPAPADGHVLLQLNSQLFVGGTATRQRGFLGCIRSLQLNGMTLDLEERAQVTPEVQPGCRGHCSSYGKLCRNGGKCRERPIGFFCDCTFSAYTGPFCSNEISAYFGSGSSVIYNFQENYLLSKNSSSHAASFHGDMKLSREMIKFSFRTTRTPSLLLFVSSFYKEYLSVIIAKNGSLQIRYKLNKYQEPDVVNFDFKNMADGQLHHIMINREEGVVFIEIDDNRRRQVHLSSGTEFSAVKSLVLGRILEHSDVDQDTALAGAQGFTGCLSAVQLSHVAPLKAALHPSHPDPVTVTGHVTESSCMAQPGTDATSRERTHSFADHSGTIDDREPLANAIKSDSA

SEQ ID NO: 2235 - protein, 1237 aa, synthetic construct
  REGION 1..1237: note = CNTNAP5 (Q8WYK1) SP+PP+ECD
MDSLPRLTSVLTLLFSGLWHLGLTATNYNCDDPLASLLSPMAFSSSSDLTGTHSPAQLNWRVGTGGWSPADSNAQQWLQMDLGNRVEITAVATQGRYGSSDWVTSYSLMFSDTGRNWKQYKQEDSIWTFAGNMNADSVVHHKLLHSVRARFVRFVPLEWNPSGKIGMRVEVYGCSYKSDVADFDGRSSLLYRFNQKLMSTLKDVISLKFKSMQGDGVLFHGEGQRGDHITLELQKGRLALHLNLGDSKARLSSSLPSATLGSLLDDQHWHSVLIERVGKQVNFTVDKHTQHFRTKGETDALDIDYELSFGGIPVPGKPGTFLKKNFHGCIENLYYNGVNIIDLAKRRKHQIYTGNVTFSCSEPQIVPITFVNSSGSYLLLPGTPQIDGLSVSFQFRTWNKDGLLLSTELSEGSGTLLLSLEGGILRLVIQKMTERVAEILTGSNLNDGLWHSVSINARRNRITLTLDDEAAPPAPDSTWVQIYSGNSYYFGGCPDNLTDSQCLNPIKAFQGCMRLIFIDNQPKDLISVQQGSLGNFSDLHIDLCSIKDRCLPNYCEHGGSCSQSWTTFYCNCSDTSYTGATCHNSIYEQSCEVYRHQGNTAGFFYIDSDGSGPLGPLQVYCNITEDKIWTSVQHNNTELTRVRGANPEKPYAMALDYGGSMEQLEAVIDGSEHCEQEVAYHCRRSRLLNTPDGTPFTWWIGRSNERHPYWGGSPPGVQQCECGLDESCLDIQHFCNCDADKDEWTNDTGFLSFKDHLPVTQIVITDTDRSNSEAAWRIGPLRCYGDRRFWNAVSFYTEASYLHFPTFHAEFSADISFFFKTTALSGVFLENLGIKDFIRLEISSPSEITFAIDVGNGPVELVVQSPSLLNDNQWHYVRAERNLKETSLQVDNLPRSTRETSEEGHFRLQLNSQLFVGGTSSRQKGFLGCIRSLHLNGQKMDLEERAKVTSGVRPGCPGHCSSYGSICHNGGKCVEKHNGYLCDCTNSPYEGPFCKKEVSAVFEAGTSVTYMFQEPYPVTKNISLSSSAIYTDSAPSKENIALSFVTTQAPSLLLFINSSSQDFVVVLLCKNGSLQVRYHLNKEETHVFTIDADNFANRRMHHLKINREGRELTIQMDQQLRLSYNFSPEVEFRVIRSLTLGKVTENLGLDSEVAKANAMGFAGCMSSVQYNHIAPLKAALRHATVAPVTVHGTLTESSCGFMVDSDVNAVTTVHSSSDPFGKTDEREPLTNAVRSDS

SEQ ID NO: 2236 - protein, 1299 aa, synthetic construct
  REGION 1..1299: note = CPD (O75976) SP+PP+ECD
MASGRDERPPWRLGRLLLLMCLLLLGSSARAAHIKKAEATTTTTSAGAEAAEGQFDRYYHEEELESALREAAAAGLPGLARLFSIGRSVEGRPLWVLRLTAGLGSLIPEGDAGPDAAGPDAAGPLLPGRPQVKLVGNMHGDETVSRQVLIYLARELAAGYRRGDPRLVRLLNTTDVYLLPSLNPDGFERAREGDCGFGDGGPSGASGRDNSRGRDLNRSFPDQFSTGEPPALDEVPEVRALIEWIRRNKFVLSGNLHGGSVVASYPFDDSPEHKATGIYSKTSDDEVFKYLAKAYASNHPIMKTGEPHCPGDEDETFKDGITNGAHWYDVEGGMQDYNYVWANCFEITLELSCCKYPPASQLRQEWENNRESLITLIEKVHIGVKGFVKDSITGSGLENATISVAGINHNITTGRFGDFYRLLVPGTYNLTVVLTGYMPLTVTNVVVKEGPATEVDFSLRPTVTSVIPDTTEAVSTASTVAIPNILSGTSSSYQPIQPKDFHHHHFPDMEIFLRRFANEYPNITRLYSLGKSVESRELYVMEISDNPGVHEPGEPEFKYIGNMHGNEVVGRELLLNLIEYLCKNFGTDPEVTDLVHNTRIHLMPSMNPDGYEKSQEGDSISVIGRNNSNNFDLNRNFPDQFVQITDPTQPETIAVMSWMKSYPFVLSANLHGGSLVVNYPFDDDEQGLATYSKSPDDAVFQQIALSYSKENSQMFQGRPCKNMYPNEYFPHGITNGASWYNVPGGMQDWNYLQTNCFEVTIELGCVKYPLEKELPNFWEQNRRSLIQFMKQVHQGVRGFVLDATDGRGILNATISVAEINHPVTTYKTGDYWRLLVPGTYKITASARGYNPVTKNVTVKSEGAIQVNFTLVRSSTDSNNESKKGKGASSSTNDASDPTTKEFETLIKDLSAENGLESLMLRSSSNLALALYRYHSYKDLSEFLRGLVMNYPHITNLTNLGQSTEYRHIWSLEISNKPNVSEPEEPKIRFVAGIHGNAPVGTELLLALAEFLCLNYKKNPAVTQLVDRTRIVIVPSLNPDGRERAQEKDCTSKIGQTNARGKDLDTDFTNNASQPETKAIIENLIQKQDFSLSVALDGGSMLVTYPYDKPVQTVENKETLKHLASLYANNHPSMHMGQPSCPNKSDENIPGGVMRGAEWHSHLGSMKDYSVTYGHCPEITVYTSCCYFPSAARLPSLWADNKRSLLSMLVEVHKGVHGFVKDKTGKPISKAVIVLNEGIKVQTKEGGYFHVLLAPGVHNIIAIADGYQQQHSQVFVHHDAASSVVIVFDTDNRIFGLPRE

SEQ ID NO: 2237 - protein, 1971 aa, synthetic construct
  REGION 1..1971: note = CR1 (P17927) SP+PP+ECD
MGASSPRSPEPVGPPAPGLPFCCGGSLLAVVVLLALPVAWGQCNAPEWLPFARPTNLTDEFEFPIGTYLNYECRPGYSGRPFSIICLKNSVWTGAKDRCRRKSCRNPPDPVNGMVHVIKGIQFGSQIKYSCTKGYRLIGSSSATCIISGDTVIWDNETPICDRIPCGLPPTITNGDFISTNRENFHYGSVVTYRCNPGSGGRKVFELVGEPSIYCTSNDDQVGIWSGPAPQCIIPNKCTPPNVENGILVSDNRSLFSLNEVVEFRCQPGFVMKGPRRVKCQALNKWEPELPSCSRVCQPPPDVLHAERTQRDKDNFSPGQEVFYSCEPGYDLRGAASMRCTPQGDWSPAAPTCEVKSCDDFMGQLLNGRVLFPVNLQLGAKVDFVCDEGFQLKGSSASYCVLAGMESLWNSSVPVCEQIFCPSPPVIPNGRHTGKPLEVFPFGKTVNYTCDPHPDRGTSFDLIGESTIRCTSDPQGNGVWSSPAPRCGILGHCQAPDHFLFAKLKTQTNASDFPIGTSLKYECRPEYYGRPFSITCLDNLVWSSPKDVCKRKSCKTPPDPVNGMVHVITDIQVGSRINYSCTTGHRLIGHSSAECILSGNAAHWSTKPPICQRIPCGLPPTIANGDFISTNRENFHYGSVVTYRCNPGSGGRKVFELVGEPSIYCTSNDDQVGIWSGPAPQCIIPNKCTPPNVENGILVSDNRSLFSLNEVVEFRCQPGFVMKGPRRVKCQALNKWEPELPSCSRVCQPPPDVLHAERTQRDKDNFSPGQEVFYSCEPGYDLRGAASMRCTPQGDWSPAAPTCEVKSCDDFMGQLLNGRVLFPVNLQLGAKVDFVCDEGFQLKGSSASYCVLAGMESLWNSSVPVCEQIFCPSPPVIPNGRHTGKPLEVFPFGKAVNYTCDPHPDRGTSFDLIGESTIRCTSDPQGNGVWSSPAPRCGILGHCQAPDHFLFAKLKTQTNASDFPIGTSLKYECRPEYYGRPFSITCLDNLVWSSPKDVCKRKSCKTPPDPVNGMVHVITDIQVGSRINYSCTTGHRLIGHSSAECILSGNTAHWSTKPPICQRIPCGLPPTIANGDFISTNRENFHYGSVVTYRCNLGSRGRKVFELVGEPSIYCTSNDDQVGIWSGPAPQCIIPNKCTPPNVENGILVSDNRSLFSLNEVVEFRCQPGFVMKGPRRVKCQALNKWEPELPSCSRVCQPPPEILHGEHTPSHQDNFSPGQEVFYSCEPGYDLRGAASLHCTPQGDWSPEAPRCAVKSCDDFLGQLPHGRVLFPLNLQLGAKVSFVCDEGFRLKGSSVSHCVLVGMRSLWNNSVPVCEHIFCPNPPAILNGRHTGTPSGDIPYGKEISYTCDPHPDRGMTFNLIGESTIRCTSDPHGNGVWSSPAPRCELSVRAGHCKTPEQFPFASPTIPINDFEFPVGTSLNYECRPGYFGKMFSISCLENLVWSSVEDNCRRKSCGPPPEPFNGMVHINTDTQFGSTVNYSCNEGFRLIGSPSTTCLVSGNNVTWDKKAPICEIISCEPPPTISNGDFYSNNRTSFHNGTVVTYQCHTGPDGEQLFELVGERSIYCTSKDDQVGVWSSPPPRCISTNKCTAPEVENAIRVPGNRSFFSLTEIIRFRCQPGFVMVGSHTVQCQTNGRWGPKLPHCSRVCQPPPEILHGEHTLSHQDNFSPGQEVFYSCEPSYDLRGAASLHCTPQGDWSPEAPRCTVKSCDDFLGQLPHGRVLLPLNLQLGAKVSFVCDEGFRLKGRSASHCVLAGMKALWNSSVPVCEQIFCPNPPAILNGRHTGTPFGDIPYGKEISYACDTHPDRGMTFNLIGESSIRCTSDPQGNGVWSSPAPRCELSVPAACPHPPKIQNGHYIGGHVSLYLPGMTISYICDPGYLLVGKGFIFCTDQGIWSQLDHYCKEVNCSFPLFMNGISKELEMKKVYHYGDYVTLKCEDGYTLEGSPWSQCQADDRWDPPLAKCTSRTHD

SEQ ID NO: 2238 - protein, 971 aa, synthetic construct
  REGION 1..971: note = CR2 (P20023) SP+PP+ECD
MGAAGLLGVFLALVAPGVLGISCGSPPPILNGRISYYSTPIAVGTVIRYSCSGTFRLIGEKSLLCITKDKVDGTWDKPAPKCEYFNKYSSCPEPIVPGGYKIRGSTPYRHGDSVTFACKTNFSMNGNKSVWCQANNMWGPTRLPTCVSVFPLECPALPMIHNGHHTSENVGSIAPGLSVTYSCESGYLLVGEKIINCLSSGKWSAVPPTCEEARCKSLGRFPNGKVKEPPILRVGVTANFFCDEGYRLQGPPSSRCVIAGQGVAWTKMPVCEEIFCPSPPPILNGRHIGNSLANVSYGSIVTYTCDPDPEEGVNFILIGESTLRCTVDSQKTGTWSGPAPRCELSTSAVQCPHPQILRGRMVSGQKDRYTYNDTVIFACMFGFTLKGSKQIRCNAQGTWEPSAPVCEKECQAPPNILNGQKEDRHMVRFDPGTSIKYSCNPGYVLVGEESIQCTSEGVWTPPVPQCKVAACEATGRQLLTKPQHQFVRPDVNSSCGEGYKLSGSVYQECQGTIPWFMEIRLCKEITCPPPPVIYNGAHTGSSLEDFPYGTTVTYTCNPGPERGVEFSLIGESTIRCTSNDQERGTWSGPAPLCKLSLLAVQCSHVHIANGYKISGKEAPYFYNDTVTFKCYSGFTLKGSSQIRCKADNTWDPEIPVCEKETCQHVRQSLQELPAGSRVELVNTSCQDGYQLTGHAYQMCQDAENGIWFKKIPLCKVIHCHPPPVIVNGKHTGMMAENFLYGNEVSYECDQGFYLLGEKKLQCRSDSKGHGSWSGPSPQCLRSPPVTRCPNPEVKHGYKLNKTHSAYSHNDIVYVDCNPGFIMNGSRVIRCHTDNTWVPGVPTCIKKAFIGCPPPPKTPNGNHTGGNIARFSPGMSILYSCDQGYLLVGEALLLCTHEGTWSQPAPHCKEVNCSSPADMDGIQKGLEPRKMYQYGAVVTLECEDGYMLEGSPQSQCQSDHQWNPPLAVCRSR

SEQ ID NO: 2239 - protein, 1347 aa, synthetic construct
  REGION 1..1347: note = CRB1 (P82279) SP+PP+ECD
MALKNINYLLIFYLSFSLLIYIKNSFCNKNNTRCLSNSCQNNSTCKDFSKDNDCSCSDTANNLDKDCDNMKDPCFSNPCQGSATCVNTPGERSFLCKCPPGYSGTICETTIGSCGKNSCQHGGICHQDPIYPVCICPAGYAGRFCEIDHDECASSPCQNGAVCQDGIDGYSCFCVPGYQGRHCDLEVDECASDPCKNEATCLNEIGRYTCICPHNYSGVNCELEIDECWSQPCLNGATCQDALGAYFCDCAPGFLGDHCELNTDECASQPCLHGGLCVDGENRYSCNCTGSGFTGTHCETLMPLCWSKPCHNNATCEDSVDNYTCHCWPGYTGAQCEIDLNECNSNPCQSNGECVELSSEKQYGRITGLPSSFSYHEASGYVCICQPGFTGIHCEEDVNECSSNPCQNGGTCENLPGNYTCHCPFDNLSRTFYGGRDCSDILLGCTHQQCLNNGTCIPHFQDGQHGFSCLCPSGYTGSLCEIATTLSFEGDGFLWVKSGSVTTKGSVCNIALRFQTVQPMALLLFRSNRDVFVKLELLSGYIHLSIQVNNQSKVLLFISHNTSDGEWHFVEVIFAEAVTLTLIDDSCKEKCIAKAPTPLESDQSICAFQNSFLGGLPVGMTSNGVALLNFYNMPSTPSFVGCLQDIKIDWNHITLENISSGSSLNVKAGCVRKDWCESQPCQSRGRCINLWLSYQCDCHRPYEGPNCLREYVAGRFGQDDSTGYVIFTLDESYGDTISLSMFVRTLQPSGLLLALENSTYQYIRVWLERGRLAMLTPNSPKLVVKFVLNDGNVHLISLKIKPYKIELYQSSQNLGFISASTWKIEKGDVIYIGGLPDKQETELNGGFFKGCIQDVRLNNQNLEFFPNPTNNASLNPVLVNVTQGCAGDNSCKSNPCHNGGVCHSRWDDFSCSCPALTSGKACEEVQWCGFSPCPHGAQCQPVLQGFECIANAVFNGQSGQILFRSNGNITRELTNITFGFRTRDANVIILHAEKEPEFLNISIQDSRLFFQLQSGNSFYMLSLTSLQSVNDGTWHEVTLSMTDPLSQTSRWQMEVDNETPFVTSTIATGSLNFLKDNTDIYVGDRAIDNIKGLQGCLSTIEIGGIYLSYFENVHGFINKPQEEQFLKISTNSVVTGCLQLNVCNSNPCLHGGNCEDIYSSYHCSCPLGWSGKHCELNIDECFSNPCIHGNCSDRVAAYHCTCEPGYTGVNCEVDIDNCQSHQCANGATCISHTNGYSCLCFGNFTGKFCRQSRLPSTVCGNEKTNLTCYNGGNCTEFQTELKCMCRPGFTGEWCEKDIDECASDPCVNGGLCQDLLNKFQCLCDVAFAGERCEVDLADDLISDIFTT

SEQ ID NO: 2240 - protein, 1224 aa, synthetic construct
  REGION 1..1224: note = CRB2 (Q5IJ48) SP+PP+ECD
MALARPGTPDPQALASVLLLLLWAPALSLLAGTVPSEPPSACASDPCAPGTECQATESGGYTCGPMEPRGCATQPCHHGALCVPQGPDPTGFRCYCVPGFQGPRCELDIDECASRPCHHGATCRNLADRYECHCPLGYAGVTCEMEVDECASAPCLHGGSCLDGVGSFRCVCAPGYGGTRCQLDLDECQSQPCAHGGTCHDLVNGFRCDCAGTGYEGTHCEREVLECASAPCEHNASCLEGLGSFRCLCWPGYSGELCEVDEDECASSPCQHGGRCLQRSDPALYGGVQAAFPGAFSFRHAAGFLCHCPPGFEGADCGVEVDECASRPCLNGGHCQDLPNGFQCHCPDGYAGPTCEEDVDECLSDPCLHGGTCSDTVAGYICRCPETWGGRDCSVQLTGCQGHTCPLAATCIPIFESGVHSYVCHCPPGTHGPFCGQNTTFSVMAGSPIQASVPAGGPLGLALRFRTTLPAGTLATRNDTKESLELALVAATLQATLWSYSTTVLVLRLPDLALNDGHWHQVEVVLHLATLELRLWHEGCPARLCVASGPVALASTASATPLPAGISSAQLGDATFAGCLQDVRVDGHLLLPEDLGENVLLGCERREQCRPLPCVHGGSCVDLWTHFRCDCARPHRGPTCADEIPAATFGLGGAPSSASFLLQELPGPNLTVSFLLRTRESAGLLLQFANDSAAGLTVFLSEGRIRAEVPGSPAVVLPGRWDDGLRHLVMLSFGPDQLQDLGQHVHVGGRLLAADSQPWGGPFRGCLQDLRLDGCHLPFFPLPLDNSSQPSELGGRQSWNLTAGCVSEDMCSPDPCFNGGTCLVTWNDFHCTCPANFTGPTCAQQLWCPGQPCLPPATCEEVPDGFVCVAEATFREGPPAAFSGHNASSGRLLGGLSLAFRTRDSEAWLLRAAAGALEGVWLAVRNGSLAGGVRGGHGLPGAVLPIPGPRVADGAWHRVRLAMERPAATTSRWLLWLDGAATPVALRGLASDLGFLQGPGAVRILLAENFTGCLGRVALGGLPLPLARPRPGAAPGAREHFASWPGTPAPILGCRGAPVCAPSPCLHDGACRDLFDAFACACGPGWEGPRCEAHVDPCHSAPCARGRCHTHPDGRFECRCPPGFGGPRCRLPVPSKECSLNVTCLDGSPCEGGSPAANCSCLEGLAGQRCQVPTLPCEANPCLNGGTCRAAGGVSECICNARFSGQFCEVAKGLPLPLPFPLLE

SEQ ID NO: 2241 - protein, 59 aa, synthetic construct
  REGION 1..59: note = CRB3 (Q9BUF7) SP+PP+ECD
MANPGLGLLLALGLPFLLARWGRAWGQIQTTSANENSTVLPSSTSSSSDGNLRPEAITA

SEQ ID NO: 2242 - protein, 939 aa, synthetic construct
  REGION 1..939: note = CRIM1 (Q9NZV1) SP+PP+ECD
MYLVAGDRGLAGCGHLLVSLLGLLLLLARSGTRALVCLPCDESKCEEPRNCPGSIVQGVCGCCYTCASQRNESCGGTFGIYGTCDRGLRCVIRPPLNGDSLTEYEAGVCEDENWTDDQLLGFKPCNENLIAGCNIINGKCECNTIRTCSNPFEFPSQDMCLSALKRIEEEKPDCSKARCEVQFSPRCPEDSVLIEGYAPPGECCPLPSRCVCNPAGCLRKVCQPGNLNILVSKASGKPGECCDLYECKPVFGVDCRTVECPPVQQTACPPDSYETQVRLTADGCCTLPTRCECLSGLCGFPVCEVGSTPRIVSRGDGTPGKCCDVFECVNDTKPACVFNNVEYYDGDMFRMDNCRFCRCQGGVAICFTAQCGEINCERYYVPEGECCPVCEDPVYPFNNPAGCYANGLILAHGDRWREDDCTFCQCVNGERHCVATVCGQTCTNPVKVPGECCPVCEEPTIITVDPPACGELSNCTLTGKDCINGFKRDHNGCRTCQCINTEELCSERKQGCTLNCPFGFLTDAQNCEICECRPRPKKCRPIICDKYCPLGLLKNKHGCDICRCKKCPELSCSKICPLGFQQDSHGCLICKCREASASAGPPILSGTCLTVDGHHHKNEESWHDGCRECYCLNGREMCALITCPVPACGNPTIHPGQCCPSCADDFVVQKPELSTPSICHAPGGEYFVEGETWNIDSCTQCTCHSGRVLCETEVCPPLLCQNPSRTQDSCCPQCTDQPFRPSLSRNNSVPNYCKNDEGDIFLAAESWKPDVCTSCICIDSVISCFSESCPSVSCERPVLRKGQCCPYCIEDTIPKKVVCHFSGKAYADEERWDLDSCTHCYCLQGQTLCSTVSCPPLPCVEPINVEGSCCPMCPEMYVPEPTNIPIEKTNHRGEVDLEVPLWPTPSENDIVHLPRDMGHLQVDYRDNRLHPSEDSSLDS

SEQ ID NO: 2243 - protein, 231 aa, synthetic construct
  REGION 1..231: note = CRLF2 (Q9HC73) SP+PP+ECD
MGRLVLLWGAAVFLLGGWMALGQGGAAEGVQIQIIYFNLETVQVTWNASKYSRTNLTFHYRFNGDEAYDQCTNYLLQEGHTSGCLLDAEQRDDILYFSIRNGTHPVFTASRWMVYYLKPSSPKHVRFSWHQDAVTVTCSDLSYGDLLYEVQYRSPFDTEWQSKQENTCNVTIEGLDAEKCYSFWVRVKAMEDVYGPDTYPSDWSEVTCWQRGEIRDACAETPTPPKPKLSK

SEQ ID NO: 2244 - protein, 287 aa, synthetic construct
  REGION 1..287: note = CRTAM (O95727) SP+PP+ECD
MWWRVLSLLAWFPLQEASLTNHTETITVEEGQTLTLKCVTSLRKNSSLQWLTPSGFTIFLNEYPALKNSKYQLLHHSANQLSITVPNVTLQDEGVYKCLHYSDSVSTKEVKVIVLATPFKPILEASVIRKQNGEEHVVLMCSTMRSKPPPQITWLLGNSMEVSGGTLHEFETDGKKCNTTSTLIIHTYGKNSTVDCIIRHRGLQGRKLVAPFRFEDLVTDEETASDALERNSLSSQDPQQPTSTVSVTEDSSTSEIDKEEKEQTTQDPDLTTEANPQYLGLARKKSG

SEQ ID NO: 2245 - protein, 496 aa, synthetic construct
  REGION 1..496: note = CSF1 (P09603) SP+PP+ECD
MTAPGAAGRCPPTTWLGSLLLLVCLLASRSITEEVSEYCSHMIGSGHLQSLQRLIDSQMETSCQITFEFVDQEQLKDPVCYLKKAFLLVQDIMEDTMRFRDNTPNAIAIVQLQELSLRLKSCFTKDYEEHDKACVRTFYETPLQLLEKVKNVFNETKNLLDKDWNIFSKNCNNSFAECSSQDVVTKPDCNCLYPKAIPSSDPASVSPHQPLAPSMAPVAGLTWEDSEGTEGSSLLPGEQPLHTVDPGSAKQRPPRSTCQSFEPPETPVVKDSTIGGSPQPRPSVGAFNPGMEDILDSAMGTNWVPEEASGEASEIPVPQGTELSPSRPGGGSMQTEPARPSNFLSASSPLPASAKGQQPADVTGTALPRVGPVRPTGQDWNHTPQKTDHPSALLRDPPEPGSPRISSLRPQGLSNPSTLSAQPQLSRSHSSGSVLPLGELEGRRSTRDRRSPAEPEGGPASEGAARPLPRFNSVPLTDTGHERQSEGSFSPQLQES

SEQ ID NO: 2246 - protein, 517 aa, synthetic construct
  REGION 1..517: note = CSF1R (P07333) SP+PP+ECD
MGPGVLLLLLVATAWHGQGIPVIEPSVPELVVKPGATVTLRCVGNGSVEWDGPPSPHWTLYSDGSSSILSTNNATFQNTGTYRCTEPGDPLGGSAAIHLYVKDPARPWNVLAQEVVVFEDQDALLPCLLTDPVLEAGVSLVRVRGRPLMRHTNYSFSPWHGFTIHRAKFIQSQDYQCSALMGGRKVMSISIRLKVQKVIPGPPALTLVPAELVRIRGEAAQIVCSASSVDVNFDVFLQHNNTKLAIPQQSDFHNNRYQKVLTLNLDQVDFQHAGNYSCVASNVQGKHSTSMFFRVVESAYLNLSSEQNLIQEVTVGEGLNLKVMVEAYPGLQGFNWTYLGPFSDHQPEPKLANATTKDTYRHTFTLSLPRLKPSEAGRYSFLARNPGGWRALTFELTLRYPPEVSVIWTFINGSGTLLCAASGYPQPNVTWLQCSGHTDRCDEAQVLQVWDDPYPEVLSQEPFHKVTVQSLLTVETLEHNQTYECRAHNSVGSGSWAFIPISAGAHTHPPDEFLFTP

SEQ ID NO: 2247 - protein, 320 aa, synthetic construct
  REGION 1..320: note = CSF2RA (P15509) SP+PP+ECD
MLLLVTSLLLCELPHPAFLLIPEKSDLRTVAPASSLNVRFDSRTMNLSWDCQENTTFSKCFLTDKKNRVVEPRLSNNECSCTFREICLHEGVTFEVHVNTSQRGFQQKLLYPNSGREGTAAQNFSCFIYNADLMNCTWARGPTAPRDVQYFLYIRNSKRRREIRCPYYIQDSGTHVGCHLDNLSGLTSRNYFLVNGTSREIGIQFFDSLLDTKKIERFNPPSNVTVRCNTTHCLVRWKQPRTYQKLSYLDFQYQLDVHRKNTQPGTENLLINVSGDLENRYNFPSSEPRAKHSVKIRAADVRILNWSSWSEAIEFGSDDG

SEQ ID NO: 2248 - protein, 443 aa, synthetic construct
  REGION 1..443: note = CSF2RB (P32927) SP+PP+ECD
MVLAQGLLSMALLALCWERSLAGAEETIPLQTLRCYNDYTSHITCRWADTQDAQRLVNVTLIRRVNEDLLEPVSCDLSDDMPWSACPHPRCVPRRCVIPCQSFVVTDVDYFSFQPDRPLGTRLTVTLTQHVQPPEPRDLQISTDQDHFLLTWSVALGSPQSHWLSPGDLEFEVVYKRLQDSWEDAAILLSNTSQATLGPEHLMPSSTYVARVRTRLAPGSRLSGRPSKWSPEVCWDSQPGDEAQPQNLECFFDGAAVLSCSWEVRKEVASSVSFGLFYKPSPDAGEEECSPVLREGLGSLHTRHHCQIPVPDPATHGQYIVSVQPRRAEKHIKSSVNIQMAPPSLNVTKDGDSYSLRWETMKMRYEHIDHTFEIQYRKDTATWKDSKTETLQNAHSMALPALEPSTRYWARVRVRTSRTGYNGIWSEWSEARSWDTESVLPMW

SEQ ID NO: 2249 - protein, 627 aa, synthetic construct
  REGION 1..627: note = CSF3R (Q99062) SP+PP+ECD
MARLGNCSLTWAALIILLLPGSLEECGHISVSAPIVHLGDPITASCIIKQNCSHLDPEPQILWRLGAELQPGGRQQRLSDGTQESIITLPHLNHTQAFLSCCLNWGNSLQILDQVELRAGYPPAIPHNLSCLMNLTTSSLICQWEPGPETHLPTSFTLKSFKSRGNCQTQGDSILDCVPKDGQSHCCIPRKHLLLYQNMGIWVQAENALGTSMSPQLCLDPMDVVKLEPPMLRTMDPSPEAAPPQAGCLQLCWEPWQPGLHINQKCELRHKPQRGEASWALVGPLPLEALQYELCGLLPATAYTLQIRCIRWPLPGHWSDWSPSLELRTTERAPTVRLDTWWRQRQLDPRTVQLFWKPVPLEEDSGRIQGYVVSWRPSGQAGAILPLCNTTELSCTFHLPSEAQEVALVAYNSAGTSRPTPVVFSESRGPALTRLHAMARDPHSLWVGWEPPNPWPQGYVIEWGLGPPSASNSNKTWRMEQNGRATGFLLKENIRPFQLYEIIVTPLYQDTMGPSQHVYAYSQEMAPSHAPELHLKHIGKTWAQLEWVPEPPELGKSPLTHYTIFWTNAQNQSFSAILNASSRGFVLHGLEPASLYHIHLMAASQAGATNSTVLTLMTLTPEGSELH

SEQ ID NO: 2250 - protein, 3487 aa, synthetic construct
  REGION 1..3487: note = CSMD1 (Q96PZ7) SP+PP+ECD
MTAWRRFQSLLLLLGLLVLCARLLTAAKGQNCGGLVQGPNGTIESPGFPHGYPNYANCTWIIITGERNRIQLSFHTFALEEDFDILSVYDGQPQQGNLKVRLSGFQLPSSIVSTGSILTLWFTTDFAVSAQGFKALYEVLPSHTCGNPGEILKGVLHGTRFNIGDKIRYSCLPGYILEGHAILTCIVSPGNGASWDFPAPFCRAEGACGGTLRGTSSSISSPHFPSEYENNADCTWTILAEPGDTIALVFTDFQLEEGYDFLEISGTEAPSIWLTGMNLPSPVISSKNWLRLHFTSDSNHRRKGFNAQFQVKKAIELKSRGVKMLPSKDGSHKNSVLSQGGVALVSDMCPDPGIPENGRRAGSDFRVGANVQFSCEDNYVLQGSKSITCQRVTETLAAWSDHRPICRARTCGSNLRGPSGVITSPNYPVQYEDNAHCVWVITTTDPDKVIKLAFEEFELERGYDTLTVGDAGKVGDTRSVLYVLTGSSVPDLIVSMSNQMWLHLQSDDSIGSPGFKAVYQEIEKGGCGDPGIPAYGKRTGSSFLHGDTLTFECPAAFELVGERVITCQQNNQWSGNKPSCVFSCFFNFTASSGIILSPNYPEEYGNNMNCVWLIISEPGSRIHLIFNDFDVEPQFDFLAVKDDGISDITVLGTFSGNEVPSQLASSGHIVRLEFQSDHSTTGRGFNITYTTFGQNECHDPGIPINGRRFGDRFLLGSSVSFHCDDGFVKTQGSESITCILQDGNVVWSSTVPRCEAPCGGHLTASSGVILPPGWPGYYKDSLHCEWIIEAKPGHSIKITFDRFQTEVNYDTLEVRDGPASSSPLIGEYHGTQAPQFLISTGNFMYLLFTTDNSRSSIGFLIHYESVTLESDSCLDPGIPVNGHRHGGDFGIRSTVTFSCDPGYTLSDDEPLVCERNHQWNHALPSCDALCGGYIQGKSGTVLSPGFPDFYPNSLNCTWTIEVSHGKGVQMIFHTFHLESSHDYLLITEDGSFSEPVARLTGSVLPHTIKAGLFGNFTAQLRFISDFSISYEGFNITFSEYDLEPCDDPGVPAFSRRIGFHFGVGDSLTFSCFLGYRLEGATKLTCLGGGRRVWSAPLPRCVAECGASVKGNEGTLLSPNFPSNYDNNHECIYKIETEAGKGIHLRTRSFQLFEGDTLKVYDGKDSSSRPLGTFTKNELLGLILNSTSNHLWLEFNTNGSDTDQGFQLTYTSFDLVKCEDPGIPNYGYRIRDEGHFTDTVVLYSCNPGYAMHGSNTLTCLSGDRRVWDKPLPSCIAECGGQIHAATSGRILSPGYPAPYDNNLHCTWIIEADPGKTISLHFIVFDTEMAHDILKVWDGPVDSDILLKEWSGSALPEDIHSTFNSLTLQFDSDFFISKSGFSIQFSTSIAATCNDPGMPQNGTRYGDSREAGDTVTFQCDPGYQLQGQAKITCVQLNNRFFWQPDPPTCIAACGGNLTGPAGVILSPNYPQPYPPGKECDWRVKVNPDFVIALIFKSFNMEPSYDFLHIYEGEDSNSPLIGSYQGSQAPERIESSGNSLFLAFRSDASVGLSGFAIEFKEKPREACFDPGNIMNGTRVGTDFKLGSTITYQCDSGYKILDPSSITCVIGADGKPSWDQVLPSCNAPCGGQYTGSEGVVLSPNYPHNYTAGQICLYSITVPKEFVVFGQFAYFQTALNDLAELFDGTHAQARLLSSLSGSHSGETLPLATSNQILLRFSAKSGASARGFHFVYQAVPRTSDTQCSSVPEPRYGRRIGSEFSAGSIVRFECNPGYLLQGSTALHCQSVPNALAQWNDTIPSCVVPCSGNFTQRRGTILSPGYPEPYGNNLNCIWKIIVTEGSGIQIQVISFATEQNWDSLEIHDGGDVTAPRLGSFSGTTVPALLNSTSNQLYLHFQSDISVAAAGFHLEYKTVGLAACQEPALPSNSIKIGDRYMVNDVLSFQCEPGYTLQGRSHISCMPGTVRRWNYPSPLCIATCGGTLSTLGGVILSPGFPGSYPNNLDCTWRISLPIGYGAHIQFLNFSTEANHDFLEIQNGPYHTSPMIGQFSGTDLPAALLSTTHETLIHFYSDHSQNRQGFKLAYQAYELQNCPDPPPFQNGYMINSDYSVGQSVSFECYPGYILIGHPVLTCQHGINRNWNYPFPRCDAPCGYNVTSQNGTIYSPGFPDEYPILKDCIWLITVPPGHGVYINFTLLQTEAVNDYIAVWDGPDQNSPQLGVFSGNTALETAYSSTNQVLLKFHSDFSNGGFFVLNFHAFQLKKCQPPPAVPQAEMLTEDDDFEIGDFVKYQCHPGYTLVGTDILTCKLSSQLQFEGSLPTCEAQCPANEVRTGSSGVILSPGYPGNYFNSQTCSWSIKVEPNYNITIFVDTFQSEKQFDALEVFDGSSGQSPLLVVLSGNHTEQSNFTSRSNQLYLRWSTDHATSKKGFKIRYAAPYCSLTHPLKNGGILNRTAGAVGSKVHYFCKPGYRMVGHSNATCRRNPLGMYQWDSLTPLCQAVSCGIPESPGNGSFTGNEFTLDSKVVYECHEGFKLESSQQATAVCQEDGLWSNKGKPPTCKPVACPSIEAQLSEHVIWRLVSGSLNEYGAQVLLSCSPGYYLEGWRLLRCQANGTWNIGDERPSCRVISCGSLSFPPNGNKIGTLTVYGATAIFTCNTGYTLVGSHVRECLANGLWSGSETRCLAGHCGSPDPIVNGHISGDGFSYRDTVVYQCNPGFRLVGTSVRICLQDHKWSGQTPVCVPITCGHPGNPAHGFTNGSEFNLNDVVNFTCNTGYLLQGVSRAQCRSNGQWSSPLPTCRVVNCSDPGFVENAIRHGQQNFPESFEYGMSILYHCKKGFYLLGSSALTCMANGLWDRSLPKCLAISCGHPGVPANAVLTGELFTYGAVVHYSCRGSESLIGNDTRVCQEDSHWSGALPHCTGNNPGFCGDPGTPAHGSRLGDDFKTKSLLRFSCEMGHQLRGSPERTCLLNGSWSGLQPVCEAVSCGNPGTPTNGMIVSSDGILFSSSVIYACWEGYKTSGLMTRHCTANGTWTGTAPDCTIISCGDPGTLANGIQFGTDFTFNKTVSYQCNPGYVMEAVTSATIRCTKDGRWNPSKPVCKAVLCPQPPPVQNGTVEGSDFRWGSSISYSCMDGYQLSHSAILSCEGRGVWKGEIPQCLPVFCGDPGIPAEGRLSGKSFTYKSEVFFQCKSPFILVGSSRRVCQADGTWSGIQPTCIDPAHNTCPDPGTPHFGIQNSSRGYEVGSTVFFRCRKGYHIQGSTTRTCLANLTWSGIQTECIPHACRQPETPAHADVRAIDLPTFGYTLVYTCHPGFFLAGGSEHRTCKADMKWTGKSPVCKSKGVREVNETVTKTPVPSDVFFVNSLWKGYYEYLGKRQPATLTVDWFNATSSKVNATFSEASPVELKLTGIYKKEEAHLLLKAFQIKGQADIFVSKFENDNWGLDGYVSSGLERGGFTFQGDIHGKDFGKFKLERQDPLNPDQDSSSHYHGTSSGS

SEQ ID NO: 2251 - protein, 2224 aa, synthetic construct
  REGION 1..2224: note = CSPG4 (Q6UVK1) SP+PP+ECD
MQSGPRPPLPAPGLALALTLTMLARLASAASFFGENHLEVPVATALTDIDLQLQFSTSQPEALLLLAAGPADHLLLQLYSGRLQVRLVLGQEELRLQTPAETLLSDSIPHTVVLTVVEGWATLSVDGFLNASSAVPGAPLEVPYGLFVGGTGTLGLPYLRGTSRPLRGCLHAATLNGRSLLRPLTPDVHEGCAEEFSASDDVALGFSGPHSLAAFPAWGTQDEGTLEFTLTTQSRQAPLAFQAGGRRGDFIYVDIFEGHLRAVVEKGQGTVLLHNSVPVADGQPHEVSVHINAHRLEISVDQYPTHTSNRGVLSYLEPRGSLLLGGLDAEASRHLQEHRLGLTPEATNASLLGCMEDLSVNGQRRGLREALLTRNMAAGCRLEEEEYEDDAYGHYEAFSTLAPEAWPAMELPEPCVPEPGLPPVFANFTQLLTISPLVVAEGGTAWLEWRHVQPTLDLMEAELRKSQVLFSVTRGARHGELELDIPGAQARKMFTLLDVVNRKARFIHDGSEDTSDQLVLEVSVTARVPMPSCLRRGQTYLLPIQVNPVNDPPHIIFPHGSLMVILEHTQKPLGPEVFQAYDPDSACEGLTFQVLGTSSGLPVERRDQPGEPATEFSCRELEAGSLVYVHRGGPAQDLTFRVSDGLQASPPATLKVVAIRPAIQIHRSTGLRLAQGSAMPILPANLSVETNAVGQDVSVLFRVTGALQFGELQKQGAGGVEGAEWWATQAFHQRDVEQGRVRYLSTDPQHHAYDTVENLALEVQVGQEILSNLSFPVTIQRATVWMLRLEPLHTQNTQQETLTTAHLEATLEEAGPSPPTFHYEVVQAPRKGNLQLQGTRLSDGQGFTQDDIQAGRVTYGATARASEAVEDTFRFRVTAPPYFSPLYTFPIHIGGDPDAPVLTNVLLVVPEGGEGVLSADHLFVKSLNSASYLYEVMERPRHGRLAWRGTQDKTTMVTSFTNEDLLRGRLVYQHDDSETTEDDIPFVATRQGESSGDMAWEEVRGVFRVAIQPVNDHAPVQTISRIFHVARGGRRLLTTDDVAFSDADSGFADAQLVLTRKDLLFGSIVAVDEPTRPIYRFTQEDLRKRRVLFVHSGADRGWIQLQVSDGQHQATALLEVQASEPYLRVANGSSLVVPQGGQGTIDTAVLHLDTNLDIRSGDEVHYHVTAGPRWGQLVRAGQPATAFSQQDLLDGAVLYSHNGSLSPRDTMAFSVEAGPVHTDATLQVTIALEGPLAPLKLVRHKKIYVFQGEAAEIRRDQLEAAQEAVPPADIVFSVKSPPSAGYLVMVSRGALADEPPSLDPVQSFSQEAVDTGRVLYLHSRPEAWSDAFSLDVASGLGAPLEGVLVELEVLPAAIPLEAQNFSVPEGGSLTLAPPLLRVSGPYFPTLLGLSLQVLEPPQHGALQKEDGPQARTLSAFSWRMVEEQLIRYVHDGSETLTDSFVLMANASEMDRQSHPVAFTVTVLPVNDQPPILTTNTGLQMWEGATAPIPAEALRSTDGDSGSEDLVYTIEQPSNGRVVLRGAPGTEVRSFTQAQLDGGLVLFSHRGTLDGGFRFRLSDGEHTSPGHFFRVTAQKQVLLSLKGSQTLTVCPGSVQPLSSQTLRASSSAGTDPQLLLYRVVRGPQLGRLFHAQQDSTGEALVNFTQAEVYAGNILYEHEMPPEPFWEAHDTLELQLSSPPARDVAATLAVAVSFEAACPQRPSHLWKNKGLWVPEGQRARITVAALDASNLLASVPSPQRSEHDVLFQVTQFPSRGQLLVSEEPLHAGQPHFLQSQLAAGQLVYAHGGGGTQQDGFHFRAHLQGPAGASVAGPQTSEAFAITVRDVNERPPQPQASVPLRLTRGSRAPISRAQLSVVDPDSAPGEIEYEVQRAPHNGFLSLVGGGLGPVTRFTQADVDSGRLAFVANGSSVAGIFQLSMSDGASPPLPMSLAVDILPSAIEVQLRAPLEVPQALGRSSLSQQQLRVVSDREEPEAAYRLIQGPQYGHLLVGGRPTSAFSQFQIDQGEVVFAFTNFSSSHDHFRVLALARGVNASAVVNVTVRALLHVWAGGPWPQGATLRLDPTVLDAGELANRTGSVPRFRLLEGPRHGRVVRVPRARTEPGGSQLVEQFTQQDLEDGRLGLEVGRPEGRAPGPAGDSLTLELWAQGVPPAVASLDFATEPYNAARPYSVALLSVPEAARTEAGKPESSTPTGEPGPMASSPEPAVAKGGFLSFLEANMFS

SEQ ID NO: 2252 - protein, 423 aa, synthetic construct
  REGION 1..423: note = CSPG5 (O95196) SP+PP+ECD
MGRAGGGGPGRGPPPLLLFLGAALVLASGAVPAREAGSAVEAEELVKGSPAWEPPANDTREEAGPPAAGEDEASWTAPGGELAGPEEVLQESAAVTGTAWLEADSPGLGGVTAEAGSGDAQALPATLQAPHEVLGQSIMPPAIPEATEASGPPSPTPGDKLSPASELPKESPLEVWLNLGGSTPDPQGPELTYPFQGTLEPQPASDIIDIDYFEGLDGEGRGADLGSFPGSPGTSENHPDTEGETPSWSLLDLYDDFTPFDESDFYPTTSFYDDLDEEEEEEEDDKDAVGGGDLEDENELLVPTGKPGLGPGTGQPTSRWHAVPPQHTLGSVPGSSIALRPRPGEPGRDLASSENGTECRSGFVRHNGSCRSVCDLFPSYCHNGGQCYLVENIGAFCRCNTQDYIWHKGMRCESIITDFQVMC

SEQ ID NO: 2253 - protein, 161 aa, synthetic construct
  REGION 1..161: note = CTLA4 (P16410) SP+PP+ECD
MACLGFQRHKAQLNLATRTWPCTLLFFLLFIPVFCKAMHVAQPAVVLASSRGIASFVCEYASPGKATEVRVTVLRQADSQVTEVCAATYMMGNELTFLDDSICTGTSSGNQVNLTIQGLRAMDTGLYICKVELMYPPPYYLGIGNGTQIYVIDPEPCPDSD

SEQ ID NO: 2254 - protein, 568 aa, synthetic construct
  REGION 1..568: note = CUZD1 (Q86UP6) SP+PP+ECD
MELVRRLMPLTLLILSCLAELTMAEAEGNASCTVSLGGANMAETHKAMILQLNPSENCTWTIERPENKSIRIIFSYVQLDPDGSCESENIKVFDGTSSNGPLLGQVCSKNDYVPVFESSSSTLTFQIVTDSARIQRTVFVFYYFFSPNISIPNCGGYLDTLEGSFTSPNYPKPHPELAYCVWHIQVEKDYKIKLNFKEIFLEIDKQCKFDFLAIYDGPSTNSGLIGQVCGRVTPTFESSSNSLTVVLSTDYANSYRGFSASYTSIYAENINTTSLTCSSDRMRVIISKSYLEAFNSNGNNLQLKDPTCRPKLSNVVEFSVPLNGCGTIRKVEDQSITYTNIITFSASSTSEVITRQKQLQIIVKCEMGHNSTVEIIYITEDDVIQSQNALGKYNTSMALFESNSFEKTILESPYYVDLNQTLFVQVSLHTSDPNLVVFLDTCRASPTSDFASPTYDLIKSGCSRDETCKVYPLFGHYGRFQFNAFKFLRSMSSVYLQCKVLICDSSDHQSRCNQGCVSRSKRDISSYKWKTDSIIGPIRLKRDRSASGNSGFQHETHAEETPNQPFNS

SEQ ID NO: 2255 - protein, 341 aa, synthetic construct
  REGION 1..341: note = CX3CL1 (P78423) SP+PP+ECD
MAPISLSWLLRLATFCHLTVLLAGQHHGVTKCNITCSKMTSKIPVALLIHYQQNQASCGKRAIILETRQHRLFCADPKEQWVKDAMQHLDRQAAALTRNGGTFEKQIGEVKPRTTPAAGGMDESVVLEPEATGESSSLEPTPSSQEAQRALGTSPELPTGVTGSSGTRLPPTPKAQDGGPVGTELFRVPPVSTAATWQSSAPHQPGPSLWAEAKTSEAPSTQDPSTQASTASSPAPEENAPSEGQRVWGQGQSPRPENSLEREEMGPVPAHTDAFQDWGPGSMAHVSVVPVSSEGTPSREPVASGSWTPKAEEPIHATMDPQRLGVLITPVPDAQAATRRQ

SEQ ID NO: 2256 - protein, 237 aa, synthetic construct
  REGION 1..237: note = CXADR (P78310) SP+PP+ECD
MALLLCFVLLCGVVDFARSLSITTPEEMIEKAKGETAYLPCKFTLSPEDQGPLDIEWLISPADNQKVDQVIILYSGDKIYDDYYPDLKGRVHFTSNDLKSGDASINVTNLQLSDIGTYQCKVKKAPGVANKKIHLVVLVKPSGARCYVDGSEEIGSDFKIKCEPKEGSLPLQYEWQKLSDSQKMPTSWLAEMTSSVISVKNASSEYSGTYSCTVRNRVGSDQCLLRLNVVPPSNKAG

SEQ ID NO: 2257 - protein, 205 aa, synthetic construct
  REGION 1..205: note = CXCL16 (Q9H2A7) SP+PP+ECD
MGRDLRPGSRVLLLLLLLLLVYLTQPGNGNEGSVTGSCYCGKRISSDSPPSVQFMNRLRKHLRAYHRCLYYTRFQLLSWSVCGGNKDPWVQELMSCLDLKECGHAYSGIVAHQKHLLPTSPPISQASEGASSDIHTPAQMLLSTLQSTQRPTLPVGSLSSDKELTRPNETTIHTAGHSLAAGPEAGENQKQPEKNAGPTARTSAT

SEQ ID NO: 2258 - protein, 749 aa, synthetic construct
  REGION 1..749: note = DAG1 (Q14118) SP+PP+ECD
MRMSVGLSLLLPLSGRTFLLLLSVVMAQSHWPSEPSEAVRDWENQLEASMHSVLSDLHEAVPTVVGIPDGTAVVGRSFRVTIPTDLIASSGDIIKVSAAGKEALPSWLHWDSQSHTLEGLPLDTDKGVHYISVSATRLGANGSHIPQTSSVFSIEVYPEDHSELQSVRTASPDPGEVVSSACAADEPVTVLTVILDADLTKMTPKQRIDLLHRMRSFSEVELHNMKLVPVVNNRLFDMSAFMAGPGNAKKVVENGALLSWKLGCSLNQNSVPDIHGVEAPAREGAMSAQLGYPVVGWHIANKKPPLPKRVRRQIHATPTPVTAIGPPTTAIQEPPSRIVPTPTSPAIAPPTETMAPPVRDPVPGKPTVTIRTRGAIIQTPTLGPIQPTRVSEAGTTVPGQIRPTMTIPGYVEPTAVATPPTTTTKKPRVSTPKPATPSTDSTTTTTRRPTKKPRTPRPVPRVTTKVSITRLETASPPTRIRTTTSGVPRGGEPNQRPELKNHIDRVDAWVGTYFEVKIPSDTFYDHEDTTTDKLKLTLKLREQQLVGEKSWVQFNSNSQLMYGLPDSSHVGKHEYFMHATDKGGLSAVDAFEIHVHRRPQGDRAPARFKAKFVGDPALVLNDIHKKIALVKKLAFAFGDRNCSTITLQNITRGSIVVEWTNNTLPLEPCPKEQIAGLSRRIAEDDGKPRPAFSNALEPDFKATSITVTGSGSCRHLQFIPVVPPRRVPSEAPPTEVPDRDPEKSSEDDV

SEQ ID NO: 2259 - protein, 459 aa, synthetic construct
  REGION 1..459: note = DCBLD1 (Q8N8Z6) SP+PP+ECD
MVPGARGGGALARAAGRGLLALLLAVSAPLRLQAEELGDGCGHLVTYQDSGTMTSKNYPGTYPNHTVCEKTITVPKGKRLILRLGDLDIESQTCASDYLLFTSSSDQYGPYCGSMTVPKELLLNTSEVTVRFESGSHISGRGFLLTYASSDHPDLITCLERASHYLKTEYSKFCPAGCRDVAGDISGNMVDGYRDTSLLCKAAIHAGIIADELGGQISVLQRKGISRYEGILANGVLSRDGSLSDKRFLFTSNGCSRSLSFEPDGQIRASSSWQSVNESGDQVHWSPGQARLQDQGPSWASGDSSNNHKPREWLEIDLGEKKKITGIRTTGSTQSNFNFYVKSFVMNFKNNNSKWKTYKGIVNNEEKVFQGNSNFRDPVQNNFIPPIVARYVRVVPQTWHQRIALKVELIGCQITQGNDSLVWRKTSQSTSVSTKKEDETITRPIPSEETSTGINITTV

SEQ ID NO: 2260 - protein, 528 aa, synthetic construct
  REGION 1..528: note = DCBLD2 (Q96PD2) SP+PP+ECD
MASRAVVRARRCPQCPQVRAAAAAPAWAALPLSRSLPPCSNSSSFSMPLFLLLLLVLLLLLEDAGAQQGDGCGHTVLGPESGTLTSINYPQTYPNSTVCEWEIRVKMGERVRIKFGDFDIEDSDSCHFNYLRIYNGIGVSRTEIGKYCGLGLQMNHSIESKGNEITLLFMSGIHVSGRGFLASYSVIDKQDLITCLDTASNFLEPEFSKYCPAGCLLPFAEISGTIPHGYRDSSPLCMAGVHAGVVSNTLGGQISVVISKGIPYYESSLANNVTSVVGHLSTSLFTFKTSGCYGTLGMESGVIADPQITASSVLEWTDHTGQENSWKPKKARLKKPGPPWAAFATDEYQWLQIDLNKEKKITGIITTGSTMVEHNYYVSAYRILYSDDGQKWTVYREPGVEQDKIFQGNKDYHQDVRNNFLPPIIARFIRVNPTQWQQKIAMKMELLGCQFIPKGRPPKLTQPPPPRNSNDLKNTTAPPKIAKGRAPKFTQPLQPRSSNEFPAQTEQTTASPDIRNTTVTPNVTKDVA

SEQ ID NO: 2261 - protein, 1097 aa, synthetic construct
  REGION 1..1097: note = DCC (P43146) SP+PP+ECD
MENSLRCVWVPKLAFVLFGASLFSAHLQVTGFQIKAFTALRFLSEPSDAVTMRGGNVLLDCSAESDRGVPVIKWKKDGIHLALGMDERKQQLSNGSLLIQNILHSRHHKPDEGLYQCEASLGDSGSIISRTAKVAVAGPLRFLSQTESVTAFMGDTVLLKCEVIGEPMPTIHWQKNQQDLTPIPGDSRVVVLPSGALQISRLQPGDIGIYRCSARNPASSRTGNEAEVRILSDPGLHRQLYFLQRPSNVVAIEGKDAVLECCVSGYPPPSFTWLRGEEVIQLRSKKYSLLGGSNLLISNVTDDDSGMYTCVVTYKNENISASAELTVLVPPWFLNHPSNLYAYESMDIEFECTVSGKPVPTVNWMKNGDVVIPSDYFQIVGGSNLRILGVVKSDEGFYQCVAENEAGNAQTSAQLIVPKPAIPSSSVLPSAPRDVVPVLVSSRFVRLSWRPPAEAKGNIQTFTVFFSREGDNRERALNTTQPGSLQLTVGNLKPEAMYTFRVVAYNEWGPGESSQPIKVATQPELQVPGPVENLQAVSTSPTSILITWEPPAYANGPVQGYRLFCTEVSTGKEQNIEVDGLSYKLEGLKKFTEYSLRFLAYNRYGPGVSTDDITVVTLSDVPSAPPQNVSLEVVNSRSIKVSWLPPPSGTQNGFITGYKIRHRKTTRRGEMETLEPNNLWYLFTGLEKGSQYSFQVSAMTVNGTGPPSNWYTAETPENDLDESQVPDQPSSLHVRPQTNCIIMSWTPPLNPNIVVRGYIIGYGVGSPYAETVRVDSKQRYYSIERLESSSHYVISLKAFNNAGEGVPLYESATTRSITDPTDPVDYYPLLDDFPTSVPDLSTPMLPPVGVQAVALTHDAVRVSWADNSVPKNQKTSEVRLYTVRWRTSFSASAKYKSEDTTSLSYTATGLKPNTMYEFSVMVTKNRRSSTWSMTAHATTYEAAPTSAPKDLTVITREGKPRAVIVSWQPPLEANGKITAYILFYTLDKNIPIDDWIMETISGDRLTHQIMDLNLDTMYYFRIQARNSKGVGPLSDPILFRTLKVEHPDKMANDQGRHGDGGYWPVDTNLIDRSTLNEPPIGQMHPPHGSVTPQKNSN

SEQ ID NO: 2262 - protein, 2940 aa, synthetic construct
  REGION 1..2940: note = DCHS1 (Q96JQ0) SP+PP+ECD
MQKELGIVPSCPGMKSPRPHLLLPLLLLLLLLLGAGVPGAWGQAGSLDLQIDEEQPAGTLIGDISAGLPAGTAAPLMYFISAQEGSGVGTDLAIDEHSGVVRTARVLDREQRDRYRFTAVTPDGATVEVTVRVADINDHAPAFPQARAALQVPEHTAFGTRYPLEPARDADAGRLGTQGYALSGDGAGETFRLETRPGPDGTPVPELVVTGELDRENRSHYMLQLEAYDGGSPPRRAQALLDVTLLDINDHAPAFNQSRYHAVVSESLAPGSPVLQVFASDADAGVNGAVTYEINRRQSEGDGPFSIDAHTGLLQLERPLDFEQRRVHELVVQARDGGAHPELGSAFVTVHVRDANDNQPSMTVIFLSADGSPQVSEAAPPGQLVARISVSDPDDGDFAHVNVSLEGGEGHFALSTQDSVIYLVCVARRLDREERDAYNLRVTATDSGSPPLRAEAAFVLHVTDVNDNAPAFDRQLYRPEPLPEVALPGSFVVRVTARDPDQGTNGQVTYSLAPGAHTHWFSIDPTSGIITTAASLDYELEPQPQLIVVATDGGLPPLASSATVSVALQDVNDNEPQFQRTFYNASLPEGTQPGTCFLQVTATDADSGPFGLLSYSLGAGLGSSGSPPFRIDAHSGDVCTTRTLDRDQGPSSFDFTVTAVDGGGLKSMVYVKVFLSDENDNPPQFYPREYAASISAQSPPGTAVLRLRAHDPDQGSHGRLSYHILAGNSPPLFTLDEQSGLLTVAWPLARRANSVVQLEIGAEDGGGLQAEPSARVDISIVPGTPTPPIFEQLQYVFSVPEDVAPGTSVGIVQAHNPPGRLAPVTLSLSGGDPRGLFSLDAVSGLLQTLRPLDRELLGPVLELEVRAGSGVPPAFAVARVRVLLDDVNDNSPAFPAPEDTVLLPPNTAPGTPIYTLRALDPDSGVNSRVTFTLLAGGGGAFTVDPTTGHVRLMRPLGPSGGPAHELELEARDGGSPPRTSHFRLRVVVQDVGTRGLAPRFNSPTYRVDLPSGTTAGTQVLQVQAQAPDGGPITYHLAAEGASSPFGLEPQSGWLWVRAALDREAQELYILKVMAVSGSKAELGQQTGTATVRVSILNQNEHSPRLSEDPTFLAVAENQPPGTSVGRVFATDRDSGPNGRLTYSLQQLSEDSKAFRIHPQTGEVTTLQTLDREQQSSYQLLVQVQDGGSPPRSTTGTVHVAVLDLNDNSPTFLQASGAAGGGLPIQVPDRVPPGTLVTTLQAKDPDEGENGTILYTLTGPGSELFSLHPHSGELLTAAPLIRAERPHYVLTLSAHDQGSPPRSASLQLLVQVLPSARLAEPPPDLAERDPAAPVPVVLTVTAAEGLRPGSLLGSVAAPEPAGVGALTYTLVGGADPEGTFALDAASGRLYLARPLDFEAGPPWRALTVRAEGPGGAGARLLRVQVQVQDENEHAPAFARDPLALALPENPEPGAALYTFRASDADGPGPNSDVRYRLLRQEPPVPALRLDARTGALSAPRGLDRETTPALLLLVEATDRPANASRRRAARVSARVFVTDENDNAPVFASPSRVRLPEDQPPGPAALHVVARDPDLGEAARVSYRLASGGDGHFRLHSSTGALSVVRPLDREQRAEHVLTVVASDHGSPPRSATQVLTVSVADVNDEAPTFQQQEYSVLLRENNPPGTSLLTLRATDPDVGANGQVTYGGVSSESFSLDPDTGVLTTLRALDREEQEEINLTVYAQDRGSPPQLTHVTVRVAVEDENDHAPTFGSAHLSLEVPEGQDPQTLTMLRASDPDVGANGQLQYRILDGDPSGAFVLDLASGEFGTMRPLDREVEPAFQLRIEARDGGQPALSATLLLTVTVLDANDHAPAFPVPAYSVEVPEDVPAGTLLLQLQAHDPDAGANGHVTYYLGAGTAGAFLLEPSSGELRTAAALDREQCPSYTFSVSAVDGAAAGPLSTTVSVTITVRDVNDHAPTFPTSPLRLRLPRPGPSFSTPTLALATLRAEDRDAGANASILYRLAGTPPPGTTVDSYTGEIRVARSPVALGPRDRVLFIVATDLGRPARSATGVIIVGLQGEAERGPRFPRASSEATIRENAPPGTPIVSPRAVHAGGTNGPITYSILSGNEKGTFSIQPSTGAITVRSAEGLDFEVSPRLRLVLQAESGGAFAFTVLTLTLQDANDNAPRFLRPHYVAFLPESRPLEGPLLQVEADDLDQGSGGQISYSLAASQPARGLFHVDPTTGTITTTAILDREIWAETRLVLMATDRGSPALVGSATLTVMVIDTNDNRPTIPQPWELRVSEDALLGSEIAQVTGNDVDSGPVLWYVLSPSGPQDPFSVGRYGGRVSLTGPLDFEQCDRYQLQLLAHDGPHEGRANLTVLVEDVNDNAPAFSQSLYQVMLLEHTPPGSAILSVSATDRDSGANGHISYHLASPADGFSVDPNNGTLFTIVGTVALGHDGSGAVDVVLEARDHGAPGRAARATVHVQLQDQNDHAPSFTLSHYRVAVTEDLPPGSTLLTLEATDADGSRSHAAVDYSIISGNWGRVFQLEPRLAEAGESAGPGPRALGCLVLLEPLDFESLTQYNLTVAAADRGQPPQSSVVPVTVTVLDVNDNPPVFTRASYRVTVPEDTPVGAELLHVEASDADPGPHGLVRFTVSSGDPSGLFELDESSGTLRLAHALDCETQARHQLVVQAADPAGAHFALAPVTIEVQDVNDHGPAFPLNLLSTSVAENQPPGTLVTTLHAIDGDAGAFGRLRYSLLEAGPGPEGREAFALNSSTGELRARVPFDYEHTESFRLLVGAADAGNLSASVTVSVLVTGEDEYDPVFLAPAFHFQVPEGARRGHSLGHVQATDEDGGADGLVLYSLATSSPYFGINQTTGALYLRVDSRAPGSGTATSGGGGRTRREAPRELRLEVIARGPLPGSRSATVPVTVDITHTALGLAPDLNLLLVGA

SEQ ID NO: 2263 - protein, 472 aa, synthetic construct
  REGION 1..472: note = DCT (P40126) SP+PP+ECD
MSPLWWGFLLSCLGCKILPGAQGQFPRVCMTVDSLVNKECCPRLGAESANVCGSQQGRGQCTEVRADTRPWSGPYILRNQDDRELWPRKFFHRTCKCTGNFAGYNCGDCKFGWTGPNCERKKPPVIRQNIHSLSPQEREQFLGALDLAKKRVHPDYVITTQHWLGLLGPNGTQPQFANCSVYDFFVWLHYYSVRDTLLGPGRPYRAIDFSHQGPAFVTWHRYHLLCLERDLQRLIGNESFALPYWNFATGRNECDVCTDQLFGAARPDDPTLISRNSRFSSWETVCDSLDDYNHLVTLCNGTYEGLLRRNQMGRNSMKLPTLKDIRDCLSLQKFDNPPFFQNSTFSFRNALEGFDKADGTLDSQVMSLHNLVHSFLNGTNALPHSAANDPIFVVLHSFTDAIFDEWMKRFNPPADAWPQELAPIGHNRMYNMVPFFPPVTNEELFLTSDQLGYSYAIDLPVSVEETPGWPTT

SEQ ID NO: 2264 - protein, 417 aa, synthetic construct
  REGION 1..417: note = DDR1 (Q08345) SP+PP+ECD
MGPEALSSLLLLLLVASGDADMKGHFDPAKCRYALGMQDRTIPDSDISASSSWSDSTAARHSRLESSDGDGAWCPAGSVFPKEEEYLQVDLQRLHLVALVGTQGRHAGGLGKEFSRSYRLRYSRDGRRWMGWKDRWGQEVISGNEDPEGVVLKDLGPPMVARLVRFYPRADRVMSVCLRVELYGCLWRDGLLSYTAPVGQTMYLSEAVYLNDSTYDGHTVGGLQYGGLGQLADGVVGLDDFRKSQELRVWPGYDYVGWSNHSFSSGYVEMEFEFDRLRAFQAMQVHCNNMHTLGARLPGGVECRFRRGPAMAWEGEPMRHNLGGNLGDPRARAVSVPLGGRVARFLQCRFLFAGPWLLFSEISFISDVVNNSSPALGGTFPPAPWWPPGPPPTNFSSLELEPRGQQPVAKAEGSPTA

SEQ ID NO: 2265 - protein, 399 aa, synthetic construct
  REGION 1..399: note = DDR2 (Q16832) SP+PP+ECD
MILIPRMLLVLFLLLPILSSAKAQVNPAICRYPLGMSGGQIPDEDITASSQWSESTAAKYGRLDSEEGDGAWCPEIPVEPDDLKEFLQIDLHTLHFITLVGTQGRHAGGHGIEFAPMYKINYSRDGTRWISWRNRHGKQVLDGNSNPYDIFLKDLEPPIVARFVRFIPVTDHSMNVCMRVELYGCVWLDGLVSYNAPAGQQFVLPGGSIIYLNDSVYDGAVGYSMTEGLGQLTDGVSGLDDFTQTHEYHVWPGYDYVGWRNESATNGYIEIMFEFDRIRNFTTMKVHCNNMFAKGVKIFKEVQCYFRSEASEWEPNAISFPLVLDDVNPSARFVTVPLHHRMASAIKCQYHFADTWMMFSEITFQSDAAMYNNSEALPTSPMAPTTYDPMLKVDDSNTR

SEQ ID NO: 2266 - protein, 349 aa, synthetic construct
  REGION 1..349: note = DGCR2 (P98153) SP+PP+ECD
MVPKADSGAFLLLFLLVLTVTEPLRPELRCNPGQFACRSGTIQCIPLPWQCDGWATCEDESDEANCPEVTGEVRPHHGKEAVDPRQGRARGGDPSHFHAVNVAQPVRFSSFLGKCPTGWHHYEGTASCYRVYLSGENYWDAAQTCQRLNGSLATFSTDQELRFVLAQEWDQPERSFGWKDQRKLWVGYQYVITGRNRSLEGRWEVAFKGSSEVFLPPDPIFASAMSENDNVFCAQLQCFHFPTLRHHDLHSWHAESCYEKSSFLCKRSQTCVDIKDNVVDEGFYFTPKGDDPCLSCTCHGGEPEMCVAALCERPQGCQQYRKDPKECCKFMCLDPDGNSLFDSMASGMR

SEQ ID NO: 2267 - protein, 303 aa, synthetic construct
  REGION 1..303: note = DLK1 (P80370) SP+PP+ECD
MTATEALLRVLLLLLAFGHSTYGAECFPACNPQNGFCEDDNVCRCQPGWQGPLCDQCVTSPGCLHGLCGEPGQCICTDGWDGELCDRDVRACSSAPCANNRTCVSLDDGLYECSCAPGYSGKDCQKKDGPCVINGSPCQHGGTCVDDEGRASHASCLCPPGFSGNFCEIVANSCTPNPCENDGVCTDIGGDFRCRCPAGFIDKTCSRPVTNCASSPCQNGGTCLQHTQVSYECLCKPEFTGLTCVKKRALSPQQVTRLPSGYGLAYRLTPGVHELPVQQPEHRILKVSMKELNKKTPLLTEGQ

SEQ ID NO: 2268 - protein, 306 aa, synthetic construct
  REGION 1..306: note = DLK2 (Q6UY11) SP+PP+ECD
MPSGCRCLHLVCLLCILGAPGQPVRADDCSSHCDLAHGCCAPDGSCRCDPGWEGLHCERCVRMPGCQHGTCHQPWQCICHSGWAGKFCDKDEHICTTQSPCQNGGQCMYDGGGEYHCVCLPGFHGRDCERKAGPCEQAGSPCRNGGQCQDDQGFALNFTCRCLVGFVGARCEVNVDDCLMRPCANGATCLDGINRFSCLCPEGFAGRFCTINLDDCASRPCQRGARCRDRVHDFDCLCPSGYGGKTCELVLPVPDPPTTVDTPLGPTSAVVVPATGPAPHSAGAGLLRISVKEVVRRQEAGLGEPS

SEQ ID NO: 2269 - protein, 545 aa, synthetic construct
  REGION 1..545: note = DLL1 (O00548) SP+PP+ECD
MGSRCALALAVLSALLCQVWSSGVFELKLQEFVNKKGLLGNRNCCRGGAGPPPCACRTFFRVCLKHYQASVSPEPPCTYGSAVTPVLGVDSFSLPDGGGADSAFSNPIRFPFGFTWPGTFSLIIEALHTDSPDDLATENPERLISRLATQRHLTVGEEWSQDLHSSGRTDLKYSYRFVCDEHYYGEGCSVFCRPRDDAFGHFTCGERGEKVCNPGWKGPYCTEPICLPGCDEQHGFCDKPGECKCRVGWQGRYCDECIRYPGCLHGTCQQPWQCNCQEGWGGLFCNQDLNYCTHHKPCKNGATCTNTGQGSYTCSCRPGYTGATCELGIDECDPSPCKNGGSCTDLENSYSCTCPPGFYGKICELSAMTCADGPCFNGGRCSDSPDGGYSCRCPVGYSGFNCEKKIDYCSSSPCSNGAKCVDLGDAYLCRCQAGFSGRHCDDNVDDCASSPCANGGTCRDGVNDFSCTCPPGYTGRNCSAPVSRCEHAPCHNGATCHERGHRYVCECARGYGGPNCQFLLPELPPGPAVVDLTEKLEGQGGPFPW

SEQ ID NO: 2270 - protein, 492 aa, synthetic construct
  REGION 1..492: note = DLL3 (Q9NYJ7) SP+PP+ECD
MVSPRMSGLLSQTVILALIFLPQTRPAGVFELQIHSFGPGPGPGAPRSPCSARLPCRLFFRVCLKPGLSEEAAESPCALGAALSARGPVYTEQPGAPAPDLPLPDGLLQVPFRDAWPGTFSFIIETWREELGDQIGGPAWSLLARVAGRRRLAAGGPWARDIQRAGAWELRFSYRARCEPPAVGTACTRLCRPRSAPSRCGPGLRPCAPLEDECEAPLVCRAGCSPEHGFCEQPGECRCLEGWTGPLCTVPVSTSSCLSPRGPSSATTGCLVPGPGPCDGNPCANGGSCSETPRSFECTCPRGFYGLRCEVSGVTCADGPCFNGGLCVGGADPDSAYICHCPPGFQGSNCEKRVDRCSLQPCRNGGLCLDLGHALRCRCRAGFAGPRCEHDLDDCAGRACANGGTCVEGGGAHRCSCALGFGGRDCRERADPCAARPCAHGGRCYAHFSGLVCACAPGYMGARCEFPVHPDGASALPAAPPGLRPGDPQRYL

SEQ ID NO: 2271 - protein, 529 aa, synthetic construct
  REGION 1..529: note = DLL4 (Q9NR61) SP+PP+ECD
MAAASRSASGWALLLLVALWQQRAAGSGVFQLQLQEFINERGVLASGRPCEPGCRTFFRVCLKHFQAVVSPGPCTFGTVSTPVLGTNSFAVRDDSSGGGRNPLQLPFNFTWPGTFSLIIEAWHAPGDDLRPEALPPDALISKIAIQGSLAVGQNWLLDEQTSTLTRLRYSYRVICSDNYYGDNCSRLCKKRNDHFGHYVCQPDGNLSCLPGWTGEYCQQPICLSGCHEQNGYCSKPAECLCRPGWQGRLCNECIPHNGCRHGTCSTPWQCTCDEGWGGLFCDQDLNYCTHHSPCKNGATCSNSGQRSYTCTCRPGYTGVDCELELSECDSNPCRNGGSCKDQEDGYHCLCPPGYYGLHCEHSTLSCADSPCFNGGSCRERNQGANYACECPPNFTGSNCEKKVDRCTSNPCANGGQCLNRGPSRMCRCRPGFTGTYCELHVSDCARNPCAHGGTCHDLENGLMCTCPAGFSGRRCEVRTSIDACASSPCFNRATCYTDLSTDTFVCNCPYGFVGSRCEFPVGLPPSFPW

SEQ ID NO: 2272 - protein, 640 aa, synthetic construct
  REGION 1..640: note = DNER (Q8NFT8) SP+PP+ECD
MQPRRAQAPGAQLLPALALLLLLLGAGPRGSSLANPVPAAPLSAPGPCAAQPCRNGGVCTSRPEPDPQHPAPAGEPGYSCTCPAGISGANCQLVADPCASNPCHHGNCSSSSSSSSDGYLCICNEGYEGPNCEQALPSLPATGWTESMAPRQLQPVPATQEPDKILPRSQATVTLPTWQPKTGQKVVEMKWDQVEVIPDIACGNASSNSSAGGRLVSFEVPQNTSVKIRQDATASLILLWKVTATGFQQCSLIDGRSVTPLQASGGLVLLEEMLALGNNHFIGFVNDSVTKSIVALRLTLVVKVSTCVPGESHANDLECSGKGKCTTKPSEATFSCTCEEQYVGTFCEEYDACQRKPCQNNASCIDANEKQDGSNFTCVCLPGYTGELCQSKIDYCILDPCRNGATCISSLSGFTCQCPEGYFGSACEEKVDPCASSPCQNNGTCYVDGVHFTCNCSPGFTGPTCAQLIDFCALSPCAHGTCRSVGTSYKCLCDPGYHGLYCEEEYNECLSAPCLNAATCRDLVNGYECVCLAEYKGTHCELYKDPCANVSCLNGATCDSDGLNGTCICAPGFTGEECDIDINECDSNPCHHGGSCLDQPNGYNCHCPHGWVGANCEIHLQWKSGHMAESLTNMPRHSLY

SEQ ID NO: 2273 - protein, 448 aa, synthetic construct
  REGION 1..448: note = DPCR1 (Q3MIW9) SP+PP+ECD
MAQPVHSLCSAFGLQCCLLFLLASWGAGATTFQEYQKTGELSTSDHIFPLTPGLVYSIPFDHIVLHSGQRPPELPKSTEIHEQKRHCNTTRHSKPTDKPTGNSKTIDHKSSTDNHEAPPTSEENSSNQGKDPMIRNQRSVDPADSTTTHKESAGKKHITPAPKSKINCRKSTTGKSTVTRKSDKTGRPLEKSMSTLDKTSTSSHKTTTSFHNSGNSQTKQKSTSFPEKITAASKTTYKTTGTPEESEKTEDSRTTVASDKLLTKTTKNIQETISANELTQSLAEPTEHGGRTANENNTPSPAEPTENRERTANENKKTICTKGKNTPVPEKPTENLGNTTLTTETIKAPVKSTENPEKTAAVTKTIKPSVKVTGDKSLTTTSSHLNKTEVTHQVPTGSFTLITSRTKLSSITSEATGNESHPYLNKDGSQKGIHAGQMGENDSFPAWA

SEQ ID NO: 2274 - protein, 691 aa, synthetic construct
  REGION 1..691: note = DSC1 (Q08554) SP+PP+ECD
MALASAAPGSIFCKQLLFSLLVLTLLCDACQKVYLRVPSHLQAETLVGKVNLEECLKSASLIRSSDPAFRILEDGSIYTTHDLILSSERKSFSIFLSDGQRREQQEIKVVLSARENKSPKKRHTKDTALKRSKRRWAPIPASLMENSLGPFPQHVQQIQSDAAQNYTIFYSISGPGVDKEPFNLFYIEKDTGDIFCTRSIDREKYEQFALYGYATTADGYAPEYPLPLIIKIEDDNDNAPYFEHRVTIFTVPENCRSGTSVGKVTATDLDEPDTLHTRLKYKILQQIPDHPKHFSIHPDTGVITTTTPFLDREKCDTYQLIMEVRDMGGQPFGLFNTGTITISLEDENDNPPSFTETSYVTEVEENRIDVEILRMKVQDQDLPNTPHSKAVYKILQGNENGNFIISTDPNTNEGVLCVVKPLNYEVNRQVILQVGVINEAQFSKAASSQTPTMCTTTVTVKIIDSDEGPECHPPVKVIQSQDGFPAGQELLGYKALDPEISSGEGLRYQKLGDEDNWFEINQHTGDLRTLKVLDRESKFVKNNQYNISVVAVDAVGRSCTGTLVVHLDDYNDHAPQIDKEVTICQNNEDFAVLKPVDPDGPENGPPFQFFLDNSASKNWNIEEKDGKTAILRQRQNLDYNYYSVPIQIKDRHGLVATHMLTVRVCDCSTPSECRMKDKSTRDVRPNVILGR

SEQ ID NO: 2275 - protein, 694 aa, synthetic construct
  REGION 1..694: note = DSC2 (Q02487) SP+PP+ECD
MEAARPSGSWNGALCRLLLLTLAILIFASDACKNVTLHVPSKLDAEKLVGRVNLKECFTAANLIHSSDPDFQILEDGSVYTTNTILLSSEKRSFTILLSNTENQEKKKIFVFLEHQTKVLKKRHTKEKVLRRAKRRWAPIPCSMLENSLGPFPLFLQQVQSDTAQNYTIYYSIRGPGVDQEPRNLFYVERDTGNLYCTRPVDREQYESFEIIAFATTPDGYTPELPLPLIIKIEDENDNYPIFTEETYTFTIFENCRVGTTVGQVCATDKDEPDTMHTRLKYSIIGQVPPSPTLFSMHPTTGVITTTSSQLDRELIDKYQLKIKVQDMDGQYFGLQTTSTCIINIDDVNDHLPTFTRTSYVTSVEENTVDVEILRVTVEDKDLVNTANWRANYTILKGNENGNFKIVTDAKTNEGVLCVVKPLNYEEKQQMILQIGVVNEAPFSREASPRSAMSTATVTVNVEDQDEGPECNPPIQTVRMKENAEVGTTSNGYKAYDPETRSSSGIRYKKLTDPTGWVTIDENTGSIKVFRSLDREAETIKNGIYNITVLASDQGGRTCTGTLGIILQDVNDNSPFIPKKTVIICKPTMSSAEIVAVDPDEPIHGPPFDFSLESSTSEVQRMWRLKAINDTAARLSYQNDPPFGSYVVPITVRDRLGMSSVTSLDVTLCDCITENDCTHRVDPRIGGGGVQLGK

SEQ ID NO: 2276 - protein, 690 aa, synthetic construct
  REGION 1..690: note = DSC3 (Q14574) SP+PP+ECD
MAAAGPRRSVRGAVCLHLLLTLVIFSRAGEACKKVILNVPSKLEADKIIGRVNLEECFRSADLIRSSDPDFRVLNDGSVYTARAVALSDKKRSFTIWLSDKRKQTQKEVTVLLEHQKKVSKTRHTRETVLRRAKRRWAPIPCSMQENSLGPFPLFLQQVESDAAQNYTVFYSISGRGVDKEPLNLFYIERDTGNLFCTRPVDREEYDVFDLIAYASTADGYSADLPLPLPIRVEDENDNHPVFTEAIYNFEVLESSRPGTTVGVVCATDRDEPDTMHTRLKYSILQQTPRSPGLFSVHPSTGVITTVSHYLDREVVDKYSLIMKVQDMDGQFFGLIGTSTCIITVTDSNDNAPTFRQNAYEAFVEENAFNVEILRIPIEDKDLINTANWRVNFTILKGNENGHFKISTDKETNEGVLSVVKPLNYEENRQVNLEIGVNNEAPFARDIPRVTALNRALVTVHVRDLDEGPECTPAAQYVRIKENLAVGSKINGYKAYDPENRNGNGLRYKKLHDPKGWITIDEISGSIITSKILDREVETPKNELYNITVLAIDKDDRSCTGTLAVNIEDVNDNPPEILQEYVVICKPKMGYTDILAVDPDEPVHGAPFYFSLPNTSPEISRLWSLTKVNDTAARLSYQKNAGFQEYTIPITVKDRAGQAATKLLRVNLCECTHPTQCRATSRSTGVILGK

SEQ ID NO: 2277 - protein, 1595 aa, synthetic construct
  REGION 1..1595: note = DSCAM (O60469) SP+PP+ECD
MWILALSLFQSFANVFSEDLHSSLYFVNASLQEVVFASTTGTLVPCPAAGIPPVTLRWYLATGEEIYDVPGIRHVHPNGTLQIFPFPPSSFSTLIHDNTYYCTAENPSGKIRSQDVHIKAVLREPYTVRVEDQKTMRGNVAVFKCIIPSSVEAYITVVSWEKDTVSLVSGSRFLITSTGALYIKDVQNEDGLYNYRCITRHRYTGETRQSNSARLFVSDPANSAPSILDGFDHRKAMAGQRVELPCKALGHPEPDYRWLKDNMPLELSGRFQKTVTGLLIENIRPSDSGSYVCEVSNRYGTAKVIGRLYVKQPLKATISPRKVKSSVGSQVSLSCSVTGTEDQELSWYRNGEILNPGKNVRITGINHENLIMDHMVKSDGGAYQCFVRKDKLSAQDYVQVVLEDGTPKIISAFSEKVVSPAEPVSLMCNVKGTPLPTITWTLDDDPILKGGSHRISQMITSEGNVVSYLNISSSQVRDGGVYRCTANNSAGVVLYQARINVRGPASIRPMKNITAIAGRDTYIHCRVIGYPYYSIKWYKNSNLLPFNHRQVAFENNGTLKLSDVQKEVDEGEYTCNVLVQPQLSTSQSVHVTVKVPPFIQPFEFPRFSIGQRVFIPCVVVSGDLPITITWQKDGRPIPGSLGVTIDNIDFTSSLRISNLSLMHNGNYTCIARNEAAAVEHQSQLIVRVPPKFVVQPRDQDGIYGKAVILNCSAEGYPVPTIVWKFSKGAGVPQFQPIALNGRIQVLSNGSLLIKHVVEEDSGYYLCKVSNDVGADVSKSMYLTVKIPAMITSYPNTTLATQGQKKEMSCTAHGEKPIIVRWEKEDRIINPEMARYLVSTKEVGEEVISTLQILPTVREDSGFFSCHAINSYGEDRGIIQLTVQEPPDPPEIEIKDVKARTITLRWTMGFDGNSPITGYDIECKNKSDSWDSAQRTKDVSPQLNSATIIDIHPSSTYSIRMYAKNRIGKSEPSNELTITADEAAPDGPPQEVHLEPISSQSIRVTWKAPKKHLQNGIIRGYQIGYREYSTGGNFQFNIISVDTSGDSEVYTLDNLNKFTQYGLVVQACNRAGTGPSSQEIITTTLEDVPSYPPENVQAIATSPESISISWSTLSKEALNGILQGFRVIYWANLMDGELGEIKNITTTQPSLELDGLEKYTNYSIQVLAFTRAGDGVRSEQIFTRTKEDVPGPPAGVKAAAASASMVFVSWLPPLKLNGIIRKYTVFCSHPYPTVISEFEASPDSFSYRIPNLSRNRQYSVWVVAVTSAGRGNSSEIITVEPLAKAPARILTFSGTVTTPWMKDIVLPCKAVGDPSPAVKWMKDSNGTPSLVTIDGRRSIFSNGSFIIRTVKAEDSGYYSCIANNNWGSDEIILNLQVQVPPDQPRLTVSKTTSSSITLSWLPGDNGGSSIRGYILQYSEDNSEQWGSFPISPSERSYRLENLKCGTWYKFTLTAQNGVGPGRISEIIEAKTLGKEPQFSKEQELFASINTTRVRLNLIGWNDGGCPITSFTLEYRPFGTTVWTTAQRTSLSKSYILYDLQEATWYELQMRVCNSAGCAEKQANFATLNYDGSTIPPLIKSVVQNEEGLTTNEGLKM

SEQ ID NO: 2278 - protein, 1591 aa, synthetic construct
  REGION 1..1591: note = DSCAML1 (Q8TD84) SP+PP+ECD
MWLVTFLLLLDSLHKARPEDVGTSLYFVNDSLQQVTFSSSVGVVVPCPAAGSPSAALRWYLATGDDIYDVPHIRHVHANGTLQLYPFSPSAFNSFIHDNDYFCTAENAAGKIRSPNIRVKAVFREPYTVRVEDQRSMRGNVAVFKCLIPSSVQEYVSVVSWEKDTVSIIPEHRFFITYHGGLYISDVQKEDALSTYRCITKHKYSGETRQSNGARLSVTDPAESIPTILDGFHSQEVWAGHTVELPCTASGYPIPAIRWLKDGRPLPADSRWTKRITGLTISDLRTEDSGTYICEVTNTFGSAEATGILMVIDPLHVTLTPKKLKTGIGSTVILSCALTGSPEFTIRWYRNTELVLPDEAISIRGLSNETLLITSAQKSHSGAYQCFATRKAQTAQDFAIIALEDGTPRIVSSFSEKVVNPGEQFSLMCAAKGAPPPTVTWALDDEPIVRDGSHRTNQYTMSDGTTISHMNVTGPQIRDGGVYRCTARNLVGSAEYQARINVRGPPSIRAMRNITAVAGRDTLINCRVIGYPYYSIKWYKDALLLPDNHRQVVFENGTLKLTDVQKGMDEGEYLCSVLIQPQLSISQSVHVAVKVPPLIQPFEFPPASIGQLLYIPCVVSSGDMPIRITWRKDGQVIISGSGVTIESKEFMSSLQISSVSLKHNGNYTCIASNAAATVSRERQLIVRVPPRFVVQPNNQDGIYGKAGVLNCSVDGYPPPKVMWKHAKGSGNPQQYHPVPLTGRIQILPNSSLLIRHVLEEDIGYYLCQASNGVGTDISKSMFLTVKIPAMITSHPNTTIAIKGHAKELNCTARGERPIIIRWEKGDTVIDPDRVMRYAIATKDNGDEVVSTLKLKPADRGDSVFFSCHAINSYGEDRGLIQLTVQEPPDPPELEIREVKARSMNLRWTQRFDGNSIITGFDIEYKNKSDSWDFKQSTRNISPTINQANIVDLHPASVYSIRMYSFNKIGRSEPSKELTISTEEAAPDGPPMDVTLQPVTSQSIQVTWKAPKKELQNGVIRGYQIGYRENSPGSNGQYSIVEMKATGDSEVYTLDNLKKFAQYGVVVQAFNRAGTGPSSSEINATTLEDVPSQPPENVRALSITSDVAVISWSEPPRSTLNGVLKGYRVIFWSLYVDGEWGEMQNITTTRERVELRGMEKFTNYSVQVLAYTQAGDGVRSSVLYIQTKEDVPGPPAGIKAVPSSASSVVVSWLPPTKPNGVIRKYTIFCSSPGSGQPAPSEYETSPEQLFYRIAHLNRGQQYLLWVAAVTSAGRGNSSEKVTIEPAGKAPAKIISFGGTVTTPWMKDVRLPCNSVGDPAPAVKWTKDSEDSAIPVSMDGHRLIHTNGTLLLRAVKAEDSGYYTCTATNTGGFDTIIVNLLVQVPPDQPRLTVSKTSASSITLTWIPGDNGGSSIRGFVLQYSVDNSEEWKDVFISSSERSFKLDSLKCGTWYKVKLAAKNSVGSGRISEIIEAKTHGREPSFSKDQHLFTHINSTHARLNLQGWNNGGCPITAIVLEYRPKGTWAWQGLRANSSGEVFLTELREATWYELRMRACNSAGCGNETAQFATLDYDGSTIPPIKSAQGEGDDVKK

SEQ ID NO: 2279 - protein, 548 aa, synthetic construct
  REGION 1..548: note = DSG1 (Q02413) SP+PP+ECD
MDWSFFRVVAMLFIFLVVVEVNSEFRIQVRDYNTKNGTIKWHSIRRQKREWIKFAAACREGEDNSKRNPIAKIHSDCAANQQVTYRISGVGIDQPPYGIFVINQKTGEINITSIVDREVTPFFIIYCRALNSMGQDLERPLELRVRVLDINDNPPVFSMATFAGQIEENSNANTLVMILNATDADEPNNLNSKIAFKIIRQEPSDSPMFIINRNTGEIRTMNNFLDREQYGQYALAVRGSDRDGGADGMSAECECNIKILDVNDNIPYMEQSSYTIEIQENTLNSNLLEIRVIDLDEEFSANWMAVIFFISGNEGNWFEIEMNERTNVGILKVVKPLDYEAMQSLQLSIGVRNKAEFHHSIMSQYKLKASAISVTVLNVIEGPVFRPGSKTYVVTGNMGSNDKVGDFVATDLDTGRPSTTVRYVMGNNPADLLAVDSRTGKLTLKNKVTKEQYNMLGGKYQGTILSIDDNLQRTCTGTININIQSFGNDDRTNTEPNTKITTNTGRQESTSSTNYDTSTTSTDSSQVYSSEPGNGAKDLLSDNVHFGP

SEQ ID NO: 2280 - protein, 609 aa, synthetic construct
  REGION 1..609: note = DSG2 (Q14126) SP+PP+ECD
MARSPGRAYALLLLLICFNVGSGLHLQVLSTRNENKLLPKHPHLVRQKRAWITAPVALREGEDLSKKNPIAKIHSDLAEERGLKITYKYTGKGITEPPFGIFVFNKDTGELNVTSILDREETPFFLLTGYALDARGNNVEKPLELRIKVLDINDNEPVFTQDVFVGSVEELSAAHTLVMKINATDADEPNTLNSKISYRIVSLEPAYPPVFYLNKDTGEIYTTSVTLDREEHSSYTLTVEARDGNGEVTDKPVKQAQVQIRILDVNDNIPVVENKVLEGMVEENQVNVEVTRIKVFDADEIGSDNWLANFTFASGNEGGYFHIETDAQTNEGIVTLIKEVDYEEMKNLDFSVIVANKAAFHKSIRSKYKPTPIPIKVKVKNVKEGIHFKSSVISIYVSESMDRSSKGQIIGNFQAFDEDTGLPAHARYVKLEDRDNWISVDSVTSEIKLAKLPDFESRYVQNGTYTVKIVAISEDYPRKTITGTVLINVEDINDNCPTLIEPVQTICHDAEYVNVTAEDLDGHPNSGPFSFSVIDKPPGMAEKWKIARQESTSVLLQQSEKKLGRSEIQFLISDNQGFSCPEKQVLTLTVCECLHGSGCREAQHDSYVG

SEQ ID NO: 2281 - protein, 615 aa, synthetic construct
  REGION 1..615: note = DSG3 (P32926) SP+PP+ECD
MMGLFPRTTGALAIFVVVILVHGELRIETKGQYDEEEMTMQQAKRRQKREWVKFAKPCREGEDNSKRNPIAKITSDYQATQKITYRISGVGIDQPPFGIFVVDKNTGDINITAIVDREETPSFLITCRALNAQGLDVEKPLILTVKILDINDNPPVFSQQIFMGEIEENSASNSLVMILNATDADEPNHLNSKIAFKIVSQEPAGTPMFLLSRNTGEVRTLTNSLDREQASSYRLVVSGADKDGEGLSTQCECNIKVKDVNDNFPMFRDSQYSARIEENILSSELLRFQVTDLDEEYTDNWLAVYFFTSGNEGNWFEIQTDPRTNEGILKVVKALDYEQLQSVKLSIAVKNKAEFHQSVISRYRVQSTPVTIQVINVREGIAFRPASKTFTVQKGISSKKLVDYILGTYQAIDEDTNKAASNVKYVMGRNDGGYLMIDSKTAEIKFVKNMNRDSTFIVNKTITAEVLAIDEYTGKTSTGTVYVRVPDFNDNCPTAVLEKDAVCSSSPSVVVSARTLNNRYTGPYTFALEDQPVKLPAVWSITTLNATSALLRAQEQIPPGVYHISLVLTDSQNNRCEMPRSLTLEVCQCDNRGICGTSYPTTSPGTRYGRPHSGR

SEQ ID NO: 2282 - protein, 631 aa, synthetic construct
  REGION 1..631: note = DSG4 (Q86SJ6) SP+PP+ECD
MDWLFFRNICLLIILMVVMEVNSEFIVEVKEFDIENGTTKWQTVRRQKREWIKFAAACREGEDNSKRNPIAKIRSDCESNQKITYRISGVGIDRPPYGVFTINPRTGEINITSVVDREITPLFLIYCRALNSRGEDLERPLELRVKVMDINDNAPVFSQSVYTASIEENSDANTLVVKLCATDADEENHLNSKIAYKIVSQEPSGAPMFILNRYTGEVCTMSSFLDREQHSMYNLVVRGSDRDGAADGLSSECDCRIKVLDVNDNFPTLEKTSYSASIEENCLSSELIRLQAIDLDEEGTDNWLAQYLILSGNDGNWFDIQTDPQTNEGILKVVKMLDYEQAPNIQLSIGVKNQADFHYSVASQFQMHPTPVRIQVVDVREGPAFHPSTMAFSVREGIKGSSLLNYVLGTYTAIDLDTGNPATDVRYIIGHDAGSWLKIDSRTGEIQFSREFDKKSKYIINGIYTAEILAIDDGSGKTATGTICIEVPDINDYCPNIFPERRTICIDSPSVLISVNEHSYGSPFTFCVVDEPPGIADMWDVRSTNATSAILTAKQVLSPGFYEIPILVKDSYNRACELAQMVQLYACDCDDNHMCLDSGAAGIYTEDITGDTYGPVTEDQAGVSNVGLGPA

SEQ ID NO: 2283 - protein, 124 aa, synthetic construct
  REGION 1..124: note = ECSCR (Q19T08) SP+PP+ECD
MGTAGAMQLCWVILGFLLFRGHNSQPTMTQTSSSQGGLGGLSLTTEPVSSNPGYIPSSEANRPSHLSSTGTPGAGVPSSGRDGGTSRDTFQTVPPNSTTMSLSMREDATILPSPTSETVLTVAA

SEQ ID NO: 2284 - protein, 187 aa, synthetic construct
  REGION 1..187: note = EDAR (Q9UNE0) SP+PP+ECD
MAHVGDCTQTPWLPVLVVSLMCSARAEYSNCGENEYYNQTTGLCQECPPCGPGEEPYLSCGYGTKDEDYGCVPCPAEKFSKGGYQICRRHKDCEGFFRATVLTPGDMENDAECGPCLPGYYMLENRPRNIYGMVCYSCLLAPPNTKECVGATSGASANFPGTSGSSTLSPFQHAHKELSGQGHLATA

SEQ ID NO: 2285 - protein, 237 aa, synthetic construct
  REGION 1..237: note = EFNB1 (P98172) SP+PP+ECD
MARPGQRWLGKWLVAMVVWALCRLATPLAKNLEPVSWSSLNPKFLSGKGLVIYPKIGDKLDIICPRAEAGRPYEYYKLYLVRPEQAAACSTVLDPNVLVTCNRPEQEIRFTIKFQEFSPNYMGLEFKKHHDYYITSTSNGSLEGLENREGGVCRTRTMKIIMKVGQDPNAVTPEQLTTSRPSKEADNTVKMATQAPGSRGSLGDSDGKHETVNQEEKSGPGASGGSSGDPDGFFNSK

SEQ ID NO: 2286 - protein, 229 aa, synthetic construct
  REGION 1..229: note = EFNB2 (P52799) SP+PP+ECD
MAVRRDSVWKYCWGVLMVLCRTAISKSIVLEPIYWNSSNSKFLPGQGLVLYPQIGDKLDIICPKVDSKTVGQYEYYKVYMVDKDQADRCTIKKENTPLLNCAKPDQDIKFTIKFQEFSPNLWGLEFQKNKDYYIISTSNGSLEGLDNQEGGVCQTRAMKILMKVGQDASSAGSTRNKDPTRRPELEAGTNGRSSTTSPFVKPNPGSSTDGNSAGHSGNNILGSEVALFA

SEQ ID NO: 2287 - protein, 226 aa, synthetic construct
  REGION 1..226: note = EFNB3 (Q15768) SP+PP+ECD
MGPPHSGPGGVRVGALLLLGVLGLVSGLSLEPVYWNSANKRFQAEGGYVLYPQIGDRLDLLCPRARPPGPHSSPNYEFYKLYLVGGAQGRRCEAPPAPNLLLTCDRPDLDLRFTIKFQEYSPNLWGHEFRSHHDYYIIATSDGTREGLESLQGGVCLTRGMKVLLRVGQSPRGGAVPRKPVSEMPMERDRGAAHSLEPGKENLPGDPTSNATSRGAEGPLPPPSMP

SEQ ID NO: 2288 - protein, 1032 aa, synthetic construct
  REGION 1..1032: note = EGF (P01133) SP+PP+ECD
MLLTLIILLPVVSKFSFVSLSAPQHWSCPEGTLAGNGNSTCVGPAPFLIFSHGNSIFRIDTEGTNYEQLVVDAGVSVIMDFHYNEKRIYWVDLERQLLQRVFLNGSRQERVCNIEKNVSGMAINWINEEVIWSNQQEGIITVTDMKGNNSHILLSALKYPANVAVDPVERFIFWSSEVAGSLYRADLDGVGVKALLETSEKITAVSLDVLDKRLFWIQYNREGSNSLICSCDYDGGSVHISKHPTQHNLFAMSLFGDRIFYSTWKMKTIWIANKHTGKDMVRINLHSSFVPLGELKVVHPLAQPKAEDDTWEPEQKLCKLRKGNCSSTVCGQDLQSHLCMCAEGYALSRDRKYCEDVNECAFWNHGCTLGCKNTPGSYYCTCPVGFVLLPDGKRCHQLVSCPRNVSECSHDCVLTSEGPLCFCPEGSVLERDGKTCSGCSSPDNGGCSQLCVPLSPVSWECDCFPGYDLQLDEKSCAASGPQPFLLFANSQDIRHMHFDGTDYGTLLSQQMGMVYALDHDPVENKIYFAHTALKWIERANMDGSQRERLIEEGVDVPEGLAVDWIGRRFYWTDRGKSLIGRSDLNGKRSKIITKENISQPRGIAVHPMAKRLFWTDTGINPRIESSSLQGLGRLVIASSDLIWPSGITIDFLTDKLYWCDAKQSVIEMANLDGSKRRRLTQNDVGHPFAVAVFEDYVWFSDWAMPSVMRVNKRTGKDRVRLQGSMLKPSSLVVVHPLAKPGADPCLYQNGGCEHICKKRLGTAWCSCREGFMKASDGKTCLALDGHQLLAGGEVDLKNQVTPLDILSKTRVSEDNITESQHMLVAEIMVSDQDDCAPVGCSMYARCISEGEDATCQCLKGFAGDGKLCSDIDECEMGVPVCPPASSKCINTEGGYVCRCSEGYQGDGIHCLDIDECQLGEHSCGENASCTNTEGGYTCMCAGRLSEPGLICPDSTPPPHLREDDHHYSVRNSDSECPLSHDGYCLHDGVCMYIEALDKYACNCVVGYIGERCQYRDLKWWELRHAGHGQQQK

SEQ ID NO: 2289 - protein, 645 aa, synthetic construct
  REGION 1..645: note = EGFR (P00533) SP+PP+ECD
MRPSGTAGAALLALLAALCPASRALEEKKVCQGTSNKLTQLGTFEDHFLSLQRMFNNCEVVLGNLEITYVQRNYDLSFLKTIQEVAGYVLIALNTVERIPLENLQIIRGNMYYENSYALAVLSNYDANKTGLKELPMRNLQEILHGAVRFSNNPALCNVESIQWRDIVSSDFLSNMSMDFQNHLGSCQKCDPSCPNGSCWGAGEENCQKLTKIICAQQCSGRCRGKSPSDCCHNQCAAGCTGPRESDCLVCRKFRDEATCKDTCPPLMLYNPTTYQMDVNPEGKYSFGATCVKKCPRNYVVTDHGSCVRACGADSYEMEEDGVRKCKKCEGPCRKVCNGIGIGEFKDSLSINATNIKHFKNCTSISGDLHILPVAFRGDSFTHTPPLDPQELDILKTVKEITGFLLIQAWPENRTDLHAFENLEIIRGRTKQHGQFSLAVVSLNITSLGLRSLKEISDGDVIISGNKNLCYANTINWKKLFGTSGQKTKIISNRGENSCKATGQVCHALCSPEGCWGPEPRDCVSCRNVSRGRECVDKCNLLEGEPREFVENSECIQCHPECLPQAMNITCTGRGPDNCIQCAHYIDGPHCVKTCPAGVMGENNTLVWKYADAGHVCHLCHPNCTYGCTGPGLEGCPTNGPKIPS

SEQ ID NO: 2290 - protein, 418 aa, synthetic construct
  REGION 1..418: note = ELFN1 (P0C7U0) SP+PP+ECD
MAGRGWGALWVCVAAATLLHAGGLARADCWLIEGDKGFVWLAICSQNQPPYEAIPQQINSTIVDLRLNENRIRSVQYASLSRFGNLTYLNLTKNEIGYIEDGAFSGQFNLQVLQLGYNRLRNLTEGMLRGLGKLEYLYLQANLIEVVMASSFWECPNIVNIDLSMNRIQQLNSGTFAGLAKLSVCELYSNPFYCSCELLGFLRWLAAFTNATQTYDRMQCESPPVYSGYYLLGQGRRGHRSILSKLQSVCTEDSYAAEVVGPPRPASGRSQPGRSPPPPPPPEPSDMPCADDECFSGDGTTPLVALPTLATQAEARPLIKVKQLTQNSATITVQLPSPFHRMYTLEHFNNSKASTVSRLTKAQEEIRLTNLFTLTNYTYCVVSTSAGLRHNHTCLTICLPRLPSPPGPVPSPSTATHY

SEQ ID NO: 2291 - protein, 397 aa, synthetic construct
  REGION 1..397: note = ELFN2 (Q5R3F8) SP+PP+ECD
MLRLGLCAAALLCVCRPGAVRADCWLIEGDKGYVWLAICSQNQPPYETIPQHINSTVHDLRLNENKLKAVLYSSLNRFGNLTDLNLTKNEISYIEDGAFLGQSSLQVLQLGYNKLSNLTEGMLRGMSRLQFLFVQHNLIEVVTPTAFSECPSLISIDLSSNRLSRLDGATFASLASLMVCELAGNPFNCECDLFGFLAWLVVFNNVTKNYDRLQCESPREFAGYPLLVPRPYHSLNAITVLQAKCRNGSLPARPVSHPTPYSTDAQREPDENSGFNPDEILSVEPPASSTTDASAGPAIKLHHVTFTSATLVVIIPHPYSKMYILVQYNNSYFSDVMTLKNKKEIVTLDKLRAHTEYTFCVTSLRNSRRFNHTCLTFTTRDPVPGDLAPSTSTTTHY

SEQ ID NO: 2292 - protein, 260 aa, synthetic construct
  REGION 1..260: note = EMB (Q6PCB8) SP+PP+ECD
MRALPGLLEARARTPRLLLLQCLLAAARPSSADGSAPDSPFTSPPLREEIMANNFSLESHNISLTEHSSMPVEKNITLERPSNVNLTCQFTTSGDLNAVNVTWKKDGEQLENNYLVSATGSTLYTQYRFTIINSKQMGSYSCFFREEKEQRGTFNFKVPELHGKNKPLISYVGDSTVLTCKCQNCFPLNWTWYSSNGSVKVPVGVQMNKYVINGTYANETKLKITQLLEEDGESYWCRALFQLGESEEHIELVVLSYLVP

SEQ ID NO: 2293 - protein, 190 aa, synthetic construct
  REGION 1..190: note = EMCN (Q9ULC0) SP+PP+ECD
MELLQVTILFLLPSICSSNSTGVLEAANNSLVVTTTKPSITTPNTESLQKNVVTPTTGTTPKGTITNELLKMSLMSTATFLTSKDEGLKATTTDVRKNDSIISNVTVTSVTLPNAVSTLQSSKPKTETQSSIKTTEIPGSVLQPDASPSKTGTLTSIPVTIPENTSQSQVIGTEGGKNASTSATSRSYSS

SEQ ID NO: 2294 - protein, 586 aa, synthetic construct
  REGION 1..586: note = ENG (P17813) SP+PP+ECD
MDRGTLPLAVALLLASCSLSPTSLAETVHCDLQPVGPERGEVTYTTSQVSKGCVAQAPNAILEVHVLFLEFPTGPSQLELTLQASKQNGTWPREVLLVLSVNSSVFLHLQALGIPLHLAYNSSLVTFQEPPGVNTTELPSFPKTQILEWAAERGPITSAAELNDPQSILLRLGQAQGSLSFCMLEASQDMGRTLEWRPRTPALVRGCHLEGVAGHKEAHILRVLPGHSAGPRTVTVKVELSCAPGDLDAVLILQGPPYVSWLIDANHNMQIWTTGEYSFKIFPEKNIRGFKLPDTPQGLLGEARMLNASIVASFVELPLASIVSLHASSCGGRLQTSPAPIQTTPPKDTCSPELLMSLIQTKCADDAMTLVLKKELVAHLKCTITGLTFWDPSCEAEDRGDKFVLRSAYSSCGMQVSASMISNEAVVNILSSSSPQRKKVHCLNMDSLSFQLGLYLSPHFLQASNTIEPGQQSFVQVRVSPSVSEFLLQLDSCHLDLGPEGGTVELIQGRAAKGNCVSLLSPSPEGDPRFSFLLHFYTVPIPKTGTLSCTVALRPKTGSQDQEVHRTVFMRLNIISPDLSGCTSKG

SEQ ID NO: 2295 - protein, 407 aa, synthetic construct
  REGION 1..407: note = ENPP4 (Q9Y6X5) SP+PP+ECD
MKLLVILLFSGLITGFRSDSSSSLPPKLLLVSFDGFRADYLKNYEFPHLQNFIKEGVLVEHVKNVFITKTFPNHYSIVTGLYEESHGIVANSMYDAVTKKHFSDSNDKDPFWWNEAVPIWVTNQLQENRSSAAAMWPGTDVPIHDTISSYFMNYNSSVSFEERLNNITMWLNNSNPPVTFATLYWEEPDASGHKYGPEDKENMSRVLKKIDDLIGDLVQRLKMLGLWENLNVIITSDHGMTQCSQDRLINLDSCIDHSYYTLIDLSPVAAILPKINRTEVYNKLKNCSPHMNVYLKEDIPNRFYYQHNDRIQPIILVADEGWTIVLNESSQKLGDHGYDNSLPSMHPFLAAHGPAFHKGYKHSTINIVDIYPMMCHILGLKPHPNNGTFGHTKCLLVDQWCINLPEA

SEQ ID NO: 2296 - protein, 431 aa, synthetic construct
  REGION 1..431: note = ENPP5 (Q9UJA9) SP+PP+ECD
MTSKFLLVSFILAALSLSTTFSLQPDQQKVLLVSFDGFRWDYLYKVPTPHFHYIMKYGVHVKQVTNVFITKTYPNHYTLVTGLFAENHGIVANDMFDPIRNKSFSLDHMNIYDSKFWEEATPIWITNQRAGHTSGAAMWPGTDVKIHKRFPTHYMPYNESVSFEDRVAKIIEWFTSKEPINLGLLYWEDPDDMGHHLGPDSPLMGPVISDIDKKLGYLIQMLKKAKLWNTLNLIITSDHGMTQCSEERLIELDQYLDKDHYTLIDQSPVAAILPKEGKFDEVYEALTHAHPNLTVYKKEDVPERWHYKYNSRIQPIIAVADEGWHILQNKSDDFLLGNHGYDNALADMHPIFLAHGPAFRKNFSKEAMNSTDLYPLLCHLLNITAMPHNGSFWNVQDLLNSAMPRVVPYTQSTILLPGSVKPAEYDQEGSY

SEQ ID NO: 2297 - protein, 265 aa, synthetic construct
  REGION 1..265: note = EPCAM (P16422) SP+PP+ECD
MAPPQVLAFGLLLAAATATFAAAQEECVCENYKLAVNCFVNNNRQCQCTSVGAQNTVICSKLAAKCLVMKAEMNGSKLGRRAKPEGALQNNDGLYDPDCDESGLFKAKQCNGTSMCWCVNTAGVRRTDKDTEITCSERVRTYWIIIELKHKAREKPYDSKSLRTALQKEITTRYQLDPKFITSILYENNVITIDLVQNSSQKTQNDVDIADVAYYFEKDVKGESLFHSKKMDLTVNGEQLDLDPGQTLIYYVDEKAPEFSMQGLK

SEQ ID NO: 2298 - protein, 110 aa, synthetic construct
  REGION 1..110: note = EPGN (Q6UW88) SP+PP+ECD
MALGVPISVYLLFNAMTALTEEAAVTVTPPITAQQGNWTVNKTEADNIEGPIALKFSHLCLEDHNSYCINGACAFHHELEKAICRCFTGYTGERCEHLTLTSYAVDSYEK

SEQ ID NO: 2299 - protein, 547 aa, synthetic construct
  REGION 1..547: note = EPHA1 (P21709) SP+PP+ECD
MERRWPLGLGLVLLLCAPLPPGARAKEVTLMDTSKAQGELGWLLDPPKDGWSEQQQILNGTPLYMYQDCPMQGRRDTDHWLRSNWIYRGEEASRVHVELQFTVRDCKSFPGGAGPLGCKETFNLLYMESDQDVGIQLRRPLFQKVTTVAADQSFTIRDLVSGSVKLNVERCSLGRLTRRGLYLAFHNPGACVALVSVRVFYQRCPETLNGLAQFPDTLPGPAGLVEVAGTCLPHARASPRPSGAPRMHCSPDGEWLVPVGRCHCEPGYEEGGSGEACVACPSGSYRMDMDTPHCLTCPQQSTAESEGATICTCESGHYRAPGEGPQVACTGPPSAPRNLSFSASGTQLSLRWEPPADTGGRQDVRYSVRCSQCQGTAQDGGPCQPCGVGVHFSPGARGLTTPAVHVNGLEPYANYTFNVEAQNGVSGLGSSGHASTSVSISMGHAESLSGLSLRLVKKEPRQLELTWAGSRPRSPGANLTYELHVLNQDEERYQMVLEPRVLLTELQPDTTYIVRVRMLTPLGPGPFSPDHEFRTSPPVSRGLTGGE

SEQ ID NO: 2300 - protein, 565 aa, synthetic construct
  REGION 1..565: note = EPHA10 (Q5JZY3) SP+PP+ECD
METCAGPHPLRLFLCRMQLCLALLLGPWRPGTAEEVILLDSKASQAELGWTALPSNGWEEISGVDEHDRPIRTYQVCNVLEPNQDNWLQTGWISRGRGQRIFVELQFTLRDCSSIPGAAGTCKETFNVYYLETEADLGRGRPRLGGSRPRKIDTIAADESFTQGDLGERKMKLNTEVREIGPLSRRGFHLAFQDVGACVALVSVRVYYKQCRATVRGLATFPATAAESAFSTLVEVAGTCVAHSEGEPGSPPRMHCGADGEWLVPVGRCSCSAGFQERGDFCEACPPGFYKVSPRRPLCSPCPEHSRALENASTFCVCQDSYARSPTDPPSASCTRPPSAPRDLQYSLSRSPLVLRLRWLPPADSGGRSDVTYSLLCLRCGREGPAGACEPCGPRVAFLPRQAGLRERAATLLHLRPGARYTVRVAALNGVSGPAAAAGTTYAQVTVSTGPGAPWEEDEIRRDRVEPQSVSLSWREPIPAGAPGANDTEYEIRYYEKGQSEQTYSMVKTGAPTVTVTNLKPATRYVFQIRAASPGPSWEAQSFNPSIEVQTLGEAASGSRDQSPA

SEQ ID NO: 2301 - protein, 537 aa, synthetic construct
  REGION 1..537: note = EPHA2 (P29317) SP+PP+ECD
MELQAARACFALLWGCALAAAAAAQGKEVVLLDFAAAGGELGWLTHPYGKGWDLMQNIMNDMPIYMYSVCNVMSGDQDNWLRTNWVYRGEAERIFIELKFTVRDCNSFPGGASSCKETFNLYYAESDLDYGTNFQKRLFTKIDTIAPDEITVSSDFEARHVKLNVEERSVGPLTRKGFYLAFQDIGACVALLSVRVYYKKCPELLQGLAHFPETIAGSDAPSLATVAGTCVDHAVVPPGGEEPRMHCAVDGEWLVPIGQCLCQAGYEKVEDACQACSPGFFKFEASESPCLECPEHTLPSPEGATSCECEEGFFRAPQDPASMPCTRPPSAPHYLTAVGMGAKVELRWTPPQDSGGREDIVYSVTCEQCWPESGECGPCEASVRYSEPPHGLTRTSVTVSDLEPHMNYTFTVEARNGVSGLVTSRSFRTASVSINQTEPPKVRLEGRSTTSLSVSWSIPPPQQSRVWKYEVTYRKKGDSNSYNVRRTEGFSVTLDDLAPDTTYLVQVQALTQEGQGAGSKVHEFQTLSPEGSGNLAV

SEQ ID NO: 2302 - protein, 541 aa, synthetic construct
  REGION 1..541: note = EPHA3 (P29320) SP+PP+ECD
MDCQLSILLLLSCSVLDSFGELIPQPSNEVNLLDSKTIQGELGWISYPSHGWEEISGVDEHYTPIRTYQVCNVMDHSQNNWLRTNWVPRNSAQKIYVELKFTLRDCNSIPLVLGTCKETFNLYYMESDDDHGVKFREHQFTKIDTIAADESFTQMDLGDRILKLNTEIREVGPVNKKGFYLAFQDVGACVALVSVRVYFKKCPFTVKNLAMFPDTVPMDSQSLVEVRGSCVNNSKEEDPPRMYCSTEGEWLVPIGKCSCNAGYEERGFMCQACRPGFYKALDGNMKCAKCPPHSSTQEDGSMNCRCENNYFRADKDPPSMACTRPPSSPRNVISNINETSVILDWSWPLDTGGRKDVTFNIICKKCGWNIKQCEPCSPNVRFLPRQFGLTNTTVTVTDLLAHTNYTFEIDAVNGVSELSSPPRQFAAVSITTNQAAPSPVLTIKKDRTSRNSISLSWQEPEHPNGIILDYEVKYYEKQEQETSYTILRARGTNVTISSLKPDTIYVFQIRARTAAGYGTNSRKFEFETSPDSFSISGESSQ

SEQ ID NO: 2303 - protein, 547 aa, synthetic construct
  REGION 1..547: note = EPHA4 (P54764) SP+PP+ECD
MAGIFYFALFSCLFGICDAVTGSRVYPANEVTLLDSRSVQGELGWIASPLEGGWEEVSIMDEKNTPIRTYQVCNVMEPSQNNWLRTDWITREGAQRVYIEIKFTLRDCNSLPGVMGTCKETFNLYYYESDNDKERFIRENQFVKIDTIAADESFTQVDIGDRIMKLNTEIRDVGPLSKKGFYLAFQDVGACIALVSVRVFYKKCPLTVRNLAQFPDTITGADTSSLVEVRGSCVNNSEEKDVPKMYCGADGEWLVPIGNCLCNAGHEERSGECQACKIGYYKALSTDATCAKCPPHSYSVWEGATSCTCDRGFFRADNDAASMPCTRPPSAPLNLISNVNETSVNLEWSSPQNTGGRQDISYNVVCKKCGAGDPSKCRPCGSGVHYTPQQNGLKTTKVSITDLLAHTNYTFEIWAVNGVSKYNPNPDQSVSVTVTTNQAAPSSIALVQAKEVTRYSVALAWLEPDRPNGVILEYEVKYYEKDQNERSYRIVRTAARNTDIKGLNPLTSYVFHVRARTAAGYGDFSEPLEVTTNTVPSRIIGDGANST

SEQ ID NO: 2304 - protein, 573 aa, synthetic construct
  REGION 1..573: note = EPHA5 (P54756) SP+PP+ECD
MRGSGPRGAGRRRPPSGGGDTPITPASLAGCYSAPRRAPLWTCLLLCAALRTLLASPSNEVNLLDSRTVMGDLGWIAFPKNGWEEIGEVDENYAPIHTYQVCKVMEQNQNNWLLTSWISNEGASRIFIELKFTLRDCNSLPGGLGTCKETFNMYYFESDDQNGRNIKENQYIKIDTIAADESFTELDLGDRVMKLNTEVRDVGPLSKKGFYLAFQDVGACIALVSVRVYYKKCPSVVRHLAVFPDTITGADSSQLLEVSGSCVNHSVTDEPPKMHCSAEGEWLVPIGKCMCKAGYEEKNGTCQVCRPGFFKASPHIQSCGKCPPHSYTHEEASTSCVCEKDYFRRESDPPTMACTRPPSAPRNAISNVNETSVFLEWIPPADTGGRKDVSYYIACKKCNSHAGVCEECGGHVRYLPRQSGLKNTSVMMVDLLAHTNYTFEIEAVNGVSDLSPGARQYVSVNVTTNQAAPSPVTNVKKGKIAKNSISLSWQEPDRPNGIILEYEIKYFEKDQETSYTIIKSKETTITAEGLKPASVYVFQIRARTAAGYGVFSRRFEFETTPVFAASSDQSQIP

SEQ ID NO: 2305 - protein, 550 aa, synthetic construct
  REGION 1..550: note = EPHA6 (Q9UF33) SP+PP+ECD
MGGCEVREFLLQFGFFLPLLTAWPGDCSHVSNNQVVLLDTTTVLGELGWKTYPLNGWDAITEMDEHNRPIHTYQVCNVMEPNQNNWLRTNWISRDAAQKIYVEMKFTLRDCNSIPWVLGTCKETFNLFYMESDESHGIKFKPNQYTKIDTIAADESFTQMDLGDRILKLNTEIREVGPIERKGFYLAFQDIGACIALVSVRVFYKKCPFTVRNLAMFPDTIPRVDSSSLVEVRGSCVKSAEERDTPKLYCGADGDWLVPLGRCICSTGYEEIEGSCHACRPGFYKAFAGNTKCSKCPPHSLTYMEATSVCQCEKGYFRAEKDPPSMACTRPPSAPRNVVFNINETALILEWSPPSDTGGRKDLTYSVICKKCGLDTSQCEDCGGGLRFIPRHTGLINNSVIVLDFVSHVNYTFEIEAMNGVSELSFSPKPFTAITVTTDQDAPSLIGVVRKDWASQNSIALSWQAPAFSNGAILDYEIKYYEKEHEQLTYSSTRSKAPSVIITGLKPATKYVFHIRVRTATGYSGYSQKFEFETGDETSDMAAEQGQILV

SEQ ID NO: 2306 - protein, 555 aa, synthetic construct
  REGION 1..555: note = EPHA7 (Q15375) SP+PP+ECD
MVFQTRYPSWIILCYIWLLRFAHTGEAQAAKEVLLLDSKAQQTELEWISSPPNGWEEISGLDENYTPIRTYQVCQVMEPNQNNWLRTNWISKGNAQRIFVELKFTLRDCNSLPGVLGTCKETFNLYYYETDYDTGRNIRENLYVKIDTIAADESFTQGDLGERKMKLNTEVREIGPLSKKGFYLAFQDVGACIALVSVKVYYKKCWSIIENLAIFPDTVTGSEFSSLVEVRGTCVSSAEEEAENAPRMHCSAEGEWLVPIGKCICKAGYQQKGDTCEPCGRGFYKSSSQDLQCSRCPTHSFSDKEGSSRCECEDGYYRAPSDPPYVACTRPPSAPQNLIFNINQTTVSLEWSPPADNGGRNDVTYRILCKRCSWEQGECVPCGSNIGYMPQQTGLEDNYVTVMDLLAHANYTFEVEAVNGVSDLSRSQRLFAAVSITTGQAAPSQVSGVMKERVLQRSVELSWQEPEHPNGVITEYEIKYYEKDQRERTYSTVKTKSTSASINNLKPGTVYVFQIRAFTAAGYGNYSPRLDVATLEEATGKMFEATAVSSEQNPV

SEQ ID NO: 2307 - protein, 542 aa, synthetic construct
  REGION 1..542: note = EPHA8 (P29322) SP+PP+ECD
MAPARGRLPPALWVVTAAAAAATCVSAARGEVNLLDTSTIHGDWGWLTYPAHGWDSINEVDESFQPIHTYQVCNVMSPNQNNWLRTSWVPRDGARRVYAEIKFTLRDCNSMPGVLGTCKETFNLYYLESDRDLGASTQESQFLKIDTIAADESFTGADLGVRRLKLNTEVRSVGPLSKRGFYLAFQDIGACLAILSLRIYYKKCPAMVRNLAAFSEAVTGADSSSLVEVRGQCVRHSEERDTPKMYCSAEGEWLVPIGKCVCSAGYEERRDACVACELGFYKSAPGDQLCARCPPHSHSAAPAAQACHCDLSYYRAALDPPSSACTRPPSAPVNLISSVNGTSVTLEWAPPLDPGGRSDITYNAVCRRCPWALSRCEACGSGTRFVPQQTSLVQASLLVANLLAHMNYSFWIEAVNGVSDLSPEPRRAAVVNITTNQAAPSQVVVIRQERAGQTSVSLLWQEPEQPNGIILEYEIKYYEKDKEMQSYSTLKAVTTRATVSGLKPGTRYVFQVRARTSAGCGRFSQAMEVETGKPRPRYDTRT

SEQ ID NO: 2308 - protein, 540 aa, synthetic construct
  REGION 1..540: note = EPHB1 (P54762) SP+PP+ECD
MALDYLLLLLLASAVAAMEETLMDTRTATAELGWTANPASGWEEVSGYDENLNTIRTYQVCNVFEPNQNNWLLTTFINRRGAHRIYTEMRFTVRDCSSLPNVPGSCKETFNLYYYETDSVIATKKSAFWSEAPYLKVDTIAADESFSQVDFGGRLMKVNTEVRSFGPLTRNGFYLAFQDYGACMSLLSVRVFFKKCPSIVQNFAVFPETMTGAESTSLVIARGTCIPNAEEVDVPIKLYCNGDGEWMVPIGRCTCKPGYEPENSVACKACPAGTFKASQEAEGCSHCPSNSRSPAEASPICTCRTGYYRADFDPPEVACTSVPSGPRNVISIVNETSIILEWHPPRETGGRDDVTYNIICKKCRADRRSCSRCDDNVEFVPRQLGLTECRVSISSLWAHTPYTFDIQAINGVSSKSPFPPQHVSVNITTNQAAPSTVPIMHQVSATMRSITLSWPQPEQPNGIILDYEIRYYEKEHNEFNSSMARSQTNTARIDGLRPGMVYVVQVRARTVAGYGKFSGKMCFQTLTDDDYKSELREQLP

SEQ ID NO: 2309 - protein, 543 aa, synthetic construct
  REGION 1..543: note = EPHB2 (P29323) SP+PP+ECD
MALRRLGAALLLLPLLAAVEETLMDSTTATAELGWMVHPPSGWEEVSGYDENMNTIRTYQVCNVFESSQNNWLRTKFIRRRGAHRIHVEMKFSVRDCSSIPSVPGSCKETFNLYYYEADFDSATKTFPNWMENPWVKVDTIAADESFSQVDLGGRVMKINTEVRSFGPVSRSGFYLAFQDYGGCMSLIAVRVFYRKCPRIIQNGAIFQETLSGAESTSLVAARGSCIANAEEVDVPIKLYCNGDGEWLVPIGRCMCKAGFEAVENGTVCRGCPSGTFKANQGDEACTHCPINSRTTSEGATNCVCRNGYYRADLDPLDMPCTTIPSAPQAVISSVNETSLMLEWTPPRDSGGREDLVYNIICKSCGSGRGACTRCGDNVQYAPRQLGLTEPRIYISDLLAHTQYTFEIQAVNGVTDQSPFSPQFASVNITTNQAAPSAVSIMHQVSRTVDSITLSWSQPDQPNGVILDYELQYYEKELSEYNATAIKSPTNTVTVQGLKAGAIYVFQVRARTVAGYGRYSGKMYFQTMTEAEYQTSIQEKLPL

SEQ ID NO: 2310 - protein, 559 aa, synthetic construct
  REGION 1..559: note = EPHB3 (P54753) SP+PP+ECD
MARARPPPPPSPPPGLLPLLPPLLLLPLLLLPAGCRALEETLMDTKWVTSELAWTSHPESGWEEVSGYDEAMNPIRTYQVCNVRESSQNNWLRTGFIWRRDVQRVYVELKFTVRDCNSIPNIPGSCKETFNLFYYEADSDVASASSPFWMENPYVKVDTIAPDESFSRLDAGRVNTKVRSFGPLSKAGFYLAFQDQGACMSLISVRAFYKKCASTTAGFALFPETLTGAEPTSLVIAPGTCIPNAVEVSVPLKLYCNGDGEWMVPVGACTCATGHEPAAKESQCRPCPPGSYKAKQGEGPCLPCPPNSRTTSPAASICTCHNNFYRADSDSADSACTTVPSPPRGVISNVNETSLILEWSEPRDLGGRDDLLYNVICKKCHGAGGASACSRCDDNVEFVPRQLGLTERRVHISHLLAHTRYTFEVQAVNGVSGKSPLPPRYAAVNITTNQAAPSEVPTLRLHSSSGSSLTLSWAPPERPNGVILDYEMKYFEKSEGIASTVTSQMNSVQLDGLRPDARYVVQVRARTVAGYGQYSRPAEFETTSERGSGAQQLQEQLPL

SEQ ID NO: 2311 - protein, 539 aa, synthetic construct
  REGION 1..539: note = EPHB4 (P54760) SP+PP+ECD
MELRVLLCWASLAAALEETLLNTKLETADLKWVTFPQVDGQWEELSGLDEEQHSVRTYEVCDVQRAPGQAHWLRTGWVPRRGAVHVYATLRFTMLECLSLPRAGRSCKETFTVFYYESDADTATALTPAWMENPYIKVDTVAAEHLTRKRPGAEATGKVNVKTLRLGPLSKAGFYLAFQDQGACMALLSLHLFYKKCAQLTVNLTRFPETVPRELVVPVAGSCVVDAVPAPGPSPSLYCREDGQWAEQPVTGCSCAPGFEAAEGNTKCRACAQGTFKPLSGEGSCQPCPANSHSNTIGSAVCQCRVGYFRARTDPRGAPCTTPPSAPRSVVSRLNGSSLHLEWSAPLESGGREDLTYALRCRECRPGGSCAPCGGDLTFDPGPRDLVEPWVVVRGLRPDFTYTFEVTALNGVSSLATGPVPFEPVNVTTDREVPPAVSDIRVTRSSPSSLSLAWAVPRAPSGAVLDYEVKYHEKGAEGPSSVRFLKTSENRAELRGLKRGASYLVQVRARSEAGYGPFGQEHHSQTQLDESEGWREQLA

SEQ ID NO: 2312 - protein, 594 aa, synthetic construct
  REGION 1..594: note = EPHB6 (O15197) SP+PP+ECD
MATEGAAQLGNRVAGMVCSLWVLLLVSSVLALEEVLLDTTGETSEIGWLTYPPGGWDEVSVLDDQRRLTRTFEACHVAGAPPGTGQDNWLQTHFVERRGAQRAHIRLHFSVRACSSLGVSGGTCRETFTLYYRQAEEPDSPDSVSSWHLKRWTKVDTIAADESFPSSSSSSSSSSSAAWAVGPHGAGQRAGLQLNVKERSFGPLTQRGFYVAFQDTGACLALVAVRLFSYTCPAVLRSFASFPETQASGAGGASLVAAVGTCVAHAEPEEDGVGGQAGGSPPRLHCNGEGKWMVAVGGCRCQPGYQPARGDKACQACPRGLYKSSAGNAPCSPCPARSHAPNPAAPVCPCLEGFYRASSDPPEAPCTGPPSAPQELWFEVQGSALMLHWRLPRELGGRGDLLFNVVCKECEGRQEPASGGGGTCHRCRDEVHFDPRQRGLTESRVLVGGLRAHVPYILEVQAVNGVSELSPDPPQAAAINVSTSHEVPSAVPVVHQVSRASNSITVSWPQPDQTNGNILDYQLRYYDQAEDESHSFTLTSETNTATVTQLSPGHIYGFQVRARTAAGHGPYGGKVYFQTLPQGELSSQLPERLS

SEQ ID NO: 2313 - protein, 250 aa, synthetic construct
  REGION 1..250: note = EPOR (P19235) SP+PP+ECD
MDHLGASLWPQVGSLCLLLAGAAWAPPPNLPDPKFESKAALLAARGPEELLCFTERLEDLVCFWEEAASAGVGPGNYSFSYQLEDEPWKLCRLHQAPTARGAVRFWCSLPTADTSSFVPLELRVTAASGAPRYHRVIHINEVVLLDAPVGLVARLADESGHVVLRWLPPPETPMTSHIRYEVDVSAGNGAGSVQRVEILEGRTECVLSNLRGRTRYTFAVRARMAEPSFGGFWSAWSEPVSLLTPSDLDP

SEQ ID NO: 2314 - protein, 181 aa, synthetic construct
  REGION 1..181: note = EQTN (Q9NQ60) SP+PP+ECD
MNFILFIFIPGVFSLKSSTLKPTIEALPNVLPLNEDVNKQEEKNEDHTPNYAPANEKNGNYYKDIKQYVFTTQNPNGTESEISVRATTDLNFALKNDKTVNATTYEKSTIEEETTTSEPSHKNIQRSTPNVPAFWTMLAKAINGTAVVMDDKDQLFHPIPESDVNATQGENQPDLEDLKIK

SEQ ID NO: 2315 - protein, 652 aa, synthetic construct
  REGION 1..652: note = ERBB2 (P04626) SP+PP+ECD
MELAALCRWGLLLALLPPGAASTQVCTGTDMKLRLPASPETHLDMLRHLYQGCQVVQGNLELTYLPTNASLSFLQDIQEVQGYVLIAHNQVRQVPLQRLRIVRGTQLFEDNYALAVLDNGDPLNNTTPVTGASPGGLRELQLRSLTEILKGGVLIQRNPQLCYQDTILWKDIFHKNNQLALTLIDTNRSRACHPCSPMCKGSRCWGESSEDCQSLTRTVCAGGCARCKGPLPTDCCHEQCAAGCTGPKHSDCLACLHFNHSGICELHCPALVTYNTDTFESMPNPEGRYTFGASCVTACPYNYLSTDVGSCTLVCPLHNQEVTAEDGTQRCEKCSKPCARVCYGLGMEHLREVRAVTSANIQEFAGCKKIFGSLAFLPESFDGDPASNTAPLQPEQLQVFETLEEITGYLYISAWPDSLPDLSVFQNLQVIRGRILHNGAYSLTLQGLGISWLGLRSLRELGSGLALIHHNTHLCFVHTVPWDQLFRNPHQALLHTANRPEDECVGEGLACHQLCARGHCWGPGPTQCVNCSQFLRGQECVEECRVLQGLPREYVNARHCLPCHPECQPQNGSVTCFGPEADQCVACAHYKDPPFCVARCPSGVKPDLSYMPIWKFPDEEGACQPCPINCTHSCVDLDDKGCPAEQRASPLT

SEQ ID NO: 2316 - protein, 643 aa, synthetic construct
  REGION 1..643: note = ERBB3 (P21860) SP+PP+ECD
MRANDALQVLGLLFSLARGSEVGNSQAVCPGTLNGLSVTGDAENQYQTLYKLYERCEVVMGNLEIVLTGHNADLSFLQWIREVTGYVLVAMNEFSTLPLPNLRVVRGTQVYDGKFAIFVMLNYNTNSSHALRQLRLTQLTEILSGGVYIEKNDKLCHMDTIDWRDIVRDRDAEIVVKDNGRSCPPCHEVCKGRCWGPGSEDCQTLTKTICAPQCNGHCFGPNPNQCCHDECAGGCSGPQDTDCFACRHFNDSGACVPRCPQPLVYNKLTFQLEPNPHTKYQYGGVCVASCPHNFVVDQTSCVRACPPDKMEVDKNGLKMCEPCGGLCPKACEGTGSGSRFQTVDSSNIDGFVNCTKILGNLDFLITGLNGDPWHKIPALDPEKLNVFRTVREITGYLNIQSWPPHMHNFSVFSNLTTIGGRSLYNRGFSLLIMKNLNVTSLGFRSLKEISAGRIYISANRQLCYHHSLNWTKVLRGPTEERLDIKHNRPRRDCVAEGKVCDPLCSSGGCWGPGPGQCLSCRNYSRGGVCVTHCNFLNGEPREFAHEAECFSCHPECQPMEGTATCNGSGSDTCAQCAHFRDGPHCVSSCPHGVLGAKGPIYKYPDVQNECRPCHENCTQGCKGPELQDCLGQTLVLIGKTHLT

SEQ ID NO: 2317 - protein, 651 aa, synthetic construct
  REGION 1..651: note = ERBB4 (Q15303) SP+PP+ECD
MKPATGLWVWVSLLVAAGTVQPSDSQSVCAGTENKLSSLSDLEQQYRALRKYYENCEVVMGNLEITSIEHNRDLSFLRSVREVTGYVLVALNQFRYLPLENLRIIRGTKLYEDRYALAIFLNYRKDGNFGLQELGLKNLTEILNGGVYVDQNKFLCYADTIHWQDIVRNPWPSNLTLVSTNGSSGCGRCHKSCTGRCWGPTENHCQTLTRTVCAEQCDGRCYGPYVSDCCHRECAGGCSGPKDTDCFACMNFNDSGACVTQCPQTFVYNPTTFQLEHNFNAKYTYGAFCVKKCPHNFVVDSSSCVRACPSSKMEVEENGIKMCKPCTDICPKACDGIGTGSLMSAQTVDSSNIDKFINCTKINGNLIFLVTGIHGDPYNAIEAIDPEKLNVFRTVREITGFLNIQSWPPNMTDFSVFSNLVTIGGRVLYSGLSLLILKQQGITSLQFQSLKEISAGNIYITDNSNLCYYHTINWTTLFSTINQRIVIRDNRKAENCTAEGMVCNHLCSSDGCWGPGPDQCLSCRRFSRGRICIESCNLYDGEFREFENGSICVECDPQCEKMEDGLLTCHGPGPDNCTKCSHFKDGPNCVEKCPDGLQGANSFIFKYADPDRECHPCHPNCTQGCNGPTSHDCIYYPWTGHSTLPQHARTP

SEQ ID NO: 2318 - protein, 119 aa, synthetic construct
  REGION 1..119: note = EREG (O14944) SP+PP+ECD
MTAGRRMEMLCAGRVPALLLCLGFHLLQAVLSTTVIPSCIPGESSDNCTALVQTEDNPRVAQVSITKCSSDMNGYCLHGQCIYLVDMSQNYCRCEVGYTGVRCEHFFLTVHQPLSKEYV

SEQ ID NO: 2319 - protein, 155 aa, synthetic construct
  REGION 1..155: note = ERMAP (Q96PL5) SP+PP+ECD
MEMASSAGSWLSGCLIPLVFLRLSVHVSGHAGDAGKFHVALLGGTAELLCPLSLWPGTVPKEVRWLRSPFPQRSQAVHIFRDGKDQDEDLMPEYKGRTVLVRDAQEGSVTLQILDVRLEDQGSYRCLIQVGNLSKEDTVILQVAAPSVGSLSPSA

SEQ ID NO: 2320 - protein, 518 aa, synthetic construct
  REGION 1..518: note = ERVFC1 (P60507) SP+PP+ECD
MARPSPLCLLLLLTLLTPIVPSNSLLTEPPFRWRFYLHETWTQGNRLSTVTLATVDCQPHGCQAQVTFNFTSFKSVLRGWSNPTICFVYDQTHSNCRDYWVDTNGGCPYAYCRMHVTQLHTAKKLQHTYRLTSDGRTTYFLTIPDPWDSRWVSGVTGRLYRWPTDSYPVGKLRIFLTYIRVIPQVLSNLKDQADNIKHQEEVINTLVQSHPKADMVTYDDKAEAGPFSWITLVRHGARLVNMAGLVNLSHCFLCTALSQPPLVAVPLPQAFNTSGNHTAHPSGVFSEQVPLFRDPLQPQFPFCYTTPNSSWCNQTYSGSLSNLSAPAGGYFWCNFTLTKHLNISSNNTLSRNLCLPISLVPRLTLYSEAELSSLVNPPMRQKRAVFPPLVIGVSLTSSLVASGLGTGAIVHFISSSQDLSIKLQMAIEASAESLASLQRQITSVAKVAMQNRRALDLLTADKGGTCMFLGEECCYYINESGLVETSLLTLDKIRDGLHRPSSTPNYGGGWWQSPLTTW

SEQ ID NO: 2321 - protein, 518 aa, synthetic construct; identical to SEQ ID NO: 2320
  REGION 1..518: note = ERVFRD-1 (P60508) SP+PP+ECD

SEQ ID NO: 2322 - protein, 632 aa, synthetic construct
  REGION 1..632: note = ERVK-19 (O71037) SP+PP+ECD
MNPSEMQRKAPPRRRRHRNRAPLTHKMNKMVTSEEQMKLPSTKKAEPPTWAQLKKLTQLATKYLENTKVTQTPESMLLAALMIVSMVVSLPMPAGAAAANYTYWAYVPFPPLIRAVTWMDNPIEVYVNDSVWVPGPTDDHCPAKPEEEGMMINISIGYRYPPICLGRAPGCLMPAVQNWLVEVPTVSPISRFTYHMVSGMSLRPRVNYLQDFSYQRSFKFRPKGKPCPKEIPKESKNTEVLVWEECVANSAVILQNNEFGTIIDWAPRGQFYHNCSGQTQSCPSAQVSPAVDSDLTESLDKHKHKKLQSFYPWEWGEKGISTPRPKIISPVSGPEHPELWRLTVASHHIRIWSGNQTLETRDRKPFYTVDLNSSVTVPLQSCIKPPYMLVVGNIVIKPDSQTITCENCRLLTCIDSTFNWQHRILLVRAREGVWIPVSMDRPWETSPSIHTLTEVLKGVLNRSKRFIFTLIAVIMGLIAVTATAAVAGVALHSSVQSVNFVNDWQKNSTRLWNSQSSIDQKLANQINDLRQTVIWMGDRLMSLEHRFQLQCDWNTSDFSITPQIYNESEHHWDMVRRHLQGREDNLTLDISKLKEQIFEASKAHLNLVPGTEAIAGVADGLANLNPVTWVKT

SEQ ID NO: 2323 - protein, 631 aa, synthetic construct
  REGION 1..631: note = ERVK-21 (P61565) SP+PP+ECD
MHPSEMQRKAPPRRRRHRNRAPLTHKMNKMVTSEQMKLPSTKKAEPPTWAQLKKLTQLATKYLENTKVTQTPESMLLAALMIVSMVVSLPMPAGAAAANYTNWAYVPFPPLIRAVTWMDNPIEVYVNDSVWVHGPIDDRCPAKPEEEGMMINISIGYHYPPICLGRAPGCLMPAVQNWLVEVPTVSPISRFTYNMVSGMSLRPRVNYLQDFSYQRSLKFRPKGKPCPKEIPKESKNTEVLVWEECVANSVVILQNNEFGTIIDWAPRGQFYHNCSGQTQSCPSAQVSPAVDSDLTESLDKHKHKKLQSFYPWEWGEKGISTPRPKIISPVSGPEHPELWRLTVASHHIRIWSGNQTLETRDRKPFYTVDLNSSLTVPLQSCVKPPYMLVVGNIVIKPDSQTITCENCRLLTCIDSTFNWQHRILLVRAREGVWIPVSMDRPWEASPSIHILTEVLKGVLNRSKRFIFTLIAVIMGLIAVTAMAAVAGVALHSFVQSVNFVNDWQKNSTRLWNSQSSIDQKLANQINDLRQTVIWMGDRLMSLEHRFQLQCDWNTSDFCITPQIYNESEHHWDMVRRHLQGREDNLTLDISKLKEQIFEASKAHLNLVPGTEAIAGVADGLANLNPVTWVKT

SEQ ID NO: 2324 - protein, 632 aa, synthetic construct
  REGION 1..632: note = ERVK-6 (Q69384) SP+PP+ECD
MNPSEMQRKAPPRRRRHRNRAPLTHKMNKMVTSEEQMKLPSTKKAEPPTWAQLKKLTQLATKYLENTKVTQTPESMLLAALMIVSMVVSLPMPAGAAAANYTYWAYVPFPPLIRAVTWMDNPTEVYVNDSVWVPGPIDDRCPAKPEEEGMMINISIGYHYPPICLGRAPGCLMPAVQNWLVEVPTVSPICRFTYHMVSGMSLRPRVNYLQDFSYQRSLKFRPKGKPCPKEIPKESKNTEVLVWEECVANSAVILQNNEFGTIIDWAPRGQFYHNCSGQTQSCPSAQVSPAVDSDLTESLDKHKHKKLQSFYPWEWGEKGISTPRPKIVSPVSGPEHPELWRLTVASHHIRIWSGNQTLETRDRKPFYTIDLNSSLTVPLQSCVKPPYMLVVGNIVIKPDSQTITCENCRLLTCIDSTFNWQHRILLVRAREGVWIPVSMDRPWEASPSVHILTEVLKGVLNRSKRFIFTLIAVIMGLIAVTATAAVAGVALHSSVQSVNFVNDWQKNSTRLWNSQSSIDQKLANQINDLRQTVIWMGDRLMSLEHRFQLQCDWNTSDFCITPQIYNESEHHWDMVRRHLQGREDNLTLDISKLKEQIFEASKAHLNLVPGTEAIAGVADGLANLNPVTWVKT

SEQ ID NO: 2325 - protein, 632 aa, synthetic construct
  REGION 1..632: note = ERVK-8 (Q902F8) SP+PP+ECD
MNPSEMQRKAPPRRRRHRNRAPLTHKMNKMVTSEEQMKLPSTKKAEPPTWAQLKKLTQLATKYLENTKVTQTPESMLLAALMIVSMVVSLPMPAGAAVANYTNWAYVPFPPLIRAVTWMDNPIEVYVNDSVWVPGPIDDRCPAKPEEEGMMINISIGYRYPPICLGRAPGCLMPAVQNWLVEVPTVSPISRFTYHMVSGMSLRPRVNYLQDFSYQRSLKFRPKGKPCPKEIPKESKNTEVLVWEECVANSAVILQNNEFGTIIDWAPRGQFYHNCSGQTQSCPSAQVSPAVDSDLTESLDKHKHKKLQSFYPWEWGEKRISTPRPKIVSPVSGPEHPELWRLTVASHHIRIWSGNQTLETRDRKPFYTVDLNSSLTLPLQSCVKPPYMLVVGNIVIKPDSQTITCENCRLLTCIDSTFNWQHRILLVRAREGVWIPVSMDRPWEASPSVHILTEVLKGVLNRSKRFIFTLIAVIMGLIAVTATAAVAGVALHSSVQSVNFVNDGQKNSTRLWNSQSSIDQKLANQINDLRQTVIWMGDRLMSLEHRFQLQCDWNTSDFCITPQIYNDSEHHWDMVRRHLQGREDNLTLDISKLKEQIFEASKAHLNLVPGTEAIAGVADGLANLNPVTWVKT

SEQ ID NO: 2326 - protein, 631 aa, synthetic construct
  REGION 1..631: note = ERVK-9 (Q9UKH3) SP+PP+ECD
MNPSEMQRKAPPRRRRHRNRAPLTHKMNKMVTSEEQMKLPSTKKAEPPTWAQLKKLTQLATKYLENTKVTQTPESMLLAALMIVSMVVSLPMPAGAAAANYTNWAYVPFPPLIRAVTWMDNPIEVYVNDSVWVPGPIDDRCPAKPEEEGMMINISIGYRYPICLGRAPGCLMPAVQNWLVEVPIVSPICRFTYHMVSGMSLRPRVNYLQDFSYQRSLKFRPKGKPCPKEIPKESKNTEVLVWEECVANSAVILQNNEFGTIIDWTPQGQFYHNCSGQTQSCPSAQVSPAVDSDLTESLDKHKHKKLQSFYPWEWGEKGISTPRPKIISPVSGPEHPELWRLTVASHHIRIWSGNQTLETRDRKPFYTVDLNSSLTLPLQSCVKPPYMLVVGNIVIKPDSQTITCENCRLLTCIDSTFNWQHRILLVRAREGVWIPVSMDRPWEASPSIHILTEVLKGVLNRSKRFIFTLIAVIMGLIAVTATAAVAGVALHSSVQSVNFVNDGQKNSTRLWNSQSSIDQKLANQINDLRQTVIWMGDRLMSLEHRFQLQCDWNTSDFCITPQIYNESEHHWDMVRRHLQGREDNLTLDISKLKEQIFEASKAHLNLVPGTEAIAGVADGLANLNPVTWVKT

SEQ ID NO: 2327 - protein, 488 aa, synthetic construct
  REGION 1..488: note = ERVMER34-1 (Q9H9K5) SP+PP+ECD
MGSLSNYALLQLTLTAFLTILVQPQHLLAPVFRTLSILTNQSNCWLCEHLDNAEQPELVFVPASASTWWTYSGQWMYERVWYPQAEVQNHSTSSYRKVTWHWEASMEAQGLSFAQVRLLEGNFSLCVENKNGSGPFLGNIPKQYCNQILWFDSTDGTFMPSIDVTNESRNDDDDTSVCLGTRQCSWFAGCTNRTWNSSAVPLIGLPNTQDYKWVDRNSGLTWSGNDTCLYSCQNQTKGLLYQLFRNLFCSYGLTEAHGKWRCADASITNDKGHDGHRTPTWWLTGSNLTLSVNNSGLFFLCGNGVYKGFPPKWSGRCGLGYLVPSLTRYLTLNASQITNLRSFIHKVTPHRCTQGDTDNPPLYCNPKDNSTIRALFPSLGTYDLEKAILNISKAMEQEFSATKQTLEAHQSKVSSLASASRKDHVLDIPTTQRQTACGTVGKQCCLYINYSEEIKSNIQRLHEASENLKNVPLLDWQGIFAKVGDWFR

SEQ ID NO: 2328 - protein, 451 aa, synthetic construct; identical to SEQ ID NO: 1224
  REGION 1..451: note = ERVPABLB-1 (P60509) SP+PP+ECD

SEQ ID NO: 2329 - protein, 575 aa, synthetic construct
  REGION 1..575: note = ERVS71-1 (P61550) SP+PP+ECD
MGPEAWVRPLKTAPKPGEAIRLILFIYLSCFFLPVMSSEPSYSFLLTSFTTGRVFANTTWRAGTSKEVSFAVDLCVLFPEPARTHEEQHNLPVIGAGSVDLAAGFGHSGSQTGCGSSKGAEKGLQNVDFYLCPGNHPDASCRDTYQFFCPDWTCVTLATYSGGSTRSSTLSISRVPHPKLCTRKNCNPLTITVHDPNAAQWYYGMSWGLRLYIPGFDVGTMFTIQKKILVSWSSPKPIGPLTDLGDPIFQKHPDKVDLTVPLPFLVPRPQLQQQHLQPSLMSILGGVHHLLNLTQPKLAQDCWLCLKAKPPYYVGLGVEATLKRGPLSCHTRPRALTIGDVSGNASCLISTGYNLSASPFQATCNQSLLTSISTSVSYQAPNNTWLACTSGLTRCINGTEPGPLLCVLVHVLPQVYVYSGPEGRQLIAPPELHPRLHQAVPLLVPLLAGLSIAGSAAIGTAALVQGETGLISLSQQVDADFSNLQSAIDILHSQVESLAEVVLQNCRCLDLLFLSQGGLCAALGESCCFYANQSGVIKGTVKKVRENLDRHQQERENNIPWYQSMFNWNPWLTTL

SEQ ID NO: 2330 - protein, 321 aa, synthetic construct
  REGION 1..321: note = ERVV-1 (B6SEH8) SP+PP+ECD
MTEKFLFLYLSLLPMPLLSQAQWNENSLVSFSKIIASGNHLSNCWICHNFITRSSSYQYILVRNFSLNLTFGSGIPEGQHKSVPLQVSLANSAHQVPCLDLTPPFNQSSKTSFYFYNCSSLNQTCCPCPEGHCDRKNTSEEGFPSPTIHPMSFSPAGCHPNLTHWCPAKQMNDYRDKSPQNRCAAWEGKELITWRVLYLLPKAHTVPTWPKSTVPLGGPLSPACNQTIPAGWKSQLHKWFDSHIPRWACTPPGYVFLCGPQKNKLPFDGSPKITYSTPPVANLYTCINNIQHTGECAVGLLGPRGIGVTIYNTTQPRQKRA

SEQ ID NO: 2331 - protein, 443 aa, synthetic construct
  REGION 1..443: note = ERVW-1 (Q9UQF0) SP+PP+ECD
MALPYHIFLFTVLLPSFTLTAPPPCRCMTSSSPYQEFLWRMQRPGNIDAPSYRSLSKGTPTFTAHTHMPRNCYHSATLCMHANTHYWTGKMINPSCPGGLGVTVCWTYFTQTGMSDGGGVQDQAREKHVKEVISQLTRVHGTSSPYKGLDLSKLHETLRTHTRLVSLFNTTLTGLHEVSAQNPTNCWICLPLNFRPYVSIPVPEQWNNFSTEINTTSVLVGPLVSNLEITHTSNLTCVKFSNTTYTTNSQCIRWVTPPTQIVCLPSGIFFVCGTSAYRCLNGSSESMCFLSFLVPPMTIYTEQDLYSYVISKPRNKRVPILPFVIGAGVLGALGTGIGGITTSTQFYYKLSQELNGDMERVADSLVTLQDQLNSLAAVVLQNRRALDLLTAERGGTCLFLGEECCYYVNQSGIVTEKVKEIRDRIQRRAEELRNTGPWGLLSQ

SEQ ID NO: 2332 - protein, 248 aa, synthetic construct
  REGION 1..248: note = ESAM (Q96AP7) SP+PP+ECD
MISLPGPLVTNLLRFLFLGLSALAPPSRAQLQLHLPANRLQAVEGGEVVLPAWYTLHGEVSSSQPWEVPFVMWFFKQKEKEDQVLSYINGVTTSKPGVSLVYSMPSRNLSLRLEGLQEKDSGPYSCSVNVQDKQGKSRGHSIKTLELNVLVPPAPPSCRLQGVPHVGANVTLSCQSPRSKPAVQYQWDRQLPSFQTFFAPALDVIRGSLSLTNLSSSMAGVYVCKAHNEVGTAQCNVTLEVSTGPGAA

SEQ ID NO: 2333 - protein, 322 aa, synthetic construct
  REGION 1..322: note = EVA1C (P58658) SP+PP+ECD
MLLPGRARQPPTPQPVQHPGLRRQVEPPGQLLRLFYCTVLVCSKEISALTDFSGYLTKLLQNHTTYACDGDYLNLQCPRHSTISVQSAFYGQDYQMCSSQKPASQREDSLTCVAATTFQKVLDECQNQRACHLLVNSRVFGPDLCPGSSKYLLVSFKCQPNELKNKTVCEDQELKLHCHESKFLNIYSATYGRRTQERDICSSKAERLPPFDCLSYSALQVLSRRCYGKQRCKIIVNNHHFGSPCLPGVKKYLTVTYACVPKNILTAIDPAIANLKPSLKQKDGEYGINFDPSGSKVLRKDGILVSNSLAAFAYIRAHPERA

SEQ ID NO: 2334 - protein, 300 aa, synthetic construct
  REGION 1..300: note = EVC2 (Q86UK5) SP+PP+ECD
MDPSGSRGRPTWVLAGGLLAVALALGGRGCLGASSRPRWRPLGAQPPRDPQVAPRSGPGLRIPPGRSGAGPESSTQDLPCMIWPKVECCHFKTAVEAPLGMKLDKKMEVFIPLSTSAASSGPWAHSLFAFIPSWPKKNLFKRESPITHRLYGDISREVQGTSENGVIFQKCALVSGSSEAQTARIWLLVNNTKTTSSANLSELLLLDSIAGLTIWDSVGNRTSEGFQAFSKKFLQVGDAFAVSYAATLQAGDLGNGESLKLPAQLTFQSSSRNRTQLKVLFSITAEENVTVLPHHGLHAA

SEQ ID NO: 2335 - protein, 133 aa, synthetic construct
  REGION 1..133: note = EVI2A (P22794) SP+PP+ECD
MPTDMEHTGHYLHLAFLMTTVFSLSPGTKANYTRLWANSTSSWDSVIQNKTGRNQNENINTNPITPEVDYKGNSTNMPETSHIVALTSKSEQELYIPSVVSNSPSTVQSIENTSKSHGEIFKKDVCAENNNNM

SEQ ID NO: 2336 - protein, 202 aa, synthetic construct
  REGION 1..202: note = EVI2B (P34910) SP+PP+ECD
MDPKYFILILFCGHLNNTFFSKTETITTEKQSQPTLFTSSMSQVLANSQNTTGNPLGQPTQFSDTFSGQSISPAKVTAGQPTPAVYTSSEKPEAHTSAGQPLAYNTKQPTPIANTSSQQAVFTSARQLPSARTSTTQPPKSFVYTFTQQSSSVQIPSRKQITVHNPSTQPTSTVKNSPRSTPGFILDTTSNKQTPQKNNYNS

SEQ ID NO: 2337 - protein, 238 aa, synthetic construct
  REGION 1..238: note = F11R (Q9Y624) SP+PP+ECD
MGTKAQVERKLLCLFILAILLCSLALGSVTVHSSEPEVRIPENNPVKLSCAYSGFSSPRVEWKFDQGDTTRLVCYNNKITASYEDRVTFLPTGITFKSVTREDTGTYTCMVSEEGGNSYGEVKVKLIVLVPPSKPTVNIPSSATIGNRAVLTCSEQDGSPPSEYTWFKDGIVMPTNPKSTRAFSNSSYVLNPTTGELVFDPLSASDTGEYSCEARNGYGTPMTSNAVRMEAVERNVGV

SEQ ID NO: 2338 - protein, 251 aa, synthetic construct
  REGION 1..251: note = F3 (P13726) SP+PP+ECD
METPAWPRVPRPETAVARTLLLGWVFAQVAGASGTTNTVAAYNLTWKSTNFKTILEWEPKPVNQVYTVQISTKSGDWKSKCFYTTDTECDLTDEIVKDVKQTYLARVFSYPAGNVESTGSAGEPLYENSPEFTPYLETNLGQPTIQSFEQVGTKVNVTVEDERTLVRRNNTFLSLRDVFGKDLIYTLYYWKSSSSGKKTAKTNTNEFLIDVDKGENYCFSVQAVIPSRTVNRKSTDSPVECMGQEKGEFRE

SEQ ID NO: 2339 - protein, 303 aa, synthetic construct
  REGION 1..303: note = FAM171A1 (Q5VUB5) SP+PP+ECD
MSRSATLLLCLLGCHVWKAVTKTLREPGAGAQEVTLKVHISDASTHQPVADALIEIFTNQASIASGTSGTDGVAFIKFQYKLGSQLIVTASKHAYVPNSAPWKPIRLPVFSSLSLGLLPERSATLMVYEDVVQIVSGFQGARPQPRVHFQRRALRLPENTSYSDLTAFLTAASSPSEVDSFPYLRGLDGNGTGNSTRHDLTPVTAVSVHLLSSNGTPVLVDGPIYVTVPLATQSSLRHNAYVAAWRFDQKLGTWLKSGLGLVHQEGSQLTWTYIAPQLGYWVAAMSPPIPGPVVTQDITTYHT

SEQ ID NO: 2340 - protein, 315 aa, synthetic construct
  REGION 1..315: note = FAM171A2 (A8MVW0) SP+PP+ECD
MPPASGPSVLARLLPLLGLLLGSASRAPGKSPPEPPSPQEILIKVQVYVSGELVPLARASVDVFGNRTLLAAGTTDSEGVATLPLSYRLGTWVLVTAARPGFLTNSVPWRVDKLPLYASVSLYLLPERPATLILYEDLVHILLGSPGARSQPLVQFQRRAARLPVSSTYSQLWASLTPASTQQEMRAFPAFLGTEASSSGNGSWLELMPLTAVSVHLLTGNGTEVPLSGPIHLSLPVPSETRALTVGTSIPAWRFDPKSGLWVRNGTGVIRKEGRQLYWTFVSPQLGYWVAAMASPTAGLVTITSGIQDIGTYHT

SEQ ID NO: 2341 - protein, 353 aa, synthetic construct
  REGION 1..353: note = FAM171B (Q6P995) SP+PP+ECD
MARLCRRVPCTLLLGLAVVLLKARLVPAAARAELSRSDLSLIQQQQQQQQQQQQQQKQLEEAEEERTEVPGATSTLTVPVSVFMLKVQVNDIISRQYLSQAVVEVFVNYTKTNSTVTKSNGAVLIKVPYKLGLSLTIIAYKDGYVLTPLPWKTRRMPIYSSVTLSLFPQSQANIWLFEDTVLITGKLADAKSQPSVQFSKALIKLPDNHHISNVTGYLTVLQQFLKVDNFLHTTGITLNKPGFENIELTPLAAICVKIYSGGKELKVNGSIQVSLPLLRLNDISAGDRIPAWTFDMNTGAWVNHGRGMVKEHNNHLIWTYDAPHLGYWIAAPLPGTRGSGINEDSKDITAYHT

SEQ ID NO: 2342 - protein, 123 aa, synthetic construct
  REGION 1..123: note = FAM174A (Q8TBP5) SP+PP+ECD
MKASQCCCCLSHLLASVLLLLLLPELSGPLAVLLQAAEAAPGLGPPDPRPRTLPPLPPGPTPAQQPGRGLAEAAGPRGSEGGNGSNPVAGLETDDHGGKAGEGSVGGGLAVSPNPGDKPMTQR

SEQ ID NO: 2343 - protein, 90 aa, synthetic construct
  REGION 1..90: note = FAM174B (Q3ZCQ3) SP+PP+ECD
MRAVPLPAPLLPLLLLALLAAPAARASRAESVSAPWPEPERESRPPPGPGPGNTTRFGSGAAGGSGSSSSNSSGDALVTRISILLRDLPT

SEQ ID NO: 2344 - protein, 335 aa, synthetic construct
  REGION 1..335: note = FAM187B (Q17R55) SP+PP+ECD
MPPMLWLLLHFAAPALGFYFSISCPSGKQCQQALLSGNDILLYCNSSGAHWYYLFTQGKKGRLTSLTNISNMEIMPEGSLLIKDPLPSQTGLYHCWNKNGRQVVQYEIDFQDVTTLHITHKDLGQRPLQNETLHLGSKQLIFTWWEPWQDCNRCEEPGECKRLGYRYIEEPLEEAMPCWLYLGEVLVWSSRLRPELQVEACHVQCTNNTQLRVDYVIFDNFRLDEKTEFVWLDCPLGSMYRPVNWRANDTPLTWESQLSGQDFTTFLDPSTGGRQLQVFQPAVYKCFVQQELVAQFKPAASLETLEAQWRENDAQWREARKALRGRADSVLKGLK

SEQ ID NO: 2345 - protein, 173 aa, synthetic construct
  REGION 1..173: note = FAS (P25445) SP+PP+ECD
MLGIWTLLPLVLTSVARLSSKSVNAQVTDINSKGLELRKTVTTVETQNLEGLHHDGQFCHKPCPPGERKARDCTVNGDEPDCVPCQEGKEYTDKAHFSSKCRRCRLCDEGHGLEVEINCTRTQNTKCRCKPNFFCNSTVCEHCDPCTKCEHGIIKECTLTSNTKCKEEGSRSN

SEQ ID NO: 2346 - protein, 4181 aa, synthetic construct
  REGION 1..4181: note = FAT1 (Q14517) SP+PP+ECD
MGRHLALLLLLLLLFQHFGDSDGSQRLEQTPLQFTHLEYNVTVQENSAAKTYVGHPVKMGVYITHPAWEVRYKIVSGDSENLFKAEEYILGDFCFLRIRTKGGNTAILNREVKDHYTLIVKALEKNTNVEARTKVRVQVLDTNDLRPLFSPTSYSVSLPENTAIRTSIARVSATDADIGTNGEFYYSFKDRTDMFAIHPTSGVIVLTGRLDYLETKLYEMEILAADRGMKLYGSSGISSMAKLTVHIEQANECAPVITAVTLSPSELDRDPAYAIVTVDDCDQGANGDIASLSIVAGDLLQQFRTVRSFPGSKEYKVKAIGGIDWDSHPFGYNLTLQAKDKGTPPQFSSVKVIHVTSPQFKAGPVKFEKDVYRAEISEFAPPNTPVVMVKAIPAYSHLRYVFKSTPGKAKFSLNYNTGLISILEPVKRQQAAHFELEVTTSDRKASTKVLVKVLGANSNPPEFTQTAYKAAFDENVPIGTTVMSLSAVDPDEGENGYVTYSIANLNHVPFAIDHFTGAVSTSENLDYELMPRVYTLRIRASDWGLPYRREVEVLATITLNNLNDNTPLFEKINCEGTIPRDLGVGEQITTVSAIDADELQLVQYQIEAGNELDFFSLNPNSGVLSLKRSLMDGLGAKVSFHSLRITATDGENFATPLYINITVAASHKLVNLQCEETGVAKMLAEKLLQANKLHNQGEVEDIFFDSHSVNAHIPQFRSTLPTGIQVKENQPVGSSVIFMNSTDLDTGFNGKLVYAVSGGNEDSCFMIDMETGMLKILSPLDRETTDKYTLNITVYDLGIPQKAAWRLLHVVVVDANDNPPEFLQESYFVEVSEDKEVHSEIIQVEATDKDLGPNGHVTYSIVTDTDTFSIDSVTGVVNIARPLDRELQHEHSLKIEARDQAREEPQLFSTVVVKVSLEDVNDNPPTFIPPNYRVKVREDLPEGTVIMWLEAHDPDLGQSGQVRYSLLDHGEGNFDVDKLSGAVRIVQQLDFEKKQVYNLTVRAKDKGKPVSLSSTCYVEVEVVDVNENLHPPVFSSFVEKGTVKEDAPVGSLVMTVSAHDEDARRDGEIRYSIRDGSGVGVFKIGEETGVIETSDRLDRESTSHYWLTVFATDQGVVPLSSFIEIYIEVEDVNDNAPQTSEPVYYPEIMENSPKDVSVVQIEAFDPDSSSNDKLMYKITSGNPQGFFSIHPKTGLITTTSRKLDREQQDEHILEVTVTDNGSPPKSTIARVIVKILDENDNKPQFLQKFYKIRLPEREKPDRERNARREPLYHVIATDKDEGPNAEISYSIEDGNEHGKFFIEPKTGVVSSKRFSAAGEYDILSIKAVDNGRPQKSSTTRLHIEWISKPKPSLEPISFEESFFTFTVMESDPVAHMIGVISVEPPGIPLWFDITGGNYDSHFDVDKGTGTIIVAKPLDAEQKSNYNLTVEATDGTTTILTQVFIKVIDTNDHRPQFSTSKYEVVIPEDTAPETEILQISAVDQDEKNKLIYTLQSSRDPLSLKKFRLDPATGSLYTSEKLDHEAVHQHTLTVMVRDQDVPVKRNFARIVVNVSDTNDHAPWFTASSYKGRVYESAAVGSVVLQVTALDKDKGKNAEVLYSIESGNIGNSFMIDPVLGSIKTAKELDRSNQAEYDLMVKATDKGSPPMSEITSVRIFVTIADNASPKFTSKEYSVELSETVSIGSFVGMVTAHSQSSVVYEIKDGNTGDAFDINPHSGTIITQKALDFETLPIYTLIIQGTNMAGLSTNTTVLVHLQDENDNAPVFMQAEYTGLISESASINSVVLTDRNVPLVIRAADADKDSNALLVYHIVEPSVHTYFAIDSSTGAIHTVLSLDYEETSIFHFTVQVHDMGTPRLFAEYAANVTVHVIDINDCPPVFAKPLYEASLLLPTYKGVKVITVNATDADSSAFSQLIYSITEGNIGEKFSMDYKTGALTVQNTTQLRSRYELTVRASDGRFAGLTSVKINVKESKESHLKFTQDVYSAVVKENSTEAETLAVITAIGNPINEPLFYHILNPDRRFKISRTSGVLSTTGTPFDREQQEAFDVVVEVTEEHKPSAVAHVVVKVIVEDQNDNAPVFVNLPYYAVVKVDTEVGHVIRYVTAVDRDSGRNGEVHYYLKEHHEHFQIGPLGEISLKKQFELDTLNKEYLVTVVAKDGGNPAFSAEVIVPITVMNKAMPVFEKPFYSAEIAESIQVHSPVVHVQANSPEGLKVFYSITDGDPFSQFTINFNTGVINVIAPLDFEAHPAYKLSIRATDSLTGAHAEVFVDIIVDDINDNPPVFAQQSYAVTLSEASVIGTSVVQVRATDSDSEPNRGISYQMFGNHSKSHDHFHVDSSTGLISLLRTLDYEQSRQHTIFVRAVDGGMPTLSSDVIVTVDVTDLNDNPPLFEQQIYEARISEHAPHGHFVTCVKAYDADSSDIDKLQYSILSGNDHKHFVIDSATGIITLSNLHRHALKPFYSLNLSVSDGVFRSSTQVHVTVIGGNLHSPAFLQNEYEVELAENAPLHTLVMEVKTTDGDSGIYGHVTYHIVNDFAKDRFYINERGQIFTLEKLDRETPAEKVISVRLMAKDAGGKVAFCTVNVILTDDNDNAPQFRATKYEVNIGSSAAKGTSVVKVLASDADEGSNADITYAIEADSESVKENLEINKLSGVITTKESLIGLENEFFTFFVRAVDNGSPSKESVVLVYVKILPPEMQLPKFSEPFYTFTVSEDVPIGTEIDLIRAEHSGTVLYSLVKGNTPESNRDESFVIDRQSGRLKLEKSLDHETTKWYQFSILARCTQDDHEMVASVDVSIQVKDANDNSPVFESSPYEAFIVENLPGGSRVIQIRASDADSGTNGQVMYSLDQSQSVEVIESFAINMETGWITTLKELDHEKRDNYQIKVVASDHGEKIQLSSTAIVDVTVTDVNDSPPRFTAEIYKGTVSEDDPQGGVIAILSTTDADSEEINRQVTYFITGGDPLGQFAVETIQNEWKVYVKKPLDREKRDNYLLTITATDGTFSSKAIVEVKVLDANDNSPVCEKTLYSDTIPEDVLPGKLIMQISATDADIRSNAEITYTLLGSGAEKFKLNPDTGELKTSTPLDREEQAVYHLLVRATDGGGRFCQASIVLTLEDVNDNAPEFSADPYAITVFENTEPGTLLTRVQATDADAGLNRKILYSLIDSADGQFSINELSGIIQLEKPLDRELQAVYTLSLKAVDQGLPRRLTATGTVIVSVLDINDNPPVFEYREYGATVSEDILVGTEVLQVYAASRDIEANAEITYSIISGNEHGKFSIDSKTGAVFIIENLDYESSHEYYLTVEATDGGTPSLSDVATVNVNVTDINDNTPVFSQDTYTTVISEDAVLEQSVITVMADDADGPSNSHIHYSIIDGNQGSSFTIDPVRGEVKVTKLLDRETISGYTLTVQASDNGSPPRVNTTTVNIDVSDVNDNAPVFSRGNYSVIIQENKPVGFSVLQLVVTDEDSSHNGPPFFFTIVTGNDEKAFEVNPQGVLLTSSAIKRKEKDHYLLQVKVADNGKPQLSSLTYIDIRVIEESIYPPAILPLEIFITSSGEEYSGGVIGKIHATDQDVYDTLTYSLDPQMDNLFSVSSTGGKLIAHKKLDIGQYLLNVSVTDGKFTTVADITVHIRQVTQEMLNHTIAIRFANLTPEEFVGDYWRNFQRALRNILGVRRNDIQIVSLQSSEPHPHLDVLLFVEKPGSAQISTKQLLHKINSSVTDIEEIIGVRILNVFQKLCAGLDCPWKFCDEKVSVDESVMSTHSTARLSFVTPRHHRAAVCLCKEGRCPPVHHGCEDDPCPEGSECVSDPWEEKHTCVCPSGRFGQCPGSSSMTLTGNSYVKYRLTENENKLEMKLTMRLRTYSTHAVVMYARGTDYSILEIHHGRLQYKFDCGSGPGIVSVQSIQVNDGQWHAVALEVNGNYARLVLDQVHTASGTAPGTLKTLNLDNYVFFGGHIRQQGTRHGRSPQVGNGFRGCMDSIYLNGQELPLNSKPRSYAHIEESVDVSPGCFLTATEDCASNPCQNGGVCNPSPAGGYYCKCSALYIGTHCEISVNPCSSKPCLYGGTCVVDNGGFVCQCRGLYTGQRCQLSPYCKDEPCKNGGTCFDSLDGAVCQCDSGFRGERCQSDIDECSGNPCLHGALCENTHGSYHCNCSHEYRGRHCEDAAPNQYVSTPWNIGLAE

SEQ ID NO: 2347 - protein, 4048 aa, synthetic construct
  REGION 1..4048: note = FAT2 (Q9NYQ8) SP+PP+ECD
MTIALLGFAIFLLHCATCEKPLEGILSSSAWHFTHSHYNATIYENSSPKTYVESFEKMGIYLAEPQWAVRYRIISGDVANVFKTEEYVVGNFCFLRIRTKSSNTALLNREVRDSYTLIIQATEKTLELEALTRVVVHILDQNDLKPLFSPPSYRVTISEDMPLKSPICKVTATDADLGQNAEFYYAFNTRSEMFAIHPTSGVVTVAGKLNVTWRGKHELQVLAVDRMRKISEGNGFGSLAALVVHVEPALRKPPAIASVVVTPPDSNDGTTYATVLVDANSSGAEVESVEVVGGDPGKHFKAIKSYARSNEFSLVSVKDINWMEYLHGFNLSLQARSGSGPYFYSQIRGFHLPPSKLSSLKFEKAVYRVQLSEFSPPGSRVVMVRVTPAFPNLQYVLKPSSENVGFKLNARTGLITTTKLMDFHDRAHYQLHIRTSPGQASTVVVIDIVDCNNHAPLFNRSSYDGTLDENIPPGTSVLAVTATDRDHGENGYVTYSIAGPKALPFSIDPYLGIISTSKPMDYELMKRIYTFRVRASDWGSPFRREKEVSIFLQLRNLNDNQPMFEEVNCTGSIRQDWPVGKSIMTMSAIDVDELQNLKYEIVSGNELEYFDLNHFSGVISLKRPFINLTAGQPTSYSLKITASDGKNYASPTTLNITVVKDPHFEVPVTCDKTGVLTQFTKTILHFIGLQNQESSDEEFTSLSTYQINHYTPQFEDHFPQSIDVLESVPINTPLARLAATDPDAGFNGKLVYVIADGNEEGCFDIELETGLLTVAAPLDYEATNFYILNVTVYDLGTPQKSSWKLLTVNVKDWNDNAPRFPPGGYQLTISEDTEVGTTIAELTTKDADSEDNGRVRYTLLSPTEKFSLHPLTGELVVTGHLDRESEPRYILKVEARDQPSKGHQLFSVTDLIITLEDVNDNSPQCITEHNRLKVPEDLPPGTVLTFLDASDPDLGPAGEVRYVLMDGAHGTFRVDLMTGALILERELDFERRAGYNLSLWASDGGRPLARRTLCHVEVIVLDVNENLHPPHFASFVHQGQVQENSPSGTQVIVVAAQDDDSGLDGELQYFLRAGTGLAAFSINQDTGMIQTLAPLDREFASYYWLTVLAVDRGSVPLSSVTEVYIEVTDANDNPPQMSQAVFYPSIQEDAPVGTSVLQLDAWDPDSSSKGKLTFNITSGNYMGFFMIHPVTGLLSTAQQLDRENKDEHILEVTVLDNGEPSLKSTSRVVVGILDVNDNPPIFSHKLFNVRLPERLSPVSPGPVYRLVASDLDEGLNGRVTYSIEDSDEEAFSIDLVTGVVSSSSTFTAGEYNILTIKATDSGQPPLSASVRLHIEWIPWPRPSSIPLAFDETYYSFTVMETDPVNHMVGVISVEGRPGLFWFNISGGDKDMDFDIEKTTGSIVIARPLDTRRRSNYNLTVEVTDGSRTIATQVHIFMIANINHHRPQFLETRYEVRVPQDTVPGVELLRVQAIDQDKGKSLIYTIHGSQDPGSASLFQLDPSSGVLVTVGKLDLGSGPSQHTLTVMVRDQEIPIKRNFVWVTIHVEDGNLHPPRFTQLHYEASVPDTIAPGTELLQVRAMDADRGVNAEVHYSLLKGNSEGFFNINALLGIITLAQKLDQANHAPHTLTVKAEDQGSPQWHDLATVIIHVYPSDRSAPIFSKSEYFVEIPESIPVGSPILLVSAMSPSEVTYELREGNKDGVFSMNSYSGLISTQKKLDHEKISSYQLKIRGSNMAGAFTDVMVVVDIIDENDNAPMFLKSTFVGQISEAAPLYSMIMDKNNNPFVIHASDSDKEANSLLVYKILEPEALKFFKIDPSMGTLTIVSEMDYESMPSFQFCVYVHDQGSPVLFAPRPAQVIIHVRDVNDSPPRFSEQIYEVAIVGPIHPGMELLMVRASDEDSEVNYSIKTGNADEAVTIHPVTGSISVLNPAFLGLSRKLTIRASDGLYQDTALVKISLTQVLDKSLQFDQDVYWAAVKENLQDRKALVILGAQGNHLNDTLSYFLLNGTDMFHMVQSAGVLQTRGVAFDREQQDTHELAVEVRDNRTPQRVAQGLVRVSIEDVNDNPPKFKHLPYYTIIQDGTEPGDVLFQVSATDEDLGTNGAVTYEFAEDYTYFRIDPYLGDISLKKPFDYQALNKYHLKVIARDGGTPSLQSEEEVLVTVRNKSNPLFQSPYYKVRVPENITLYTPILHTQARSPEGLRLIYNIVEEEPLMLFTTDFKTGVLTVTGPLDYESKTKHVFTVRATDTALGSFSEATVEVLVEDVNDNPPTFSQLVYTTSISEGLPAQTPVIQLLASDQDSGRNRDVSYQIVEDGSDVSKFFQINGSTGEMSTVQELDYEAQQHFHVKVRAMDKGDPPLTGETLVVVNVSDINDNPPEFRQPQYEANVSELATCGHLVLKVQAIDPDSRDTSRLEYLILSGNQDRHFFINSSSGIISMFNLCKKHLDSSYNLRVGASDGVFRATVPVYINTTNANKYSPEFQQHLYEAELAENAMVGTKVIDLLAIDKDSGPYGTIDYTIINKLASEKFSINPNGQIATLQKLDRENSTERVIAIKVMARDGGGRVAFCTVKIILTDENDNPPQFKASEYTVSIQSNVSKDSPVIQVLAYDADEGQNADVTYSVNPEDLVKDVIEINPVTGVVKVKDSLVGLENQTLDFFIKAQDGGPPHWNSLVPVRLQVVPKKVSLPKFSEPLYTFSAPEDLPEGSEIGIVKAVAAQDPVIYSLVRGTTPESNKDGVFSLDPDTGVIKVRKPMDHESTKLYQIDVMAHCLQNTDVVSLVSVNIQVGDVNDNRPVFEADPYKAVLTENMPVGTSVIQVTAIDKDTGRDGQVSYRLSADPGSNVHELFAIDSESGWITTLQELDCETCQTYHFHVVAYDHGQTIQLSSQALVQVSITDENDNAPRFASEEYRGSVVENSEPGELVATLKTLDADISEQNRQVTCYITEGDPLGQFGISQVGDEWRISSRKTLDREHTAKYLLRVTASDGKFQASVTVEIFVLDVNDNSPQCSQLLYTGKVHEDVFPGHFILKVSATDLDTDTNAQITYSLHGPGAHEFKLDPHTGELTTLTALDRERKDVFNLVAKATDGGGRSCQADITLHVEDVNDNAPRFFPSHCAVAVFDNTTVKTPVAVVFARDPDQGANAQVVYSLPDSAEGHFSIDATTGVIRLEKPLQVRPQAPLELTVRASDLGTPIPLSTLGTVTVSVVGLEDYLPVFLNTEHSVQVPEDAPPGTEVLQLATLTRPGAEKTGYRVVSGNEQGRFRLDARTGILYVNASLDFETSPKYFLSIECSRKSSSSLSDVTTVMVNITDVNEHRPQFPQDPYSTRVLENALVGDVILTVSATDEDGPLNSDITYSLIGGNQLGHFTIHPKKGELQVAKALDREQASSYSLKLRATDSGQPPLHEDTDIAIQVADVNDNPPRFFQLNYSTTVQENSPIGSKVLQLILSDPDSPENGPPYSFRITKGNNGSAFRVTPDGWLVTAEGLSRRAQEWYQLQIQASDSGIPPLSSLTSVRVHVTEQSHYAPSALPLEIFITVGEDEFQGGMVGKIHATDRDPQDTLTYSLAEEETLGRHFSVGAPDGKIIAAQGLPRGHYSFNVTVSDGTFTTTAGVHVYVWHVGQEALQQAMWMGFYQLTPEELVSDHWRNLQRFLSHKLDIKRANIHLASLQPAEAVAGVDVLLVFEGHSGTFYEFQELASIITHSAKEMEHSVGVQMRSAMPMVPCQGPTCQGQICHNTVHLDPKVGPTYSTARLSILTPRHHLQRSCSCNGTATRFSGQSYVRYRAPAARNWHIHFYLKTLQPQAILLFTNETASVSLKLASGVPQLEYHCLGGFYGNLSSQRHVNDHEWHSILVEEMDASIRLMVDSMGNTSLVVPENCRGLRPERHLLLGGLILLHSSSNVSQGFEGCLDAVVVNEEALDLLAPGKTVAGLLETQALTQCCLHSDYCSQNTCLNGGKCSWTHGAGYVCKCPPQFSGKHCEQGRENCTFAPCLEGGTCILSPKGASCNCPHPYTGDRCEMEARGCSEGHCLVTPEIQRGDWGQQE

SEQ ID NO: 2348 - protein, 4154 aa, synthetic construct
  REGION 1..4154: note = FAT3 (Q8TDW7) SP+PP+ECD
MDIIMGHCVGTRPPACCLILLLFKLLATVSQGLPGTGPLGFHFTHSIYNATVYENSAARTYVNSQSRMGITLIDLSWDIKYRIVSGDEEGFFKAEEVIIADFCFLRIRTKGGNSAILNREIQDNYLLIVKGSVRGEDLEAWTKVNIQVLDMNDLRPLFSPTTYSVTIAESTPLRTSVAQVTATDADIGSNGEFYYYFKNKVDLFSVHPTSGVISLSGRLNYDEKNRYDLEILAVDRGMKLYGNNGVSSTAKLYVHIERINEHAPTIHVVTHVPFSLEKEPTYAVVTVDDLDDGANGEIESVSIVAGDPLDQFFLAKEGKWLNEYKIKERKQIDWESFPYGYNLTLQAKDKGSPQKCSALKAVYIGNPTRDTVPIRFEKEVYDVSISEFSPPGVVVAIVKLSPEPIDVEYKLSPGEDAVYFKINPRSGLIVTARPLNTVKKEVYKLEVTNKEGDLKAQVTISIEDANDHTPEFQQPLYDAYVNESVPVGTSVLTVSASDKDKGENGYITYSIASLNLLPFVINQFTGVISTTEELDFESSPEIYRFIVRASDWGSPYRHESEVNVTIRIGNVNDNSPLFEKVACQGVISYDFPVGGHITAVSAIDIDELELVKYKIISGNELGFFYLNPDSGVLQLKKSLTNSGIKNGNFALRITATDGENLADPMSINISVLHGKVSSKSFSCRETRVAQKLAEKLLIKAKANGKLNLEDGFLDFYSINRQGPYFDKSFPSDVAVKEDLPVGANILKIKAYDADSGFNGKVLFTISDGNTDSCFNIDMETGQLKVLMPMDREHTDLYLLNITIYDLGNPQKSSWRLLTINVEDANDNSPVFIQDSYSVNILESSGIGTEIIQVEARDKDLGSNGEVTYSVLTDTQQFAINSSTGIVYVADQLDRESKANYSLKIEARDKAESGQQLFSVVTLKVFLDDVNDCSPAFIPSSYSVKVLEDLPVGTVIAWLETHDPDLGLGGQVRYSLVNDYNGRFEIDKASGAIRLSKELDYEKQQFYNLTVRAKDKGRPVSLSSVSFVEVEVVDVNENLHTPYFPDFAVVGSVKENSRIGTSVLQVTARDEDSGRDGEIQYSIRDGSGLGRFSIDDESGVITAADILDRETMGSYWLTVYATDRGVVPLYSTIEVYIEVEDVNDNAPLTSEPIYYPVVMENSPKDVSVIQIQAEDPDSSSNEKLTYRITSGNPQNFFAINIKTGLITTTSRKLDREQQAEHFLEVTVTDGGPSPKQSTIWVVVQVLDENDNKPQFPEKVYQIKLPERDRKKRGEPIYRAFAFDRDEGPNAEISYSIVDGNDDGKFFIDPKTGMVSSRKQFTAGSYDILTIKAVDNGRPQKSSTARLHIEWIKKPPPSPIPLTFDEPFYNFTVMESDRVTEIVGVVSVQPANTPLWFDIVGGNFDSAFDAEKGVGTIVIAKPLDAEQRSIYNMSVEVTDGTNVAVTQVFIKVLDNNDNGPEFSQPNYDVTISEDVLPDTEILQIEATDRDEKHKLSYTVHSSIDSISMRKFRIDPSTGVLYTAERLDHEAQDKHILNIMVRDQEFPYRRNLARVIVNVEDANDHSPYFTNPLYEASVFESAALGSAVLQVTALDKDKGENAELIYTIEAGNTGNMFKIEPVLGIITICKEPDMTTMGQFVLSIKVTDQGSPPMSATAIVRISVTMSDNSHPKFIHKDYQAEVNENVDIGTSVILISAISQSTLIYEVKDGDINGIFTINPYSGVITTQKALDYERTSSYQLIIQATNMAGMASNATVNIQIVDENDNAPVFLFSQYSGSLSEAAPINSIVRSLDNSPLVIRATDADSNRNALLVYQIVESTAKKFFTVDSSTGAIRTIANLDHETIAHFHFHVHVRDSGSPQLTAESPVEVNIEVTDVNDNPPVFTQAVFETILLLPTYVGVEVLKVSATDPDSEVPPELTYSLMEGSLDHFLIDSNSGVLTIKNNNLSKDHYMLIVKVSDGKFYSTSMVTIMVKEAMDSGLHFTQSFYSTSISENNTNITKVAIVNAVGNRLNEPLKYSILNPGNKFKIKSTSGVIQTTGVPFDREEQELYELVVEASRELDHLRVARVVVRVNIEDINDNSPVFVGLPYYAAVQVDAEPGTLIYQVTAIDKDKGPNGEVTYVLQDDYGHFEINPNSGNVILKEAFNSDLSNIEYGVTILAKDGGKPSLSTSVELPITIVNKAMPVFDKPFYTASVNEDIRMNTPILSINATSPEGQGIIYIIIDGDPFKQFNIDFDTGVLKVVSPLDYEVTSAYKLTIRASDALTGARAEVTVDLLVNDVNDNPPIFDQPTYNTTLSEASLIGTPVLQVVSIDADSENNKMVHYQIVQDTYNSTDYFHIDSSSGLILTARMLDHELVQHCTLKVRSIDSGFPSLSSEVLVHIYISDVNDNPPVFNQLIYESYVSELAPRGHFVTCVQASDADSSDFDRLEYSILSGNDRTSFLMDSKSGVITLSNHRKQRMEPLYSLNVSVSDGLFTSTAQVHIRVLGANLYSPAFSQSTYVAEVRENVAAGTKVIHVRATDGDPGTYGQISYAIINDFAKDRFLIDSNGQVITTERLDRENPLEGDVSIFVRALDGGGRTTFCTVRVIVVDENDNAPQFMTVEYRASVRADVGRGHLVTQVQAIDPDDGANSRITYSLYSEASVSVADLLEIDPDNGWMVTKGNFNQLKNTVLSFFVKAVDGGIPVKHSLIPVYIHVLPPETFLPSFTQSQYSFTIAEDTAIGSTVDTLRILPSQNVWFSTVNGERPENNKGGIFVIEQETGTIKLDKRLDRETSPAFHFKVAATIPLDKVDIVFTVDVDIKVLDLNDNKPVFETSSYDTIIMEGMPVGTKLTQVRAIDMDWGANGQVTYSLHSDSQPEKVMEAFNIDSNTGWISTLKDLDHETDPTFTFSVVASDLGEAFSLSSTALVSVRVTDINDNAPVFAQEVYRGNVKESDPPGEVVAVLSTWDRDTSDVNRQVSYHITGGNPRGRFALGLVQSEWKVYVKRPLDREEQDIYFLNITATDGLFVTQAMVEVSVSDVNDNSPVCDQVAYTALLPEDIPSNKIILKVSAKDADIGSNGYIRYSLYGSGNSEFFLDPESGELKTLALLDRERIPVYSLMAKATDGGGRFCQSNIHLILEDVNDNPPVFSSDHYNTCVYENTATKALLTRVQAVDPDIGINRKVVYSLADSAGGVFSIDSSSGIIILEQPLDREQQSSYNISVRATDQSPGQSLSSLTTVTITVLDINDNPPVFERRDYLVTVPEDTSPGTQVLAVFATSKDIGTNAEITYLIRSGNEQGKFKINPKTGGISVSEVLDYELCKRFYLVVEAKDGGTPALSAVATVNINLTDVNDNPPKFSQDVYSAVISEDALVGDSVILLIAEDVDSQPNGQIHFSIVNGDRDNEFTVDPVLGLVKVKKKLDRERVSGYSLLVQAVDSGIPAMSSTATVNIDISDVNDNSPVFTPANYTAVIQENKPVGTSILQLVVTDRDSFHNGPPFSFSILSGNEEEEFVLDPHGILRSAVVFQHTESLEYVLCVQAKDSGKPQQVSHTYIRVRVIEESTHKPTAIPLEIFIVTMEDDFPGGVIGKIHATDQDMYDVLTFALKSEQKSLFKVNSHDGKIIALGGLDSGKYVLNVSVSDGRFQVPIDVVVHVEQLVHEMLQNTVTIRFENVSPEDFVGLHMHGFRRTLRNAVLTQKQDSLRIISIQPVAGTNQLDMLFAVEMHSSEFYKPAYLIQKLSNARRHLENIMRISAILEKNCSGLDCQEQHCEQGLSLDSHALMTYSTARISFVCPRFYRNVRCTCNGGLCPGSNDPCVEKPCPGDMQCVSYEASRRPFLCQCPPGKLGECSGHTSLSFAGNSYIKYRLSENSKEEDFKLALRLRTLQSNGIIMYTRANPCIILKIVDGKLWFQLDCGSGPGILGISGRAVNDGSWHSVFLELNRNFTSLSLDDSYVERRRAPLYFQTLSTESSIYFGALVQADNIRSLTDTRVTQVLSGFQGCLDSVILNNNELPLQNKRSSFAEVVGLTELKLGCVLYPDACKRSPCQHGGSCTGLPSGGYQCTCLSQFTGRNCESEITACFPNPCRNGGSCDPIGNTFICNCKAGLTGVTCEEDINECEREECENGGSCVNVFGSFLCNCTPGYVGQYCGLRPVVVPNIQAGHSYVGKEE

SEQ ID NO: 2349 - protein, 4504 aa, synthetic construct
  REGION 1..4504: note = FAT4 (Q6V0I7) SP+PP+ECD
MDLAPDRATGRPWLPLHTLSVSQLLRVFWLLSLLPGQAWVHGAEPRQVFQVLEEQPPGTLVGTIQTRPGFTYRLSESHALFAINSSTGALYTTSTIDRESLPSDVINLVVLSSAPTYPTEVRVLVRDLNDNAPVFPDPSIVVTFKEDSSSGRQVILDTATDSDIGSNGVDHRSYRIIRGNEAGRFRLDITLNPSGEGAFLHLVSKGGLDREVTPQYQLLVEVEDKGEPKRRGYLQVNVTVQDINDNPPVFGSSHYQAGVPEDAVVGSSVLQVAAADADEGTNADIRYRLQDEGTPFQMDPETGLITVREPLDFEARRQYSLTVQAMDRGVPSLTGRAEALIQLLDVNDNDPVVKFRYFPATSRYASVDENAQVGTVVALLTVTDADSPAANGNISVQILGGNEQRHFEVQSSKVPNLSLIKVASALDRERIPSYNLTVSVSDNYGAPPGAAVQARSSVASLVIFVNDINDHPPVFSQQVYRVNLSEEAPPGSYVSGISATDGDSGLNANLRYSIVSGNGLGWFHISEHSGLVTTGSSGGLDRELASQIVLNISARDQGVHPKVSYAQLVVTLLDVNDEKPVFSQPEGYDVSVVENAPTGTELLMLRATDGDLGDNGTVRFSLQEAETDRRSFRLDPVSGRLSTISSLDREEQAFYSLLVLATDLGSPPQSSMARINVSLLDINDNSPVFYPVQYFAHIKENEPGGSYITTVSATDPDLGTNGTVKYSISAGDRSRFQVNAQSGVISTRMALDREEKTAYQLQIVATDGGNLQSPNQAIVTITVLDTQDNPPVFSQVAYSFVVFENVALGYHVGSVSASTMDLNSNISYLITTGDQKGMFAINQVTGQLTTANVIDREEQSFYQLKVVASGGTVTGDTMVNITVKDLNDNSPHFLQAIESVNVVENWQAGHSIFQAKAVDPDEGVNGMVLYSLKQNPKNLFAINEKNGTISLLGPLDVHAGSYQIEILASDMGVPQLSSSVILTVYVHDVNDNSPVFDQLSYEVTLSESEPVNSRFFKVQASDKDSGANGEIAYTIAEGNTGDAFGIFPDGQLYIKSELDRELQDRYVLMVVASDRAVEPLSATVNVTVILEDVNDNRPLFNSTNYTFYFEEEQRAGSFVGKVSAVDKDFGPNGEVRYSFEMVQPDFELHAISGEITNTHQFDRESLMRRRGTAVFSFTVIATDQGIPQPLKDQATVHVYMKDINDNAPKFLKDFYQATISESAANLTQVLRVSASDVDEGNNGLIHYSIIKGNEERQFAIDSTSGQVTLIGKLDYEATPAYSLVIQAVDSGTIPLNSTCTLNIDILDENDNTPSFPKSTLFVDVLENMRIGELVSSVTATDSDSGDNADLYYSITGTNNHGTFSISPNTGSIFLAKKLDFETQSLYKLNITAKDQGRPPRSSTMSVVIHVRDFNDNPPSFPPGDIFKSIVENIPIGTSVISVTAHDPDADINGQLSYTIIQQMPRGNHFTIDEVKGTIYTNAEIDREFANLFELTVKANDQAVPIETRRYALKNVTILVTDLNDNVPMFISQNALAADPSAVIGSVLTTIMAADPDEGANGEIEYEIINGDTDTFIVDRYSGDLRVASALVPSQLIYNLIVSATDLGPERRKSTTELTIILQGLDGPVFTQPKYITILKEGEPIGTNVISIEAASPRGSEAPVEYYIVSVRCEEKTVGRLFTIGRHTGIIQTAAILDREQGACLYLVDVYAIEKSTAFPRTQRAEVEITLQDINDNPPVFPTDMLDLTVEENIGDGSKIMQLTAMDADEGANALVTYTIISGADDSFRIDPESGDLIATRRLDRERRSKYSLLVRADDGLQSSDMRINITVSDVNDHTPKFSRPVYSFDIPEDTIPGSLVAAILATDDDSGVNGEITYIVNEDDEDGIFFLNPITGVFNLTRLLDYEVQQYYILTVRAEDGGGQFTTIRVYFNILDVNDNPPIFSLNSYSTSLMENLPVGSTVLVFNVTDADDGINSQLTYSIASGDSLGQFTVDKNGVLKVLKALDRESQSFYNLVVQVHDLPQIPASRFTSTAQVSIILLDVNDNPPTFLSPKLTYIPENTPIDTVVFKAQATDPDSGPNSYIEYTLLNPLGNKFSIGTIDGEVRLTGELDREEVSNYTLTVVATDKGQPSLSSSTEVVVMVLDINDNNPIFAQALYKVEINENTLTGTDIIQVFAADGDEGTNGQVRYGIVNGNTNQEFRIDSVTGAITVAKPLDREKTPTYHLTVQATDRGSTPRTDTSTVSIVLLDINDFVPVFELSPYSVNVPENLGTLPRTILQVVARDDDRGSNSKLSYVLFGGNEDNAFTLSASGELGVTQSLDRETKERFVLMITATDSGSPALTGTGTINVIVDDVNDNVPTFASKAYFTTIPEDAPTGTDVLLVNASDADASKNAVIRIIGGNSQFTINPSTGQIITSALLDRETKDNYTLVVVCSDAGSPEPLSSSTSVLVTVTDVNDNPPRFQHHPYVTHIPSPTLPGSFVFAVTVTDADIGPNSELHYSLSGRNSEKFHIDPLRGAIMAAGPLNGASEVTFSVHVKDGGSFPKTDSTTVTVRFVNKADFPKVRAKEQTFMFPENQPVSSLVTTITGSSLRGEPMSYYIASGNLGNTFQIDQLTGQVSISQPLDFEKIQKYVVWIEARDGGFPPFSSYEKLDITVLDVNDNAPIFKEDPFISEILENLSPRKILTVSAMDKDSGPNGQLDYEIVNGNMENSFSINHATGEIRSVRPLDREKVSHYVLTIKSSDKGSPSQSTSVKVMINILDENDNAPRFSQIFSAHVPENSPLGYTVTRVTTSDEDIGINAISRYSIMDASLPFTINPSTGDIVISRPLNREDTDRYRIRVSAHDSGWTVSTDVTIFVTDINDNAPRFSRTSYYLDCPELTEIGSKVTQVFATDPDEGSNGQVFYFIKSQSEYFRINATTGEIFNKQILKYQNVTGFSNVNINRHSFIVTSSDRGKPSLISETTVTINIVDSNDNAPQFLKSKYFTPVTKNVKVGTKLIRVTAIDDKDFGLNSEVEYFISNDNHLGKFKLDNDTGWISVASSLISDLNQNFFITVTAKDKGNPPLSSQATVHITVTEENYHTPEFSQSHMSATIPESHSIGSIVRTVSARDRDAAMNGLIKYSISSGNEEGIFAINSSTGILTLAKALDYELCQKHEMTISAIDGGWVARTGYCSVTVNVIDVNDNSPVFLSDDYFPTVLENAPSGTTVIHLNATDADSGTNAVIAYTVQSSDSDLFVIDPNTGVITTQGFLDFETKQSYHLTVKAFNVPDEERCSFATVNIQLKGTNEYVPRFVSKLYYFEISEAAPKGTIVGEVFASDRDLGTDGEVHYLIFGNSRKKGFQINKKTGQIYVSGILDREKEERVSLKVLAKNFGSIRGADIDEVTVNVTVLDANDPPIFTLNIYSVQISEGVPIGTHVTFVSAFDSDSIPSWSRFSYFIGSGNENGAFSINPQTGQITVTAELDRETLPIYNLSVLAVDSGTPSATGSASLLVTLEDINDNGPMLTVSEGEVMENKRPGTLVMTLQSTDPDLPPNQGPFTYYLLSTGPATSYFSLSTAGVLSTTREIDREQIADFYLSVVTKDSGVPQMSSTGTVHITVIDQNDNPSQSRTVEIFVNYYGNLFPGGILGSVKPQDPDVLDSFHCSLTSGVTSLFSIPGGTCDLNSQPRSTDGTFDLTVLSNDGVHSTVTSNIRVFFAGFSNATVDNSILLRLGVPTVKDFLTNHYLHFLRIASSQLTGLGTAVQLYSAYEENNRTFLLAAVKRNHNQYVNPSGVATFFESIKEILLRQSGVKVESVDHDSCVHGPCQNGGSCLRRLAVSSVLKSRESLPVIIVANEPLQPFLCKCLPGYAGSWCEIDIDECLPSPCHSGGTCHNLVGGFSCSCPDGFTGRACERDINECLQSPCKNGAICQNFPGSFNCVCKTGYTGKMCESSVNYCECNPCFNGGSCQSGVDSYYCHCPFGVFGKHCELNSYGFEELSYMEFPSLDPNNNYIYVKFATIKSHALLLYNYDNQTGDRAEFLALEIAEERLRFSYNLGSGTYKLTTMKKVSDGHFHTVIARRAGMAASLTVDSCSENQEPGYCTVSNVAVSDDWTLDVQPNRVTVGGIRSLEPILQRRGHVESHDFVGCIMEFAVNGRPLEPSQALAAQGILDQCPRLEGACTRSPCQHGGTCMDYWSWQQCHCKEGLTGKYCEKSVTPDTALSLEGKGRLDYHMSQNEKREYLLRQSLRGAMLEPFGVNSLEVKFRTRSENGVLIHIQESSNYTTVKIKNGKVYFTSDAGIAGKVERNIPEVYVADGHWHTFLIGKNGTATVLSVDRIYNRDIIHPTQDFGGLDVLTISLGGIPPNQAHRDAQTAGFDGCIASMWYGGESLPFSGKHSLASISKTDPSVKIGCRGPNICASNPCWGDLLCINQWYAYRCVPPGDCASHPCQNGGSCEPGLHSGFTCSCPDSHTGRTCEMVVACLGVLCPQGKVCKAGSPAGHVCVLSQGPEEISLPLWA

SEQ ID NO: 2350 - protein, 450 aa, synthetic construct
  REGION 1..450: note = FCAMR (Q8WWV6) SP+PP+ECD
MPLFLILCLLQGSSFALPQKRPHPRWLWEGSLPSRTHLRAMGTLRPSSPLCWREESSFAAPNSLKGSRLVSGEPGGAVTIQCHYAPSSVNRHQRKYWCRLGPPRWICQTIVSTNQYTHHRYRDRVALTDFPQRGLFVVRLSQLSPDDIGCYLCGIGSENNMLFLSMNLTISAGPASTLPTATPAAGELTMRSYGTASPVANRWTPGTTQTLGQGTAWDTVASTPGTSKTTASAEGRRTPGATRPAAPGTGSWAEGSVKAPAPIPESPPSKSRSMSNTTEGVWEGTRSSVTNRARASKDRREMTTTKADRPREDIEGVRIALDAAKKVLGTIGPPALVSETLAWEILPQATPVSKQQSQGSIGETTPAAGMWTLGTPAADVWILGTPAADVWTSMEAASGEGSAAGDLDAATGDRGPQATLSQTPAVGPWGPPGKESSVKRTFPEDESSSR

SEQ ID NO: 2351 - protein, 227 aa, synthetic construct
  REGION 1..227: note = FCAR (P24071) SP+PP+ECD
MDPKQTTLLCLVLCLGQRIQAQEGDFPMPFISAKSSPVIPLDGSVKIQCQAIREAYLTQLMIIKNSTYREIGRRLKFWNETDPEFVIDHMDANKAGRYQCQYRIGHYRFRYSDTLELVVTGLYGKPFLSADRGLVLMPGENISLTCSSAHIPFDRFSLAKEGELSLPQHQSGEHPANFSLGPVDLNVSGIYRCYGWYNRSPYLWSFPSNALELVVTDSIHQDYTTQN

SEQ ID NO: 2352 - protein, 205 aa, synthetic construct
  REGION 1..205: note = FCER1A (P12319) SP+PP+ECD
MAPAMESPTLLCVALLFFAPDGVLAVPQKPKVSLNPPWNRIFKGENVTLTCNGNNFFEVSSTKWFHNGSLSEETNSSLNIVNAKFEDSGEYKCQHQQVNESEPVYLEVFSDWLLLQASAEVVMEGQPLFLRCHGWRNWDVYKVIYYKDGEALKYWYENHNISITNATVEDSGTYYCTGKVWQLDYESEPLNITVIKAPREKYWLQ

SEQ ID NO: 2353 - protein, 292 aa, synthetic construct
  REGION 1..292: note = FCGR1A (P12314) SP+PP+ECD
MWFLTTLLLWVPVDGQVDTTKAVITLQPPWVSVFQEETVTLHCEVLHLPGSSSTQWFLNGTATQTSTPSYRITSASVNDSGEYRCQRGLSGRSDPIQLEIHRGWLLLQVSSRVFTEGEPLALRCHAWKDKLVYNVLYYRNGKAFKFFHWNSNLTILKTNISHNGTYHCSGMGKHRYTSAGISVTVKELFPAPVLNASVTSPLLEGNLVTLSCETKLLLQRPGLQLYFSFYMGSKTLRGRNTSSEYQILTARREDSGLYWCEAATEDGNVLKRSPELELQVLGLQLPTPVWFH

SEQ ID NO: 2354 - protein, 198 aa, synthetic construct
  REGION 1..198: note = FCGR1B (Q92637) SP+PP+ECD
MWFLTTLLLWVPVDGQVDTTKAVITLQPPWVSVFQEETVTLHCEVLHLPGSSSTQWFLNGTATQTSTPSYRITSASVNDSGEYRCQRGLSGRSDPIQLEIHRGWLLLQVSSRVFMEGEPLALRCHAWKDKLVYNVLYYRNGKAFKFFHWNSNLTILKTNISHNGTYHCSGMGKHRYTSAGISQYTVKGLQLPTPVWFH

SEQ ID NO: 2355 - protein, 217 aa, synthetic construct
  REGION 1..217: note = FCGR2A (P12318) SP+PP+ECD
MTMETQMSQNVCPRNLWLLQPLTVLLLLASADSQAAAPPKAVLKLEPPWINVLQEDSVTLTCQGARSPESDSIQWFHNGNLIPTHTQPSYRFKANNNDSGEYTCQTGQTSLSDPVHLTVLSEWLVLQTPHLEFQEGETIMLRCHSWKDKPLVKVTFFQNGKSQKFSHLDPTFSIPQANHSHSGDYHCTGNIGYTLFSSKPVTITVQVPSMGSSSPMG

SEQ ID NO: 2356 - protein, 217 aa, synthetic construct
  REGION 1..217: note = FCGR2B (P31994) SP+PP+ECD
MGILSFLPVLATESDWADCKSPQPWGHMLLWTAVLFLAPVAGTPAAPPKAVLKLEPQWINVLQEDSVTLTCRGTHSPESDSIQWFHNGNLIPTHTQPSYRFKANNNDSGEYTCQTGQTSLSDPVHLTVLSEWLVLQTPHLEFQEGETIVLRCHSWKDKPLVKVTFFQNGKSKKFSRSDPNFSIPQANHSHSGDYHCTGNIGYTLYSSKPVTITVQAP

SEQ ID NO: 2357 - protein, 223 aa, synthetic construct
  REGION 1..223: note = FCGR2C (P31995) SP+PP+ECD
MGILSFLPVLATESDWADCKSPQPWGHMLLWTAVLFLAPVAGTPAAPPKAVLKLEPQWINVLQEDSVTLTCRGTHSPESDSIQWFHNGNLIPTHTQPSYRFKANNNDSGEYTCQTGQTSLSDPVHLTVLSEWLVLQTPHLEFQEGETIVLRCHSWKDKPLVKVTFFQNGKSKKFSRSDPNFSIPQANHSHSGDYHCTGNIGYTLYSSKPVTITVQAPSSSPMG

SEQ ID NO: 2358 - protein, 208 aa, synthetic construct
  REGION 1..208: note = FCGR3A (P08637) SP+PP+ECD
MWQLLLPTALLLLVSAGMRTEDLPKAVVFLEPQWYRVLEKDSVTLKCQGAYSPEDNSTQWFHNESLISSQASSYFIDAATVDDSGEYRCQTNLSTLSDPVQLEVHIGWLLLQAPRWVFKEEDPIHLRCHSWKNTALHKVTYLQNGKGRKYFHHNSDFYIPKATLKDSGSYFCRGLFGSKNVSSETVNITITQGLAVSTISSFFPPGYQ

SEQ ID NO: 2359 - protein, 297 aa, synthetic construct
  REGION 1..297: note = FCGRT (P55899) SP+PP+ECD
MGVPRPQPWALGLLLFLLPGSLGAESHLSLLYHLTAVSSPAPGTPAFWVSGWLGPQQYLSYNSLRGEAEPCGAWVWENQVSWYWEKETTDLRIKEKLFLEAFKALGGKGPYTLQGLLGCELGPDNTSVPTAKFALNGEEFMNFDLKQGTWGGDWPEALAISQRWQQQDKAANKELTFLLFSCPHRLREHLERGRGNLEWKEPPSMRLKARPSSPGFSVLTCSAFSFYPPELQLRFLRNGLAAGTGQGDFGPNSDGSFHASSSLTVKSGDEHHYCCIVQHAGLAQPLRVELESPAKSS

SEQ ID NO: 2360 - protein, 307 aa, synthetic construct
  REGION 1..307: note = FCRL1 (Q96LA6) SP+PP+ECD
MLPRLLLLICAPLCEPAELFLIASPSHPTEGSPVTLTCKMPFLQSSDAQFQFCFFRDTRALGPGWSSSPKLQIAAMWKEDTGSYWCEAQTMASKVLRSRRSQINVHRVPVADVSLETQPPGGQVMEGDRLVLICSVAMGTGDITFLWYKGAVGLNLQSKTQRSLTAEYEIPSVRESDAEQYYCVAENGYGPSPSGLVSITVRIPVSRPILMLRAPRAQAAVEDVLELHCEALRGSPPILYWFYHEDITLGSRSAPSGGGASFNLSLTEEHSGNYSCEANNGLGAQRSEAVTLNFTVPTGARSNHLTS

SEQ ID NO: 2361 - protein, 401 aa, synthetic construct
  REGION 1..401: note = FCRL2 (Q96LA5) SP+PP+ECD
MLLWSLLVIFDAVTEQADSLTLVAPSSVFEGDSIVLKCQGEQNWKIQKMAYHKDNKELSVFKKFSDFLIQSAVLSDSGNYFCSTKGQLFLWDKTSNIVKIKVQELFQRPVLTASSFQPIEGGPVSLKCETRLSPQRLDVQLQFCFFRENQVLGSGWSSSPELQISAVWSEDTGSYWCKAETVTHRIRKQSLQSQIHVQRIPISNVSLEIRAPGGQVTEGQKLILLCSVAGGTGNVTFSWYREATGTSMGKKTQRSLSAELEIPAVKESDAGKYYCRADNGHVPIQSKVVNIPVRIPVSRPVLTLRSPGAQAAVGDLLELHCEALRGSPPILYQFYHEDVTLGNSSAPSGGGASFNLSLTAEHSGNYSCEANNGLGAQCSEAVPVSISGPDGYRRDLMTAGV

SEQ ID NO: 2362 - protein, 573 aa, synthetic construct
  REGION 1..573: note = FCRL3 (Q96P31) SP+PP+ECD
MLLWLLLLILTPGREQSGVAPKAVLLLNPPWSTAFKGEKVALICSSISHSLAQGDTYWYHDEKLLKIKHDKIQITEPGNYQCKTRGSSLSDAVHVEFSPDWLILQALHPVFEGDNVILRCQGKDNKNTHQKVYYKDGKQLPNSYNLEKITVNSVSRDNSKYHCTAYRKFYILDIEVTSKPLNIQVQELFLHPVLRASSSTPIEGSPMTLTCETQLSPQRPDVQLQFSLFRDSQTLGLGWSRSPRLQIPAMWTEDSGSYWCEVETVTHSIKKRSLRSQIRVQRVPVSNVNLEIRPTGGQLIEGENMVLICSVAQGSGTVTFSWHKEGRVRSLGRKTQRSLLAELHVLTVKESDAGRYYCAADNVHSPILSTWIRVTVRIPVSHPVLTFRAPRAHTVVGDLLELHCESLRGSPPILYRFYHEDVTLGNSSAPSGGGASFNLSLTAEHSGNYSCDADNGLGAQHSHGVSLRVTVPVSRPVLTLRAPGAQAVVGDLLELHCESLRGSFPILYWFYHEDDTLGNISAHSGGGASFNLSLTTEHSGNYSCEADNGLGAQHSKVVTLNVTGTSRNRTGLT

SEQ ID NO: 2363 - protein, 387 aa, synthetic construct
  REGION 1..387: note = FCRL4 (Q96PJ5) SP+PP+ECD
MLLWASLLAFAPVCGQSAAAHKPVISVHPPWTTFFKGERVTLTCNGFQFYATEKTTWYHRHYWGEKLTLTPGNTLEVRESGLYRCQARGSPRSNPVRLLFSSDSLILQAPYSVFEGDTLVLRCHRRRKEKLTAVKYTWNGNILSISNKSWDLLIPQASSNNNGNYRCIGYGDENDVFRSNFKIIKIQELFPHPELKATDSQPTEGNSVNLSCETQLPPERSDTPLHFNFFRDGEVILSDWSTYPELQLPTVWRENSGSYWCGAETVRGNIHKHSPSLQIHVQRIPVSGVLLETQPSGGQAVEGEMLVLVCSVAEGTGDTTFSWHREDMQESLGRKTQRSLRAELELPAIRQSHAGGYYCTADNSYGPVQSMVLNVTVRETPGNRDGL

SEQ ID NO: 2364 - protein, 851 aa, synthetic construct
  REGION 1..851: note = FCRL5 (Q96RD9) SP+PP+ECD
MLLWVILLVLAPVSGQFARTPRPIIFLQPPWTTVFQGERVTLTCKGFRFYSPQKTKWYHRYLGKEILRETPDNILEVQESGEYRCQAQGSPLSSPVHLDFSSASLILQAPLSVFEGDSVVLRCRAKAEVTLNNTIYKNDNVLAFLNKRTDFHIPHACLKDNGAYRCTGYKESCCPVSSNTVKIQVQEPFTRPVLRASSFQPISGNPVTLTCETQLSLERSDVPLRFRFFRDDQTLGLGWSLSPNFQITAMWSKDSGFYWCKAATMPYSVISDSPRSWIQVQIPASHPVLTLSPEKALNFEGTKVTLHCETQEDSLRTLYRFYHEGVPLRHKSVRCERGASISFSLTTENSGNYYCTADNGLGAKPSKAVSLSVTVPVSHPVLNLSSPEDLIFEGAKVTLHCEAQRGSLPILYQFHHEGAALERRSANSAGGVAISFSLTAEHSGNYYCTADNGFGPQRSKAVSLSVTVPVSHPVLTLSSAEALTFEGATVTLHCEVQRGSPQILYQFYHEDMPLWSSSTPSVGRVSFSFSLTEGHSGNYYCTADNGFGPQRSEVVSLFVTVPVSRPILTLRVPRAQAVVGDLLELHCEAPRGSPPILYWFYHEDVTLGSSSAPSGGEASFNLSLTAEHSGNYSCEANNGLVAQHSDTISLSVIVPVSRPILTFRAPRAQAVVGDLLELHCEALRGSSPILYWFYHEDVTLGKISAPSGGGASFNLSLTTEHSGIYSCEADNGLEAQRSEMVTLKVAVPVSRPVLTLRAPGTHAAVGDLLELHCEALRGSPLILYRFFHEDVTLGNRSSPSGGASLNLSLTAEHSGNYSCEADNGLGAQRSETVTLYITGLTANRSGPFATG

SEQ ID NO: 2365 - protein, 307 aa, synthetic construct
  REGION 1..307: note = FCRL6 (Q6DN72) SP+PP+ECD
MLLWTAVLLFVPCVGKTVWLYLQAWPNPVFEGDALTLRCQGWKNTPLSQVKFYRDGKFLHFSKENQTLSMGAATVQSRGQYSCSGQVMYIPQTFTQTSETAMVQVQELFPPPVLSAIPSPEPREGSLVTLRCQTKLHPLRSALRLLFSFHKDGHTLQDRGPHPELCIPGAKEGDSGLYWCEVAPEGGQVQKQSPQLEVRVQAPVSRPVLTLHHGPADPAVGDMVQLLCEAQRGSPPILYSFYLDEKIVGNHSAPCGGTTSLLFPVKSEQDAGNYSCEAENSVSRERSEPKKLSLKGSQVLFTPASNW

SEQ ID NO: 2366 - protein, 376 aa, synthetic construct
  REGION 1..376: note = FGFR1 (P11362) SP+PP+ECD
MWSWKCLLFWAVLVTATLCTARPSPTLPEQAQPWGAPVEVESFLVHPGDLLQLRCRLRDDVQSINWLRDGVQLAESNRTRITGEEVEVQDSVPADSGLYACVTSSPSGSDTTYFSVNVSDALPSSEDDDDDDDSSSEEKETDNTKPNRMPVAPYWTSPEKMEKKLHAVPAAKTVKFKCPSSGTPNPTLRWLKNGKEFKPDHRIGGYKVRYATWSIIMDSVVPSDKGNYTCIVENEYGSINHTYQLDVVERSPHRPILQAGLPANKTVALGSNVEFMCKVYSDPQPHIQWLKHIEVNGSKIGPDNLPYVQILKTAGVNTTDKEMEVLHLRNVSFEDAGEYTCLAGNSIGLSHHSAWLTVLEALEERPAVMTSPLYLE

SEQ ID NO: 2367 - protein, 377 aa, synthetic construct
  REGION 1..377: note = FGFR2 (P21802) SP+PP+ECD
MVSWGRFICLVVVTMATLSLARPSFSLVEDTTLEPEEPPTKYQISQPEVYVAAPGESLEVRCLLKDAAVISWTKDGVHLGPNNRTVLIGEYLQIKGATPRDSGLYACTASRTVDSETWYFMVNVTDAISSGDDEDDTDGAEDFVSENSNNKRAPYWTNTEKMEKRLHAVPAANTVKFRCPAGGNPMPTMRWLKNGKEFKQEHRIGGYKVRNQHWSLIMESVVPSDKGNYTCVVENEYGSINHTYHLDVVERSPHRPILQAGLPANASTVVGGDVEFVCKVYSDAQPHIQWIKHVEKNGSKYGPDGLPYLKVLKAAGVNTTDKEIEVLYIRNVTFEDAGEYTCLAGNSIGISFHSAWLTVLPAPGREKEITASPDYLE

SEQ ID NO: 2368 - protein, 375 aa, synthetic construct
  REGION 1..375: note = FGFR3 (P22607) SP+PP+ECD
MGAPACALALCVAVAIVAGASSESLGTEQRVVGRAAEVPGPEPGQQEQLVFGSGDAVELSCPPPGGGPMGPTVWVKDGTGLVPSERVLVGPQRLQVLNASHEDSGAYSCRQRLTQRVLCHFSVRVTDAPSSGDDEDGEDEAEDTGVDTGAPYWTRPERMDKKLLAVPAANTVRFRCPAAGNPTPSISWLKNGREFRGEHRIGGIKLRHQQWSLVMESVVPSDRGNYTCVVENKFGSIRQTYTLDVLERSPHRPILQAGLPANQTAVLGSDVEFHCKVYSDAQPHIQWLKHVEVNGSKVGPDGTPYVTVLKTAGANTTDKELEVLSLHNVTFEDAGEYTCLAGNSIGFSHHSAWLVVLPAEEELVEADEAGSVYAG

SEQ ID NO: 2369 - protein, 369 aa, synthetic construct
  REGION 1..369: note = FGFR4 (P22455) SP+PP+ECD
MRLLLALLGVLLSVPGPPVLSLEASEEVELEPCLAPSLEQQEQELTVALGQPVRLCCGRAERGGHWYKEGSRLAPAGRVRGWRGRLEIASFLPEDAGRYLCLARGSMIVLQNLTLITGDSLTSSNDDEDPKSHRDPSNRHSYPQQAPYWTHPQRMEKKLHAVPAGNTVKFRCPAAGNPTPTIRWLKDGQAFHGENRIGGIRLRHQHWSLVMESVVPSDRGTYTCLVENAVGSIRYNYLLDVLERSPHRPILQAGLPANTTAVVGSDVELLCKVYSDAQPHIQWLKHIVINGSSFGADGFPYVQVLKTADINSSEVEVLYLRNVSAEDAGEYTCLAGNSIGLSYQSAWLTVLPEEDPTWTAAAPEARYTD

SEQ ID NO: 2370 - protein, 378 aa, synthetic construct
  REGION 1..378: note = FGFRL1 (Q8N441) SP+PP+ECD
MTPSPLLLLLLPPLLLGAFPPAAAARGPPKMADKVVPRQVARLGRTVRLQCPVEGDPPPLTMWTKDGRTIHSGWSRFRVLPQGLKVKQVEREDAGVYVCKATNGFGSLSVNYTLVVLDDISPGKESLGPDSSSGGQEDPASQQWARPRFTQPSKMRRRVIARPVGSSVRLKCVASGHPRPDITWMKDDQALTRPEAAEPRKKKWTLSLKNLRPEDSGKYTCRVSNRAGAINATYKVDVIQRTRSKPVLTGTHPVNTTVDFGGTTSFQCKVRSDVKPVIQWLKRVEYGAEGRHNSTIDVGGQKFVVLPTGDVWSRPDGSYLNKLLITRARQDDAGMYICLGANTMGYSFRSAFLTVLPDPKPPGPPVASSSSATSLPWP

SEQ ID NO: 2371 - protein, 524 aa, synthetic construct
  REGION 1..524: note = FLRT1 (Q9NZU1) SP+PP+ECD
MDLRDWLFLCYGLIAFLTEVIDSTTCPSVCRCDNGFIYCNDRGLTSIPADIPDDATTLYLQNNQINNAGIPQDLKTKVNVQVIYLYENDLDEFPINLPRSLRELHLQDNNVRTIARDSLARIPLLEKLHLDDNSVSTVSIEEDAFADSKQLKLLFLSRNHLSSIPSGLPHTLEELRLDDNRISTIPLHAFKGLNSLRRLVLDGNLLANQRIADDTFSRLQNLTELSLVRNSLAAPPLNLPSAHLQKLYLQDNAISHIPYNTLAKMRELERLDLSNNNLTTLPRGLFDDLGNLAQLLLRNNPWFCGCNLMWLRDWVKARAAVVNVRGLMCQGPEKVRGMAIKDITSEMDECFETGPQGGVANAAAKTTASNHASATTPQGSLFTLKAKRPGLRLPDSNIDYPMATGDGAKTLAIHVKALTADSIRITWKATLPASSFRLSWLRLGHSPAVGSITETLVQGDKTEYLLTALEPKSTYIICMVTMETSNAYVADETPVCAKAETADSYGPTTTLNQEQNAGPMASLP

SEQ ID NO: 2372 - protein, 541 aa, synthetic construct
  REGION 1..541: note = FLRT2 (O43155) SP+PP+ECD
MGLQTTKWPSHGAFFLKSWLIISLGLYSQVSKLLACPSVCRCDRNFVYCNERSLTSVPLGIPEGVTVLYLHNNQINNAGFPAELHNVQSVHTVYLYGNQLDEFPMNLPKNVRVLHLQENNIQTISRAALAQLLKLEELHLDDNSISTVGVEDGAFREAISLKLLFLSKNHLSSVPVGLPVDLQELRVDENRIAVISDMAFQNLTSLERLIVDGNLLTNKGIAEGTFSHLTKLKEFSIVRNSLSHPPPDLPGTHLIRLYLQDNQINHIPLTAFSNLRKLERLDISNNQLRMLTQGVFDNLSNLKQLTARNNPWFCDCSIKWVTEWLKYIPSSLNVRGFMCQGPEQVRGMAVRELNMNLLSCPTTTPGLPLFTPAPSTASPTTQPPTLSIPNPSRSYTPPTPTTSKLPTIPDWDGRERVTPPISERIQLSIHFVNDTSIQVSWLSLFTVMAYKLTWVKMGHSLVGGIVQERIVSGEKQHLSLVNLEPRSTYRICLVPLDAFNYRAVEDTICSEATTHASYLNNGSNTASSHEQTTSHSMGSPF

SEQ ID NO: 2373 - protein, 528 aa, synthetic construct
  REGION 1..528: note = FLRT3 (Q9NZU0) SP+PP+ECD
MISAAWSIFLIGTKIGLFLQVAPLSVMAKSCPSVCRCDAGFIYCNDRFLTSIPTGIPEDATTLYLQNNQINNAGIPSDLKNLLKVERIYLYHNSLDEFPTNLPKYVKELHLQENNIRTITYDSLSKIPYLEELHLDDNSVSAVSIEEGAFRDSNYLRLLFLSRNHLSTIPWGLPRTIEELRLDDNRISTISSPSLQGLTSLKRLVLDGNLLNNHGLGDKVFFNLVNLTELSLVRNSLTAAPVNLPGTNLRKLYLQDNHINRVPPNAFSYLRQLYRLDMSNNNLSNLPQGIFDDLDNITQLILRNNPWYCGCKMKWVRDWLQSLPVKVNVRGLMCQAPEKVRGMAIKDLNAELFDCKDSGIVSTIQITTAIPNTVYPAQGQWPAPVTKQPDIKNPKLTKDHQTTGSPSRKTITITVKSVTSDTIHISWKLALPMTALRLSWLKLGHSPAFGSITETIVTGERSEYLVTALEPDSPYKVCMVPMETSNLYLFDETPVCIETETAPLRMYNPTTTLNREQEKEPYKNPNLP

SEQ ID NO: 2374 - protein, 758 aa, synthetic construct
  REGION 1..758: note = FLT1 (P17948) SP+PP+ECD
MVSYWDTGVLLCALLSCLLLTGSSSGSKLKDPELSLKGTQHIMQAGQTLHLQCRGEAAHKWSLPEMVSKESERLSITKSACGRNGKQFCSTLTLNTAQANHTGFYSCKYLAVPTSKKKETESAIYIFISDTGRPFVEMYSEIPEIIHMTEGRELVIPCRVTSPNITVTLKKFPLDTLIPDGKRIIWDSRKGFIISNATYKEIGLLTCEATVNGHLYKTNYLTHRQTNTIIDVQISTPRPVKLLRGHTLVLNCTATTPLNTRVQMTWSYPDEKNKRASVRRRIDQSNSHANIFYSVLTIDKMQNKDKGLYTCRVRSGPSFKSVNTSVHIYDKAFITVKHRKQQVLETVAGKRSYRLSMKVKAFPSPEVVWLKDGLPATEKSARYLTRGYSLIIKDVTEEDAGNYTILLSIKQSNVFKNLTATLIVNVKPQIYEKAVSSFPDPALYPLGSRQILTCTAYGIPQPTIKWFWHPCNHNHSEARCDFCSNNEESFILDADSNMGNRIESITQRMAIIEGKNKMASTLVVADSRISGIYICIASNKVGTVGRNISFYITDVPNGFHVNLEKMPTEGEDLKLSCTVNKFLYRDVTWILLRTVNNRTMHYSISKQKMAITKEHSITLNLTIMNVSLQDSGTYACRARNVYTGEEILQKKEITIRDQEAPYLLRNLSDHTVAISSSTTLDCHANGVPEPQITWFKNNHKIQQEPGIILGPGSSTLFIERVTEEDEGVYHCKATNQKGSVESSAYLTVQGTSDKSNLE

SEQ ID NO: 2375 - protein, 543 aa, synthetic construct
  REGION 1..543: note = FLT3 (P36888) SP+PP+ECD
MPALARDGGQLPLLVVFSAMIFGTITNQDLPVIKCVLINHKNNDSSVGKSSSYPMVSESPEDLGCALRPQSSGTVYEAAAVEVDVSASITLQVLVDAPGNISCLWVFKHSSLNCQPHFDLQNRGVVSMVILKMTETQAGEYLLFIQSEATNYTILFTVSIRNTLLYTLRRPYFRKMENQDALVCISESVPEPIVEWVLCDSQGESCKEESPAVVKKEEKVLHELFGTDIRCCARNELGRECTRLFTIDLNQTPQTTLPQLFLKVGEPLWIRCKAVHVNHGFGLTWELENKALEEGNYFEMSTYSTNRTMIRILFAFVSSVARNDTGYYTCSSSKHPSQSALVTIVEKGFINATNSSEDYEIDQYEEFCFSVRFKAYPQIRCTWTFSRKSFPCEQKGLDNGYSISKFCNHKHQPGEYIFHAENDDAQFTKMFTLNIRRKPQVLAEASASQASCFSDGYPLPSWTWKKCSDKSPNCTEEITEGVWNRKANRKVFGQWVSSSTLNMSEAIKGFLVKCCAYNSLGTSCETILLNSPGPFPFIQDNIS

SEQ ID NO: 2376 - protein, 184 aa, synthetic construct
  REGION 1..184: note = FLT3LG (P49771) SP+PP+ECD
MTVLAPAWSPTTYLLLLLLLSSGLSGTQDCSFQHSPISSDFAVKIRELSDYLLQDYPVTVASNLQDEELCGGLWRLVLAQRWMERLKTVAGSKMQGLLERVNTEIHFVTKCAFQPPPSCLRFVQTNISRLLQETSEQLVALKPWITRQNFSRCLELQCQPDSSTLPPPWSPRPLEATAPTAPQP

SEQ ID NO: 2377 - protein, 775 aa, synthetic construct
  REGION 1..775: note = FLT4 (P35916) SP+PP+ECD
MQRGAALCLRLWLCLGLLDGLVSGYSMTPPTLNITEESHVIDTGDSLSISCRGQHPLEWAWPGAQEAPATGDKDSEDTGVVRDCEGTDARPYCKVLLLHEVHANDTGSYVCYYKYIKARIEGTTAASSYVFVRDFEQPFINKPDTLLVNRKDAMWVPCLVSIPGLNVTLRSQSSVLWPDGQEVVWDDRRGMLVSTPLLHDALYLQCETTWGDQDFLSNPFLVHITGNELYDIQLLPRKSLELLVGEKLVLNCTVWAEFNSGVTFDWDYPGKQAERGKWVPERRSQQTHTELSSILTIHNVSQHDLGSYVCKANNGIQRFRESTEVIVHENPFISVEWLKGPILEATAGDELVKLPVKLAAYPPPEFQWYKDGKALSGRHSPHALVLKEVTEASTGTYTLALWNSAAGLRRNISLELVVNVPPQIHEKEASSPSIYSRHSRQALTCTAYGVPLPLSIQWHWRPWTPCKMFAQRSLRRRQQQDLMPQCRDWRAVTTQDAVNPIESLDTWTEFVEGKNKTVSKLVIQNANVSAMYKCVVSNKVGQDERLIYFYVTTIPDGFTIESKPSEELLEGQPVLLSCQADSYKYEHLRWYRLNLSTLHDAHGNPLLLDCKNVHLFATPLAASLEEVAPGARHATLSLSIPRVAPEHEGHYVCEVQDRRSHDKHCHKKYLSVQALEAPRLTQNLTDLLVNVSDSLEMQCLVAGAHAPSIVWYKDERLLEEKSGVDLADSNQKLSIQRVREEDAGRYLCSVCNAKGCVNSSASVAVEGSEDKGSME

SEQ ID NO: 2378 - protein, 167 aa, synthetic construct
  REGION 1..167: note = FNDC4 (Q9H6D8) SP+PP+ECD
MPSGCHSSPPSGLRGDMASLVPLSPYLSPTVLLLVSCDLGFVRADRPPSPVNVTVTHLRANSATVSWDVPEGNIVIGYSISQQRQNGPGQRVIREVNTTTRACALWGLAEDSDYTVQVRSIGLRGESPPGPRVHFRTLKGSDRLPSNSSSPGDITVEGLDGERPLQT

SEQ ID NO: 2379 - protein, 152 aa, synthetic construct
  REGION 1..152: note = FNDC5 (Q8NAU1) SP+PP+ECD
MHPGSPSAWPPRARAALRLWLGCVCFALVQADSPSAPVNVTVRHLKANSAVVSWDVLEDEVVIGFAISQQKKDVRMLRFIQEVNTTTRSCALWDLEEDTEYIVHVQAISIQGQSPASEPVLFKTPREAEKMASKNKDEVTMKEMGRNQQLRT

SEQ ID NO: 2380 - protein, 3901 aa, synthetic construct
  REGION 1..3901: note = FRAS1 (Q86XX4) SP+PP+ECD
MGVLKVWLGLALALAEFAVLPHHSEGACVYQDSLLADATIWKPDSCQSCRCHGDIVICKPAVCRNPQCAFEKGEVLQIAANQCCPECVLRTPGSCHHEKKIHEHGTEWASSPCSVCSCNHGEVRCTPQPCPPLSCGHQELAFIPEGSCCPVCVGLGKPCSYEGHVFQDGEDWRLSRCAKCLCRNGVAQCFTAQCQPLFCNQDETVVRVPGKCCPQCSARSCSAAGQVYEHGEQWSENACTTCICDRGEVRCHKQACLPLRCGKGQSRARRHGQCCEECVSPAGSCSYDGVVRYQDEMWKGSACEFCMCDHGQVTCQTGECAKVECARDEELIHLDGKCCPECISRNGYCVYEETGEFMSSNASEVKRIPEGEKWEDGPCKVCECRGAQVTCYEPSCPPCPVGTLALEVKGQCCPDCTSVHCHPDCLTCSQSPDHCDLCQDPTKLLQNGWCVHSCGLGFYQAGSLCLACQPQCSTCTSGLECSSCQPPLLMRHGQCVPTCGDGFYQDRHSCAVCHESCAGCWGPTEKHCLACRDPLHVLRDGGCESSCGKGFYNRQGTCSACDQSCDSCGPSSPRCLTCTEKTVLHDGKCMSECPGGYYADATGRCKVCHNSCASCSGPTPSHCTACSPPKALRQGHCLPRCGEGFYSDHGVCKACHSSCLACMGPAPSHCTGCKKPEEGLQVEQLSDVGIPSGECLAQCRAHFYLESTGICEACHQSCFRCAGKSPHNCTDCGPSHVLLDGQCLSQCPDGYFHQEGSCTECHPTCRQCHGPLESDCISCYPHISLTNGNCRTSCREEQFLNLVGYCADCHHLCQHCAADLHNTGSICLRCQNAHYLLLGDHCVPDCPSGYYAERGACKKCHSSCRTCQGRGPFSCSSCDTNLVLSHTGTCSTTCFPGHYLDDNHVCQPCNTHCGSCDSQASCTSCRDPNKVLLFGECQYESCAPQYYLDFSTNTCKECDWSCSACSGPLKTDCLQCMDGYVLQDGACVEQCLSSFYQDSGLCKNCDSYCLQCQGPHECTRCKGPFLLLEAQCVQECGKGYFADHAKHKCTACPQGCLQCSHRDRCHLCDHGFFLKSGLCVYNCVPGFSVHTSNETCSGKIHTPSLHVNGSLILPIGSIKPLDFSLLNVQDQEGRVEDLLFHVVSTPTNGQLVLSRNGKEVQLDKAGRFSWKDVNEKKVRFVHSKEKLRKGYLFLKISDQQFFSEPQLINIQAFSTQAPYVLRNEVLHISRGERATITTQMLDIRDDDNPQDVVIEIIDPPLHGQLLQTLQSPATPIYQFQLDELSRGLLHYAHDGSDSTSDVAVLQANDGHSFHNILFQVKTVPQNDRGLQLVANSMVWVPEGGMLQITNRILQAEAPGASAEEIIYKITQDYPQFGEVVLLVNMPADSPADEGQHLPDGRTATPTSTFTQQDINEGIVWYRHSGAPAQSDSFRFEVSSASNAQTRLESHMFNIAILPQTPEAPKVSLEASLHMTAREDGLTVIQPHSLSFINSEKPSGKIVYNITLPLHPNQGIIEHRDHPHSPIRYFTQEDINQGKVMYRPPPAAPHLQELMAFSFAGLPESVKFHFTVSDGEHTSPEMVLTIHLLPSDQQLPVFQVTAPRLAVSPGGSTSVGLQVVVRDAETAPKELFFELRRPPQHGVLLKHTAEFRRPMATGDTFTYEDVEKNALQYIHDGSSTREDSMEISVTDGLTVTMLEVRVEVSLSEDRGPRLAAGSSLSITVASKSTAIITRSHLAYVDDSSPDPEIWIQLNYLPSYGTLLRISGSEVEELSEVSNFTMEDINNKKIRYSAVFETDGHLVTDSFYFSVSDMDHNHLDNQIFTIMITPAENPPPVIAFADLITVDEGGRAPLSFHHFFATDDDDNLQRDAIIKLSALPKYGCIENTGTGDRFGPETASDLEASFPIQDVLENYIYYFQSVHESIEPTHDIFSFYVSDGTSRSEIHSINITIERKNDEPPRMTLQPLRVQLSSGVVISNSSLSLQDLDTPDNELIFVLTKKPDHGHVLWRQTASEPLENGRVLVQGSTFTYQDILAGLVGYVPSVPGMVVDEFQFSLTDGLHVDTGRMKIYTELPASDTPHLAINQGLQLSAGSVARITEQHLKVTDIDSDDHQVMYIMKEDPGAGRLQMMKHGNLEQISIKGPIRSFTQADISQGQPEYSHGTGEPGGSFAFKFDVVDGEGNRLIDKSFSISISEDKSPPVITTNKGLVLDENSVKKITTLQLSATDQDSGPTELIYRITRQPQLGHLEHAASPGIQISSFTQADLTSRNVQYVHSSEAEKHSDAFSFTLSDGVSEVTQTFHITLHPVDDSLPVVQNLGMRVQEGMRKTITEFELKAVDADTEAESVTFTIVQPPRHGTIERTSNGQHFHLTSTFTMKDIYQNRVSYSHDGSNSLKDRFTFTVSDGTNPFFIIEEGGKEIMTAAPQPFRVDILPVDDGTPRIVTNLGLQWLEYMDGKATNLITKKELLTMDPDTEDAQLVYEITTGPKHGFVENKLQPGRAAATFTQEDVNLGLIRYVLHKEKIREMMDSFQFLVKDSKPNVVSDNVFHIQWSLISFKYTSYNVSEKAGSVSVTVQRTGNLNQYAIVLCRTEQGTASSSSQPGQQDYVEYAGQVQFDEREDTKSCTIVINDDDVFENVESFTVELSMPAYALLGEFTQAKVIINDTEDEPTLEFDKKIYWVNESAGFLFAPIERKGDASSIVSAICYTVPKSAMGSLFYALESGSDFKSRGMSAASRVIFGPGVTMSTCDVMLIDDSEYEEEEEFEIALADASDNARIGRVATAKVLISGPNDASTVSLGNTAFTVSEDAGTVKIPVIRHGTDLSTFASVWCATRPSDPASATPGVDYVPSSRKVEFGPGVIEQYCTLTILDDTQYPVIEGLETFVVFLSSAQGAELTKPFQAVIAINDTFQDVPSMQFAKDLLLVKEKEGVLHVPITRSGDLSYESSVRCYTQSHSAQVMEDFEERQNADSSRITFLKGDKVKNCTVYIHDDSMFEPEEQFRVYLGLPLGNHWSGARIGKNNMATITISNDEDAPTIEFEEAAYQVREPAGPDAIAILNIKVIRRGDQNRTSKVRCSTRDGSAQSGVDYYPKSRVLKFSPGVDHIFFKVEILSNEDREWHESFSLVLGPDDPVEAVLGDVTTATVTILDQEAAGSLILPAPPIVVTLADYDHVEEVTKEGVKKSPSPGYPLVCVTPCDPHFPRYAVMKERCSEAGINQTSVQFSWEVAAPTDGNGARSPFETITDNTPFTSVNHMVLDSIYFSRRFHVRCVAKAVDKVGHVGTPLRSNIVTIGTDSAICHTPVVAGTSRGFQAQSFIATLKYLDVKHKEHPNRIHISVQIPHQDGMLPLISTMPLHNLHFLLSESIYRHQHVCSNLVTTYDLRGLAEAGFLDDVVYDSTALGPGYDRPFQFDPSVREPKTIQLYKHLNLKSCVWTFDAYYDMTELIDVCGGSVTADFQVRDSAQSFLTVHVPLYVSYIYVTAPRGWASLEHHTEMEFSFFYDTVLWRTGIQTDSVLSARLQIIRIYIREDGRLVIEFKTHAKFRGQFVMEHHTLPEVKSFVLTPDHLGGIEFDLQLLWSAQTFDSPHQLWRATSSYNRKDYSGEYTIYLIPCTVQPTQPWVDPGEKPLACTAHAPERFLIPIAFQQTNRPVPVVYSLNTEFQLCNNEKVFLMDPNTSDMSLAEMDYKGAFSKGQILYGRVLWNPEQNLNSAYKLQLEKVYLCTGKDGYVPFFDPTGTIYNEGPQYGCIQPNKHLKHRFLLLDRNQPEVTDKYFHDVPFEAHFASELPDFHVVSNMPGVDGFTLKVDALYKVEAGHQWYLQVIYIIGPDTISGPRVQRSLTAPLRRNRRDLVEPDGQLILDDSLIYDNEGDQVKNGTNMKSLNLEMQELAVAASLSQTGAS

SEQ ID NO: 2381 - protein, 3113 aa, synthetic construct
  REGION 1..3113: note = FREM2 (Q5SZK8) SP+PP+ECD
MHSAGTPGLSSRRTGNSTSFQPGPPPPPRLLLLLLLLLSLVSRVPAQPAAFGRALLSPGLAGAAGVPAEEAIVLANRGLRVPFGREVWLDPLHDLVLQVQPGDRCAVSVLDNDALAQRPGRLSPKRFPCDFGPGEVRYSHLGARSPSRDRVRLQLRYDAPGGAVVLPLVLEVEVVFTQLEVVTRNLPLVVEELLGTSNALDARSLEFAFQPETEECRVGILSGLGALPRYGELLHYPQVPGGAREGGAPETLLMDCKAFQELGVRYRHTAASRSPNRDWIPMVVELRSRGAPVGSPALKREHFQVLVRIRGGAENTAPKPSFVAMMMMEVDQFVLTALTPDMLAAEDAESPSDLLIFNLTSPFQPGQGYLVSTDDRSLPLSSFTQRDLRLLKIAYQPPSEDSDQERLFELELEVVDLEGAASDPFAFMVVVKPMNTMAPVVTRNTGLILYEGQSRPLTGPAGSGPQNLVISDEDDLEAVRLEVVAGLRHGHLVILGASSGSSAPKSFTVAELAAGQVVYQHDDRDGSLSDNLVLRMVDGGGRHQVQFLFPITLVPVDDQPPVLNANTGLTLAEGETVPILPLSLSATDMDSDDSLLLFVLESPFLTTGHLLLRQTHPPHEKQELLRGLWRKEGAFYERTVTEWQQQDITEGRLFYRHSGPHSPGPVTDQFTFRVQDNHDPPNQSGLQRFVIRIHPVDRLPPELGSGCPLRMVVQESQLTPLRKKWLRYTDLDTDDRELRYTVTQSPTDTDENHLPAPLGTLVLTDNPSVVVTHFTQAQINHHKIAYRPPGQELGVATRVAQFQFQVEDRAGNVAPGTFTLYLHPVDNQPPEILNTGFTIQEKGHHILSETELHVNDVDTDVAHISFTLTQAPKHGHMRVSGQILHVGGLFHLEDIKQGRVSYAHNGDKSLTDSCSLEVSDRHHVVPITLRVNVRPVDDEVPILSHPTGTLESYLDVLENGATEITANVIKGTNEETDDLMLTFLLEDPPLYGEILVNGIPAEQFTQRDILEGSVVYTHTSGEIGLLPKADSFNLSLSDMSQEWRIGGNTIQGVTIWVTILPVDSQAPEIFVGEQLIVMEGDKSVITSVHISAEDVDSLNDDILCTIVIQPTSGYVENISPAPGSEKSRAGIAISAFNLKDLRQGHINYVQSVHKGVEPVEDRFVFRCSDGINFSERQFFPIVIIPTNDEQPEMFMREFMVMEGMSLVIDTPILNAADADVPLDDLTFTITQFPTHGHIMNQLINGTVLVESFTLDQIIESSSIIYEHDDSETQEDSFVIKLTDGKHSVEKTVLIIVIPVDDETPRMTINNGLEIEIGDTKIINNKILMATDLDSEDKSLVYIIRYGPGHGLLQRRKPTGAFENITLGMNFTQDEVDRNLIQYVHLGQEGIRDLIKFDVTDGINPLIDRYFYVSIGSIDIVFPDVISKGVSLKEGGKVTLTTDLLSTSDLNSPDENLVFTITRAPMRGHLECTDQPGVSITSFTQLQLAGNKIYYIHTADDEVKMDSFEFQVTDGRNPVFRTFRISISDVDNKKPVVTIHKLVVSESENKLITPFELTVEDRDTPDKLLKFTITQVPIHGHLLFNNTRPVMVFTKQDLNENLISYKHDGTESSEDSFSFTVTDGTHTDFYVFPDTVFETRRPQVMKIQVLAVDNSVPQIAVNKGASTLRTLATGHLGFMITSKILKVEDRDSLHISLRFIVTEAPQHGYLLNLDKGNHSITQFTQADIDDMKICYVLREGANATSDMFYFAVEDGGGNKLTYQNFRLNWAWISFEKEYYLVNEDSKFLDVVLKRRGYLGETSFISIGTRDRTAEKDKDFKGKAQKQVQFNPGQTRATWRVRILSDGEHEQSETFQVVLSEPVLAALEFPTVATVEIVDPGDEPTVFIPQSKYSVEEDVGELFIPIRRSGDVSQELMVVCYTQQGTATGTVPTSVLSYSDYISRPEDHTSVVRFDKDEREKLCRIVIIDDSLYEEEETFHVLLSMPMGGRIGSEFPGAQVTIVPDKDDEPIFYFGDVEYSVDESAGYVEVQVWRTGTDLSKSSSVTVRSRKTDPPSADAGTDYVGISRNLDFAPGVNMQPVRVVILDDLGQPALEGIEKFELVLRMPMNAALGEPSKATVSINDSVSDLPKMQFKERIYTGSESDGQIVTMIHRTGDVQYRSSVRCYTRQGSAQVMMDFEERPNTDTSIITFLPGETEKPCILELMDDVLYEEVEELRLVLGTPQSNSPFGAAVGEQNETLIRIRDDADKTVIKFGETKFSVTEPKEPGESVVIRIPVIRQGDTSKVSIVRVHTKDGSATSGEDYHPVSEEIEFKEGETQHVVEIEVTFDGVREMREAFTVHLKPDENMIAEMQLTKAIVYIEEMSSMADVTFPSVPQIVSLLMYDDTSKAKESAEPMSGYPVICITACNPKYSDYDKTGSICASENINDTLTRYRWLISAPAGPDGVTSPMREVDFDTFFTSSKMVTLDSIYFQPGSRVQCAARAVNTNGDEGLELMSPIVTISREEGLCQPRVPGVVGAEPFSAKLRYTGPEDADYTNLIKLTVTMPHIDGMLPVISTRELSNFELTLSPDGTRVGNHKCSNLLDYTEVKTHYGFLTDATKNPEIIGETYPYQYSLSIRGSTTLRFYRNLNLEACLWEFVSYYDMSELLADCGGTIGTDGQVLNLVQSYVTLRVPLYVSYVFHSPVGVGGWQHFDLKSELRLTFVYDTAILWNDGIGSPPEAELQGSLYPTSMRIGDEGRLAVHFKTEAQFHGLFVLSHPASFTSSVIMSADHPGLTFSLRLIRSEPTYNQPVQQWSFVSDFAVRDYSGTYTVKLVPCTAPSHQEYRLPVTCNPREPVTFDLDIRFQQVSDPVAAEFSLNTQMYLLSKKSLWLSDGSMGFGQESDVAFAEGDIIYGRVMVDPVQNLGDSFYCSIEKVFLCTGADGYVPKYSPMNAEYGCLADSPSLLYRFKIVDKAQPETQATSFGNVLFNAKLAVDDPEAILLVNQPGSDGFKVDSTPLFQVALGREWYIHTIYTVRSKDNANRGIGKRSVEYHSLVSQGKPQSTTKSRKKREIRSTPSLAWEIGAENSRGTNIQHIALDRTKRQIPHGRAPPDGILPWELNSPSSAVSLVT

SEQ ID NO: 2382 - protein, 715 aa, synthetic construct
  REGION 1..715: note = FURIN (P09958) SP+PP+ECD
MELRPWLLWVVAATGTLVLLAADAQGQKVFTNTWAVRIPGGPAVANSVARKHGFLNLGQIFGDYYHFWHRGVTKRSLSPHRPRHSRLQREPQVQWLEQQVAKRRTKRDVYQEPTDPKFPQQWYLSGVTQRDLNVKAAWAQGYTGHGIVVSILDDGIEKNHPDLAGNYDPGASFDVNDQDPDPQPRYTQMNDNRHGTRCAGEVAAVANNGVCGVGVAYNARIGGVRMLDGEVTDAVEARSLGLNPNHIHIYSASWGPEDDGKTVDGPARLAEEAFFRGVSQGRGGLGSIFVWASGNGGREHDSCNCDGYTNSIYTLSISSATQFGNVPWYSEACSSTLATTYSSGNQNEKQIVTTDLRQKCTESHTGTSASAPLAAGIIALTLEANKNLTWRDMQHLVVQTSKPAHLNANDWATNGVGRKVSHSYGYGLLDAGAMVALAQNWTTVAPQRKCIIDILTEPKDIGKRLEVRKTVTACLGEPNHITRLEHAQARLTLSYNRRGDLAIHLVSPMGTRSTLLAARPHDYSADGFNDWAFMTTHSWDEDPSGEWVLEIENTSEANNYGTLTKFTLVLYGTAPEGLPVPPESSGCKTLTSSQACVVCEEGFSLHQKSCVQHCPPGFAPQVLDTHYSTENDVETIRASVCAPCHASCATCQGPALTDCLSCPSHASLDPVEQTCSRQSQSSRESPPQQQPPRLPPEVEAGQRLRAGLLPSHLPE

SEQ ID NO: 2383 - protein, 142 aa, synthetic construct
  REGION 1..142: note = G6B (O95866) SP+PP+ECD
MAVFLQLLPLLLSRAQGNPGASLDGRPGDRVNLSCGGVSHPIRWVWAPSFPACKGLSKGRRPILWASSSGTPTVPPLQPFVGRLRSLDSGIRRLELLLSAGDSGTFFCKGRHEDESRTVLHVLGDRTYCKAPGPTHGSVYPQ

SEQ ID NO: 2384 - protein, 351 aa, synthetic construct
  REGION 1..351: note = GFRAL (Q6UXV0) SP+PP+ECD
MIVFIFLAMGLSLENEYTSQTNNCTYLREQCLRDANGCKHAWRVMEDACNDSDPGDPCKMRNSSYCNLSIQYLVESNFQFKECLCTDDFYCTVNKLLGKKCINKSDNVKEDKFKWNLTTRSHHGFKGMWSCLEVAEACVGDVVCNAQLASYLKACSANGNPCDLKQCQAAIRFFYQNIPFNIAQMLAFCDCAQSDIPCQQSKEALHSKTCAVNMVPPPTCLSVIRSCQNDELCRRHYRTFQSKCWQRVTRKCHEDENCISTLSKQDLTCSGSDDCKAAYIDILGTVLQVQCTCRTITQSEESLCKIFQHMLHRKSCFNYPTLSNVKGMALYTRKHANKITLTGFHSPFNGE

SEQ ID NO: 2385 - protein, 409 aa, synthetic construct
  REGION 1..409: note = GFY (I3L273) SP+PP+ECD
MKSFSRILFLVFLLAGLRSKAAPSAPLPLGCGFPDMAHPSETSPLKGASENSKRDRLNPEFPGTPYPEPSKLPHTVSLETFPLDFTEPLNPDLRETPHPESPETPKADSLTTSISESLDMPKTNLSKMAHPESSETPTPGPTEMPHPGSPETPKPNFSKTSRPEFPETPNTDLMQTTPQESPEILQLNATEVSQAELPETSNTNPTKTPDPKSPEKHDLNSTETPNSEFLQALHPDPSKTPHPESHVTHNPSPTEISQTEFPTTYYQNATDVPRTSDPQISTSLYPETPVPFKDDATALNELSLNPKPGTPAAIQPDSPKLPTSDSPGMVELKAPQNSGPKESNVPPPSARIAGPPALPGRPSQLAPATLRAPQRHSRGEGVNTIIVVERVKETGVTLVGRPRGAAGGA

SEQ ID NO: 2386 - protein, 264 aa, synthetic construct
  REGION 1..264: note = GHR (P10912) SP+PP+ECD
MDLWQLLLTLALAGSSDAFSGSEATAAILSRAPWSLQSVNPGLKTNSSKEPKFTKCRSPERETFSCHWTDEVHHGTKNLGPIQLFYTRRNTQEWTQEWKECPDYVSAGENSCYFNSSFTSIWIPYCIKLTSNGGTVDEKCFSVDEIVQPDPPIALNWTLLNVSLTGIHADIQVRWEAPRNADIQKGWMVLEYELQYKEVNETKWKMMDPILTTSVPVYSLKVDKEYEVRVRSKQRNSGNYGEFSEVLYVTLPQMSQFTCEEDFY

SEQ ID NO: 2387 - protein, 268 aa, synthetic construct
  REGION 1..268: note = GINM1 (Q9NU53) SP+PP+ECD
MEGAPPGSLALRLLLFVALPASGWLTTGAPEPPPLSGAPQDGIRINVTTLKDDGDISKQQVVLNITYESGQVYVNDLPVNSGVTRISCQTLIVKNENLENLEEKEYFGIVSVRILVHEWPMTSGSSLQLIVIQEEVVEIDGKQVQQKDVTEIDILVKNRGVLRHSNYTLPLEESMLYSISRDSDILFTLPNLSKKESVSSLQTTSQYLIRNVETTVDEDVLPGKLPETPLRAEPPSSYKVMCQWMEKFRKDLCRFWSNVFPVFFQFLN

SEQ ID NO: 2388 - protein, 232 aa, synthetic construct
  REGION 1..232: note = GLIPR1 (P48060) SP+PP+ECD
MRVTLATIAWMVSFVSNYSHTANILPDIENEDFIKDCVRIHNKFRSEVKPTASDMLYMTWDPALAQIAKAWASNCQFSHNTRLKPPHKLHPNFTSLGENIWTGSVPIFSVSSAITNWYDEIQDYDFKTRICKKVCGHYTQVVWADSYKVGCAVQFCPKVSGFDALSNGAHFICNYGPGGNYPTWPYKRGATCSACPNNDKCLDNLCVNRQRDQVKRYYSVVYPGWPIYPRNR

SEQ ID NO: 2389 - protein, 531 aa, synthetic construct
  REGION 1..531: note = GP1BA (P07359) SP+PP+ECD
MPLLLLLLLLPSPLHPHPICEVSKVASHLEVNCDKRNLTALPPDLPKDTTILHLSENLLYTFSLATLMPYTRLTQLNLDRCELTKLQVDGTLPVLGTLDLSHNQLQSLPLLGQTLPALTVLDVSFNRLTSLPLGALRGLGELQELYLKGNELKTLPPGLLTPTPKLEKLSLANNNLTELPAGLLNGLENLDTLLLQENSLYTIPKGFFGSHLLPFAFLHGNPWLCNCEILYFRRWLQDNAENVYVWKQGVDVKAMTSNVASVQCDNSDKFPVYKYPGKGCPTLGDEGDTDLYDYYPEEDTEGDKVRATRTVVKFPTKAHTTPWGLFYSWSTASLDSQMPSSLHPTQESTKEQTTFPPRWTPNFTLHMESITFSKTPKSTTEPTPSPTTSEPVPEPAPNMTTLEPTPSPTTPEPTSEPAPSPTTPEPTSEPAPSPTTPEPTSEPAPSPTTPEPTPIPTIATSPTILVSATSLITPKSTFLTTTKPVSLLESTKKTIPELDQPPKLRGVLQGHLESSRNDPFLHPDFCCLLPL

SEQ ID NO: 2390 - protein, 147 aa, synthetic construct
  REGION 1..147: note = GP1BB (P13224) SP+PP+ECD
MGSGPRGALSLLLLLLAPPSRPAAGCPAPCSCAGTLVDCGRRGLTWASLPTAFPVDTTELVLTGNNLTALPPGLLDALPALRTAHLGANPWRCDCRLVPLRAWLAGRPERAPYRDLRCVAPPALRGRLLPYLAEDELRAACAPGPLC

SEQ ID NO: 2391 - protein, 523 aa, synthetic construct
  REGION 1..523: note = GP5 (P40197) SP+PP+ECD
MLRGTLLCAVLGLLRAQPFPCPPACKCVFRDAAQCSGGDVARISALGLPTNLTHILLFGMGRGVLQSQSFSGMTVLQRLMISDSHISAVAPGTFSDLIKLKTLRLSRNKITHLPGALLDKMVLLEQLFLDHNALRGIDQNMFQKLVNLQELALNQNQLDFLPASLFTNLENLKLLDLSGNNLTHLPKGLLGAQAKLERLLLHSNRLVSLDSGLLNSLGALTELQFHRNHIRSIAPGAFDRLPNLSSLTLSRNHLAFLPSALFLHSHNLTLLTLFENPLAELPGVLFGEMGGLQELWLNRTQLRTLPAAAFRNLSRLRYLGVTLSPRLSALPQGAFQGLGELQVLALHSNGLTALPDGLLRGLGKLRQVSLRRNRLRALPRALFRNLSSLESVQLDHNQLETLPGDVFGALPRLTEVLLGHNSWRCDCGLGPFLGWLRQHLGLVGGEEPPRCAGPGAHAGLPLWALPGGDAECPGPRGPPPRPAADSSSEAPVHPALAPNSSEPWVWAQPVTTGKGQDHSPFWG

SEQ ID NO: 2392 - protein, 267 aa, synthetic construct
  REGION 1..267: note = GP6 (Q9HCN6) SP+PP+ECD
MSPSPTALFCLGLCLGRVPAQSGPLPKPSLQALPSSLVPLEKPVTLRCQGPPGVDLYRLEKLSSSRYQDQAVLFIPAMKRSLAGRYRCSYQNGSLWSLPSDQLELVATGVFAKPSLSAQPGPAVSSGGDVTLQCQTRYGFDQFALYKEGDPAPYKNPERWYRASFPIITVTAAHSGTYRCYSFSSRDPYLWSAPSDPLELVVTGTSVTPSRLPTEPPSPVAEFSEATAELTVSFTNEVFTTETSRSITASPKESDSPAGPARQYYTK

SEQ ID NO: 2393 - protein, 235 aa, synthetic construct
  REGION 1..235: note = GPA33 (Q99795) SP+PP+ECD
MVGKMWPVLWTLCAVRVTVDAISVETPQDVLRASQGKSVTLPCTYHTSTSSREGLIQWDKLLLTHTERVVIWPFSNKNYIHGELYKNRVSISNNAEQSDASITIDQLTMADNGTYECSVSLMSDLEGNTKSRVRLLVLVPPSKPECGIEGETIIGNNIQLTCQSKEGSPTPQYSWKRYNILNQEQPLAQPASGQPVSLKNISTDTSGYYICTSSNEEGTQFCNITVAVRSPSMNV

SEQ ID NO: 2394 - protein, 498 aa, synthetic construct
  REGION 1..498: note = GPNMB (Q14956) SP+PP+ECD
MECLYYFLGFLLLAARLPLDAAKRFHDVLGNERPSAYMREHNQLNGWSSDENDWNEKLYPVWKRGDMRWKNSWKGGRVQAVLTSDSPALVGSNITFAVNLIFPRCQKEDANGNIVYEKNCRNEAGLSADPYVYNWTAWSEDSDGENGTGQSHHNVFPDGKPFPHHPGWRRWNFIYVFHTLGQYFQKLGRCSVRVSVNTANVTLGPQLMEVTVYRRHGRAYVPIAQVKDVYVVTDQIPVFVTMFQKNDRNSSDETFLKDLPIMFDVLIHDPSHFLNYSTINYKWSFGDNTGLFVSTNHTVNHTYVLNGTFSLNLTVKAAAPGPCPPPPPPPRPSKPTPSLATTLKSYDSNTPGPAGDNPLELSRIPDENCQINRYGHFQATITIVEGILEVNIIQMTDVLMPVPWPESSLIDFVVTCQGSIPTEVCTIISDPTCEITQNTVCSPVDVDEMCLLTVRRTFNGSGTYCVNLTLGDDTSLALTSTLISVPDRDPASPLRMAN

SEQ ID NO: 2395 - protein, 430 aa, synthetic construct
  REGION 1..430: note = GUCY2C (P25092) SP+PP+ECD
MKTLLLDLALWSLLFQPGWLSFSSQVSQNCHNGSYEISVLMMGNSAFAEPLKNLEDAVNEGLEIVRGRLQNAGLNVTVNATFMYSDGLIHNSGDCRSSTCEGLDLLRKISNAQRMGCVLIGPSCTYSTFQMYLDTELSYPMISAGSFGLSCDYKETLTRLMSPARKLMYFLVNFWKTNDLPFKTYSWSTSYVYKNGTETEDCFWYLNALEASVSYFSHELGFKVVLRQDKEFQDILMDHNRKSNVIIMCGGPEFLYKLKGDRAVAEDIVIILVDLFNDQYFEDNVTAPDYMKNVLVLTLSPGNSLLNSSFSRNLSPTKRDFALAYLNGILLFGHMLKIFLENGENITTPKFAHAFRNLTFEGYDGPVTLDDWGDVDSTMVLLYTSVDTKKYKVLLTYDTHVNKTYPVDMSPTFTWKNSKLPNDITGRGPQ

SEQ ID NO: 2396 - protein, 91 aa, synthetic construct
  REGION 1..91: note = GYPA (P02724) SP+PP+ECD
MYGKIIFVLLLSEIVSISASSTTGVAMHTSTSSSVTKSYISSQTNDTHKRDTYAATPRAHEVSEISVRTVYPPEEETGERVQLAHHFSEPE

SEQ ID NO: 2397 - protein, 295 aa, synthetic construct
  REGION 1..295: note = HAVCR1 (Q96D42) SP+PP+ECD
MHPQVVILSLILHLADSVAGSVKVGGEAGPSVTLPCHYSGAVTSMCWNRGSCSLFTCQNGIVWTNGTHVTYRKDTRYKLLGDLSRRDVSLTIENTAVSDSGVYCCRVEHRGWFNDMKITVSLEIVPPKVTTTPIVTTVPTVTTVRTSTTVPTTTTVPMTTVPTTTVPTTMSIPTTTTVLTTMTVSTTTSVPTTTSIPTTTSVPVTTTVSTFVPPMPLPRQNHEPVATSPSSPQPAETHPTTLQGAIRREPTSSPLYSYTTDGNDTVTESSDGLWNNNQTQLFLEHSLLTANTTKG

SEQ ID NO: 2398 - protein, 202 aa, synthetic construct
  REGION 1..202: note = HAVCR2 (Q8TDQ0) SP+PP+ECD
MFSHLPFDCVLLLLLLLLTRSSEVEYRAEVGQNAYLPCFYTPAAPGNLVPVCWGKGACPVFECGNVVLRTDERDVNYWTSRYWLNGDFRKGDVSLTIENVTLADSGIYCCRIQIPGIMNDEKFNLKLVIKPAKVTPAPTRQRDFTAAFPRMLTTRGHGPAETQTLGSLPDINLTQISTLANELRDSRLANDLRDSGATIRIG

SEQ ID NO: 2399 - protein, 160 aa, synthetic construct
  REGION 1..160: note = HBEGF (Q99075) SP+PP+ECD
MKLLPSVVLKLFLAAVLSALVTGESLERLRRGLAAGTSNPDPPTVSTDQLLPLGGGRDRKVRDLQEADLDLLRVTLSSKPQALATPNKEEHGKRKKKGKGLGKKRDPCLRKYKDFCIHGECKYVKELRAPSCICHPGYHGERCHGLSLPVENRLYTYDHT

SEQ ID NO: 2400 - protein, 1248 aa, synthetic construct
  REGION 1..1248: note = HEG1 (Q9ULI3) SP+PP+ECD
MASPRASRWPPPLLLLLLPLLLLPPAAPGTRDPPPSPARRALSLAPLAGAGLELQLERRPEREPPPTPPRERRGPATPGPSYRAPEPGAATQRGPSGRAPRGGSADAAWKHWPESNTEAHVENITFYQNQEDFSTVSSKEGVMVQTSGKSHAASDAPENLTLLAETADARGRSGSSSRTNFTILPVGYSLEIATALTSQSGNLASESLHLPSSSSEFDERIAAFQTKSGTASEMGTERAMGLSEEWTVHSQEATTSAWSPSFLPALEMGELTTPSRKRNSSGPDLSWLHFYRTAASSPLLDLSSSSESTEKLNNSTGLQSSSVSQTKTMHVATVFTDGGPRTLRSLTVSLGPVSKTEGFPKDSRIATTSSSVLLSPSAVESRRNSRVTGNPGDEEFIEPSTENEFGLTSLRWQNDSPTFGEHQLASSSEVQNGSPMSQTETVSRSVAPMRGGEITAHWLLTNSTTSADVTGSSASYPEGVNASVLTQFSDSTVQSGGSHTALGDRSYSESSSTSSSESLNSSAPRGERSIAGISYGQVRGTAIEQRTSSDHTDHTYLSSTFTKGERALLSITDNSSSSDIVESSTSYIKISNSSHSEYSSFFHAQTERSNISSYDGEYAQPSTESPVLHTSNLPSYTPTINMPNTSVVLDTDAEFVSDSSSSSSSSSSSSSSGPPLPLPSVSQSHHLFSSILPSTRASVHLLKSTSDASTPWSSSPSPLPVSLTTSTSAPLSVSQTTLPQSSSTPVLPRARETPVTSFQTSTMTSFMTMLHSSQTADLKSQSTPHQEKVITESKSPSLVSLPTESTKAVTTNSPLPPSLTESSTEQTLPATSTNLAQMSPTFTTTILKTSQPLMTTPGTLSSTASLVTGPIAVQTTAGKQLSLTHPEILVPQISTEGGISTERNRVIVDATTGLIPLTSVPTSAKEMTTKLGVTAEYSPASRSLGTSPSPQTTVVSTAEDLAPKSATFAVQSSTQSPTTVSSSASVNSCAVNPCLHNGECVADNTSRGYHCRCPPSWQGDDCSVDVNECLSNPCPSTAMCNNTQGSFICKCPVGYQLEKGICNLVRTFVTEFKLKRTFLNTTVEKHSDLQEVENEITKTLNMCFSALPSYIRSTVHASRESNAVVISLQTTFSLASNVTLFDLADRMQKCVNSCKSSAEVCQLLGSQRRIFRAGSLCKRKSPECDKDTSICTDLDGVALCQCKSGYFQFNKMDHSCRACEDGYRLENETCMSCPFGLGGLNCGNPYQL

SEQ ID NO: 2401 - protein, 240 aa, synthetic construct
  REGION 1..240: note = HEPACAM (Q14CZ8) SP+PP+ECD
MKRERGALSRASRALRLAPFVYLLLIQTDPLEGVNITSPVRLIHGTVGKSALLSVQYSSTSSDRPVVKWQLKRDKPVTVVQSIGTEVIGTLRPDYRDRIRLFENGSLLLSDLQLADEGTYEVEISITDDTFTGEKTINLTVDVPISRPQVLVASTTVLELSEAFTLNCSHENGTKPSYTWLKDGKPLLNDSRMLLSPDQKVLTITRVLMEDDDLYSCMVENPISQGRSLPVKITVYRRSS

SEQ ID NO: 2402 - protein, 351 aa, synthetic construct
  REGION 1..351: note = HEPACAM2 (A8MVW5) SP+PP+ECD
MGQDAFMEPFGDTLGVFQCKIYLLLFGACSGLKVTVPSHTVHGVRGQALYLPVHYGFHTPASDIQIIWLFERPHTMPKYLLGSVNKSVVPDLEYQHKFTMMPPNASLLINPLQFPDEGNYIVKVNIQGNGTLSASQKIQVTVDDPVTKPVVQIHPPSGAVEYVGNMTLTCHVEGGTRLAYQWLKNGRPVHTSSTYSFSPQNNTLHIAPVTKEDIGNYSCLVRNPVSEMESDIIMPIIYYGPYGLQVNSDKGLKVGEVFTVDLGEAILFDCSADSHPPNTYSWIRRTDNTTYIIKHGPRLEVASEKVAQKTMDYVCCAYNNITGRQDETHFTVIITSVGLEKLAQKGKSLSP

SEQ ID NO: 2403 - protein, 1110 aa, synthetic construct
  REGION 1..1110: note = HEPH (Q9BQS7) SP+PP+ECD
MESGHLLWALLFMQSLWPQLTDGATRVYYLGIRDVQWNYAPKGRNVITNQPLDSDIVASSFLKSDKNRIGGTYKKTIYKEYKDDSYTDEVAQPAWLGFLGPVLQAEVGDVILIHLKNFATRPYTIHPHGVFYEKDSEGSLYPDGSSGPLKADDSVPPGGSHIYNWTIPEGHAPTDADPACLTWIYHSHVDAPRDIATGLIGPLITCKRGALDGNSPPQRQDVDHDFFLLFSVVDENLSWHLNENIATYCSDPASVDKEDETFQESNRMHAINGFVFGNLPELNMCAQKRVAWHLFGMGNEIDVHTAFFHGQMLTTRGHHTDVANIFPATFVTAEMVPWEPGTWLISCQVNSHFRDGMQALYKVKSCSMAPPVDLLTGKVRQYFIEAHEIQWDYGPMGHDGSTGKNLREPGSISDKFFQKSSSRIGGTYWKVRYEAFQDETFQEKMHLEEDRHLGILGPVIRAEVGDTIQVVFYNRASQPFSMQPHGVFYEKDYEGTVYNDGSSYPGLVAKPFEKVTYRWTVPPHAGPTAQDPACLTWMYFSAADPIRDTNSGLVGPLLVCRAGALGADGKQKGVDKEFFLLFTVLDENKSWYSNANQAAAMLDFRLLSEDIEGFQDSNRMHAINGFLFSNLPRLDMCKGDTVAWHLLGLGTETDVHGVMFQGNTVQLQGMRKGAAMLFPHTFVMAIMQPDNLGTFEIYCQAGSHREAGMRAIYNVSQCPGHQATPRQRYQAARIYYIMAEEVEWDYCPDRSWEREWHNQSEKDSYGYIFLSNKDGLLGSRYKKAVFREYTDGTFRIPRPRTGPEEHLGILGPLIKGEVGDILTVVFKNNASRPYSVHAHGVLESTTVWPLAAEPGEVVTYQWNIPERSGPGPNDSACVSWIYYSAVDPIKDMYSGLVGPLAICQKGILEPHGGRSDMDREFALLFLIFDENKSWYLEENVATHGSQDPGSINLQDETFLESNKMHAINGKLYANLRGLTMYQGERVAWYMLAMGQDVDLHTIHFHAESFLYRNGENYRADVVDLFPGTFEVVEMVASNPGTWLMHCHVTDHVHAGMETLFTVFSRTEHLSPLTVITKETEKAVPPRDIEEGNVKMLGMQIPIKNVEMLAS

SEQ ID NO: 2404 - protein, 1114 aa, synthetic construct
  REGION 1..1114: note = HEPHL1 (Q6MZM0) SP+PP+ECD
MPRKQPAGCIFLLTFLGLSGLVGTVTRTYYIGIVEEYWNYVPQGKNVITGKSFTEDKLATLFLERGPNRIGSIYKKAVYRRFTDGTYSIEIPKPPWLGFLGPILRAEVGDVIVIHLKNFASRPYSLHPHGVFYNKDSEGALYPDGTSGRNKNDDMVPPGKNYTYVWPVREEYAPTPADANCLTWVYHSHIDAPKDICSGLIGPLLVCKEGILNRYSGTRNDVDREFVIMFTLVDENQSWYLNENIKHFCTNPDSVDKKDAVFQRSNKMHALNGYLFGNFPEPDMCVGESVSWHLFGMGNEIDIHSIYFYGNTFISRGHRTDVVNLFPATFLTTEMIAENPGKWMITCQVSDHLQAGMLGQYNVDNCKSDIFYPKMKGQQRRYFIAAEKILWDYAPQGYNKFSGLPLNASGSDSDLYFTQGDNRIGGKYWKVRYTEFVDATFTKRKRLSAEEAHLGILGPVIKAEVGDTLLVTFANKADKVYSILPHGVIYDKASDAAPNLDGFVKPGAHVKPGETFTYKWTVPESVSPTAGDPPCLTYLYFSAVDPIKDTSSGLVGPLLVCKKGVLNADGTQKGIDKEFYLLFTVFDENLSRYFDENIQKFIWHPFSIDKEDKEFVKSNRMHAVNGYMYGNQPGLNMCKRDRVSWHLIGLGTDTDMHGIVFQGNTIHLRGTHRDSLALFPHMATTAFMQPDHAGIFRVFCATMPHLSRGMGQIYEVSSCDNRDPSEQRYGMIRTFYIAAEEVEWDYAPNKNWEFEKQHVDARGERHGDIFMNRTENWIGSQYKKVVYREYTDGEFVEIKARPPREEHLELLGPMIHAEVGNTVLIIFKNKASRPYSISAQGVEEMDSGKQFQVPMTKPGEVKTYRWNIPKRSGPGPSDPNCIPWVYYSTVNFVKDTYSGLMGPLITCRKGVLNEKGRRSDVDYEFALLFLVFNENESWYLDDNIKKYLNKDPRDFKRTDDFEESNRMHAINGKIFGNLHGLIMNEDTMTNWYLLGIGSEVDIHTIHYHAESFLFKIDKSYREDVYDLFPGTFQTIELFADHPGTWLLHCHVSDHIHAGMETTYTVLRNIDNRIPYSTTSPGVASHPATVPSNERPGKEQLYFFGKNLGPTGAKA

SEQ ID NO: 2405 - protein, 515 aa, synthetic construct
  REGION 1..515: note = HERVH59 (Q9N2J8) SP+PP+ECD
MILAGRAPSNTSTLMKFYSLLLYSLLFSFPFLYHPLPLPSYLHHTINLTHSLPAASNPSLANNCWLCISLSSSAYIAVPTLQTDRATSPVSLHLRTSFNSPHLYPPEELIYFLDRSSKTSPDISHQPAAALLHIYLKNLSPYINSTPPIFGPLTTQTTIPVAAPLCISRQRPTGIPLGNISPSRCSFTLHLQSPTTHVTETIGVFQLHIIDKPSINTDKLKNVSSNYCLGRHLPYISLHPWLPSPCSSDSPPRPSSCLLTPSPQNNSERLLVDTQRFLIHHENRTSSSMQLAHQSPLQPLTAAALAGSLGVWVQDTPFSTPSHPFSLHLQFCLTQGLFFLCGSSTYMCLPANWTGTCTLVFLTPKIQFANGTKELPVPLMTLTPQKRVIPLIPLMVGLGLSASTIALSTGIAGISTSVTTFRSPSNDFSASITDISQTLSVLQAQVDSLAAVVLQNRRGLGLSILLNEECCFYLNQSGLVYENIKKLKDRAQKLANQASNYAESPWALSNWMSWV

SEQ ID NO: 2406 - protein, 523 aa, synthetic construct
  REGION 1..523: note = HERVH62 (Q9N2K0) SP+PP+ECD
MIFAGKAPSNTSTLMKFYSLLLYSLLFSFPFLCHPLPLPSYLHHTINLTHSLLAASNPSLVNNCWLCISLSSSAYTAVPAVQTDWATSPISLHLRTSFNSPHLYPPEELIYFLDRSSKTSPDISHQQAAALLRTYLKNLSPYINSTPPIFGPLTTQTTIPVAAPLCISWQRPTGIPLGNLSPSRCSFTLHLRSPTTNINETIGAFQLHITDKPSINTDKLKNISSNYCLGRHLPCISLHPWLSSPCSSDSPPRPSSCLLIPSPENNSERLLVDTRRFLIHHENRTFPSTQLPHQSPLQPLTAAALAGSLGVWVQDTPFSTPSHLFTLHLQFCLAQGLFFLCGSSTYMCLPANWTGTCTLVFLTPKIQFANGTEELPVPLMTPTQQKRVIPLIPLMVGLGLSASTVALGTGIAGISTSVMTFRSLSNDFSASITDISQTLSVLQAQVDSLAAVVLQNRRGLDLLTAEKGGLCIFLNEECCFYLNQSGLVYDNIKKLKDRAQKLANQASNYAEPPWALSNWMSWV

SEQ ID NO: 2407 - protein, 632 aa, synthetic construct
  REGION 1..632: note = HERVK_113 (Q902F9) SP+PP+ECD
MNPSEMQRKAPPRRRRHRNRAPLTHKMNKMVTSEEQMKLPSTKKAEPPTWAQLKKLTQLATKYLENTKVTQTPESMLLAALMIVSMVVSLPMPAGAAAANYTYWAYVPFPPLIRAVTWMDNPIEIYVNDSVWVPGPTDDCCPAKPEEEGMMINISIGYRYPPICLGRAPGCLMPAVQNWLVEVPTVSPISRFTYHMVSGMSLRPRVNYLQDFSYQRSLKFRPKGKPCPKEIPKESKNTEVLVWEECVANSAVILQNNEFGTLIDWAPRGQFYHNCSGQTQSCPSAQVSPAVDSDLTESLDKHKHKKLQSFYPWEWGEKGISTARPKIISPVSGPEHPELWRLTVASHHIRIWSGNQTLETRDRKPFYTIDLNSSLTVPLQSCVKPPYMLVVGNIVIKPDSQTITCENCRLLTCIDSTFNWQHRILLVRAREGVWIPVSMDRPWEASPSVHILTEVLKGVLNRSKRFIFTLIAVIMGLIAVTATAAVAGVALHSSVQSVNFVNDWQNNSTRLWNSQSSIDQKLANQINDLRQTVIWMGDRLMSLEHRFQLQCDWNTSDFCITPQIYNESEHHWDMVRCHLQGREDNLTLDISKLKEQIFEASKAHLNLVPGTEAIAGVADGLANLNTVTWVKT

SEQ ID NO: 2408 - protein, 306 aa, synthetic construct
  REGION 1..306: note = HFE (Q30201) SP+PP+ECD
MGPRARPALLLLMLLQTAVLQGRLLRSHSLHYLFMGASEQDLGLSLFEALGYVDDQLFVFYDHESRRVEPRTPWVSSRISSQMWLQLSQSLKGWDHMFTVDFWTIMENHNHSKESHTLQVILGCEMQEDNSTEGYWKYGYDGQDHLEFCPDTLDWRAAEPRAWPTKLEWERHKIRARQNRAYLERDCPAQLQQLLELGRGVLDQQVPPLVKVTHHVTSSVTTLRCRALNYYPQNITMKWLKDKQPMDAKEFEPKDVLPNGDGTYQGWITLAVPPGEEQRYTCQVEHPGLDQPLIVIWEPSPSGTLV

SEQ ID NO: 2409 - protein, 344 aa, synthetic construct
  REGION 1..344: note = HHLA2 (Q9UM44) SP+PP+ECD
MKAQTALSFFLILITSLSGSQGIFPLAFFIYVPMNEQIVIGRLDEDIILPSSFERGSEVVIHWKYQDSYKVHSYYKGSDHLESQDPRYANRTSLFYNEIQNGNASLFFRRVSLLDEGIYTCYVGTAIQVITNKVVLKVGVFLTPVMKYEKRNTNSFLICSVLSVYPRPIITWKMDNTPISENNMEETGSLDSFSINSPLNITGSNSSYECTIENSLLKQTWTGRWTMKDGLHKMQSEHVSLSCQPVNDYFSPNQDFKVTWSRMKSGTFSVLAYYLSSSQNTIINESRFSWNKELINQSDFSMNLMDLNLSDSGEYLCNISSDEYTLLTIHTVHVEPSQETASHN

SEQ ID NO: 2410 - protein, 117 aa, synthetic construct
  REGION 1..117: note = HIDE1 (A8MVS5) SP+PP+ECD
MPWTILLFAAGSLAIPAPSIRLVPPYPSSQEDPIHIACMAPGNFPGANFTLYRGGQVVQLLQAPTDQRGVTFNLSGGSSKAPGGPFHCQYGVLGELNQSQLSDLSEPVNVSFPVPTW

SEQ ID NO: 2411 - protein, 308 aa, synthetic construct
  REGION 1..308: note = HLA-A (P01891) SP+PP+ECD
MAVMAPRTLLLLLSGALALTQTWAGSHSMRYFFTSVSRPGRGEPRFIAVGYVDDTQFVRFDSDAASQRMEPRAPWIEQEGPEYWDQETRNVKAQSQTDRVDLGTLRGYYNQSEAGSHTIQIMYGCDVGSDGRFLRGYRQDAYDGKDYIALNEDLRSWTAADMAAQITKRKWEAAHEAEQLRAYLDGTCVEWLRRYLENGKETLQRTDPPKTHMTHHPISDHEATLRCWALGFYPAEITLTWQRDGEDQTQDTELVETRPAGDGTFQKWAAVVVPSGEEQRYTCHVQHEGLPKPLTLRWELSSQPTIPI

SEQ ID NO: 2412 - protein, 308 aa, synthetic construct; identical to SEQ ID NO: 2411
  REGION 1..308: note = HLA-A (P01892) SP+PP+ECD

SEQ ID NO: 2413 - protein, 308 aa, synthetic construct; identical to SEQ ID NO: 2411
  REGION 1..308: note = HLA-A (P04439) SP+PP+ECD

SEQ ID NO: 2414 - protein, 308 aa, synthetic construct; identical to SEQ ID NO: 2411
  REGION 1..308: note = HLA-A (P05534) SP+PP+ECD

SEQ ID NO: 2415 - protein, 308 aa, synthetic construct; identical to SEQ ID NO: 2411
  REGION 1..308: note = HLA-A (P10314) SP+PP+ECD

SEQ ID NO: 2416 - protein, 308 aa, synthetic construct; identical to SEQ ID NO: 2411
  REGION 1..308: note = HLA-A (P10316) SP+PP+ECD

SEQ ID NO: 2417 - protein, 308 aa, synthetic construct; identical to SEQ ID NO: 2411
  REGION 1..308: note = HLA-A (P13746) SP+PP+ECD

SEQ ID NO: 2418 - protein, 308 aa, synthetic construct; identical to SEQ ID NO: 2411
  REGION 1..308: note = HLA-A (P16188) SP+PP+ECD

SEQ ID NO: 2419 - protein, 308 aa, synthetic construct; identical to SEQ ID NO: 2411
  REGION 1..308: note = HLA-A (P16189) SP+PP+ECD

SEQ ID NO: 2420 - protein, 308 aa, synthetic construct; identical to SEQ ID NO: 2411
  REGION 1..308: note = HLA-A (P16190) SP+PP+ECD

SEQ ID NO: 2421 - protein, 308 aa, synthetic construct; identical to SEQ ID NO: 2411
  REGION 1..308: note = HLA-A (P18462) SP+PP+ECD

SEQ ID NO: 2422 - protein, 308 aa, synthetic construct; identical to SEQ ID NO: 2411
  REGION 1..308: note = HLA-A (P30443) SP+PP+ECD

SEQ ID NO: 2423 - protein, 308 aa, synthetic construct; identical to SEQ ID NO: 2411
  REGION 1..308: note = HLA-A (P30447) SP+PP+ECD

SEQ ID NO: 2424 - protein, 308 aa, synthetic construct; identical to SEQ ID NO: 2411
  REGION 1..308: note = HLA-A (P30450) SP+PP+ECD

SEQ ID NO: 2425 - protein, 308 aa, synthetic construct; identical to SEQ ID NO: 2411
  REGION 1..308: note = HLA-A (P30453) SP+PP+ECD

SEQ ID NO: 2426 - protein, 308 aa, synthetic construct; identical to SEQ ID NO: 2411
  REGION 1..308: note = HLA-A (P30455) SP+PP+ECD

SEQ ID NO: 2427 - protein, 308 aa, synthetic construct; identical to SEQ ID NO: 2411
  REGION 1..308: note = HLA-A (P30456) SP+PP+ECD

SEQ ID NO: 2428 - protein, 308 aa, synthetic construct; identical to SEQ ID NO: 2411
  REGION 1..308: note = HLA-A (P30457) SP+PP+ECD

SEQ ID NO: 2429 - protein, 308 aa, synthetic construct; identical to SEQ ID NO: 2411
  REGION 1..308: note = HLA-A (P30459) SP+PP+ECD

SEQ ID NO: 2430 - protein, 308 aa, synthetic construct; identical to SEQ ID NO: 2411
  REGION 1..308: note = HLA-A (P30512) SP+PP+ECD

SEQ ID NO: 2431 - protein, 308 aa, synthetic construct; identical to SEQ ID NO: 2411
  REGION 1..308: note = HLA-A (Q09160) SP+PP+ECD

SEQ ID NO: 2432 - protein, 309 aa, synthetic construct
  REGION 1..309: note = HLA-B (P01889) SP+PP+ECD
MLVMAPRTVLLLLSAALALTETWAGSHSMRYFYTSVSRPGRGEPRFISVGYVDDTQFVRFDSDAASPREEPRAPWIEQEGPEYWDRNTQIYKAQAQTDRESLRNLRGYYNQSEAGSHTLQSMYGCDVGPDGRLLRGHDQYAYDGKDYIALNEDLRSWTAADTAAQITQRKWEAAREAEQRRAYLEGECVEWLRRYLENGKDKLERADPPKTHVTHHPISDHEATLRCWALGFYPAEITLTWQRDGEDQTQDTELVETRPAGDRTFQKWAAVVVPSGEEQRYTCHVQHEGLPKPLTLRWEPSSQSTVPIV

SEQ ID NO: 2433 - protein, 309 aa, synthetic construct; identical to SEQ ID NO: 2432
  REGION 1..309: note = HLA-B (P03989) SP+PP+ECD

SEQ ID NO: 2434 - protein, 309 aa, synthetic construct; identical to SEQ ID NO: 2432
  REGION 1..309: note = HLA-B (P10319) SP+PP+ECD

SEQ ID NO: 2435 - protein, 309 aa, synthetic construct; identical to SEQ ID NO: 2432
  REGION 1..309: note = HLA-B (P18463) SP+PP+ECD

SEQ ID NO: 2436 - protein, 309 aa, synthetic construct; identical to SEQ ID NO: 2432
  REGION 1..309: note = HLA-B (P18464) SP+PP+ECD

SEQ ID NO: 2437 - protein, 309 aa, synthetic construct; identical to SEQ ID NO: 2432
  REGION 1..309: note = HLA-B (P18465) SP+PP+ECD

SEQ ID NO: 2438 - protein, 309 aa, synthetic construct; identical to SEQ ID NO: 2432
  REGION 1..309: note = HLA-B (P30460) SP+PP+ECD

SEQ ID NO: 2439 - protein, 309 aa, synthetic construct; identical to SEQ ID NO: 2432
  REGION 1..309: note = HLA-B (P30461) SP+PP+ECD

SEQ ID NO: 2440 - protein, 309 aa, synthetic construct; identical to SEQ ID NO: 2432
  REGION 1..309: note = HLA-B (P30462) SP+PP+ECD

SEQ ID NO: 2441 - protein, 309 aa, synthetic construct; identical to SEQ ID NO: 2432
  REGION 1..309: note = HLA-B (P30464) SP+PP+ECD

SEQ ID NO: 2442 - protein, 309 aa, synthetic construct; identical to SEQ ID NO: 2432
  REGION 1..309: note = HLA-B (P30466) SP+PP+ECD

SEQ ID NO: 2443 - protein, 309 aa, synthetic construct; identical to SEQ ID NO: 2432
  REGION 1..309: note = HLA-B (P30475) SP+PP+ECD

SEQ ID NO: 2444 - protein, 309 aa, synthetic construct; identical to SEQ ID NO: 2432
  REGION 1..309: note = HLA-B (P30479) SP+PP+ECD

SEQ ID NO: 2445 - protein, 309 aa, synthetic construct; identical to SEQ ID NO: 2432
  REGION 1..309: note = HLA-B (P30480) SP+PP+ECD

SEQ ID NO: 2446 - protein, 309 aa, synthetic construct; identical to SEQ ID NO: 2432
  REGION 1..309: note = HLA-B (P30481) SP+PP+ECD

SEQ ID NO: 2447 - protein, 309 aa, synthetic construct; identical to SEQ ID NO: 2432
  REGION 1..309: note = HLA-B (P30483) SP+PP+ECD

SEQ ID NO: 2448 - protein, 309 aa, synthetic construct; identical to SEQ ID NO: 2432
  REGION 1..309: note = HLA-B (P30484) SP+PP+ECD

SEQ ID NO: 2449 - protein, 309 aa, synthetic construct; identical to SEQ ID NO: 2432
  REGION 1..309: note = HLA-B (P30485) SP+PP+ECD

SEQ ID NO: 2450 - protein, 309 aa, synthetic construct; identical to SEQ ID NO: 2432
  REGION 1..309: note = HLA-B (P30486) SP+PP+ECD

SEQ ID NO: 2451 - protein, 309 aa, synthetic construct; identical to SEQ ID NO: 2432
  REGION 1..309: note = HLA-B (P30487) SP+PP+ECD

SEQ ID NO: 2452 - protein, 309 aa, synthetic construct; identical to SEQ ID NO: 2432
  REGION 1..309: note = HLA-B (P30488) SP+PP+ECD

SEQ ID NO: 2453 - protein, 309 aa, synthetic construct; identical to SEQ ID NO: 2432
  REGION 1..309: note = HLA-B (P30490) SP+PP+ECD

SEQ ID NO: 2454 - protein, 309 aa, synthetic construct; identical to SEQ ID NO: 2432
  REGION 1..309: note = HLA-B (P30491) SP+PP+ECD

SEQ ID NO: 2455 - protein, 309 aa, synthetic construct; identical to SEQ ID NO: 2432
  REGION 1..309: note = HLA-B (P30492) SP+PP+ECD

SEQ ID NO: 2456 - protein, 309 aa, synthetic construct; identical to SEQ ID NO: 2432
  REGION 1..309: note = HLA-B (P30493) SP+PP+ECD

SEQ ID NO: 2457 - protein, 309 aa, synthetic construct; identical to SEQ ID NO: 2432
  REGION 1..309: note = HLA-B (P30495) SP+PP+ECD

SEQ ID NO: 2458 - protein, 309 aa, synthetic construct; identical to SEQ ID NO: 2432
  REGION 1..309: note = HLA-B (P30498) SP+PP+ECD

SEQ ID NO: 2459 - protein, 309 aa, synthetic construct; identical to SEQ ID NO: 2432
  REGION 1..309: note = HLA-B (P30685) SP+PP+ECD

SEQ ID NO: 2460 - protein, 309 aa, synthetic construct; identical to SEQ ID NO: 2432
  REGION 1..309: note = HLA-B (Q04826) SP+PP+ECD

SEQ ID NO: 2461 - protein, 309 aa, synthetic construct; identical to SEQ ID NO: 2432
  REGION 1..309: note = HLA-B (Q29718) SP+PP+ECD

SEQ ID NO: 2462 - protein, 309 aa, synthetic construct; identical to SEQ ID NO: 2432
  REGION 1..309: note = HLA-B (Q29836) SP+PP+ECD

SEQ ID NO: 2463 - protein, 309 aa, synthetic construct; identical to SEQ ID NO: 2432
  REGION 1..309: note = HLA-B (Q29940) SP+PP+ECD

SEQ ID NO: 2464 - protein, 309 aa, synthetic construct; identical to SEQ ID NO: 2432
  REGION 1..309: note = HLA-B (Q31610) SP+PP+ECD

SEQ ID NO: 2465 - protein, 309 aa, synthetic construct; identical to SEQ ID NO: 2432
  REGION 1..309: note = HLA-B (Q31612) SP+PP+ECD

SEQ ID NO: 2466 - protein, 309 aa, synthetic construct; identical to SEQ ID NO: 2432
  REGION 1..309: note = HLA-B (Q95365) SP+PP+ECD

SEQ ID NO: 2467 - protein, 308 aa, synthetic construct
  REGION 1..308: note = HLA-C (P04222) SP+PP+ECD
MRVMAPRALLLLLSGGLALTETWACSHSMRYFDTAVSRPGRGEPRFISVGYVDDTQFVRFDSDAASPRGEPRAPWVEQEGPEYWDRETQKYKRQAQADRVSLRNLRGYYNQSEDGSHTLQRMSGCDLGPDGRLLRGYDQSAYDGKDYIALNEDLRSWTAADTAAQITQRKLEAARAAEQLRAYLEGTCVEWLRRYLENGKETLQRAEPPKTHVTHHPLSDHEATLRCWALGFYPAEITLTWQRDGEDQTQDTELVETRPAGDGTFQKWAAVVVPSGQEQRYTCHMQHEGLQEPLTLSWEPSSQPTIPI

SEQ ID NO: 2468 - protein, 308 aa, synthetic construct; identical to SEQ ID NO: 2467
  REGION 1..308: note = HLA-C (P10321) SP+PP+ECD

SEQ ID NO: 2469 - protein, 308 aa, synthetic construct; identical to SEQ ID NO: 2467
  REGION 1..308: note = HLA-C (P30499) SP+PP+ECD

SEQ ID NO: 2470 - protein, 308 aa, synthetic construct; identical to SEQ ID NO: 2467
  REGION 1..308: note = HLA-C (P30501) SP+PP+ECD

SEQ ID NO: 2471 - protein, 308 aa, synthetic construct; identical to SEQ ID NO: 2467
  REGION 1..308: note = HLA-C (P30504) SP+PP+ECD

SEQ ID NO: 2472 - protein, 308 aa, synthetic construct; identical to SEQ ID NO: 2467
  REGION 1..308: note = HLA-C (P30505) SP+PP+ECD

SEQ ID NO: 2473 - protein, 308 aa, synthetic construct; identical to SEQ ID NO: 2467
  REGION 1..308: note = HLA-C (P30508) SP+PP+ECD

SEQ ID NO: 2474 - protein, 308 aa, synthetic construct; identical to SEQ ID NO: 2467
  REGION 1..308: note = HLA-C (P30510) SP+PP+ECD

SEQ ID NO: 2475 - protein, 308 aa, synthetic construct; identical to SEQ ID NO: 2467
  REGION 1..308: note = HLA-C (Q07000) SP+PP+ECD

SEQ ID NO: 2476 - protein, 308 aa, synthetic construct; identical to SEQ ID NO: 2467
  REGION 1..308: note = HLA-C (Q29865) SP+PP+ECD

SEQ ID NO: 2477 - protein, 308 aa, synthetic construct; identical to SEQ ID NO: 2467
  REGION 1..308: note = HLA-C (Q29960) SP+PP+ECD

SEQ ID NO: 2478 - protein, 308 aa, synthetic construct; identical to SEQ ID NO: 2467
  REGION 1..308: note = HLA-C (Q29963) SP+PP+ECD

SEQ ID NO: 2479 - protein, 308 aa, synthetic construct; identical to SEQ ID NO: 2467
  REGION 1..308: note = HLA-C (Q95604) SP+PP+ECD

SEQ ID NO: 2480 - protein, 308 aa, synthetic construct; identical to SEQ ID NO: 2467
  REGION 1..308: note = HLA-C (Q9TNN7) SP+PP+ECD

SEQ ID NO: 2481 - protein, 233 aa, synthetic construct
  REGION 1..233: note = HLA-DMA (P28067) SP+PP+ECD
MGHEQNQGAALLQMLPLLWLLPHSWAVPEAPTPMWPDDLQNHTFLHTVYCQDGSPSVGLSEAYDEDQLFFFDFSQNTRVPRLPEFADWAQEQGDAPAILFDKEFCEWMIQQIGPKLDGKIPVSRGFPIAEVFTLKPLEFGKPNTLVCFVSNLFPPMLTVNWHDHSVPVEGFGPTFVSAVDGLSFQAFSYLNFTPEPSDIFSCIVTHEIDRYTAIAYWVPRNALPSDLLENVLC

SEQ ID NO: 2482 - protein, 218 aa, synthetic construct
  REGION 1..218: note = HLA-DMB (P28068) SP+PP+ECD
MITFLPLLLGLSLGCTGAGGFVAHVESTCLLDDAGTPKDFTYCISFNKDLLTCWDPEENKMAPCEFGVLNSLANVLSQHLNQKDTLMQRLRNGLQNCATHTQPFWGSLTNRTRPPSVQVAKTTPFNTREPVMLACYVWGFYPAEVTITWRKNGKLVMPHSSAHKTAQPNGDWTYQTLSHLALTPSYGDTYTCVVEHIGAPEPILRDWTPGLSPMQTLK

SEQ ID NO: 2483 - protein, 217 aa, synthetic construct
  REGION 1..217: note = HLA-DOA (P06340) SP+PP+ECD
MALRAGLVLGFHTLMTLLSPQEAGATKADHMGSYGPAFYQSYGASGQFTHEFDEEQLFSVDLKKSEAVWRLPEFGDFARFDPQGGLAGIAAIKAHLDILVERSNRSRAINVPPRVTVLPKSRVELGQPNILICIVDNIFPPVINITWLRNGQTVTEGVAQTSFYSQPDHLFRKFHYLPFVPSAEDVYDCQVEHWGLDAPLLRHWELQVPIPPPDAME

SEQ ID NO: 2484 - protein, 224 aa, synthetic construct
  REGION 1..224: note = HLA-DOB (P13765) SP+PP+ECD
MGSGWVPWVVALLVNLTRLDSSMTQGTDSPEDFVIQAKADCYFTNGTEKVQFVVRFIFNLEEYVRFDSDVGMFVALTKLGQPDAEQWNSRLDLLERSRQAVDGVCRHNYRLGAPFTVGRKVQPEVTVYPERTPLLHQHNLLHCSVTGFYPGDIKIKWFLNGQEERAGVMSTGPIRNGDWTFQTVVMLEMTPELGHVYTCLVDHSSLLSPVSVEWRAQSEYSWRK

SEQ ID NO: 2485 - protein, 222 aa, synthetic construct
  REGION 1..222: note = HLA-DPA1 (P20036) SP+PP+ECD
MRPEDRMFHIRAVILRALSLAFLLSLRGAGAIKADHVSTYAAFVQTHRPTGEFMFEFDEDEMFYVDLDKKETVWHLEEFGQAFSFEAQGGLANIAILNNNLNTLIQRSNHTQATNDPPEVTVFPKEPVELGQPNTLICHIDKFFPPVLNVTWLCNGELVTEGVAESLFLPRTDYSFHKFHYLTFVPSAEDFYDCRVEHWGLDQPLLKHWEAQEPIQMPETTE

SEQ ID NO: 2486 - protein, 225 aa, synthetic construct
  REGION 1..225: note = HLA-DPB1 (P04440) SP+PP+ECD
MMVLQVSAAPRTVALTALLMVLLTSVVQGRATPENYLFQGRQECYAFNGTQRFLERYIYNREEFARFDSDVGEFRAVTELGRPAAEYWNSQKDILEEKRAVPDRMCRHNYELGGPMTLQRRVQPRVNVSPSKKGPLQHHNLLVCHVTDFYPGSIQVRWFLNGQEETAGVVSTNLIRNGDWTFQILVMLEMTPQQGDVYTCQVEHTSLDSPVTVEWKAQSDSARSK

SEQ ID NO: 2487 - protein, 216 aa, synthetic construct
  REGION 1..216: note = HLA-DQA1 (P01909) SP+PP+ECD
MILNKALMLGALALTTVMSPCGGEDIVADHVASYGVNLYQSYGPSGQYTHEFDGDEQFYVDLGRKETVWCLPVLRQFRFDPQFALTNIAVLKHNLNSLIKRSNSTAATNEVPEVTVFSKSPVTLGQPNILICLVDNIFPPVVNITWLSNGHSVTEGVSETSFLSKSDHSFFKISYLTLLPSAEESYDCKVEHWGLDKPLLKHWEPEIPAPMSELTE

SEQ ID NO: 2488 - protein, 217 aa, synthetic construct
  REGION 1..217: note = HLA-DQA2 (P01906) SP+PP+ECD
MILNKALLLGALALTAVMSPCGGEDIVADHVASYGVNFYQSHGPSGQYTHEFDGDEEFYVDLETKETVWQLPMFSKFISFDPQSALRNMAVGKHTLEFMMRQSNSTAATNEVPEVTVFSKFPVTLGQPNTLICLVDNIFPPVVNITWLSNGHSVTEGVSETSFLSKSDHSFFKISYLTFLPSADEIYDCKVEHWGLDEPLLKHWEPEIPAPMSELTE

SEQ ID NO: 2489 - protein, 230 aa, synthetic construct
  REGION 1..230: note = HLA-DQB1 (P01920) SP+PP+ECD
MSWKKALRIPGGLRAATVTLMLAMLSTPVAEGRDSPEDFVYQFKAMCYFTNGTERVRYVTRYIYNREEYARFDSDVEVYRAVTPLGPPDAEYWNSQKEVLERTRAELDTVCRHNYQLELRTTLQRRVEPTVTISPSRTEALNHHNLLVCSVTDFYPAQIKVRWFRNDQEETTGVVSTPLIRNGDWTFQILVMLEMTPQHGDVYTCHVEHPSLQNPITVEWRAQSESAQSK

SEQ ID NO: 2490 - protein, 229 aa, synthetic construct
  REGION 1..229: note = HLA-DQB2 (P05538) SP+PP+ECD
MSWKMALQIPGGFWAAAVTVMLVMLSTPVAEARDFPKDFLVQFKGMCYFTNGTERVRGVARYIYNREEYGRFDSDVGEFQAVTELGRSIEDWNNYKDFLEQERAAVDKVCRHNYEAELRTTLQRQVEPTVTISPSRTEALNHHNLLVCSVTDFYPAQIKVRWFRNDQEETAGVVSTSLIRNGDWTFQILVMLEITPQRGDIYTCQVEHPSLQSPITVEWRAQSESAQSK

SEQ ID NO: 2491 - protein, 216 aa, synthetic construct
  REGION 1..216: note = HLA-DRA (P01903) SP+PP+ECD
MAISGVPVLGFFIIAVLMSAQESWAIKEEHVIIQAEFYLNPDQSGEFMFDFDGDEIFHVDMAKKETVWRLEEFGRFASFEAQGALANIAVDKANLEIMTKRSNYTPITNVPPEVTVLTNSPVELREPNVLICFIDKFTPPVVNVTWLRNGKPVTTGVSETVFLPREDHLFRKFHYLPFLPSTEDVYDCRVEHWGLDEPLLKHWEFDAPSPLPETTE

SEQ ID NO: 2492 - protein, 227 aa, synthetic construct
  REGION 1..227: note = HLA-DRB1 (P01911) SP+PP+ECD
MVCLKLPGGSCMTALTVTLMVLSSPLALSGDTRPRFLWQPKRECHFFNGTERVRFLDRYFYNQEESVRFDSDVGEFRAVTELGRPDAEYWNSQKDILEQARAAVDTYCRHNYGVVESFTVQRRVQPKVTVYPSKTQPLQHHNLLVCSVSGFYPGSIEVRWFLNGQEEKAGMVSTGLIQNGDWTFQTLVMLETVPRSGEVYTCQVEHPSVTSPLTVEWRARSESAQSK

SEQ ID NO: 2493 - protein, 227 aa, synthetic construct
  REGION 1..227: note = HLA-DRB3 (P79483) SP+PP+ECD
MVCLKLPGGSSLAALTVTLMVLSSRLAFAGDTRPRFLELRKSECHFFNGTERVRYLDRYFHNQEEFLRFDSDVGEYRAVTELGRPVAESWNSQKDLLEQKRGRVDNYCRHNYGVGESFTVQRRVHPQVTVYPAKTQPLQHHNLLVCSVSGFYPGSIEVRWFRNGQEEKAGVVSTGLIQNGDWTFQTLVMLETVPRSGEVYTCQVEHPSVTSALTVEWRARSESAQSK

SEQ ID NO: 2494 - protein, 227 aa, synthetic construct
  REGION 1..227: note = HLA-DRB4 (P13762) SP+PP+ECD
MVCLKLPGGSCMAALTVTLTVLSSPLALAGDTQPRFLEQAKCECHFLNGTERVWNLIRYIYNQEEYARYNSDLGEYQAVTELGRPDAEYWNSQKDLLERRRAEVDTYCRYNYGVVESFTVQRRVQPKVTVYPSKTQPLQHHNLLVCSVNGFYPGSIEVRWFRNGQEEKAGVVSTGLIQNGDWTFQTLVMLETVPRSGEVYTCQVEHPSMMSPLTVQWSARSESAQSK

SEQ ID NO: 2495 - protein, 227 aa, synthetic construct
  REGION 1..227: note = HLA-DRB5 (Q30154) SP+PP+ECD
MVCLKLPGGSYMAKLTVTLMVLSSPLALAGDTRPRFLQQDKYECHFFNGTERVRFLHRDIYNQEEDLRFDSDVGEYRAVTELGRPDAEYWNSQKDFLEDRRAAVDTYCRHNYGVGESFTVQRRVEPKVTVYPARTQTLQHHNLLVCSVNGFYPGSIEVRWFRNSQEEKAGVVSTGLIQNGDWTFQTLVMLETVPRSGEVYTCQVEHPSVTSPLTVEWRAQSESAQSK

SEQ ID NO: 2496 - protein, 305 aa, synthetic construct
  REGION 1..305: note = HLA-E (P13747) SP+PP+ECD
MVDGTLLLLLSEALALTQTWAGSHSLKYFHTSVSRPGRGEPRFISVGYVDDTQFVRFDNDAASPRMVPRAPWMEQEGSEYWDRETRSARDTAQIFRVNLRTLRGYYNQSEAGSHTLQWMHGCELGPDGRFLRGYEQFAYDGKDYLTLNEDLRSWTAVDTAAQISEQKSNDASEAEHQRAYLEDTCVEWLHKYLEKGKETLLHLEPPKTHVTHHPISDHEATLRCWALGFYPAEITLTWQQDGEGHTQDTELVETRPAGDGTFQKWAAVVVPSGEEQRYTCHVQHEGLPEPVTLRWKPASQPTIPI

SEQ ID NO: 2497 - protein, 305 aa, synthetic construct
  REGION 1..305: note = HLA-F (P30511) SP+PP+ECD
MAPRSLLLLLSGALALTDTWAGSHSLRYFSTAVSRPGRGEPRYIAVEYVDDTQFLRFDSDAAIPRMEPREPWVEQEGPQYWEWTTGYAKANAQTDRVALRNLLRRYNQSEAGSHTLQGMNGCDMGPDGRLLRGYHQHAYDGKDYISLNEDLRSWTAADTVAQITQRFYEAEEYAEEFRTYLEGECLELLRRYLENGKETLQRADPPKAHVAHHPISDHEATLRCWALGFYPAEITLTWQRDGEEQTQDTELVETRPAGDGTFQKWAAVVVPPGEEQRYTCHVQHEGLPQPLILRWEQSPQPTIPI

SEQ ID NO: 2498 - protein, 308 aa, synthetic construct
  REGION 1..308: note = HLA-G (P17693) SP+PP+ECD
MVVMAPRTLFLLLSGALTLTETWAGSHSMRYFSAAVSRPGRGEPRFIAMGYVDDTQFVRFDSDSACPRMEPRAPWVEQEGPEYWEEETRNTKAHAQTDRMNLQTLRGYYNQSEASSHTLQWMIGCDLGSDGRLLRGYEQYAYDGKDYLALNEDLRSWTAADTAAQISKRKCEAANVAEQRRAYLEGTCVEWLHRYLENGKEMLQRADPPKTHVTHHPVFDYEATLRCWALGFYPAEIILTWQRDGEDQTQDVELVETRPAGDGTFQKWAAVVVPSGEEQRYTCHVQHEGLPEPLMLRWKQSSLPTIPI

SEQ ID NO: 2499 - protein, 308 aa, synthetic construct
  REGION 1..308: note = HLA-H (P01893) SP+PP+ECD
MVLMAPRTLLLLLSGALALTQTWARSHSMRYFYTTMSRPGAGEPRFISVGYVDDTQFVRFDSDDASPREEPRAPWMEREGPKYWDRNTQICKAQAQTERENLRIALRYYNQSEGGSHTMQVMYGCDVGPDGPFLRGYEQHAYDGKDYIALNEDLRSWTAADMAAQITKRKWEAARRAEQRRVYLEGEFVEWLRRYLENGKETLQRADPPKTHMTHHPISDHEATLRCWALGFYPAEITLTWQRDGEDQTQDTELVETRPAGDGTFQKWAAVVVPSGEEQRYTCHVQHEGLPEPLTLRWEPSSQPTVPI

SEQ ID NO: 2500 - protein, 480 aa, synthetic construct
  REGION 1..480: note = ICAM1 (P05362) SP+PP+ECD
MAPSSPRPALPALLVLLGALFPGPGNAQTSVSPSKVILPRGGSVLVTCSTSCDQPKLLGIETPLPKKELLLPGNNRKVYELSNVQEDSQPMCYSNCPDGQSTAKTFLTVYWTPERVELAPLPSWQPVGKNLTLRCQVEGGAPRANLTVVLLRGEKELKREPAVGEPAEVTTTVLVRRDHHGANFSCRTELDLRPQGLELFENTSAPYQLQTFVLPATPPQLVSPRVLEVDTQGTVVCSLDGLFPVSEAQVHLALGDQRLNPTVTYGNDSFSAKASVSVTAEDEGTQRLTCAVILGNQSQETLQTVTIYSFPAPNVILTKPEVSEGTEVTVKCEAHPRAKVTLNGVPAQPLGPRAQLLLKATPEDNGRSFSCSATLEVAGQLIHKNQTRELRVLYGPRLDERDCPGNWTWPENSQQTPMCQAWGNPLPELKCLKDGTFPLPIGESVTVTRDLEGTYLCRARSTQGEVTRKVTVNVLSPRYE

SEQ ID NO: 2501 - protein, 223 aa, synthetic construct
  REGION 1..223: note = ICAM2 (P13598) SP+PP+ECD
MSSFGYRTLTVALFTLICCPGSDEKVFEVHVRPKKLAVEPKGSLEVNCSTTCNQPEVGGLETSLDKILLDEQAQWKHYLVSNISHDTVLQCHFTCSGKQESMNSNVSVYQPPRQVILTLQPTLVAVGKSFTIECRVPTVEPLDSLTLFLFRGNETLHYETFGKAAPAPQEATATFNSTADREDGHRNFSCLAVLDLMSRGGNIFHKHSAPKMLEIYEPVSDSQ

SEQ ID NO: 2502 - protein, 485 aa, synthetic construct
  REGION 1..485: note = ICAM3 (P32942) SP+PP+ECD
MATMVPSVLWPRACWTLLVCCLLTPGVQGQEFLLRVEPQNPVLSAGGSLFVNCSTDCPSSEKIALETSLSKELVASGMGWAAFNLSNVTGNSRILCSVYCNGSQITGSSNITVYRLPERVELAPLPPWQPVGQNFTLRCQVEDGSPRTSLTVVLLRWEEELSRQPAVEEPAEVTATVLASRDDHGAPFSCRTELDMQPQGLGLFVNTSAPRQLRTFVLPVTPPRLVAPRFLEVETSWPVDCTLDGLFPASEAQVYLALGDQMLNATVMNHGDTLTATATATARADQEGAREIVCNVTLGGERREARENLTVFSFLGPIVNLSEPTAHEGSTVTVSCMAGARVQVTLDGVPAAAPGQPAQLQLNATESDDGRSFFCSATLEVDGEFLHRNSSVQLRVLYGPKIDRATCPQHLKWKDKTRHVLQCQARGNPYPELRCLKEGSSREVPVGIPFFVNVTHNGTYQCQASSSRGKYTLVVVMDIEAGSSH

SEQ ID NO: 2503 - protein, 240 aa, synthetic construct
  REGION 1..240: note = ICAM4 (Q14773) SP+PP+ECD
MGSLFPLSLLFFLAAAYPGVGSALGRRTKRAQSPKGSPLAPSGTSVPFWVRMSPEFVAVQPGKSVQLNCSNSCPQPQNSSLRTPLRQGKTLRGPGWVSYQLLDVRAWSSLAHCLVTCAGKTRWATSRITAYKPPHSVILEPPVLKGRKYTLRCHVTQVFPVGYLVVTLRHGSRVIYSESLERFTGLDLANVTLTYEFAAGPRDFWQPVICHARLNLDGLVVRNSSAPITLMLAWSPAPTA

SEQ ID NO: 2504 - protein, 835 aa, synthetic construct
  REGION 1..835: note = ICAM5 (Q9UMF0) SP+PP+ECD
MPGPSPGLRRALLGLWAALGLGLFGLSAVSQEPFWADLQPRVAFVERGGSLWLNCSTNCPRPERGGLETSLRRNGTQRGLRWLARQLVDIREPETQPVCFFRCARRTLQARGLIRTFQRPDRVELMPLPPWQPVGENFTLSCRVPGAGPRASLTLTLLRGAQELIRRSFAGEPPRARGAVLTATVLARREDHGANFSCRAELDLRPHGLGLFENSSAPRELRTFSLSPDAPRLAAPRLLEVGSERPVSCTLDGLFPASEARVYLALGDQNLSPDVTLEGDAFVATATATASAEQEGARQLVCNVTLGGENRETRENVTIYSFPAPLLTLSEPSVSEGQMVTVTCAAGAQALVTLEGVPAAVPGQPAQLQLNATENDDRRSFFCDATLDVDGETLIKNRSAELRVLYAPRLDDSDCPRSWTWPEGPEQTLRCEARGNPEPSVHCARSDGGAVLALGLLGPVTRALSGTYRCKAANDQGEAVKDVTLTVEYAPALDSVGCPERITWLEGTEASLSCVAHGVPPPDVICVRSGELGAVIEGLLRVAREHAGTYRCEATNPRGSAAKNVAVTVEYGPRFEEPSCPSNWTWVEGSGRLFSCEVDGKPQPSVKCVGSGGATEGVLLPLAPPDPSPRAPRIPRVLAPGIYVCNATNRHGSVAKTVVVSAESPPEMDESTCPSHQTWLEGAEASALACAARGRPSPGVRCSREGIPWPEQQRVSREDAGTYHCVATNAHGTDSRTVTVGVEYRPVVAELAASPPGGVRPGGNFTLTCRAEAWPPAQISWRAPPGALNIGLSSNNSTLSVAGAMGSHGGEYECAATNAHGRHARRITVRVAGPW

SEQ ID NO: 2505 - protein, 140 aa, synthetic construct
  REGION 1..140: note = ICOS (Q9Y6W8) SP+PP+ECD
MKSGLWYFFLFCLRIKVLTGEINGSANYEMFIFHNGGVQILCKYPDIVQQFKMQLLKGGQILCDLTKTKGSGNTVSIKSLKFCHSQLSNNSVSFFLYNLDHSHANYYFCNLSIFDPPPFKVTLTGGYLHIYESQLCCQLK

SEQ ID NO: 2506 - protein, 256 aa, synthetic construct
  REGION 1..256: note = ICOSLG (O75144) SP+PP+ECD
MRLGSPGLLFLLFSSLRADTQEKEVRAMVGSDVELSCACPEGSRFDLNDVYVYWQTSESKTVVTYHIPQNSSLENVDSRYRNRALMSPAGMLRGDFSLRLFNVTPQDEQKFHCLVLSQSLGFQEVLSVEVTLHVAANFSVPVVSAPHSPSQDELTFTCTSINGYPRPNVYWINKTDNSLLDQALQNDTVFLNMRGLYDVVSVLRIARTPSVNIGCCIENVLLQQNLTVGSQTGNDIGERDKITENPVSTGEKNAAT

SEQ ID NO: 2507 - protein, 436 aa, synthetic construct
  REGION 1..436: note = IFNAR1 (P17181) SP+PP+ECD
MMVVLLGATTLVLVAVAPWVLSAAAGGKNLKSPQKVEVDIIDDNFILRWNRSDESVGNVTFSFDYQKTGMDNWIKLSGCQNITSTKCNFSSLKLNVYEEIKLRIRAEKENTSSWYEVDSFTPFRKAQIGPPEVHLEAEDKAIVIHISPGTKDSVMWALDGLSFTYSLVIWKNSSGVEERIENIYSRHKIYKLSPETTYCLKVKAALLTSWKIGVYSPVHCIKTTVENELPPPENIEVSVQNQNYVLKWDYTYANMTFQVQWLHAFLKRNPGNHLYKWKQIPDCENVKTTQCVFPQNVFQKGIYLLRVQASDGNNTSFWSEEIKFDTEIQAFLLPPVFNIRSLSDSFHIYIGAPKQSGNTPVIQDYPLIYEIIFWENTSNAERKIIEKKTDVTVPNLKPLTVYCVKARAHTMDEKLNKSSVFSDAVCEKTKPGNTSK

SEQ ID NO: 2508 - protein, 243 aa, synthetic construct
  REGION 1..243: note = IFNAR2 (P48551) SP+PP+ECD
MLLSQNAFIFRSLNLVLMVYISLVFGISYDSPDYTDESCTFKISLRNFRSILSWELKNHSIVPTHYTLLYTIMSKPEDLKVVKNCANTTRSFCDLTDEWRSTHEAYVTVLEGFSGNTTLFSCSHNFWLAIDMSFEPPEFEIVGFTNHINVMVKFPSIVEEELQFDLSLVIEEQSEGIVKKHKPEIKGNMSGNFTYIIDKLIPNTNYCVSVYLEHSDEQAVIKSPLKCTLLPPGQESESAESAK

SEQ ID NO: 2509 - protein, 245 aa, synthetic construct
  REGION 1..245: note = IFNGR1 (P15260) SP+PP+ECD
MALLFLLPLVMQGVSRAEMGTADLGPSSVPTPTNVTIESYNMNPIVYWEYQIMPQVPVFTVEVKNYGVKNSEWIDACINISHHYCNISDHVGDPSNSLWVRVKARVGQKESAYAKSEEFAVCRDGKIGPPKLDIRKEEKQIMIDIFHPSVFVNGDEQEVDYDPETTCYIRVYNVYVRMNGSEIQYKILTQKEDDCDEIQCQLAIPVSSLNSQYCVSAEGVLHVWGVTTEKSKEVCITIFNSSIKG

SEQ ID NO: 2510 - protein, 241 aa, synthetic construct
  REGION 1..241: note = IFNGR2 (P38484) SP+PP+ECD
MRPTLLWSLLLLLGVFAAAAASQLPAPQHPKIRLYNAEQVLSWEPVALSNSTRPVVYQVQFKYTDSKWFTADIMSIGVNCTQITATECDFTAASPSAGFPMDFNVTLRLRAELGALHSAWVTMPWFQHYRNVTVGPPENIEVTPGEGSLIIRFSSPFDIADTSTAFFCYYVHYWEKGGIQQVKGPFRSNSISLDNLKPSRVYCLQVQAQLLWNKSNIFRVGHLSNISCYETMADASTELQQ

SEQ ID NO: 2511 - protein, 228 aa, synthetic construct
  REGION 1..228: note = IFNLR1 (Q8IU57) SP+PP+ECD
MAGPERWGPLLLCLLQAAPGRPRLAPPQNVTLLSQNFSVYLTWLPGLGNPQDVTYFVAYQSSPTRRRWREVEECAGTKELLCSMMCLKKQDLYNKFKGRVRTVSPSSKSPWVESEYLDYLFEVEPAPPVLVLTQTEEILSANATYQLPPCMPPLDLKYEVAFWKEGAGNKTLFPVTPHGQPVQITLQPAASEHHCLSARTIYTFSVPKYSKFSKPTCFLLEVPEANWA

SEQ ID NO: 2512 - protein, 640 aa, synthetic construct
  REGION 1..640: note = IGDCC3 (Q8IVU1) SP+PP+ECD
MAVQRAASPRRPPAPLWPRLLLPLLLLLLPAPSEGLGHSAELAFAVEPSDDVAVPGQPIVLDCRVEGTPPVRITWRKNGVELPESTHSTLLANGSLMIRHFRLEPGGSPSDEGDYECVAQNRFGLVVSRKARIQAATMSDFHVHPQATVGEEGGVARFQCQIHGLPKPLITWEKNRVPIDTDNERYTLLPKGVLQITGLRAEDGGIFHCVASNIASIRISHGARLTVSGSGSGAYKEPAILVGPENLTLTVHQTAVLECVATGNPRPIVSWSRLDGRPIGVEGIQVLGTGNLIISDVTVQHSGVYVCAANRPGTRVRRTAQGRLVVQAPAEFVQHPQSISRPAGTTAMFTCQAQGEPPPHVTWLKNGQVLGPGGHVRLKNNNSTLTISGIGPEDEAIYQCVAENSAGSSQASARLTVLWAEGLPGPPRNVRAVSVSSTEVRVSWSEPLANTKEIIGYVLHIRKAADPPELEYQEAVSKSTFQHLVSDLEPSTAYSFYIKAYTPRGASSASVPTLASTLGEAPAPPPLSVRVLGSSSLQLLWEPWPRLAQHEGGFKLFYRPASKTSFTGPILLPGTVSSYNLSQLDPTAVYEVKLLAYNQHGDGNATVRFVSLRGASERTALSPPCDCRKEEAANQTSTTG

SEQ ID NO: 2513 - protein, 957 aa, synthetic construct
  REGION 1..957: note = IGDCC4 (Q8TDY8) SP+PP+ECD
MARGDAGRGRGLLALTFCLLAARGELLLPQETTVELSCGVGPLQVILGPEQAAVLNCSLGAAAAGPPTRVTWSKDGDTLLEHDHLHLLPNGSLWLSQPLAPNGSDESVPEAVGVIEGNYSCLAHGPLGVLASQTAVVKLATLADFSLHPESQTVEENGTARFECHIEGLPAPIITWEKDQVTLPEEPRLIVLPNGVLQILDVQESDAGPYRCVATNSARQHFSQEALLSVAHRGSLASTRGQDVVIVAAPENTTVVSGQSVVMECVASADPTPFVSWVRQDGKPISTDVIVLGRTNLLIANAQPWHSGVYVCRANKPRTRDFATAAAELRVLAAPAITQAPEALSRTRASTARFVCRASGEPRPALRWLHNGAPLRPNGRVKVQGGGGSLVITQIGLQDAGYYQCVAENSAGMACAAASLAVVVREGLPSAPTRVTATPLSSSAVLVAWERPEMHSEQIIGFSLHYQKARGMDNVEYQFAVNNDTTELQVRDLEPNTDYEFYVVAYSQLGASRTSTPALVHTLDDVPSAAPQLSLSSPNPSDIRVAWLPLPPSLSNGQVVKYKIEYGLGKEDQIFSTEVRGNETQLMLNSLQPNKVYRVRISAGTAAGFGAPSQWMHHRTPSMHNQSHVPFAPAELKVQAKMESLVVSWQPPPHPTQISGYKLYWREVGAEEEANGDRLPGGRGDQAWDVGPVRLKKKVKQYELTQLVPGRLYEVKLVAFNKHEDGYAAVWKGKTEKAPAPDMPIQRGPPLPPAHVHAESNSSTSIWLRWKKPDFTTVKIVNYTVRFSPWGLRNASLVTYYTSSGEDILIGGLKPFTKYEFAVQSHGVDMDGPFGSVVERSTLPDRPSTPPSDLRLSPLTPSTVRLHWCPPTEPNGEIVEYLILYSSNHTQPEHQWTLLTTQGNIFSAEVHGLESDTRYFFKMGARTEVGPGPFSRLQDVITLQEKLSDSLDMHSVT

SEQ ID NO: 2514 - protein, 935 aa, synthetic construct
  REGION 1..935: note = IGF1R (P08069) SP+PP+ECD
MKSGSGGGSPTSLWGLLFLSAALSLWPTSGEICGPGIDIRNDYQQLKRLENCTVIEGYLHILLISKAEDYRSYRFPKLTVITEYLLLFRVAGLESLGDLFPNLTVIRGWKLFYNYALVIFEMTNLKDIGLYNLRNITRGAIRIEKNADLCYLSTVDWSLILDAVSNNYIVGNKPPKECGDLCPGTMEEKPMCEKTTINNEYNYRCWTTNRCQKMCPSTCGKRACTENNECCHPECLGSCSAPDNDTACVACRHYYYAGVCVPACPPNTYRFEGWRCVDRDFCANILSAESSDSEGFVIHDGECMQECPSGFIRNGSQSMYCIPCEGPCPKVCEEEKKTKTIDSVTSAQMLQGCTIFKGNLLINIRRGNNIASELENFMGLIEVVTGYVKIRHSHALVSLSFLKNLRLILGEEQLEGNYSFYVLDNQNLQQLWDWDHRNLTIKAGKMYFAFNPKLCVSEIYRMEEVTGTKGRQSKGDINTRNNGERASCESDVLHFTSTTTSKNRIIITWHRYRPPDYRDLISFTVYYKEAPFKNVTEYDGQDACGSNSWNMVDVDLPPNKDVEPGILLHGLKPWTQYAVYVKAVTLTMVENDHIRGAKSEILYIRTNASVPSIPLDVLSASNSSSQLIVKWNPPSLPNGNLSYYIVRWQRQPQDGYLYRHNYCSKDKIPIRKYADGTIDIEEVTENPKTEVCGGEKGPCCACPKTEAEKQAEKEEAEYRKVFENFLHNSIFVPRPERKRRDVMQVANTTMSSRSRNTTAADTYNITDPEELETEYPFFESRVDNKERTVISNLRPFTLYRIDIHSCNHEAEKLGCSASNFVFARTMPAEGADDIPGPVTWEPRPENSIFLKWPEPENPNGLILMYEIKYGSQVEDQRECVSRQEYRKYGGAKLNRLNPGNYTARIQATSLSGNGSWTDPVFFYVQAKTGYENFIH

SEQ ID NO: 2515 - protein, 2304 aa, synthetic construct
  REGION 1..2304: note = IGF2R (P11717) SP+PP+ECD
MGAAAGRSPHLGPAPARRPQRSLLLLQLLLLVAAPGSTQAQAAPFPELCSYTWEAVDTKNNVLYKINICGSVDIVQCGPSSAVCMHDLKTRTYHSVGDSVLRSATRSLLEFNTTVSCDQQGTNHRVQSSIAFLCGKTLGTPEFVTATECVHYFEWRTTAACKKDIFKANKEVPCYVFDEELRKHDLNPLIKLSGAYLVDDSDPDTSLFINVCRDIDTLRDPGSQLRACPPGTAACLVRGHQAFDVGQPRDGLKLVRKDRLVLSYVREEAGKLDFCDGHSPAVTITFVCPSERREGTIPKLTAKSNCRYEIEWITEYACHRDYLESKTCSLSGEQQDVSIDLTPLAQSGGSSYISDGKEYLFYLNVCGETEIQFCNKKQAAVCQVKKSDTSQVKAAGRYHNQTLRYSDGDLTLIYFGGDECSSGFQRMSVINFECNKTAGNDGKGTPVFTGEVDCTYFFTWDTEYACVKEKEDLLCGATDGKKRYDLSALVRHAEPEQNWEAVDGSQTETEKKHFFINICHRVLQEGKARGCPEDAAVCAVDKNGSKNLGKFISSPMKEKGNIQLSYSDGDDCGHGKKIKTNITLVCKPGDLESAPVLRTSGEGGCFYEFEWHTAAACVLSKTEGENCTVFDSQAGFSFDLSPLTKKNGAYKVETKKYDFYINVCGPVSVSPCQPDSGACQVAKSDEKTWNLGLSNAKLSYYDGMIQLNYRGGTPYNNERHTPRATLITFLCDRDAGVGFPEYQEEDNSTYNFRWYTSYACPEEPLECVVTDPSTLEQYDLSSLAKSEGGLGGNWYAMDNSGEHVTWRKYYINVCRPLNPVPGCNRYASACQMKYEKDQGSFTEVVSISNLGMAKTGPVVEDSGSLLLEYVNGSACTTSDGRQTTYTTRIHLVCSRGRLNSHPIFSLNWECVVSFLWNTEAACPIQTTTDTDQACSIRDPNSGFVFNLNPLNSSQGYNVSGIGKIFMFNVCGTMPVCGTILGKPASGCEAETQTEELKNWKPARPVGIEKSLQLSTEGFITLTYKGPLSAKGTADAFIVRFVCNDDVYSGPLKFLHQDIDSGQGIRNTYFEFETALACVPSPVDCQVTDLAGNEYDLTGLSTVRKPWTAVDTSVDGRKRTFYLSVCNPLPYIPGCQGSAVGSCLVSEGNSWNLGVVQMSPQAAANGSLSIMYVNGDKCGNQRFSTRITFECAQISGSPAFQLQDGCEYVFIWRTVEACPVVRVEGDNCEVKDPRHGNLYDLKPLGLNDTIVSAGEYTYYFRVCGKLSSDVCPTSDKSKVVSSCQEKREPQGFHKVAGLLTQKLTYENGLLKMNFTGGDTCHKVYQRSTAIFFYCDRGTQRPVFLKETSDCSYLFEWRTQYACPPFDLTECSFKDGAGNSFDLSSLSRYSDNWEAITGTGDPEHYLINVCKSLAPQAGTEPCPPEAAACLLGGSKPVNLGRVRDGPQWRDGIIVLKYVDGDLCPDGIRKKSTTIRFTCSESQVNSRPMFISAVEDCEYTFAWPTATACPMKSNEHDDCQVTNPSTGHLFDLSSLSGRAGFTAAYSEKGLVYMSICGENENCPPGVGACFGQTRISVGKANKRLRYVDQVLQLVYKDGSPCPSKSGLSYKSVISFVCRPEARPTNRPMLISLDKQTCTLFFSWHTPLACEQATECSVRNGSSIVDLSPLIHRTGGYEAYDESEDDASDTNPDFYINICQPLNPMHGVPCPAGAAVCKVPIDGPPIDIGRVAGPPILNPIANEIYLNFESSTPCLADKHFNYTSLIAFHCKRGVSMGTPKLLRTSECDFVFEWETPVVCPDEVRMDGCTLTDEQLLYSFNLSSLSTSTFKVTRDSRTYSVGVCTFAVGPEQGGCKDGGVCLLSGTKGASFGRLQSMKLDYRHQDEAVVLSYVNGDRCPPETDDGVPCVFPFIFNGKSYEECIIESRAKLWCSTTADYDRDHEWGFCRHSNSYRTSSIIFKCDEDEDIGRPQVFSEVRGCDVTFEWKTKVVCPPKKLECKFVQKHKTYDLRLLSSLTGSWSLVHNGVSYYINLCQKIYKGPLGCSERASICRRTTTGDVQVLGLVHTQKLGVIGDKVVVTYSKGYPCGGNKTASSVIELTCTKTVGRPAFKRFDIDSCTYYFSWDSRAACAVKPQEVQMVNGTITNPINGKSFSLGDIYFKLFRASGDMRTNGDNYLYEIQLSSITSSRNPACSGANICQVKPNDQHFSRKVGTSDKTKYYLQDGDLDVVFASSSKCGKDKTKSVSSTIFFHCDPLVEDGIPEFSHETADCQYLFSWYTSAVCPLGVGFDSENPGDDGQMHKGLSERSQ

SEQ ID NO: 2516 - protein, 163 aa, synthetic construct
  REGION 1..163: note = IGFLR1 (Q9H665) SP+PP+ECD
MGPGRCLLTALLLLALAPPPEASQYCGRLEYWNPDNKCCSSCLQRFGPPPCPDYEFRENCGLNDHGDFVTPPFRKCSSGQCNPDGAELCSPCGGGAVTPTPAAGGGRTPWRCRERPVPAKGHCPLTPGNPGAPSSQERSSPASSIAWRTPEPVPQQAWPNFLP

SEQ ID NO: 2517 - protein, 241 aa, synthetic construct
  REGION 1..241: note = IGSF11 (Q5DX21) SP+PP+ECD
MTSQRSPLAPLLLLSLHGVAASLEVSESPGSIQVARGQPAVLPCTFTTSAALINLNVIWMVTPLSNANQPEQVILYQGGQMFDGAPRFHGRVGFTGTMPATNVSIFINNTQLSDTGTYQCLVNNLPDIGGRNIGVTGLTVLVPPSAPHCQIQGSQDIGSDVILLCSSEEGIPRPTYLWEKLDNTLKLPPTATQDQVQGTVTIRNISALSSGLYQCVASNAIGTSTCLLDLQVISPQPRNIG

SEQ ID NO: 2518 - protein, 1124 aa, synthetic construct
  REGION 1..1124: note = IGSF3 (O75054) SP+PP+ECD
MKCFFPVLSCLAVLGVVSAQRQVTVQEGPLYRTEGSHITIWCNVSGYQGPSEQNFQWSIYLPSSPEREVQIVSTMDSSFPYAIYTQRVRGGKIFIERVQGNSTLLHITDLQARDAGEYECHTPSTDKQYFGSYSAKMNLVVIPDSLQTTAMPQTLHRVEQDPLELTCEVASETIQHSHLSVAWLRQKVGEKPVEVISLSRDFMLHSSSEYAQRQSLGEVRLDKLGRTTFRLTIFHLQPSDQGEFYCEAAEWIQDPDGSWYAMTRKRSEGAVVNVQPTDKEFTVRLETEKRLHTVGEPVEFRCILEAQNVPDRYFAVSWAFNSSLIATMGPNAVPVLNSEFAHREARGQLKVAKESDSVFVLKIYHLRQEDSGKYNCRVTEREKTVTGEFIDKESKRPKNIPIIVLPLKSSISVEVASNASVILEGEDLRFSCSVRTAGRPQGRFSVIWQLVDRQNRRSNIMWLDRDGTVQPGSSYWERSSFGGVQMEQVQPNSFSLGIFNSRKEDEGQYECHVTEWVRAVDGEWQIVGERRASTPISITALEMGFAVTAISRTPGVTYSDSFDLQCIIKPHYPAWVPVSVTWRFQPVGTVEFHDLVTFTRDGGVQWGDRSSSFRTRTAIEKAESSNNVRLSISRASDTEAGKYQCVAELWRKNYNNTWTRLAERTSNLLEIRVLQPVTKLQVSKSKRTLTLVENKPIQLNCSVKSQTSQNSHFAVLWYVHKPSDADGKLILKTTHNSAFEYGTYAEEEGLRARLQFERHVSGGLFSLTVQRAEVSDSGSYYCHVEEWLLSPNYAWYKLAEEVSGRTEVTVKQPDSRLRLSQAQGNLSVLETRQVQLECVVLNRTSITSQLMVEWFVWKPNHPERETVARLSRDATFHYGEQAAKNNLKGRLHLESPSPGVYRLFIQNVAVQDSGTYSCHVEEWLPSPSGMWYKRAEDTAGQTALTVMRPDASLQVDTVVPNATVSEKAAFQLDCSIVSRSSQDSRFAVAWYSLRTKAGGKRSSPGLEEQEEEREEEEEEDDDDDDDPTERTALLSVGPDAVFGPEGSPWEGRLRFQRLSPVLYRLTVLQASPQDTGNYSCHVEEWLPSPQKEWYRLTEEESAPIGIRVLDTSPTLQSIICSNDA

SEQ ID NO: 2519 - protein, 153 aa, synthetic construct
  REGION 1..153: note = IGSF6 (O95976) SP+PP+ECD
MGTASRSNIARHLQTNLILFCVGAVGACTLSVTQPWYLEVDYTHEAVTIKCTFSATGCPSEQPTCLWFRYGAHQPENLCLDGCKSEADKFTVREALKENQVSLTVNRVTSNDSAIYICGIAFPSVPEARAKQTGGGTTLVVREIKLLSKELRS

SEQ ID NO: 2520 - protein, 579 aa, synthetic construct
  REGION 1..579: note = IGSF8 (Q969P0) SP+PP+ECD
MGALRPTLLPPSLPLLLLLMLGMGCWAREVLVPEGPLYRVAGTAVSISCNVTGYEGPAQQNFEWFLYRPEAPDTALGIVSTKDTQFSYAVFKSRVVAGEVQVQRLQGDAVVLKIARLQAQDAGIYECHTPSTDTRYLGSYSGKVELRVLPDVLQVSAAPPGPRGRQAPTSPPRMTVHEGQELALGCLARTSTQKHTHLAVSFGRSVPEAPVGRSTLQEVVGIRSDLAVEAGAPYAERLAAGELRLGKEGTDRYRMVVGGAQAGDAGTYHCTAAEWIQDPDGSWAQIAEKRAVLAHVDVQTLSSQLAVTVGPGERRIGPGEPLELLCNVSGALPPAGRHAAYSVGWEMAPAGAPGPGRLVAQLDTEGVGSLGPGYEGRHIAMEKVASRTYRLRLEAARPGDAGTYRCLAKAYVRGSGTRLREAASARSRPLPVHVREEGVVLEAVAWLAGGTVYRGETASLLCNISVRGGPPGLRLAASWWVERPEDGELSSVPAQLVGGVGQDGVAELGVRPGGGPVSVELVGPRSHRLRLHSLGPEDEGVYHCAPSAWVQHADYSWYQAGSARSGPVTVYPYMHALDT

SEQ ID NO: 2521 - protein, 734 aa, synthetic construct
  REGION 1..734: note = IGSF9 (Q9P2J2) SP+PP+ECD
MVWCLGLAVLSLVISQGADGRGKPEVVSVVGRAGESVVLGCDLLPPAGRPPLHVIEWLRFGFLLPIFIQFGLYSPRIDPDYVGRVRLQKGASLQIEGLRVEDQGWYECRVFFLDQHIPEDDFANGSWVHLTVNSPPQFQETPPAVLEVQELEPVTLRCVARGSPLPHVTWKLRGKDLGQGQGQVQVQNGTLRIRRVERGSSGVYTCQASSTEGSATHATQLLVLGPPVIVVPPKNSTVNASQDVSLACHAEAYPANLTYSWFQDNINVFHISRLQPRVRILVDGSLRLLATQPDDAGCYTCVPSNGLLHPPSASAYLTVLYPAQVTAMPPETPLPIGMPGVIRCPVRANPPLLFVSWTKDGKALQLDKFPGWSQGTEGSLIIALGNEDALGEYSCTPYNSLGTAGPSPVTRVLLKAPPAFIERPKEEYFQEVGRELLIPCSAQGDPPPVVSWTKVGRGLQGQAQVDSNSSLILRPLTKEAHGHWECSASNAVARVATSTNVYVLGTSPHVVTNVSVVALPKGANVSWEPGFDGGYLQRFSVWYTPLAKRPDRMHHDWVSLAVPVGAAHLLVPGLQPHTQYQFSVLAQNKLGSGPFSEIVLSAPEGLPTTPAAPGLPPTEIPPPLSPPRGLVAVRTPRGVLLHWDPPELVPKRLDGYVLEGRQGSQGWEVLDPAVAGTETELLVPGLIKDVLYEFRLVAFAGSFVSDPSNTANVSTSGLEVYPSRTQLPGLLPQP

SEQ ID NO: 2522 - protein, 722 aa, synthetic construct
  REGION 1..722: note = IGSF9B (Q9UPX0) SP+PP+ECD
MIWYVATFIASVIGTRGLAAEGAHGLREEPEFVTARAGESVVLRCDVIHPVTGQPPPYVVEWFKFGVPIPIFIKFGYYPPHVDPEYAGRASLHDKASLRLEQVRSEDQGWYECKVLMLDQQYDTFHNGSWVHLTINAPPTFTETPPQYIEAKEGGSITMTCTAFGNPKPIVTWLKEGTLLGASGKYQVSDGSLTVTSVSREDRGAYTCRAYSIQGEAVHTTHLLVQGPPFIVSPPENITVNISQDALLTCRAEAYPGNLTYTWYWQDENVYFQNDLKLRVRILIDGTLIIFRVKPEDSGKYTCVPSNSLGRSPSASAYLTVQYPARVLNMPPVIYVPVGIHGYIRCPVDAEPPATVVKWNKDGRPLQVEKNLGWTLMEDGSIRIEEATEEALGTYTCVPYNTLGTMGQSAPARLVLKDPPYFTVLPGWEYRQEAGRELLIPCAAAGDPFPVITWRKVGKPSRSKHSALPSGSLQFRALSKEDHGEWECVATNVVTSITASTHLTVIGTSPHAPGSVRVQVSMTTANVSWEPGYDGGYEQTFSVWMKRAQFGPHDWLSLPVPPGPSWLLVDTLEPETAYQFSVLAQNKLGTSAFSEVVTVNTLAFPITTPEPLVLVTPPRCLIANRTQQGVLLSWLPPANHSFPIDRYIMEFRVAERWELLDDGIPGTEGEFFAKDLSQDTWYEFRVLAVMQDLISEPSNIAGVSSTDIFPQPDLTEDGLARP

SEQ ID NO: 2523 - protein, 235 aa, synthetic construct
  REGION 1..235: note = IL10RA (Q13651) SP+PP+ECD
MLPCLVVLLAALLSLRLGSDAHGTELPSPPSVWFEAEFFHHILHWTPIPNQSESTCYEVALLRYGIESWNSISNCSQTLSYDLTAVTLDLYHSNGYRARVRAVDGSRHSNWTVTNTRFSVDEVTLTVGSVNLEIHNGFILGKIQLPRPKMAPANDTYESIFSHFREYEIAIRKVPGNFTFTHKKVKHENFSLLTSGEVGEFCVQVKPSVASRSNKGMWSKEECISLTRQYFTVTN

SEQ ID NO: 2524 - protein, 220 aa, synthetic construct
  REGION 1..220: note = IL10RB (Q08334) SP+PP+ECD
MAWSLGSWLGGCLLVSALGMVPPPENVRMNSVNFKNILQWESPAFAKGNLTFTAQYLSYRIFQDKCMNTTLTECDFSSLSKYGDHTLRVRAEFADEHSDWVNITFCPVDDTIIGPPGMQVEVLADSLHMRFLAPKIENEYETWTMKNVYNSWTYNVQYWKNGTDEKFQITPQYDFEVLRNLEPWTTYCVQVRGFLPDRNKAGEWSEPVCEQTTHDETVPS

SEQ ID NO: 2525 - protein, 369 aa, synthetic construct
  REGION 1..369: note = IL11RA (Q14626) SP+PP+ECD
MSSSCSGLSRVLVAVATALVSASPCPQAWGPPGVQYGQPGRSVKLCCPGVTAGDPVSWFRDGEPKLLQGPDSGLGHELVLAQADSTDEGTYICQTLDGALGGTVTLQLGYPPARPVVSCQAADYENFSCTWSPSQISGLPTRYLTSYRKKTVLGADSQRRSPSTGPWPCPQDPLGAARCVVHGAEFWSQYRINVTEVNPLGASTRLLDVSLQSILRPDPPQGLRVESVPGYPRRLRASWTYPASWPCQPHFLLKFRLQYRPAQHPAWSTVEPAGLEEVITDAVAGLPHAVRVSARDFLDAGTWSTWSPEAWGTPSTGTIPKEIPAWGQLHTQPEVEPQVDSPAPPRPSLQPHPRLLDHRDSVEQVAVLA

SEQ ID NO: 2526 - protein, 545 aa, synthetic construct
  REGION 1..545: note = IL12RB1 (P42701) SP+PP+ECD
MEPLVTWVVPLLFLFLLSRQGAACRTSECCFQDPPYPDADSGSASGPRDLRCYRISSDRYECSWQYEGPTAGVSHFLRCCLSSGRCCYFAAGSATRLQFSDQAGVSVLYTVTLWVESWARNQTEKSPEVTLQLYNSVKYEPPLGDIKVSKLAGQLRMEWETPDNQVGAEVQFRHRTPSSPWKLGDCGPQDDDTESCLCPLEMNVAQEFQLRRRQLGSQGSSWSKWSSPVCVPPENPPQPQVRFSVEQLGQDGRRRLTLKEQPTQLELPEGCQGLAPGTEVTYRLQLHMLSCPCKAKATRTLHLGKMPYLSGAAYNVAVISSNQFGPGLNQTWHIPADTHTEPVALNISVGTNGTTMYWPARAQSMTYCIEWQPVGQDGGLATCSLTAPQDPDPAGMATYSWSRESGAMGQEKCYYITIFASAHPEKLTLWSTVLSTYHFGGNASAAGTPHHVSVKNHSLDSVSVDWAPSLLSTCPGVLKEYVVRCRDEDSKQVSEHPVQPTETQVTLSGLRAGVAYTVQVRADTAWLRGVWSQPQRFSIEVQVSD

SEQ ID NO: 2527 - protein, 622 aa, synthetic construct
  REGION 1..622: note = IL12RB2 (Q99665) SP+PP+ECD
MAHTFRGCSLAFMFIITWLLIKAKIDACKRGDVTVKPSHVILLGSTVNITCSLKPRQGCFHYSRRNKLILYKFDRRINFHHGHSLNSQVTGLPLGTTLFVCKLACINSDEIQICGAEIFVGVAPEQPQNLSCIQKGEQGTVACTWERGRDTHLYTEYTLQLSGPKNLTWQKQCKDIYCDYLDFGINLTPESPESNFTAKVTAVNSLGSSSSLPSTFTFLDIVRPLPPWDIRIKFQKASVSRCTLYWRDEGLVLLNRLRYRPSNSRLWNMVNVTKAKGRHDLLDLKPFTEYEFQISSKLHLYKGSWSDWSESLRAQTPEEEPTGMLDVWYMKRHIDYSRQQISLFWKNLSVSEARGKILHYQVTLQELTGGKAMTQNITGHTSWTTVIPRTGNWAVAVSAANSKGSSLPTRINIMNLCEAGLLAPRQVSANSEGMDNILVTWQPPRKDPSAVQEYVVEWRELHPGGDTQVPLNWLRSRPYNVSALISENIKSYICYEIRVYALSGDQGGCSSILGNSKHKAPLSGPHINAITEEKGSILISWNSIPVQEQMGCLLHYRIYWKERDSNSQPQLCEIPYRVSQNSHPINSLQPRVTYVLWMTALTAAGESSHGNEREFCLQGKAN

SEQ ID NO: 2528 - protein, 343 aa, synthetic construct
  REGION 1..343: note = IL13RA1 (P78552) SP+PP+ECD
MEWPARLCGLWALLLCAGGGGGGGGAAPTETQPPVTNLSVSVENLCTVIWTWNPPEGASSNCSLWYFSHFGDKQDKKIAPETRRSIEVPLNERICLQVGSQCSTNESEKPSILVEKCISPPEGDPESAVTELQCIWHNLSYMKCSWLPGRNTSPDTNYTLYYWHRSLEKIHQCENIFREGQYFGCSFDLTKVKDSSFEQHSVQIMVKDNAGKIKPSFNIVPLTSRVKPDPPHIKNLSFHNDDLYVQWENPQNFISRCLFYEVEVNNSQTETHNVFYVQEAKCENPEFERNVENTSCFMVPGVLPDTLNTVRIRVKTNKLCYEDDKLWSNWSQEMSIGKKRNST

SEQ ID NO: 2529 - protein, 343 aa, synthetic construct
  REGION 1..343: note = IL13RA2 (Q14627) SP+PP+ECD
MAFVCLAIGCLYTFLISTTFGCTSSSDTEIKVNPPQDFEIVDPGYLGYLYLQWQPPLSLDHFKECTVEYELKYRNIGSETWKTIITKNLHYKDGFDLNKGIEAKIHTLLPWQCTNGSEVQSSWAETTYWISPQGIPETKVQDMDCVYYNWQYLLCSWKPGIGVLLDTNYNLFYWYEGLDHALQCVDYIKADGQNIGCRFPYLEASDYKDFYICVNGSSENKPIRSSYFTFQLQNIVKPLPPVYLTFTRESSCEIKLKWSIPLGPIPARCFDYEIEIREDDTTLVTATVENETYTLKTTNETRQLCFVVRSKVNIYCSDDGIWSEWSDKQCWEGEDLSKKTLLR

SEQ ID NO: 2530 - protein, 205 aa, synthetic construct
  REGION 1..205: note = IL15RA (Q13261) SP+PP+ECD
MAPRRARGCRTLGLPALLLLLLLRPPATRGITCPPPMSVEHADIWVKSYSLYSRERYICNSGFKRKAGTSSLTECVLNKATNVAHWTTPSLKCIRDPALVHQRPAPPSTVTTAGVTPQPESLSPSGKEPAASSPSSNNTAATTAAIVPGSQLMPSKSPSTGTTEISSHESSHGTPSQTTAKNWELTASASHQPPGVYPQGHSDTT

SEQ ID NO: 2531 - protein, 320 aa, synthetic construct
  REGION 1..320: note = IL17RA (Q96F46) SP+PP+ECD
MGAARSPPSAVPGPLLGLLLLLLGVLAPGGASLRLLDHRALVCSQPGLNCTVKNSTCLDDSWIHPRNLTPSSPKDLQIQLHFAHTQQGDLFPVAHIEWTLQTDASILYLEGAELSVLQLNTNERLCVRFEFLSKLRHHHRRWRFTFSHFVVDPDQEYEVTVHHLPKPIPDGDPNHQSKNFLVPDCEHARMKVTTPCMSSGSLWDPNITVETLEAHQLRVSFTLWNESTHYQILLTSFPHMENHSCFEHMHHIPAPRPEEFHQRSNVTLTLRNLKGCCRHQVQIQPFFSSCLNDCLRHSATVSCPEMPDTPEPIPDYMPLW

SEQ ID NO: 2532 - protein, 292 aa, synthetic construct
  REGION 1..292: note = IL17RB (Q9NRM6) SP+PP+ECD
MSLVLLSLAALCRSAVPREPTVQCGSETGPSPEWMLQHDLIPGDLRDLRVEPVTTSVATGDYSILMNVSWVLRADASIRLLKATKICVTGKSNFQSYSCVRCNYTEAFQTQTRPSGGKWTFSYIGFPVELNTVYFIGAHNIPNANMNEDGPSMSVNFTSPGCLDHIMKYKKKCVKAGSLWDPNITACKKNEETVEVNFTTTPLGNRYMALIQHSTIIGFSQVFEPHQKKQTRASVVIPVTGDSEGATVQLTPYFPTCGSDCIRHKGTVVLCPQTGVPFPLDNNKSKPGGWLP

SEQ ID NO: 2533 - protein, 538 aa, synthetic construct
  REGION 1..538: note = IL17RC (Q8NAC3) SP+PP+ECD
MPVPWFLLSLALGRSPVVLSLERLVGPQDATHCSPVSLEPWGDEERLRVQFLAQQSLSLAPVTAATARTALSGLSGADGRREERGRGKSWVCLSLGGSGNTEPQKKGLSCRLWDSDILCLPGDIVPAPGPVLAPTHLQTELVLRCQKETDCDLCLRVAVHLAVHGHWEEPEDEEKFGGAADSGVEEPRNASLQAQVVLSFQAYPTARCVLLEVQVPAALVQFGQSVGSVVYDCFEAALGSEVRIWSYTQPRYEKELNHTQQLPDCRGLEVWNSIPSCWALPWLNVSADGDNVHLVLNVSEEQHFGLSLYWNQVQGPPKPRWHKNLTGPQIITLNHTDLVPCLCIQVWPLEPDSVRTNICPFREDPRAHQNLWQAARLQLLTLQSWLLDAPCSLPAEAALCWRAPGGDPCQPLVPPLSWENVTVDKVLEFPLLKGHPNLCVQVNSSEKLQLQECLWADSLGPLKDDVLLLETRGPQDNRSLCALEPSGCTSLPSKASTRAARLGEYLLQDLQSGQCLQLWDDDLGALWACPMDKYIHKR

SEQ ID NO: 2534 - protein, 299 aa, synthetic construct
  REGION 1..299: note = IL17RD (Q8NFM7) SP+PP+ECD
MAPWLQLCSVFFTVNACLNGSQLAVAAGGSGRARGADTCGWRGVGPASRNSGLYNITFKYDNCTTYLNPVGKHVIADAQNITISQYACHDQVAVTILWSPGALGIEFLKGFRVILEELKSEGRQCQQLILKDPKQLNSSFKRTGMESQPFLNMKFETDYFVKVVPFPSIKNESNYHPFFFRTRACDLLLQPDNLACKPFWKPRNLNISQHGSDMQVSFDHAPHNFGFRFFYLHYKLKHEGPFKRKTCKQEQTTETTSCLLQNVSPGDYIIELVDDTNTTRKVMHYALKPVHSPWAGPIR

SEQ ID NO: 2535 - protein, 454 aa, synthetic construct
  REGION 1..454: note = IL17RE (Q8NFR9) SP+PP+ECD
MGSSRLAALLLPLLLIVIDLSDSAGIGFRHLPHWNTRCPLASHTDDSFTGSSAYIPCRTWWALFSTKPWCVRVWHCSRCLCQHLLSGGSGLQRGLFHLLVQKSKKSSTFKFYRRHKMPAPAQRKLLPRRHLSEKSHHISIPSPDISHKGLRSKRTQPSDPETWESLPRLDSQRHGGPEFSFDLLPEARAIRVTISSGPEVSVRLCHQWALECEELSSPYDVQKIVSGGHTVELPYEFLLPCLCIEASYLQEDTVRRKKCPFQSWPEAYGSDFWKSVHFTDYSQHTQMVMALTLRCPLKLEAALCQRHDWHTLCKDLPNATARESDGWYVLEKVDLHPQLCFKFSFGNSSHVECPHQTGSLTSWNVSMDTQAQQLILHFSSRMHATFSAAWSLPGLGQDTLVPPVYTVSQARGSSPVSLDLIIPFLRPGCCVLVWRSDVQFAWKHLLCPDVSYRH

SEQ ID NO: 2536 - protein, 329 aa, synthetic construct
  REGION 1..329: note = IL18R1 (Q13478) SP+PP+ECD
MNCRELPLTLWVLISVSTAESCTSRPHITVVEGEPFYLKHCSCSLAHEIETTTKSWYKSSGSQEHVELNPRSSSRIALHDCVLEFWPVELNDTGSYFFQMKNYTQKWKLNVIRRNKHSCFTERQVTSKIVEVKKFFQITCENSYYQTLVNSTSLYKNCKKLLLENNKNPTIKKNAEFEDQGYYSCVHFLHHNGKLFNITKTFNITIVEDRSNIVPVLLGPKLNHVAVELGKNVRLNCSALLNEEDVIYWMFGEENGSDPNIHEEKEMRIMTPEGKWHASKVLRIENIGESNLNVLYNCTVASTGGTDTKSFILVRKADMADIPGHVFTR

SEQ ID NO: 2537 - protein, 356 aa, synthetic construct
  REGION 1..356: note = IL18RAP (O95256) SP+PP+ECD
MLCLGWIFLWLVAGERIKGFNISGCSTKKLLWTYSTRSEEEFVLFCDLPEPQKSHFCHRNRLSPKQVPEHLPFMGSNDLSDVQWYQQPSNGDPLEDIRKSYPHIIQDKCTLHFLTPGVNNSGSYICRPKMIKSPYDVACCVKMILEVKPQTNASCEYSASHKQDLLLGSTGSISCPSLSCQSDAQSPAVTWYKNGKLLSVERSNRIVVDEVYDYHQGTYVCDYTQSDTVSSWTVRAVVQVRTIVGDTKLKPDILDPVEDTLEVELGKPLTISCKARFGFERVFNPVIKWYIKDSDLEWEVSVPEAKSIKSTLKDEIIERNIILEKVTQRDLRRKFVCFVQNSIGNTTQSVQLKEKR

SEQ ID NO: 2538 - protein, 336 aa, synthetic construct
  REGION 1..336: note = IL1R1 (P14778) SP+PP+ECD
MKVLLRLICFIALLISSLEADKCKEREEKIILVSSANEIDVRPCPLNPNEHKGTITWYKDDSKTPVSTEQASRIHQHKEKLWFVPAKVEDSGHYYCVVRNSSYCLRIKISAKFVENEPNLCYNAQAIFKQKLPVAGDGGLVCPYMEFFKNENNELPKLQWYKDCKPLLLDNIHFSGVKDRLIVMNVAEKHRGNYTCHASYTYLGKQYPITRVIEFITLEENKPTRPVIVSPANETMEVDLGSQIQLICNVTGQLSDIAYWKWNGSVIDEDDPVLGEDYYSVENPANKRRSTLITVLNISEIESRFYKHPFTCFAKNTHGIDAAYIQLIYPVTNFQK

SEQ ID NO: 2539 - protein, 343 aa, synthetic construct
  REGION 1..343: note = IL1R2 (P27930) SP+PP+ECD
MLRLYVLVMGVSAFTLQPAAHTGAARSCRFRGRHYKREFRLEGEPVALRCPQVPYWLWASVSPRINLTWHKNDSARTVPGEEETRMWAQDGALWLLPALQEDSGTYVCTTRNASYCDKMSIELRVFENTDAFLPFISYPQILTLSTSGVLVCPDLSEFTRDKTDVKIQWYKDSLLLDKDNEKFLSVRGTTHLLVHDVALEDAGYYRCVLTFAHEGQQYNITRSIELRIKKKKEETIPVIISPLKTISASLGSRLTIPCKVFLGTGTPLTTMLWWTANDTHIESAYPGGRVTEGPRQEYSENNENYIEVPLIFDPVTREDLHMDFKCVVHNTLSFQTLRTTVKE

SEQ ID NO: 2540 - protein, 367 aa, synthetic construct
  REGION 1..367: note = IL1RAP (Q9NPH3) SP+PP+ECD
MTLLWCVVSLYFYGILQSDASERCDDWGLDTMRQIQVFEDEPARIKCPLFEHFLKFNYSTAHSAGLTLIWYWTRQDRDLEEPINFRLPENRISKEKDVLWFRPTLLNDTGNYTCMLRNTTYCSKVAFPLEVVQKDSCFNSPMKLPVHKLYIEYGIQRITCPNVDGYFPSSVKPTITWYMGCYKIQNFNNVIPEGMNLSFLIALISNNGNYTCVVTYPENGRTFHLTRTLTVKVVGSPKNAVPPVIHSPNDHVVYEKEPGEELLIPCTVYFSFLMDSRNEVWWTIDGKKPDDITIDVTINESISHSRTEDETRTQILSIKKVTSEDLKRSYVCHARSAKGEVAKAAKVKQKVPAPRYTVELACGFGAT

SEQ ID NO: 2541 - protein, 357 aa, synthetic construct
  REGION 1..357: note = IL1RAPL1 (Q9NZN1) SP+PP+ECD
MKAPIPHLILLYATFTQSLKVVTKRGSADGCTDWSIDIKKYQVLVGEPVRIKCALFYGYIRTNYSLAQSAGLSLMWYKSSGPGDFEEPIAFDGSRMSKEEDSIWFRPTLLQDSGLYACVIRNSTYCMKVSISLTVGENDTGLCYNSKMKYFEKAELSKSKEISCRDIEDFLLPTREPEILWYKECRTKTWRPSIVFKRDTLLIREVREDDIGNYTCELKYGGFVVRRTTELTVTAPLTDKPPKLLYPMESKLTIQETQLGDSANLTCRAFFGYSGDVSPLIYWMKGEKFIEDLDENRVWESDIRILKEHLGEQEVSISLIVDSVEEGDLGNYSCYVENGNGRRHASVLLHKRELMYT

SEQ ID NO: 2542 - protein, 354 aa, synthetic construct
  REGION 1..354: note = IL1RAPL2 (Q9NP60) SP+PP+ECD
MKPPFLLALVVCSVVSTNLKMVSKRNSVDGCIDWSVDLKTYMALAGEPVRVKCALFYSYIRTNYSTAQSTGLRLMWYKNKGDLEEPIIFSEVRMSKEEDSIWFHSAEAQDSGFYTCVLRNSTYCMKVSMSLTVAENESGLCYNSRIRYLEKSEVTKRKEISCPDMDDFKKSDQEPDVVWYKECKPKMWRSIIIQKGNALLIQEVQEEDGGNYTCELKYEGKLVRRTTELKVTALLTDKPPKPLFPMENQPSVIDVQLGKPLNIPCKAFFGFSGESGPMIYWMKGEKFIEELAGHIREGEIRLLKEHLGEKEVELALIFDSVVEADLANYTCHVENRNGRKHASVLLRKKDLIYK

SEQ ID NO: 2543 - protein, 328 aa, synthetic construct
  REGION 1..328: note = IL1RL1 (Q01638) SP+PP+ECD
MGFWILAILTILMYSTAAKFSKQSWGLENEALIVRCPRQGKPSYTVDWYYSQTNKSIPTQERNRVFASGQLLKFLPAAVADSGIYTCIVRSPTFNRTGYANVTIYKKQSDCNVPDYLMYSTVSGSEKNSKIYCPTIDLYNWTAPLEWFKNCQALQGSRYRAHKSFLVIDNVMTEDAGDYTCKFIHNENGANYSVTATRSFTVKDEQGFSLFPVIGAPAQNEIKEVEIGKNANLTCSACFGKGTQFLAAVLWQLNGTKITDFGEPRIQQEEGQNQSFSNGLACLDMVLRIADVKEEDLLLQYDCLALNLHGLRRHTVRLSRKNPIDHHS

SEQ ID NO: 2544 - protein, 335 aa, synthetic construct
  REGION 1..335: note = IL1RL2 (Q9HB29) SP+PP+ECD
MWSLLLCGLSIALPLSVTADGCKDIFMKNEILSASQPFAFNCTFPPITSGEVSVTWYKNSSKIPVSKIIQSRIHQDETWILFLPMEWGDSGVYQCVIKGRDSCHRIHVNLTVFEKHWCDTSIGGLPNLSDEYKQILHLGKDDSLTCHLHFPKSCVLGPIKWYKDCNEIKGERFTVLETRLLVSNVSAEDRGNYACQAILTHSGKQYEVLNGITVSITERAGYGGSVPKIIYPKNHSIEVQLGTTLIVDCNVTDTKDNTNLRCWRVNNTLVDDYYDESKRIREGVETHVSFREHNLYTVNITFLEVKMEDYGLPFMCHAGVSTAYIILQLPAPDFR

SEQ ID NO: 2545 - protein, 250 aa, synthetic construct
  REGION 1..250: note = IL20RA (Q9UHF4) SP+PP+ECD
MRAPGRPALRPLPLPPLLLLLLAAPWGRAVPCVSGGLPKPANITFLSINMKNVLQWTPPEGLQGVKVTYTVQYFIYGQKKWLNKSECRNINRTYCDLSAETSDYEHQYYAKVKAIWGTKCSKWAESGRFYPFLETQIGPPEVALTTDEKSISVVLTAPEKWKRNPEDLPVSMQQIYSNLKYNVSVLNTKSNRTWSQCVTNHTLVLTWLEPNTLYCVHVESFVPGPPRRAQPSEKQCARTLKDQSSEFKAK

SEQ ID NO: 2546 - protein, 233 aa, synthetic construct
  REGION 1..233: note = IL20RB (Q6UXL0) SP+PP+ECD
MQTFTMVLEEIWTSLFMWFFYALIPCLLTDEVAILPAPQNLSVLSTNMKHLLMWSPVIAPGETVYYSVEYQGEYESLYTSHIWIPSSWCSLTEGPECDVTDDITATVPYNLRVRATLGSQTSAWSILKHPFNRNSTILTRPGMEITKDGFHLVIELEDLGPQFEFLVAYWRREPGAEEHVKMVRSGGIPVHLETMEPGAAYCVKAQTFVKAIGRYSAFSQTECVEVQGEAIPL

SEQ ID NO: 2547 - protein, 232 aa, synthetic construct
  REGION 1..232: note = IL21R (Q9HBE5) SP+PP+ECD
MPRGWAAPLLLLLLQGGWGCPDLVCYTDYLQTVICILEMWNLHPSTLTLTWQDQYEELKDEATSCSLHRSAHNATHATYTCHMDVFHFMADDIFSVNITDQSGNYSQECGSFLLAESIKPAPPFNVTVTFSGQYNISWRSDYEDPAFYMLKGKLQYELQYRNRGDPWAVSPRRKLISVDSRSVSLLPLEFRKDSSYELQVRAGPMPGSSYQGTWSEWSDPVIFQTQSEELKE

SEQ ID NO: 2548 - protein, 228 aa, synthetic construct
  REGION 1..228: note = IL22RA1 (Q8N6P7) SP+PP+ECD
MRTLLTILTVGSLAAHAPEDPSDLLQHVKFQSSNFENILTWDSGPEGTPDTVYSIEYKTYGERDWVAKKGCQRITRKSCNLTVETGNLTELYYARVTAVSAGGRSATKMTDRFSSLQHTTLKPPDVTCISKVRSIQMIVHPTPTPIRAGDGHRLTLEDIFHDLFYHLELQVNRTYQMHLGGKQREYEFFGLTPDTEFLGTIMICVPTWAKESAPYMCRVKTLPDRTWT

SEQ ID NO: 2549 - protein, 355 aa, synthetic construct
  REGION 1..355: note = IL23R (Q5VWK5) SP+PP+ECD
MNQVTIQWDAVIALYILFSWCHGGITNINCSGHIWVEPATIFKMGMNISIYCQAAIKNCQPRKLHFYKNGIKERFQITRINKTTARLWYKNFLEPHASMYCTAECPKHFQETLICGKDISSGYPPDIPDEVTCVIYEYSGNMTCTWNAGKLTYIDTKYVVHVKSLETEEEQQYLTSSYINISTDSLQGGKKYLVWVQAANALGMEESKQLQIHLDDIVIPSAAVISRAETINATVPKTIIYWDSQTTIEKVSCEMRYKATTNQTWNVKEFDTNFTYVQQSEFYLEPNIKYVFQVRCQETGKRYWQPWSSLFFHKTPETVPQVTSKAFQHDTWNSGLTVASISTGHLTSDNRGDIG

SEQ ID NO: 2550 - protein, 516 aa, synthetic construct
  REGION 1..516: note = IL27RA (Q6UWB1) SP+PP+ECD
MRGGRGAPFWLWPLPKLALLPLLWVLFQRTRPQGSAGPLQCYGVGPLGDLNCSWEPLGDLGAPSELHLQSQKYRSNKTQTVAVAAGRSWVAIPREQLTMSDKLLVWGTKAGQPLWPPVFVNLETQMKPNAPRLGPDVDFSEDDPLEATVHWAPPTWPSHKVLICQFHYRRCQEAAWTLLEPELKTIPLTPVEIQDLELATGYKVYGRCRMEKEEDLWGEWSPILSFQTPPSAPKDVWVSGNLCGTPGGEEPLLLWKAPGPCVQVSYKVWFWVGGRELSPEGITCCCSLIPSGAEWARVSAVNATSWEPLTNLSLVCLDSASAPRSVAVSSIAGSTELLVTWQPGPGEPLEHVVDWARDGDPLEKLNWVRLPPGNLSALLPGNFTVGVPYRITVTAVSASGLASASSVWGFREELAPLVGPTLWRLQDAPPGTPAIAWGEVPRHQLRGHLTHYTLCAQSGTSPSVCMNVSGNTQSVTLPDLPWGPCELWVTASTIAGQGPPGPILRLHLPDNTLRWK

SEQ ID NO: 2551 - protein, 240 aa, synthetic construct
  REGION 1..240: note = IL2RA (P01589) SP+PP+ECD
MDSYLLMWGLLTFIMVPGCQAELCDDDPPEIPHATFKAMAYKEGTMLNCECKRGFRRIKSGSLYMLCTGNSSHSSWDNQCQCTSSATRNTTKQVTPQPEEQKERKTTEMQSPMQPVDQASLPGHCREPPPWENEATERIYHFVVGQMVYYQCVQGYRALHRGPAESVCKMTHGKTRWTQPQLICTGEMETSQFPGEEKPQASPEGRPESETSCLVTTTDFQIQTEMAATMETSIFTTEYQ

SEQ ID NO: 2552 - protein, 240 aa, synthetic construct
  REGION 1..240: note = IL2RB (P14784) SP+PP+ECD
MAAPALSWRLPLLILLLPLATSWASAAVNGTSQFTCFYNSRANISCVWSQDGALQDTSCQVHAWPDRRRWNQTCELLPVSQASWACNLILGAPDSQKLTTVDIVTLRVLCREGVRWRVMAIQDFKPFENLRLMAPISLQVVHVETHRCNISWEISQASHYFERHLEFEARTLSPGHTWEEAPLLTLKQKQEWICLETLTPDTQYEFQVRVKPLQGEFTTWSPWSQPLAFRTKPAALGKDT

SEQ ID NO: 2553 - protein, 262 aa, synthetic construct
  REGION 1..262: note = IL2RG (P31785) SP+PP+ECD
MLKPSLPFTSLLFLQLPLLGVGLNTTILTPNGNEDTTADFFLTTMPTDSLSVSTLPLPEVQCFVFNVEYMNCTWNSSSEPQPTNLTLHYWYKNSDNDKVQKCSHYLFSEEITSGCQLQKKEIHLYQTFVVQLQDPREPRRQATQMLKLQNLVIPWAPENLTLHKLSESQLELNWNNRFLNHCLEHLVQYRTDWDHSWTEQSVDYRHKFSLPSVDGQKRYTFRVRSRFNPLCGSAQHWSEWSHPIHWGSNTSKENPFLFALEA

SEQ ID NO: 2554 - protein, 519 aa, synthetic construct
  REGION 1..519: note = IL31RA (Q8NI17) SP+PP+ECD
MMWTWALWMLPSLCKFSLAALPAKPENISCVYYYRKNLTCTWSPGKETSYTQYTVKRTYAFGEKHDNCTTNSSTSENRASCSFFLPRITIPDNYTIEVEAENGDGVIKSHMTYWRLENIAKTEPPKIFRVKPVLGIKRMIQIEWIKPELAPVSSDLKYTLRFRTVNSTSWMEVNFAKNRKDKNQTYNLTGLQPFTEYVIALRCAVKESKFWSDWSQEKMGMTEEEAPCGLELWRVLKPAEADGRRPVRLLWKKARGAPVLEKTLGYNIWYYPESNTNLTETMNTTNQQLELHLGGESFWVSMISYNSLGKSPVATLRIPAIQEKSFQCIEVMQACVAEDQLVVKWQSSALDVNTWMIEWFPDVDSEPTTLSWESVSQATNWTIQQDKLKPFWCYNISVYPMLHDKVGEPYSIQAYAKEGVPSEGPETKVENIGVKTVTITWKEIPKSERKGIICNYTIFYQAEGGKGFSKTVNSSILQYGLESLKRKTSYIVQVMASTSAGGTNGTSINFKTLSFSVFE

SEQ ID NO: 2555 - protein, 305 aa, synthetic construct
  REGION 1..305: note = IL3RA (P26951) SP+PP+ECD
MVLLWLTLLLIALPCLLQTKEDPNPPITNLRMKAKAQQLTWDLNRNVTDIECVKDADYSMPAVNNSYCQFGAISLCEVTNYTVRVANPPFSTWILFPENSGKPWAGAENLTCWIHDVDFLSCSWAVGPGAPADVQYDLYLNVANRRQQYECLHYKTDAQGTRIGCRFDDISRLSSGSQSSHILVRGRSAAFGIPCTDKFVVFSQIEILTPPNMTAKCNKTHSFMHWKMRSHFNRKFRYELQIQKRMQPVITEQVRDRTSFQLLNPGTYTVQIRARERVYEFLSAWSTPQRFECDQEEGANTRAWR

SEQ ID NO: 2556 - protein, 232 aa, synthetic construct
  REGION 1..232: note = IL4R (P24394) SP+PP+ECD
MGWLCSGLLFPVSCLVLLQVASSGNMKVLQEPTCVSDYMSISTCEWKMNGPTNCSTELRLLYQLVFLLSEAHTCIPENNGGAGCVCHLLMDDVVSADNYTLDLWAGQQLLWKGSFKPSEHVKPRAPGNLTVHTNVSDTLLLTWSNPYPPDNYLYNHLTYAVNIWSENDPADFRIYNVTYLEPSLRIAASTLKSGISYRARVRAWAQCYNTTWSEWSPSTKWHNSYREPFEQH

SEQ ID NO: 2557 - protein, 342 aa, synthetic construct
  REGION 1..342: note = IL5RA (Q01344) SP+PP+ECD
MIIVAHVLLILLGATEILQADLLPDEKISLLPPVNFTIKVTGLAQVLLQWKPNPDQEQRNVNLEYQVKINAPKEDDYETRITESKCVTILHKGFSASVRTILQNDHSLLASSWASAELHAPPGSPGTSIVNLTCTTNTTEDNYSRLRSYQVSLHCTWLVGTDAPEDTQYFLYYRYGSWTEECQEYSKDTLGRNIACWFPRTFILSKGRDWLAVLVNGSSKHSAIRPFDQLFALHAIDQINPPLNVTAEIEGTRLSIQWEKPVSAFPIHCFDYEVKIHNTRNGYLQIEKLMTNAFISIIDDLSKYDVQVRAAVSSMCREAGLWSEWSQPIYVGNDEHKPLREW

SEQ ID NO: 2558 - protein, 365 aa, synthetic construct
  REGION 1..365: note = IL6R (P08887) SP+PP+ECD
MLAVGCALLAALLAAPGAALAPRRCPAQEVARGVLTSLPGDSVTLTCPGVEPEDNATVHWVLRKPAAGSHPSRWAGMGRRLLLRSVQLHDSGNYSCYRAGRPAGTVHLLVDVPPEEPQLSCFRKSPLSNVVCEWGPRSTPSLTTKAVLLVRKFQNSPAEDFQEPCQYSQESQKFSCQLAVPEGDSSFYIVSMCVASSVGSKFSKTQTFQGCGILQPDPPANITVTAVARNPRWLSVTWQDPHSWNSSFYRLRFELRYRAERSKTFTTWMVKDLQHHCVIHDAWSGLRHVVQLRAQEEFGQGEWSEWSPEAMGTPWTESRSPPAENEVSTPMQALTTNKDDDNILFRDSANATSLPVQDSSSVPLP

SEQ ID NO: 2559 - protein, 619 aa, synthetic construct
  REGION 1..619: note = IL6ST (P40189) SP+PP+ECD
MLTLQTWLVQALFIFLTTESTGELLDPCGYISPESPVVQLHSNFTAVCVLKEKCMDYFHVNANYIVWKTNHFTIPKEQYTIINRTASSVTFTDIASLNIQLTCNILTFGQLEQNVYGITIISGLPPEKPKNLSCIVNEGKKMRCEWDGGRETHLETNFTLKSEWATHKFADCKAKRDTPTSCTVDYSTVYFVNIEVWVEAENALGKVTSDHINFDPVYKVKPNPPHNLSVINSEELSSILKLTWTNPSIKSVIILKYNIQYRTKDASTWSQIPPEDTASTRSSFTVQDLKPFTEYVFRIRCMKEDGKGYWSDWSEEASGITYEDRPSKAPSFWYKIDPSHTQGYRTVQLVWKTLPPFEANGKILDYEVTLTRWKSHLQNYTVNATKLTVNLTNDRYLATLTVRNLVGKSDAAVLTIPACDFQATHPVMDLKAFPKDNMLWVEWTTPRESVKKYILEWCVLSDKAPCITDWQQEDGTVHRTYLRGNLAESKCYLITVTPVYADGPGSPESIKAYLKQAPPSKGPTVRTKKVGKNEAVLEWDQLPVDVQNGFIRNYTIFYRTIIGNETAVNVDSSHTEYTLSSLTSDTLYMVRMAAYTDEGGKDGPEFTFTTPKFAQGEIE

SEQ ID NO: 2560 - protein, 239 aa, synthetic construct
  REGION 1..239: note = IL7R (P16871) SP+PP+ECD
MTILGTTFGMVFSLLQVVSGESGYAQNGDLEDAELDDYSFSCYSQLEVNGSQHSLTCAFEDPDVNITNLEFEICGALVEVKCLNFRKLQEIYFIETKKFLLIGKSNICVKVGEKSLTCKKIDLTTIVKPEAPFDLSVVYREGANDFVVTFNTSHLQKKYVKVLMHDVAYRQEKDENKWTHVNLSSTKLTLLQRKLQPAAMYEIKVRSIPDHYFKGFWSEWSPSYYFRTPEINNSSGEMD

SEQ ID NO: 2561 - protein, 270 aa, synthetic construct; identical to SEQ ID NO: 900
  REGION 1..270: note = IL9R (Q01113) SP+PP+ECD

SEQ ID NO: 2562 - protein, 167 aa, synthetic construct
  REGION 1..167: note = ILDR1 (Q86SU0) SP+PP+ECD
MAWPKLPAPWLLLCTWLPAGCLSLLVTVQHTERYVTLFASIILKCDYTTSAQLQDVVVTWRFKSFCKDPIFDYYSASYQAALSLGQDPSNDCNDNQREVRIVAQRRGQNEPVLGVDYRQRKITIQNRADLVINEVMWWDHGVYYCTIEAPGDTSGDPDKEVKLIVLH

SEQ ID NO: 2563 - protein, 1099 aa, synthetic construct
  REGION 1..1099: note = IMPG2 (Q9BZV3) SP+PP+ECD
MIMFPLFGKISLGILIFVLIEGDFPSLTAQTYLSIEEIQEPKSAVSFLLPEESTDLSLATKKKQPLDRRETERQWLIRRRRSILFPNGVKICPDESVAEAVANHVKYFKVRVCQEAVWEAFRTFWDRLPGREEYHYWMNLCEDGVTSIFEMGTNFSESVEHRSLIMKKLTYAKETVSSSELSSPVPVGDTSTLGDTTLSVPHPEVDAYEGASESSLERPEESISNEIENVIEEATKPAGEQIAEFSIHLLGKQYREELQDSSSFHHQHLEEEFISEVENAFTGLPGYKEIRVLEFRSPKENDSGVDVYYAVTFNGEAISNTTWDLISLHSNKVENHGLVELDDKPTVVYTISNFRDYIAETLQQNFLLGNSSLNPDPDSLQLINVRGVLRHQTEDLVWNTQSSSLQATPSSILDNTFQAAWPSADESITSSIPPLDFSSGPPSATGRELWSESPLGDLVSTHKLAFPSKMGLSSSPEVLEVSSLTLHSVTPAVLQTGLPVASEERTSGSHLVEDGLANVEESEDFLSIDSLPSSSFTQPVPKETIPSMEDSDVSLTSSPYLTSSIPFGLDSLTSKVKDQLKVSPFLPDASMEKELIFDGGLGSGSGQKVDLITWPWSETSSEKSAEPLSKPWLEDDDSLLPAEIEDKKLVLVDKMDSTDQISKHSKYEHDDRSTHFPEEEPLSGPAVPIFADTAAESASLTLPKHISEVPGVDDYSVTKAPLILTSVAISASTDKSDQADAILREDMEQITESSNYEWFDSEVSMVKPDMQTLWTILPESERVWTRTSSLEKLSRDILASTPQSADRLWLSVTQSTKLPPTTISTLLEDEVIMGVQDISLELDRIGTDYYQPEQVQEQNGKVGSYVEMSTSVHSTEMVSVAWPTEGGDDLSYTQTSGALVVFFSLRVTNMMFSEDLFNKNSLEYKALEQRFLELLVPYLQSNLTGFQNLEILNFRNGSIVVNSRMKFANSVPPNVNNAVYMILEDFCTTAYNTMNLAIDKYSLDVESGDEANPCKFQACNEFSECLVNPWSGEAKCRCFPGYLSVEERPCQSLCDLQPDFCLNDGKCDIMPGHGAICRCRVGENWWYRGKHCEEFVSEP

SEQ ID NO: 2564 - protein, 956 aa, synthetic construct
  REGION 1..956: note = INSR (P06213) SP+PP+ECD
MATGGRRGAAAAPLLVAVAALLLGAAGHLYPGEVCPGMDIRNNLTRLHELENCSVIEGHLQILLMFKTRPEDFRDLSFPKLIMITDYLLLFRVYGLESLKDLFPNLTVIRGSRLFFNYALVIFEMVHLKELGLYNLMNITRGSVRIEKNNELCYLATIDWSRILDSVEDNYIVLNKDDNEECGDICPGTAKGKTNCPATVINGQFVERCWTHSHCQKVCPTICKSHGCTAEGLCCHSECLGNCSQPDDPTKCVACRNFYLDGRCVETCPPPYYHFQDWRCVNFSFCQDLHHKCKNSRRQGCHQYVIHNNKCIPECPSGYTMNSSNLLCTPCLGPCPKVCHLLEGEKTIDSVTSAQELRGCTVINGSLIINIRGGNNLAAELEANLGLIEEISGYLKIRRSYALVSLSFFRKLRLIRGETLEIGNYSFYALDNQNLRQLWDWSKHNLTITQGKLFFHYNPKLCLSEIHKMEEVSGTKGRQERNDIALKTNGDQASCENELLKFSYIRTSFDKILLRWEPYWPPDFRDLLGFMLFYKEAPYQNVTEFDGQDACGSNSWTVVDIDPPLRSNDPKSQNHPGWLMRGLKPWTQYAIFVKTLVTFSDERRTYGAKSDIIYVQTDATNPSVPLDPISVSNSSSQIILKWKPPSDPNGNITHYLVFWERQAEDSELFELDYCLKGLKLPSRTWSPPFESEDSQKHNQSEYEDSAGECCSCPKTDSQILKELEESSFRKTFEDYLHNVVFVPRKTSSGTGAEDPRPSRKRRSLGDVGNVTVAVPTVAAFPNTSSTSVPTSPEEHRPFEKVVNKESLVISGLRHFTGYRIELQACNQDTPEERCSVAAYVSARTMPEAKADDIVGPVTHEIFENNVVHLMWQEPKEPNGLIVLYEVSYRRYGDEELHLCVSRKHFALERGCRLRGLSPGNYSVRIRATSLAGNGSWTEPTYFYVTDYLDVPSNIAK

SEQ ID NO: 2565 - protein, 921 aa, synthetic construct
  REGION 1..921: note = INSRR (P14616) SP+PP+ECD
MAVPSLWPWGACLPVIFLSLGFGLDTVEVCPSLDIRSEVAELRQLENCSVVEGHLQILLMFTATGEDFRGLSFPRLTQVTDYLLLFRVYGLESLRDLFPNLAVIRGTRLFLGYALVIFEMPHLRDVALPALGAVLRGAVRVEKNQELCHLSTIDWGLLQPAPGANHIVGNKLGEECADVCPGVLGAAGEPCAKTTFSGHTDYRCWTSSHCQRVCPCPHGMACTARGECCHTECLGGCSQPEDPRACVACRHLYFQGACLWACPPGTYQYESWRCVTAERCASLHSVPGRASTFGIHQGSCLAQCPSGFTRNSSSIFCHKCEGLCPKECKVGTKTIDSIQAAQDLVGCTHVEGSLILNLRQGYNLEPQLQHSLGLVETITGFLKIKHSFALVSLGFFKNLKLIRGDAMVDGNYTLYVLDNQNLQQLGSWVAAGLTIPVGKIYFAFNPRLCLEHIYRLEEVTGTRGRQNKAEINPRTNGDRAACQTRTLRFVSNVTEADRILLRWERYEPLEARDLLSFIVYYKESPFQNATEHVGPDACGTQSWNLLDVELPLSRTQEPGVTLASLKPWTQYAVFVRAITLTTEEDSPHQGAQSPIVYLRTLPAAPTVPQDVISTSNSSSHLLVRWKPPTQRNGNLTYYLVLWQRLAEDGDLYLNDYCHRGLRLPTSNNDPRFDGEDGDPEAEMESDCCPCQHPPPGQVLPPLEAQEASFQKKFENFLHNAITIPISPWKVTSINKSPQRDSGRHRRAAGPLRLGGNSSDFEIQEDKVPRERAVLSGLRHFTEYRIDIHACNHAAHTVGCSAATFVFARTMPHREADGIPGKVAWEASSKNSVLLRWLEPPDPNGLILKYEIKYRRLGEEATVLCVSRLRYAKFGGVHLALLPPGNYSARVRATSLAGNGSWTDSVAFYILGPEEEDAGGLH

SEQ ID NO: 2566 - protein, 589 aa, synthetic construct
  REGION 1..589: note = ISLR2 (Q6UXK2) SP+PP+ECD
MFPLRALWLVWALLGVAGSCPEPCACVDKYAHQFADCAYKELREVPEGLPANVTTLSLSANKITVLRRGAFADVTQVTSLWLAHNEVRTVEPGALAVLSQLKNLDLSHNFISSFPWSDLRNLSALQLLKMNHNRLGSLPRDALGALPDLRSLRINNNRLRTLAPGTFDALSALSHLQLYHNPFHCGCGLVWLQAWAASTRVSLPEPDSIACASPPALQGVPVYRLPALPCAPPSVHLSAEPPLEAPGTPLRAGLAFVLHCIADGHPTPRLQWQLQIPGGTVVLEPPVLSGEDDGVGAEEGEGEGDGDLLTQTQAQTPTPAPAWPAPPATPRFLALANGSLLVPLLSAKEAGVYTCRAHNELGANSTSIRVAVAATGPPKHAPGAGGEPDGQAPTSERKSTAKGRGNSVLPSKPEGKIKGQGLAKVSILGETETEPEEDTSEGEEAEDQILADPAEEQRCGNGDPSRYVSNHAFNQSAELKPHVFELGVIALDVAEREARVQLTPLAARWGPGPGGAGGAPRPGRRPLRLLYLCPAGGGAAVQWSRVEEGVNAYWFRGLRPGTNYSVCLALAGEACHVQVVFSTKKELPS

SEQ ID NO: 2567 - protein, 566 aa, synthetic construct
  REGION 1..566: note = ITFG1 (Q8TB96) SP+PP+ECD
MAAAGRLPSSWALFSPLLAGLALLGVGPVPARALHNVTAELFGAEAWGTLAAFGDLNSDKQTDLFVLRERNDLIVFLADQNAPYFKPKVKVSFKNHSALITSVVPGDYDGDSQMDVLLTYLPKNYAKSELGAVIFWGQNQTLDPNNMTILNRTFQDEPLIMDFNGDLIPDIFGITNESNQPQILLGGNLSWHPALTTTSKMRIPHSHAFIDLTEDFTADLFLTTLNATTSTFQFEIWENLDGNFSVSTILEKPQNMMVVGQSAFADFDGDGHMDHLLPGCEDKNCQKSTIYLVRSGMKQWVPVLQDFSNKGTLWGFVPFVDEQQPTEIPIPITLHIGDYNMDGYPDALVILKNTSGSNQQAFLLENVPCNNASCEEARRMFKVYWELTDLNQIKDAMVATFFDIYEDGILDIVVLSKGYTKNDFAIHTLKNNFEADAYFVKVIVLSGLCSNDCPRKITPFGVNQPGPYIMYTTVDANGYLKNGSAGQLSQSAHLALQLPYNVLGLGRSANFLDHLYVGIPRPSGEKSIRKQEWTAIIPNSQLIVIPYPHNVPRSWSAKLYLTPSNI

SEQ ID NO: 2568 - protein, 1141 aa, synthetic construct
  REGION 1..1141: note = ITGA1 (P56199) SP+PP+ECD
MAPRPRARPGVAVACCWLLTVVLRCCVSFNVDVKNSMTFSGPVEDMFGYTVQQYENEEGKWVLIGSPLVGQPKNRTGDVYKCPVGRGESLPCVKLDLPVNTSIPNVTEVKENMTFGSTLVTNPNGGFLACGPLYAYRCGHLHYTTGICSDVSPTFQVVNSIAPVQECSTQLDIVIVLDGSNSIYPWDSVTAFLNDLLERMDIGPKQTQVGIVQYGENVTHEFNLNKYSSTEEVLVAAKKIVQRGGRQTMTALGIDTARKEAFTEARGARRGVKKVMVIVTDGESHDNHRLKKVIQDCEDENIQRFSIAILGSYNRGNLSTEKFVEEIKSIASEPTEKHFFNVSDELALVTIVKTLGERIFALEATADQSAASFEMEMSQTGFSAHYSQDWVMLGAVGAYDWNGTVVMQKASQIIIPRNTTFNVESTKKNEPLASYLGYTVNSATASSGDVLYIAGQPRYNHTGQVIIYRMEDGNIKILQTLSGEQIGSYFGSILTTTDIDKDSNTDILLVGAPMYMGTEKEEQGKVYVYALNQTRFEYQMSLEPIKQTCCSSRQHNSCTTENKNEPCGARFGTAIAAVKDLNLDGFNDIVIGAPLEDDHGGAVYIYHGSGKTIRKEYAQRIPSGGDGKTLKFFGQSIHGEMDLNGDGLTDVTIGGLGGAALFWSRDVAVVKVTMNFEPNKVNIQKKNCHMEGKETVCINATVCFDVKLKSKEDTIYEADLQYRVTLDSLRQISRSFFSGTQERKVQRNITVRKSECTKHSFYMLDKHDFQDSVRITLDFNLTDPENGPVLDDSLPNSVHEYIPFAKDCGNKEKCISDLSLHVATTEKDLLIVRSQNDKFNVSLTVKNTKDSAYNTRTIVHYSPNLVFSGIEAIQKDSCESNHNITCKVGYPFLRRGEMVTFKILFQFNTSYLMENVTIYLSATSDSEEPPETLSDNVVNISIPVKYEVGLQFYSSASEYHISIAANETVPEVINSTEDIGNEINIFYLIRKSGSFPMPELKLSISFPNMTSNGYPVLYPTGLSSSENANCRPHIFEDPFSINSGKKMTTSTDHLKRGTILDCNTCKFATITCNLTSSDISQVNVSLILWKPTFIKSYFSSLNLTIRGELRSENASLVLSSSNQKRELAIQISKDGLPGRVP

SEQ ID NO: 2569 - protein, 1122 aa, synthetic construct
  REGION 1..1122: note = ITGA10 (O75578) SP+PP+ECD
MELPFVTHLFLPLVFLTGLCSPFNLDEHHPRLFPGPPEAEFGYSVLQHVGGGQRWMLVGAPWDGPSGDRRGDVYRCPVGGAHNAPCAKGHLGDYQLGNSSHPAVNMHLGMSLLETDGDGGFMACAPLWSRACGSSVFSSGICARVDASFQPQGSLAPTAQRCPTYMDVVIVLDGSNSIYPWSEVQTFLRRLVGKLFIDPEQIQVGLVQYGESPVHEWSLGDFRTKEEVVRAAKNLSRREGRETKTAQAIMVACTEGFSQSHGGRPEAARLLVVVTDGESHDGEELPAALKACEAGRVTRYGIAVLGHYLRRQRDPSSFLREIRTIASDPDERFFFNVTDEAALTDIVDALGDRIFGLEGSHAENESSFGLEMSQIGFSTHRLKDGILFGMVGAYDWGGSVLWLEGGHRLFPPRMALEDEFPPALQNHAAYLGYSVSSMLLRGGRRLFLSGAPRFRHRGKVIAFQLKKDGAVRVAQSLQGEQIGSYFGSELCPLDTDRDGTTDVLLVAAPMFLGPQNKETGRVYVYLVGQQSLLTLQGTLQPEPPQDARFGFAMGALPDLNQDGFADVAVGAPLEDGHQGALYLYHGTQSGVRPHPAQRIAAASMPHALSYFGRSVDGRLDLDGDDLVDVAVGAQGAAILLSSRPIVHLTPSLEVTPQAISVVQRDCRRRGQEAVCLTAALCFQVTSRTPGRWDHQFYMRFTASLDEWTAGARAAFDGSGQRLSPRRLRLSVGNVTCEQLHFHVLDTSDYLRPVALTVTFALDNTTKPGPVLNEGSPTSIQKLVPFSKDCGPDNECVTDLVLQVNMDIRGSRKAPFVVRGGRRKVLVSTTLENRKENAYNTSLSLIFSRNLHLASLTPQRESPIKVECAAPSAHARLCSVGHPVFQTGAKVTFLLEFEFSCSSLLSQVFVKLTASSDSLERNGTLQDNTAQTSAYIQYEPHLLFSSESTLHRYEVHPYGTLPVGPGPEFKTTLRVQNLGCYVVSGLIISALLPAVAHGGNYFLSLSQVITNNASCIVQNLTEPPGPPVHPEELQHTNRLNGSNTQCQVVRCHLGQLAKGTEVSVGLLRLVHNEFFRRAKFKSLTVVSTFELGTEEGSVLQLTEASRWSESLLEVVQTRPILIS

SEQ ID NO: 2570 - protein, 1141 aa, synthetic construct
  REGION 1..1141: note = ITGA11 (Q9UKX5) SP+PP+ECD
MDLPRGLVVAWALSLWPGFTDTFNMDTRKPRVIPGSRTAFFGYTVQQHDISGNKWLVVGAPLETNGYQKTGDVYKCPVIHGNCTKLNLGRVTLSNVSERKDNMRLGLSLATNPKDNSFLACSPLWSHECGSSYYTTGMCSRVNSNFRFSKTVAPALQRCQTYMDIVIVLDGSNSIYPWVEVQHFLINILKKFYIGPGQIQVGVVQYGEDVVHEFHLNDYRSVKDVVEAASHIEQRGGTETRTAFGIEFARSEAFQKGGRKGAKKVMIVITDGESHDSPDLEKVIQQSERDNVTRYAVAVLGYYNRRGINPETFLNEIKYIASDPDDKHFFNVTDEAALKDIVDALGDRIFSLEGTNKNETSFGLEMSQTGFSSHVVEDGVLLGAVGAYDWNGAVLKETSAGKVIPLRESYLKEFPEELKNHGAYLGYTVTSVVSSRQGRVYVAGAPRFNHTGKVILFTMHNNRSLTIHQAMRGQQIGSYFGSEITSVDIDGDGVTDVLLVGAPMYFNEGRERGKVYVYELRQNLFVYNGTLKDSHSYQNARFGSSIASVRDLNQDSYNDVVVGAPLEDNHAGAIYIFHGFRGSILKTPKQRITASELATGLQYFGCSIHGQLDLNEDGLIDLAVGALGNAVILWSRPVVQINASLHFEPSKINIFHRDCKRSGRDATCLAAFLCFTPIFLAPHFQTTTVGIRYNATMDERRYTPRAHLDEGGDRFTNRAVLLSSGQELCERINFHVLDTADYVKPVTFSVEYSLEDPDHGPMLDDGWPTTLRVSVPFWNGCNEDEHCVPDLVLDARSDLPTAMEYCQRVLRKPAQDCSAYTLSFDTTVFIIESTRQRVAVEATLENRGENAYSTVLNISQSANLQFASLIQKEDSDGSIECVNEERRLQKQVCNVSYPFFRAKAKVAFRLDFEFSKSIFLHHLEIELAAGSDSNERDSTKEDNVAPLRFHLKYEADVLFTRSSSLSHYEVKPNSSLERYDGIGPPFSCIFRIQNLGLFPIHGMMMKITIPIATRSGNRLLKLRDFLTDEANTSCNIWGNSTEYRPTPVEEDLRRAPQLNHSNSDVVSINCNIRLVPNQEINFHLLGNLWLRSLKALKYKSMKIMVNAALQRQFHSPFIFREEDPSRQIVFEISKQEDWQVP

SEQ ID NO: 2571 - protein, 1132 aa, synthetic construct
  REGION 1..1132: note = ITGA2 (P17301) SP+PP+ECD
MGPERTGAAPLPLLLVLALSQGILNCCLAYNVGLPEAKIFSGPSSEQFGYAVQQFINPKGNWLLVGSPWSGFPENRMGDVYKCPVDLSTATCEKLNLQTSTSIPNVTEMKTNMSLGLILTRNMGTGGFLTCGPLWAQQCGNQYYTTGVCSDISPDFQLSASFSPATQPCPSLIDVVVVCDESNSIYPWDAVKNFLEKFVQGLDIGPTKTQVGLIQYANNPRVVFNLNTYKTKEEMIVATSQTSQYGGDLTNTFGAIQYARKYAYSAASGGRRSATKVMVVVTDGESHDGSMLKAVIDQCNHDNILRFGIAVLGYLNRNALDTKNLIKEIKAIASIPTERYFFNVSDEAALLEKAGTLGEQIFSIEGTVQGGDNFQMEMSQVGFSADYSSQNDILMLGAVGAFGWSGTIVQKTSHGHLIFPKQAFDQILQDRNHSSYLGYSVAAISTGESTHFVAGAPRANYTGQIVLYSVNENGNITVIQAHRGDQIGSYFGSVLCSVDVDKDTITDVLLVGAPMYMSDLKKEEGRVYLFTIKKGILGQHQFLEGPEGIENTRFGSAIAALSDINMDGFNDVIVGSPLENQNSGAVYIYNGHQGTIRTKYSQKILGSDGAFRSHLQYFGRSLDGYGDLNGDSITDVSIGAFGQVVQLWSQSIADVAIEASFTPEKITLVNKNAQIILKLCFSAKFRPTKQNNQVAIVYNITLDADGFSSRVTSRGLFKENNERCLQKNMVVNQAQSCPEHIIYIQEPSDVVNSLDLRVDISLENPGTSPALEAYSETAKVFSIPFHKDCGEDGLCISDLVLDVRQIPAAQEQPFIVSNQNKRLTFSVTLKNKRESAYNTGIVVDFSENLFFASFSLPVDGTEVTCQVAASQKSVACDVGYPALKREQQVTFTINFDFNLQNLQNQASLSFQALSESQEENKADNLVNLKIPLLYDAEIHLTRSTNINFYEISSDGNVPSIVHSFEDVGPKFIFSLKVTTGSVPVSMATVIIHIPQYTKEKNPLMYLTGVQTDKAGDISCNADINPLKIGQTSSSVSFKSENFRHTKELNCRTASCSNVTCWLKDVHMKGEYFVNVTTRIWNGTFASSTFQTVQLTAAAEINTYNPEIYVIEDNTVTIPLMIMKPDEKAEVPT

SEQ ID NO: 2572 - protein, 993 aa, synthetic construct
  REGION 1..993: note = ITGA2B (P08514) SP+PP+ECD
MARALCPLQALWLLEWVLLLLGPCAAPPAWALNLDPVQLTFYAGPNGSQFGFSLDFHKDSHGRVAIVVGAPRTLGPSQEETGGVFLCPWRAEGGQCPSLLFDLRDETRNVGSQTLQTFKARQGLGASVVSWSDVIVACAPWQHWNVLEKTEEAEKTPVGSCFLAQPESGRRAEYSPCRGNTLSRIYVENDFSWDKRYCEAGFSSVVTQAGELVLGAPGGYYFLGLLAQAPVADIFSSYRPGILLWHVSSQSLSFDSSNPEYFDGYWGYSVAVGEFDGDLNTTEYVVGAPTWSWTLGAVEILDSYYQRLHRLRGEQMASYFGHSVAVTDVNGDGRHDLLVGAPLYMESRADRKLAEVGRVYLFLQPRGPHALGAPSLLLTGTQLYGRFGSAIAPLGDLDRDGYNDIAVAAPYGGPSGRGQVLVFLGQSEGLRSRPSQVLDSPFPTGSAFGFSLRGAVDIDDNGYPDLIVGAYGANQVAVYRAQPVVKASVQLLVQDSLNPAVKSCVLPQTKTPVSCFNIQMCVGATGHNIPQKLSLNAELQLDRQKPRQGRRVLLLGSQQAGTTLNLDLGGKHSPICHTTMAFLRDEADFRDKLSPIVLSLNVSLPPTEAGMAPAVVLHGDTHVQEQTRIVLDCGEDDVCVPQLQLTASVTGSPLLVGADNVLELQMDAANEGEGAYEAELAVHLPQGAHYMRALSNVEGFERLICNQKKENETRVVLCELGNPMKKNAQIGIAMLVSVGNLEEAGESVSFQLQIRSKNSQNPNSKIVLLDVPVRAEAQVELRGNSFPASLVVAAEEGEREQNSLDSWGPKVEHTYELHNNGPGTVNGLHLSIHLPGQSQPSDLLYILDIQPQGGLQCFPQPPVNPLKVDWGLPIPSPSPIHPAHHKRDRRQIFLPEPEQPSRLQDPVLVSCDSAPCTVVQCDLQEMARGQRAMVTVLAFLWLPSLYQRPLDQFVLQSHAWFNVSSLPYAVPPLSLPRGEAQVWTQLLRALEER

SEQ ID NO: 2573 - protein, 991 aa, synthetic construct
  REGION 1..991: note = ITGA3 (P26006) SP+PP+ECD
MGPGPSRAPRAPRLMLCALALMVAAGGCVVSAFNLDTRFLVVKEAGNPGSLFGYSVALHRQTERQQRYLLLAGAPRELAVPDGYTNRTGAVYLCPLTAHKDDCERMNITVKNDPGHHIIEDMWLGVTVASQGPAGRVLVCAHRYTQVLWSGSEDQRRMVGKCYVRGNDLELDSSDDWQTYHNEMCNSNTDYLETGMCQLGTSGGFTQNTVYFGAPGAYNWKGNSYMIQRKEWDLSEYSYKDPEDQGNLYIGYTMQVGSFILHPKNITIVTGAPRHRHMGAVFLLSQEAGGDLRRRQVLEGSQVGAYFGSAIALADLNNDGWQDLLVGAPYYFERKEEVGGAIYVFMNQAGTSFPAHPSLLLHGPSGSAFGLSVASIGDINQDGFQDIAVGAPFEGLGKVYIYHSSSKGLLRQPQQVIHGEKLGLPGLATFGYSLSGQMDVDENFYPDLLVGSLSDHIVLLRARPVINIVHKTLVPRPAVLDPALCTATSCVQVELCFAYNQSAGNPNYRRNITLAYTLEADRDRRPPRLRFAGSESAVFHGFFSMPEMRCQKLELLLMDNLRDKLRPIIISMNYSLPLRMPDRPRLGLRSLDAYPILNQAQALENHTEVQFQKECGPDNKCESNLQMRAAFVSEQQQKLSRLQYSRDVRKLLLSINVTNTRTSERSGEDAHEALLTLVVPPALLLSSVRPPGACQANETIFCELGNPFKRNQRMELLIAFEVIGVTLHTRDLQVQLQLSTSSHQDNLWPMILTLLVDYTLQTSLSMVNHRLQSFFGGTVMGESGMKTVEDVGSPLKYEFQVGPMGEGLVGLGTLVLGLEWPYEVSNGKWLLYPTEITVHGNGSWPCRPPGDLINPLNLTLSDPGDRPSSPQRRRRQLDPGGGQGPPPVTLAAAKKAKSETVLTCATGRAHCVWLECPIPDAPVVTNVTVKARVWNSTFIEDYRDFDRVRVNGWATLFLRTSIPTINMENKTTWFSVDIDSELVEELPAEIE

SEQ ID NO: 2574 - protein, 976 aa, synthetic construct
  REGION 1..976: note = ITGA4 (P13612) SP+PP+ECD
MAWEARREPGPRRAAVRETVMLLLCLGVPTGRPNVDTESALLYQGPHNTLFGYSVVLHSHGANRWLLVGAPTANWLANASVINPGAIYRCRIGKNPGQTCEQLQLGSPNGEPCGKTCLEERDNQWLGVTLSRQPGENGSIVTCGHRWKNIFYIKNENKLPTGGCYGVPPDLRTELSKRIAPCYQDYVKKFGENFASCQAGISSFYTKDLIVMGAPGSSYWTGSLFVYNITTNKYKAFLDKQNQVKFGSYLGYSVGAGHFRSQHTTEVVGGAPQHEQIGKAYIFSIDEKELNILHEMKGKKLGSYFGASVCAVDLNADGFSDLLVGAPMQSTIREEGRVFVYINSGSGAVMNAMETNLVGSDKYAARFGESIVNLGDIDNDGFEDVAIGAPQEDDLQGAIYIYNGRADGISSTFSQRIEGLQISKSLSMFGQSISGQIDADNNGYVDVAVGAFRSDSAVLLRTRPVVIVDASLSHPESVNRTKFDCVENGWPSVCIDLTLCFSYKGKEVPGYIVLFYNMSLDVNRKAESPPRFYFSSNGTSDVITGSIQVSSREANCRTHQAFMRKDVRDILTPIQIEAAYHLGPHVISKRSTEEFPPLQPILQQKKEKDIMKKTINFARFCAHENCSADLQVSAKIGFLKPHENKTYLAVGSMKTLMLNVSLFNAGDDAYETTLHVKLPVGLYFIKILELEEKQINCEVTDNSGVVQLDCSIGYIYVDHLSRIDISFLLDVSSLSRAEEDLSITVHATCENEEEMDNLKHSRVTVAIPLKYEVKLTVHGFVNPTSFVYGSNDENEPETCMVEKMNLTFHVINTGNSMAPNVSVEIMVPNSFSPQTDKLFNILDVQTTTGECHFENYQRVCALEQQKSAMQTLKGIVRFLSKTDKRLLYCIKADPHCLNFLCNFGKMESGKEASVHIQLEGRPSILEMDETSALKFEIRATGFPEPNPRVIELNKDENVAHVLLEGLHHQRPKRYFT

SEQ ID NO: 2575 - protein, 995 aa, synthetic construct
  REGION 1..995: note = ITGA5 (P08648) SP+PP+ECD
MGSRTPESPLHAVQLRWGPRRRPPLLPLLLLLLPPPPRVGGFNLDAEAPAVLSGPPGSFFGFSVEFYRPGTDGVSVLVGAPKANTSQPGVLQGGAVYLCPWGASPTQCTPIEFDSKGSRLLESSLSSSEGEEPVEYKSLQWFGATVRAHGSSILACAPLYSWRTEKEPLSDPVGTCYLSTDNFTRILEYAPCRSDFSWAAGQGYCQGGFSAEFTKTGRVVLGGPGSYFWQGQILSATQEQIAESYYPEYLINLVQGQLQTRQASSIYDDSYLGYSVAVGEFSGDDTEDFVAGVPKGNLTYGYVTILNGSDIRSLYNFSGEQMASYFGYAVAATDVNGDGLDDLLVGAPLLMDRTPDGRPQEVGRVYVYLQHPAGIEPTPTLTLTGHDEFGRFGSSLTPLGDLDQDGYNDVAIGAPFGGETQQGVVFVFPGGPGGLGSKPSQVLQPLWAASHTPDFFGSALRGGRDLDGNGYPDLIVGSFGVDKAVVYRGRPIVSASASLTIFPAMFNPEERSCSLEGNPVACINLSFCLNASGKHVADSIGFTVELQLDWQKQKGGVRRALFLASRQATLTQTLLIQNGAREDCREMKIYLRNESEFRDKLSPIHIALNFSLDPQAPVDSHGLRPALHYQSKSRIEDKAQILLDCGEDNICVPDLQLEVFGEQNHVYLGDKNALNLTFHAQNVGEGGAYEAELRVTAPPEAEYSGLVRHPGNFSSLSCDYFAVNQSRLLVCDLGNPMKAGASLWGGLRFTVPHLRDTKKTIQFDFQILSKNLNNSQSDVVSFRLSVEAQAQVTLNGVSKPEAVLFPVSDWHPRDQPQKEEDLGPAVHHVYELINQGPSSISQGVLELSCPQALEGQQLLYVTRVTGLNCTTNHPINPKGLELDPEGSLHHQQKREAPSRSSASSGPQILKCPEAECFRLRCELGPLHQQESQSLQLHFRVWAKTFLQREHQPFSLQCEAVYKALKMPYRILPRQLPQKERQVATAVQWTKAEGSY

SEQ ID NO: 2576 - protein, 1050 aa, synthetic construct
  REGION 1..1050: note = ITGA6 (P23229) SP+PP+ECD
MAAAGQLCLLYLSAGLLSRLGAAFNLDTREDNVIRKYGDPGSLFGFSLAMHWQLQPEDKRLLLVGAPRAEALPLQRANRTGGLYSCDITARGPCTRIEFDNDADPTSESKEDQWMGVTVQSQGPGGKVVTCAHRYEKRQHVNTKQESRDIFGRCYVLSQNLRIEDDMDGGDWSFCDGRLRGHEKFGSCQQGVAATFTKDFHYIVFGAPGTYNWKGIVRVEQKNNTFFDMNIFEDGPYEVGGETEHDESLVPVPANSYLGLLFLTSVSYTDPDQFVYKTRPPREQPDTFPDVMMNSYLGFSLDSGKGIVSKDEITFVSGAPRANHSGAVVLLKRDMKSAHLLPEHIFDGEGLASSFGYDVAVVDLNKDGWQDIVIGAPQYFDRDGEVGGAVYVYMNQQGRWNNVKPIRLNGTKDSMFGIAVKNIGDINQDGYPDIAVGAPYDDLGKVFIYHGSANGINTKPTQVLKGISPYFGYSIAGNMDLDRNSYPDVAVGSLSDSVTIFRSRPVINIQKTITVTPNRIDLRQKTACGAPSGICLQVKSCFEYTANPAGYNPSISIVGTLEAEKERRKSGLSSRVQFRNQGSEPKYTQELTLKRQKQKVCMEETLWLQDNIRDKLRPIPITASVEIQEPSSRRRVNSLPEVLPILNSDEPKTAHIDVHFLKEGCGDDNVCNSNLKLEYKFCTREGNQDKFSYLPIQKGVPELVLKDQKDIALEITVTNSPSNPRNPTKDGDDAHEAKLIATFPDTLTYSAYRELRAFPEKQLSCVANQNGSQADCELGNPFKRNSNVTFYLVLSTTEVTFDTPDLDINLKLETTSNQDNLAPITAKAKVVIELLLSVSGVAKPSQVYFGGTVVGEQAMKSEDEVGSLIEYEFRVINLGKPLTNLGTATLNIQWPKEISNGKWLLYLVKVESKGLEKVTCEPQKEINSLNLTESHNSRKKREITEKQIDDNRKFSLFAERKYQTLNCSVNVNCVNIRCPLRGLDSKASLILRSRLWNSTFLEEYSKLNYLDILMRAFIDVTAAAENIRLPNAGTQVRVTVFPSKTVAQYS

SEQ ID NO: 2577 - protein, 1082 aa, synthetic construct
  REGION 1..1082: note = ITGA7 (Q13683) SP+PP+ECD
MAGARSRDPWGASGICYLFGSLLVELLFSRAVAFNLDVMGALRKEGEPGSLFGFSVALHRQLQPRPQSWLLVGAPQALALPGQQANRTGGLFACPLSLEETDCYRVDIDQGADMQKESKENQWLGVSVRSQGPGGKIVTCAHRYEARQRVDQILETRDMIGRCFVLSQDLAIRDELDGGEWKFCEGRPQGHEQFGFCQQGTAAAFSPDSHYLLFGAPGTYNWKGTARVELCAQGSADLAHLDDGPYEAGGEKEQDPRLIPVPANSYFGLLFVTNIDSSDPDQLVYKTLDPADRLPGPAGDLALNSYLGFSIDSGKGLVRAEELSFVAGAPRANHKGAVVILRKDSASRLVPEVMLSGERLTSGFGYSLAVADLNSDGWPDLIVGAPYFFERQEELGGAVYVYLNQGGHWAGISPLRLCGSPDSMFGISLAVLGDLNQDGFPDIAVGAPFDGDGKVFIYHGSSLGVVAKPSQVLEGEAVGIKSFGYSLSGSLDMDGNQYPDLLVGSLADTAVLFRARPILHVSHEVSIAPRSIDLEQPNCAGGHSVCVDLRVCFSYIAVPSSYSPTVALDYVLDADTDRRLRGQVPRVTFLSRNLEEPKHQASGTVWLKHQHDRVCGDAMFQLQENVKDKLRAIVVTLSYSLQTPRLRRQAPGQGLPPVAPILNAHQPSTQRAEIHFLKQGCGEDKICQSNLQLVRARFCTRVSDTEFQPLPMDVDGTTALFALSGQPVIGLELMVTNLPSDPAQPQADGDDAHEAQLLVMLPDSLHYSGVRALDPAEKPLCLSNENASHVECELGNPMKRGAQVTFYLILSTSGISIETTELEVELLLATISEQELHPVSARARVFIELPLSIAGMAIPQQLFFSGVVRGERAMQSERDVGSKVKYEVTVSNQGQSLRTLGSAFLNIMWPHEIANGKWLLYPMQVELEGGQGPGQKGLCSPRPNILHLDVDSRDRRRRELEPPEQQEPGERQEPSMSWWPVSSAEKKKNITLDCARGTANCVVFSCPLYSFDRAAVLHVWGRLWNSTFLEEYSAVKSLEVIVRANITVKSSIKNLMLRDASTVIPVMVYLDPMAVVAEGVPW

SEQ ID NO: 2578 - protein, 1012 aa, synthetic construct
  REGION 1..1012: note = ITGA8 (P53708) SP+PP+ECD
MSPGASRGPRGSQAPLIAPLCCAAAALGMLLWSPACQAFNLDVEKLTVYSGPKGSYFGYAVDFHIPDARTASVLVGAPKANTSQPDIVEGGAVYYCPWPAEGSAQCRQIPFDTTNNRKIRVNGTKEPIEFKSNQWFGATVKAHKGKVVACAPLYHWRTLKPTPEKDPVGTCYVAIQNFSAYAEFSPCRNSNADPEGQGYCQAGFSLDFYKNGDLIVGGPGSFYWQGQVITASVADIIANYSFKDILRKLAGEKQTEVAPASYDDSYLGYSVAAGEFTGDSQQELVAGIPRGAQNFGYVSIINSTDMTFIQNFTGEQMASYFGYTVVVSDVNSDGLDDVLVGAPLFMEREFESNPREVGQIYLYLQVSSLLFRDPQILTGTETFGRFGSAMAHLGDLNQDGYNDIAIGVPFAGKDQRGKVLIYNGNKDGLNTKPSQVLQGVWASHAVPSGFGFTLRGDSDIDKNDYPDLIVGAFGTGKVAVYRARPVVTVDAQLLLHPMIINLENKTCQVPDSMTSAACFSLRVCASVTGQSIANTIVLMAEVQLDSLKQKGAIKRTLFLDNHQAHRVFPLVIKRQKSHQCQDFIVYLRDETEFRDKLSPINISLNYSLDESTFKEGLEVKPILNYYRENIVSEQAHILVDCGEDNLCVPDLKLSARPDKHQVIIGDENHLMLIINARNEGEGAYEAELFVMIPEEADYVGIERNNKGFRPLSCEYKMENVTRMVVCDLGNPMVSGTNYSLGLRFAVPRLEKTNMSINFDLQIRSSNKDNPDSNFVSLQINITAVAQVEIRGVSHPPQIVLPIHNWEPEEEPHKEEEVGPLVEHIYELHNIGPSTISDTILEVGWPFSARDEFLLYIFHIQTLGPLQCQPNPNINPQDIKPAASPEDTPELSAFLRNSTIPHLVRKRDVHVVEFHRQSPAKILNCTNIECLQISCAVGRLEGGESAVLKVRSRLWAHTFLQRKNDPYALASLVSFEVKKMPYTDQPAKLPEGSIVIKTSVIWATPNVSFSIPL

SEQ ID NO: 2579 - protein, 981 aa, synthetic construct
  REGION 1..981: note = ITGA9 (Q13797) SP+PP+ECD
MGGPAAPRGAGRLRALLLALVVAGIPAGAYNLDPQRPVHFQGPADSFFGYAVLEHFHDNTRWVLVGAPKADSKYSPSVKSPGAVFKCRVHTNPDRRCTELDMARGKNRGTSCGKTCREDRDDEWMGVSLARQPKADGRVLACAHRWKNIYYEADHILPHGFCYIIPSNLQAKGRTLIPCYEEYKKKYGEEHGSCQAGIAGFFTEELVVMGAPGSFYWAGTIKVLNLTDNTYLKLNDEVIMNRRYTYLGYAVTAGHFSHPSTIDVVGGAPQDKGIGKVYIFRADRRSGTLIKIFQASGKKMGSYFGSSLCAVDLNGDGLSDLLVGAPMFSEIRDEGQVTVYINRGNGALEEQLALTGDGAYNAHFGESIASLDDLDNDGFPDVAIGAPKEDDFAGAVYIYHGDAGGIVPQYSMKLSGQKINPVLRMFGQSISGGIDMDGNGYPDVTVGAFMSDSVVLLRARPVITVDVSIFLPGSINITAPQCHDGQQPVNCLNVTTCFSFHGKHVPGEIGLNYVLMADVAKKEKGQMPRVYFVLLGETMGQVTEKLQLTYMEETCRHYVAHVKRRVQDVISPIVFEAAYSLSEHVTGEEERELPPLTPVLRWKKGQKIAQKNQTVFERNCRSEDCAADLQLQGKLLLSSMDEKTLYLALGAVKNISLNISISNLGDDAYDANVSFNVSRELFFINMWQKEEMGISCELLESDFLKCSVGFPFMRSKSKYEFSVIFDTSHLSGEEEVLSFIVTAQSGNTERSESLHDNTLVLMVPLMHEVDTSITGIMSPTSFVYGESVDAANFIQLDDLECHFQPINITLQVYNTGPSTLPGSSVSISFPNRLSSGGAEMFHVQEMVVGQEKGNCSFQKNPTPCIIPQEQENIFHTIFAFFTKSGRKVLDCEKPGISCLTAHCNFSALAKEESRTIDIYMLLNTEILKKDSSSVIQFMSRAKVKVDPALRVVEIAHGNPEEVTVVFEALHNLEPRGYVVGW

SEQ ID NO: 2580 - protein, 1099 aa, synthetic construct
  REGION 1..1099: note = ITGAD (Q13349) SP+PP+ECD
MTFGTVLLLSVLASYHGFNLDVEEPTIFQEDAGGFGQSVVQFGGSRLVVGAPLEVVAANQTGRLYDCAAATGMCQPIPLHIRPEAVNMSLGLTLAASTNGSRLLACGPTLHRVCGENSYSKGSCLLLGSRWEIIQTVPDATPECPHQEMDIVFLIDGSGSIDQNDFNQMKGFVQAVMGQFEGTDTLFALMQYSNLLKIHFTFTQFRTSPSQQSLVDPIVQLKGLTFTATGILTVVTQLFHHKNGARKSAKKILIVITDGQKYKDPLEYSDVIPQAEKAGIIRYAIGVGHAFQGPTARQELNTISSAPPQDHVFKVDNFAALGSIQKQLQEKIYAVEGTQSRASSSFQHEMSQEGFSTALTMDGLFLGAVGSFSWSGGAFLYPPNMSPTFINMSQENVDMRDSYLGYSTELALWKGVQNLVLGAPRYQHTGKAVIFTQVSRQWRKKAEVTGTQIGSYFGASLCSVDVDSDGSTDLILIGAPHYYEQTRGGQVSVCPLPRGRVQWQCDAVLRGEQGHPWGRFGAALTVLGDVNEDKLIDVAIGAPGEQENRGAVYLFHGASESGISPSHSQRIASSQLSPRLQYFGQALSGGQDLTQDGLMDLAVGARGQVLLLRSLPVLKVGVAMRFSPVEVAKAVYRCWEEKPSALEAGDATVCLTIQKSSLDQLGDIQSSVRFDLALDPGRLTSRAIFNETKNPTLTRRKTLGLGIHCETLKLLLPDCVEDVVSPIILHLNFSLVREPIPSPQNLRPVLAVGSQDLFTASLPFEKNCGQDGLCEGDLGVTLSFSGLQTLTVGSSLELNVIVTVWNAGEDSYGTVVSLYYPAGLSHRRVSGAQKQPHQSALRLACETVPTEDEGLRSSRCSVNHPIFHEGSNGTFIVTFDVSYKATLGDRMLMRASASSENNKASSSKATFQLELPVKYAVYTMISRQEESTKYFNFATSDEKKMKEAEHRYRVNNLSQRDLAISINFWVPVLLNGVAVWDVVMEAPSQSLPCVSERKPPQHSDFLTQISRSPMLDCSIADCLQFRCDVPSFSVQEELDFTLKGNLSFGWVRETLQKKVLVVSVAEITFDTSVYSQLPGQEAFMRAQMEMVLEEDEVYN

SEQ ID NO: 2581 - protein, 1124 aa, synthetic construct
  REGION 1..1124: note = ITGAE (P38570) SP+PP+ECD
MWLFHTLLCIASLALLAAFNVDVARPWLTPKGGAPFVLSSLLHQDPSTNQTWLLVTSPRTKRTPGPLHRCSLVQDEILCHPVEHVPIPKGRHRGVTVVRSHHGVLICIQVLVRRPHSLSSELTGTCSLLGPDLRPQAQANFFDLENLLDPDARVDTGDCYSNKEGGGEDDVNTARQRRALEKEEEEDKEEEEDEEEEEAGTEIAIILDGSGSIDPPDFQRAKDFISNMMRNFYEKCFECNFALVQYGGVIQTEFDLRDSQDVMASLARVQNITQVGSVTKTASAMQHVLDSIFTSSHGSRRKASKVMVVLTDGGIFEDPLNLTTVINSPKMQGVERFAIGVGEEFKSARTARELNLIASDPDETHAFKVTNYMALDGLLSKLRYNIISMEGTVGDALHYQLAQIGFSAQILDERQVLLGAVGAFDWSGGALLYDTRSRRGRFLNQTAAAAADAEAAQYSYLGYAVAVLHKTCSLSYIAGAPRYKHHGAVFELQKEGREASFLPVLEGEQMGSYFGSELCPVDIDMDGSTDFLLVAAPFYHVHGEEGRVYVYRLSEQDGSFSLARILSGHPGFTNARFGFAMAAMGDLSQDKLTDVAIGAPLEGFGADDGASFGSVYIYNGHWDGLSASPSQRIRASTVAPGLQYFGMSMAGGFDISGDGLADITVGTLGQAVVFRSRPVVRLKVSMAFTPSALPIGFNGVVNVRLCFEISSVTTASESGLREALLNFTLDVDVGKQRRRLQCSDVRSCLGCLREWSSGSQLCEDLLLMPTEGELCEEDCFSNASVKVSYQLQTPEGQTDHPQPILDRYTEPFAIFQLPYEKACKNKLFCVAELQLATTVSQQELVVGLTKELTLNINLTNSGEDSYMTSMALNYPRNLQLKRMQKPPSPNIQCDDPQPVASVLIMNCRIGHPVLKRSSAHVSVVWQLEENAFPNRTADITVTVTNSNERRSLANETHTLQFRHGFVAVLSKPSIMYVNTGQGLSHHKEFLFHVHGENLFGAEYQLQICVPTKLRGLQVVAVKKLTRTQASTVCTWSQERACAYSSVQHVEEWHSVSCVIASDKENVTVAAEISWDHSEELLKDVTELQILGEISFNKSLYEGLNAENHRTKITVVFLKDEKYHS

SEQ ID NO: 2582 - protein, 1090 aa, synthetic construct
  REGION 1..1090: note = ITGAL (P20701) SP+PP+ECD
MKDSCITVMAMALLSGFFFFAPASSYNLDVRGARSFSPPRAGRHFGYRVLQVGNGVIVGAPGEGNSTGSLYQCQSGTGHCLPVTLRGSNYTSKYLGMTLATDPTDGSILACDPGLSRTCDQNTYLSGLCYLFRQNLQGPMLQGRPGFQECIKGNVDLVFLFDGSMSLQPDEFQKILDFMKDVMKKLSNTSYQFAAVQFSTSYKTEFDFSDYVKRKDPDALLKHVKHMLLLTNTFGAINYVATEVFREELGARPDATKVLIIITDGEATDSGNIDAAKDIIRYIIGIGKHFQTKESQETLHKFASKPASEFVKILDTFEKLKDLFTELQKKIYVIEGTSKQDLTSFNMELSSSGISADLSRGHAVVGAVGAKDWAGGFLDLKADLQDDTFIGNEPLTPEVRAGYLGYTVTWLPSRQKTSLLASGAPRYQHMGRVLLFQEPQGGGHWSQVQTIHGTQIGSYFGGELCGVDVDQDGETELLLIGAPLFYGEQRGGRVFIYQRRQLGFEEVSELQGDPGYPLGRFGEAITALTDINGDGLVDVAVGAPLEEQGAVYIFNGRHGGLSPQPSQRIEGTQVLSGIQWFGRSIHGVKDLEGDGLADVAVGAESQMIVLSSRPVVDMVTLMSFSPAEIPVHEVECSYSTSNKMKEGVNITICFQIKSLIPQFQGRLVANLTYTLQLDGHRTRRRGLFPGGRHELRRNIAVTTSMSCTDFSFHFPVCVQDLISPINVSLNFSLWEEEGTPRDQRAQGKDIPPILRPSLHSETWEIPFEKNCGEDKKCEANLRVSFSPARSRALRLTAFASLSVELSLSNLEEDAYWVQLDLHFPPGLSFRKVEMLKPHSQIPVSCEELPEESRLLSRALSCNVSSPIFKAGHSVALQMMFNTLVNSSWGDSVELHANVTCNNEDSDLLEDNSATTIIPILYPINILIQDQEDSTLYVSFTPKGPKIHQVKHMYQVRIQPSIHDHNIPTLEAVVGVPQPPSEGPITHQWSVQMEPPVPCHYEDLERLPDAAEPCLPGALFRCPVVFRQEILVQVIGTLELVGEIEASSMFSLCSSLSISFNSSKHFHLYGSNASLAQVVMKVDVVYEKQML

SEQ ID NO: 2583 - protein, 1104 aa, synthetic construct
  REGION 1..1104: note = ITGAM (P11215) SP+PP+ECD
MALRVLLLTALTLCHGFNLDTENAMTFQENARGFGQSVVQLQGSRVVVGAPQEIVAANQRGSLYQCDYSTGSCEPIRLQVPVEAVNMSLGLSLAATTSPPQLLACGPTVHQTCSENTYVKGLCFLFGSNLRQQPQKFPEALRGCPQEDSDIAFLIDGSGSIIPHDFRRMKEFVSTVMEQLKKSKTLFSLMQYSEEFRIHFTFKEFQNNPNPRSLVKPITQLLGRTHTATGIRKVVRELFNITNGARKNAFKILVVITDGEKFGDPLGYEDVIPEADREGVIRYVIGVGDAFRSEKSRQELNTIASKPPRDHVFQVNNFEALKTIQNQLREKIFAIEGTQTGSSSSFEHEMSQEGFSAAITSNGPLLSTVGSYDWAGGVFLYTSKEKSTFINMTRVDSDMNDAYLGYAAAIILRNRVQSLVLGAPRYQHIGLVAMFRQNTGMWESNANVKGTQIGAYFGASLCSVDVDSNGSTDLVLIGAPHYYEQTRGGQVSVCPLPRGRARWQCDAVLYGEQGQPWGRFGAALTVLGDVNGDKLTDVAIGAPGEEDNRGAVYLFHGTSGSGISPSHSQRIAGSKLSPRLQYFGQSLSGGQDLTMDGLVDLTVGAQGHVLLLRSQPVLRVKAIMEFNPREVARNVFECNDQVVKGKEAGEVRVCLHVQKSTRDRLREGQIQSVVTYDLALDSGRPHSRAVFNETKNSTRRQTQVLGLTQTCETLKLQLPNCIEDPVSPIVLRLNFSLVGTPLSAFGNLRPVLAEDAQRLFTALFPFEKNCGNDNICQDDLSITFSFMSLDCLVVGGPREFNVTVTVRNDGEDSYRTQVTFFFPLDLSYRKVSTLQNQRSQRSWRLACESASSTEVSGALKSTSCSINHPIFPENSEVTFNITFDVDSKASLGNKLLLKANVTSENNMPRTNKTEFQLELPVKYAVYMVVTSHGVSTKYLNFTASENTSRVMQHQYQVSNLGQRSLPISLVFLVPVRLNQTVIWDRPQVTFSENLSSTCHTKERLPSHSDFLAELRKAPVVNCSIAVCQRIQCDIPFFGIQEEFNATLKGNLSFDWYIKTSHNHLLIVSTAEILFNDSVFTLLPGQGAFVRSQTETKVEPFEVPN

SEQ ID NO: 2584 - protein, 992 aa, synthetic construct
  REGION 1..992: note = ITGAV (P06756) SP+PP+ECD
MAFPPRRRLRLGPRGLPLLLSGLLLPLCRAFNLDVDSPAEYSGPEGSYFGFAVDFFVPSASSRMFLLVGAPKANTTQPGIVEGGQVLKCDWSSTRRCQPIEFDATGNRDYAKDDPLEFKSHQWFGASVRSKQDKILACAPLYHWRTEMKQEREPVGTCFLQDGTKTVEYAPCRSQDIDADGQGFCQGGFSIDFTKADRVLLGGPGSFYWQGQLISDQVAEIVSKYDPNVYSIKYNNQLATRTAQAIFDDSYLGYSVAVGDFNGDGIDDFVSGVPRAARTLGMVYIYDGKNMSSLYNFTGEQMAAYFGFSVAATDINGDDYADVFIGAPLFMDRGSDGKLQEVGQVSVSLQRASGDFQTTKLNGFEVFARFGSAIAPLGDLDQDGFNDIAIAAPYGGEDKKGIVYIFNGRSTGLNAVPSQILEGQWAARSMPPSFGYSMKGATDIDKNGYPDLIVGAFGVDRAILYRARPVITVNAGLEVYPSILNQDNKTCSLPGTALKVSCFNVRFCLKADGKGVLPRKLNFQVELLLDKLKQKGAIRRALFLYSRSPSHSKNMTISRGGLMQCEELIAYLRDESEFRDKLTPITIFMEYRLDYRTAADTTGLQPILNQFTPANISRQAHILLDCGEDNVCKPKLEVSVDSDQKKIYIGDDNPLTLIVKAQNQGEGAYEAELIVSIPLQADFIGVVRNNEALARLSCAFKTENQTRQVVCDLGNPMKAGTQLLAGLRFSVHQQSEMDTSVKFDLQIQSSNLFDKVSPVVSHKVDLAVLAAVEIRGVSSPDHVFLPIPNWEHKENPETEEDVGPVVQHIYELRNNGPSSFSKAMLHLQWPYKYNNNTLLYILHYDIDGPMNCTSDMEINPLRIKISSLQTTEKNDTVAGQGERDHLITKRDLALSEGDIHTLGCGVAQCLKIVCQVGRLDRGKSAILYVKSLLWTETFMNKENQNHSYSLKSSASFNVIEFPYKNLPIEDITNSTLVTTNVTWGIQPAPMPV

SEQ ID NO: 2585 - protein, 1107 aa, synthetic construct
  REGION 1..1107: note = ITGAX (P20702) SP+PP+ECD
MTRTRAALLLFTALATSLGFNLDTEELTAFRVDSAGFGDSVVQYANSWVVVGAPQKITAANQTGGLYQCGYSTGACEPIGLQVPPEAVNMSLGLSLASTTSPSQLLACGPTVHHECGRNMYLTGLCFLLGPTQLTQRLPVSRQECPRQEQDIVFLIDGSGSISSRNFATMMNFVRAVISQFQRPSTQFSLMQFSNKFQTHFTFEEFRRSSNPLSLLASVHQLQGFTYTATAIQNVVHRLFHASYGARRDAAKILIVITDGKKEGDSLDYKDVIPMADAAGIIRYAIGVGLAFQNRNSWKELNDIASKPSQEHIFKVEDFDALKDIQNQLKEKIFAIEGTETTSSSSFELEMAQEGFSAVFTPDGPVLGAVGSFTWSGGAFLYPPNMSPTFINMSQENVDMRDSYLGYSTELALWKGVQSLVLGAPRYQHTGKAVIFTQVSRQWRMKAEVTGTQIGSYFGASLCSVDVDSDGSTDLVLIGAPHYYEQTRGGQVSVCPLPRGWRRWWCDAVLYGEQGHPWGRFGAALTVLGDVNGDKLTDVVIGAPGEEENRGAVYLFHGVLGPSISPSHSQRIAGSQLSSRLQYFGQALSGGQDLTQDGLVDLAVGARGQVLLLRTRPVLWVGVSMQFIPAEIPRSAFECREQVVSEQTLVQSNICLYIDKRSKNLLGSRDLQSSVTLDLALDPGRLSPRATFQETKNRSLSRVRVLGLKAHCENFNLLLPSCVEDSVTPITLRLNFTLVGKPLLAFRNLRPMLAADAQRYFTASLPFEKNCGADHICQDNLGISFSFPGLKSLLVGSNLELNAEVMVWNDGEDSYGTTITFSHPAGLSYRYVAEGQKQGQLRSLHLTCDSAPVGSQGTWSTSCRINHLIFRGGAQITFLATFDVSPKAVLGDRLLLTANVSSENNTPRTSKTTFQLELPVKYAVYTVVSSHEQFTKYLNFSESEEKESHVAMHRYQVNNLGQRDLPVSINFWVPVELNQEAVWMDVEVSHPQNPSLRCSSEKIAPPASDFLAHIQKNPVLDCSIAGCLRFRCDVPSFSVQEELDFTLKGNLSFGWVRQILQKKVSVVSVAEITFDTSVYSQLPGQEAFMRAQTTTVLEKYKVHNPTP

SEQ ID NO: 2586 - protein, 728 aa, synthetic construct
  REGION 1..728: note = ITGB1 (P05556) SP+PP+ECD
MNLQPIFWIGLISSVCCVFAQTDENRCLKANAKSCGECIQAGPNCGWCTNSTFLQEGMPTSARCDDLEALKKKGCPPDDIENPRGSKDIKKNKNVTNRSKGTAEKLKPEDITQIQPQQLVLRLRSGEPQTFTLKFKRAEDYPIDLYYLMDLSYSMKDDLENVKSLGTDLMNEMRRITSDFRIGFGSFVEKTVMPYISTTPAKLRNPCTSEQNCTSPFSYKNVLSLTNKGEVFNELVGKQRISGNLDSPEGGFDAIMQVAVCGSLIGWRNVTRLLVFSTDAGFHFAGDGKLGGIVLPNDGQCHLENNMYTMSHYYDYPSIAHLVQKLSENNIQTIFAVTEEFQPVYKELKNLIPKSAVGTLSANSSNVIQLIIDAYNSLSSEVILENGKLSEGVTISYKSYCKNGVNGTGENGRKCSNISIGDEVQFEISITSNKCPKKDSDSFKIRPLGFTEEVEVILQYICECECQSEGIPESPKCHEGNGTFECGACRCNEGRVGRHCECSTDEVNSEDMDAYCRKENSSEICSNNGECVCGQCVCRKRDNTNEIYSGKFCECDNFNCDRSNGLICGGNGVCKCRVCECNPNYTGSACDCSLDTSTCEASNGQICNGRGICECGVCKCTDPKFQGQTCEMCQTCLGVCAEHKECVQCRAFNKGEKKDTCTQECSYFNITKVESRDKLPQPVQPDPVSHCKEKDVDDCWFYFTYSVNGNNEVMVHVVENPECPTGPD

SEQ ID NO: 2587 - protein, 700 aa, synthetic construct
  REGION 1..700: note = ITGB2 (P05107) SP+PP+ECD
MLGLRPPLLALVGLLSLGCVLSQECTKFKVSSCRECIESGPGCTWCQKLNFTGPGDPDSIRCDTRPQLLMRGCAADDIMDPTSLAETQEDHNGGQKQLSPQKVTLYLRPGQAAAFNVTFRRAKGYPIDLYYLMDLSYSMLDDLRNVKKLGGDLLRALNEITESGRIGFGSFVDKTVLPFVNTHPDKLRNPCPNKEKECQPPFAFRHVLKLTNNSNQFQTEVGKQLISGNLDAPEGGLDAMMQVAACPEEIGWRNVTRLLVFATDDGFHFAGDGKLGAILTPNDGRCHLEDNLYKRSNEFDYPSVGQLAHKLAENNIQPIFAVTSRMVKTYEKLTEIIPKSAVGELSEDSSNVVQLIKNAYNKLSSRVFLDHNALPDTLKVTYDSFCSNGVTHRNQPRGDCDGVQINVPITFQVKVTATECIQEQSFVIRALGFTDIVTVQVLPQCECRCRDQSRDRSLCHGKGFLECGICRCDTGYIGKNCECQTQGRSSQELEGSCRKDNNSIICSGLGDCVCGQCLCHTSDVPGKLIYGQYCECDTINCERYNGQVCGGPGRGLCFCGKCRCHPGFEGSACQCERTTEGCLNPRRVECSGRGRCRCNVCECHSGYQLPLCQECPGCPSPCGKYISCAECLKFEKGPFGKNCSAACPGLQLSNNPVKGRTCKERDSEGCWVAYTLEQQDGMDRYLIYVDESRECVAGPN

SEQ ID NO: 2588 - protein, 718 aa, synthetic construct
  REGION 1..718: note = ITGB3 (P05106) SP+PP+ECD
MRARPRPRPLWATVLALGALAGVGVGGPNICTTRGVSSCQQCLAVSPMCAWCSDEALPLGSPRCDLKENLLKDNCAPESIEFPVSEARVLEDRPLSDKGSGDSSQVTQVSPQRIALRLRPDDSKNFSIQVRQVEDYPVDIYYLMDLSYSMKDDLWSIQNLGTKLATQMRKLTSNLRIGFGAFVDKPVSPYMYISPPEALENPCYDMKTTCLPMFGYKHVLTLTDQVTRFNEEVKKQSVSRNRDAPEGGFDAIMQATVCDEKIGWRNDASHLLVFTTDAKTHIALDGRLAGIVQPNDGQCHVGSDNHYSASTTMDYPSLGLMTEKLSQKNINLIFAVTENVVNLYQNYSELIPGTTVGVLSMDSSNVLQLIVDAYGKIRSKVELEVRDLPEELSLSFNATCLNNEVIPGLKSCMGLKIGDTVSFSIEAKVRGCPQEKEKSFTIKPVGFKDSLIVQVTFDCDCACQAQAEPNSHRCNNGNGTFECGVCRCGPGWLGSQCECSEEDYRPSQQDECSPREGQPVCSQRGECLCGQCVCHSSDFGKITGKYCECDDFSCVRYKGEMCSGHGQCSCGDCLCDSDWTGYYCNCTTRTDTCMSSNGLLCSGRGKCECGSCVCIQPGSYGDTCEKCPTCPDACTFKKECVECKKFDRGALHDENTCNRYCRDEIESVKELKDTGKDAVNCTYKNEDDCVVRFQYYEDSSGKSILYVVEEPECPKGPD

SEQ ID NO: 2589 - protein, 710 aa, synthetic construct
  REGION 1..710: note = ITGB4 (P16144) SP+PP+ECD
MAGPRPSPWARLLLAALISVSLSGTLANRCKKAPVKSCTECVRVDKDCAYCTDEMFRDRRCNTQAELLAAGCQRESIVVMESSFQITEETQIDTTLRRSQMSPQGLRVRLRPGEERHFELEVFEPLESPVDLYILMDFSNSMSDDLDNLKKMGQNLARVLSQLTSDYTIGFGKFVDKVSVPQTDMRPEKLKEPWPNSDPPFSFKNVISLTEDVDEFRNKLQGERISGNLDAPEGGFDAILQTAVCTRDIGWRPDSTHLLVFSTESAFHYEADGANVLAGIMSRNDERCHLDTTGTYTQYRTQDYPSVPTLVRLLAKHNIIPIFAVTNYSYSYYEKLHTYFPVSSLGVLQEDSSNIVELLEEAFNRIRSNLDIRALDSPRGLRTEVTSKMFQKTRTGSFHIRRGEVGIYQVQLRALEHVDGTHVCQLPEDQKGNIHLKPSFSDGLKMDAGIICDVCTCELQKEVRSARCSFNGDFVCGQCVCSEGWSGQTCNCSTGSLSDIQPCLREGEDKPCSGRGECQCGHCVCYGEGRYEGQFCEYDNFQCPRTSGFLCNDRGRCSMGQCVCEPGWTGPSCDCPLSNATCIDSNGGICNGRGHCECGRCHCHQQSLYTDTICEINYSAIHPGLCEDLRSCVQCQAWGTGEKKGRTCEECNFKVKMVDELKRAEEVVVRCSFRDEDDDCTYSYTMEGDGAPGPNSTVLVHKKKDCPPGS

SEQ ID NO: 2590 - protein, 719 aa, synthetic construct
  REGION 1..719: note = ITGB5 (P18084) SP+PP+ECD
MPRAPAPLYACLLGLCALLPRLAGLNICTSGSATSCEECLLIHPKCAWCSKEDFGSPRSITSRCDLRANLVKNGCGGEIESPASSFHVLRSLPLSSKGSGSAGWDVIQMTPQEIAVNLRPGDKTTFQLQVRQVEDYPVDLYYLMDLSLSMKDDLDNIRSLGTKLAEEMRKLTSNFRLGFGSFVDKDISPFSYTAPRYQTNPCIGYKLFPNCVPSFGFRHLLPLTDRVDSFNEEVRKQRVSRNRDAPEGGFDAVLQAAVCKEKIGWRKDALHLLVFTTDDVPHIALDGKLGGLVQPHDGQCHLNEANEYTASNQMDYPSLALLGEKLAENNINLIFAVTKNHYMLYKNFTALIPGTTVEILDGDSKNIIQLIINAYNSIRSKVELSVWDQPEDLNLFFTATCQDGVSYPGQRKCEGLKIGDTASFEVSLEARSCPSRHTEHVFALRPVGFRDSLEVGVTYNCTCGCSVGLEPNSARCNGSGTYVCGLCECSPGYLGTRCECQDGENQSVYQNLCREAEGKPLCSGRGDCSCNQCSCFESEFGKIYGPFCECDNFSCARNKGVLCSGHGECHCGECKCHAGYIGDNCNCSTDISTCRGRDGQICSERGHCLCGQCQCTEPGAFGEMCEKCPTCPDACSTKRDCVECLLLHSGKPDNQTCHSLCRDEVITWVDTIVKDDQEAVLCFYKTAKDCVMMFTYVELPSGKSNLTVLREPECGNTPN

SEQ ID NO: 2591 - protein, 709 aa, synthetic construct
  REGION 1..709: note = ITGB6 (P18564) SP+PP+ECD
MGIELLCLFFLFLGRNDHVQGGCALGGAETCEDCLLIGPQCAWCAQENFTHPSGVGERCDTPANLLAKGCQLNFIENPVSQVEILKNKPLSVGRQKNSSDIVQIAPQSLILKLRPGGAQTLQVHVRQTEDYPVDLYYLMDLSASMDDDLNTIKELGSRLSKEMSKLTSNFRLGFGSFVEKPVSPFVKTTPEEIANPCSSIPYFCLPTFGFKHILPLTNDAERFNEIVKNQKISANIDTPEGGFDAIMQAAVCKEKIGWRNDSLHLLVFVSDADSHFGMDSKLAGIVIPNDGLCHLDSKNEYSMSTVLEYPTIGQLIDKLVQNNVLLIFAVTQEQVHLYENYAKLIPGATVGLLQKDSGNILQLIISAYEELRSEVELEVLGDTEGLNLSFTAICNNGTLFQHQKKCSHMKVGDTASFSVTVNIPHCERRSRHIIIKPVGLGDALELLVSPECNCDCQKEVEVNSSKCHHGNGSFQCGVCACHPGHMGPRCECGEDMLSTDSCKEAPDHPSCSGRGDCYCGQCICHLSPYGNIYGPYCQCDNFSCVRHKGLLCGGNGDCDCGECVCRSGWTGEYCNCTTSTDSCVSEDGVLCSGRGDCVCGKCVCTNPGASGPTCERCPTCGDPCNSKRSCIECHLSAAGQAREECVDKCKLAGATISEEEDFSKDGSVSCSLQGENECLITFLITTDNEGKTIIHSINEKDCPKPPNIP

SEQ ID NO: 2592 - protein, 723 aa, synthetic construct
  REGION 1..723: note = ITGB7 (P26010) SP+PP+ECD
MVALPMVLVLLLVLSRGESELDAKIPSTGDATEWRNPHLSMLGSCQPAPSCQKCILSHPSCAWCKQLNFTASGEAEARRCARREELLARGCPLEELEEPRGQQEVLQDQPLSQGARGEGATQLAPQRVRVTLRPGEPQQLQVRFLRAEGYPVDLYYLMDLSYSMKDDLERVRQLGHALLVRLQEVTHSVRIGFGSFVDKTVLPFVSTVPSKLRHPCPTRLERCQSPFSFHHVLSLTGDAQAFEREVGRQSVSGNLDSPEGGFDAILQAALCQEQIGWRNVSRLLVFTSDDTFHTAGDGKLGGIFMPSDGHCHLDSNGLYSRSTEFDYPSVGQVAQALSAANIQPIFAVTSAALPVYQELSKLIPKSAVGELSEDSSNVVQLIMDAYNSLSSTVTLEHSSLPPGVHISYESQCEGPEKREGKAEDRGQCNHVRINQTVTFWVSLQATHCLPEPHLLRLRALGFSEELIVELHTLCDCNCSDTQPQAPHCSDGQGHLQCGVCSCAPGRLGRLCECSVAELSSPDLESGCRAPNGTGPLCSGKGHCQCGRCSCSGQSSGHLCECDDASCERHEGILCGGFGRCQCGVCHCHANRTGRACECSGDMDSCISPEGGLCSGHGRCKCNRCQCLDGYYGALCDQCPGCKTPCERHRDCAECGAFRTGPLATNCSTACAHTNVTLALAPILDDGWCKERTLDNQLFFFLVEDDARGTVVLRVRPQEKGADH

SEQ ID NO: 2593 - protein, 684 aa, synthetic construct
  REGION 1..684: note = ITGB8 (P26012) SP+PP+ECD
MCGSALAFFTAAFVCLQNDRRGPASFLWAAWVFSLVLGLGQGEDNRCASSNAASCARCLALGPECGWCVQEDFISGGSRSERCDIVSNLISKGCSVDSIEYPSVHVIIPTENEINTQVTPGEVSIQLRPGAEANFMLKVHPLKKYPVDLYYLVDVSASMHNNIEKLNSVGNDLSRKMAFFSRDFRLGFGSYVDKTVSPYISIHPERIHNQCSDYNLDCMPPHGYIHVLSLTENITEFEKAVHRQKISGNIDTPEGGFDAMLQAAVCESHIGWRKEAKRLLLVMTDQTSHLALDSKLAGIVVPNDGNCHLKNNVYVKSTTMEHPSLGQLSEKLIDNNINVIFAVQGKQFHWYKDLLPLLPGTIAGEIESKAANLNNLVVEAYQKLISEVKVQVENQVQGIYFNITAICPDGSRKPGMEGCRNVTSNDEVLFNVTVTMKKCDVTGGKNYAIIKPIGFNETAKIHIHRNCSCQCEDNRGPKGKCVDETFLDSKCFQCDENKCHFDEDQFSSESCKSHKDQPVCSGRGVCVCGKCSCHKIKLGKVYGKYCEKDDFSCPYHHGNLCAGHGECEAGRCQCFSGWEGDRCQCPSAAAQHCVNSKGQVCSGRGTCVCGRCECTDPRSIGRFCEHCPTCYTACKENWNCMQCLHPHNLSQAILDQCKTSCALMEQQHYVDQTSECFSSPSYLR

SEQ ID NO: 2594 - protein, 292 aa, synthetic construct
  REGION 1..292: note = IZUMO1 (Q8IYV9) SP+PP+ECD
MGPHFTLLCAALAGCLLPAEGCVICDPSVVLALKSLEKDYLPGHLDAKHHKAMMERVENAVKDFQELSLNEDAYMGVVDEATLQKGSWSLLKDLKRITDSDVKGDLFVKELFWMLHLQKETFATYVARFQKEAYCPNKCGVMLQTLIWCKNCKKEVHACRKSYDCGERNVEVPQMEDMILDCELNWHQASEGLTDYSFYRVWGNNTETLVSKGKEATLTKPMVGPEDAGSYRCELGSVNSSPATIINFHVTVLPKMIKEEKPSPNIVTPGEATTESSISLQPLQPEKMLASR

SEQ ID NO: 2595 - protein, 174 aa, synthetic construct
  REGION 1..174: note = IZUMO3 (Q5VZ72) SP+PP+ECD
MGDLWLFLLLPLSAFHGVKGCLECDPKFIEDVGSLLGNLIPSEVPGRTQLLERQIKEMIHLSFKVSHSDKRLRVLAVQQVVKLRTWLKNEFYKLGNETWKGVFIYQGKLLDVCQNLESKLKELLKNFSEIACSEDCIVVEGPILDCWTCLRMTNRCFKGEYCGDEDPRKAENRE

SEQ ID NO: 2596 - protein, 1067 aa, synthetic construct
  REGION 1..1067: note = JAG1 (P78504) SP+PP+ECD
MRSPRTRGRSGRPLSLLLALLCALRAKVCGASGQFELEILSMQNVNGELQNGNCCGGARNPGDRKCTRDECDTYFKVCLKEYQSRVTAGGPCSFGSGSTPVIGGNTFNLKASRGNDRNRIVLPFSFAWPRSYTLLVEAWDSSNDTVQPDSIIEKASHSGMINPSRQWQTLKQNTGVAHFEYQIRVTCDDYYYGFGCNKFCRPRDDFFGHYACDQNGNKTCMEGWMGPECNRAICRQGCSPKHGSCKLPGDCRCQYGWQGLYCDKCIPHPGCVHGICNEPWQCLCETNWGGQLCDKDLNYCGTHQPCLNGGTCSNTGPDKYQCSCPEGYSGPNCEIAEHACLSDPCHNRGSCKETSLGFECECSPGWTGPTCSTNIDDCSPNNCSHGGTCQDLVNGFKCVCPPQWTGKTCQLDANECEAKPCVNAKSCKNLIASYYCDCLPGWMGQNCDININDCLGQCQNDASCRDLVNGYRCICPPGYAGDHCERDIDECASNPCLNGGHCQNEINRFQCLCPTGFSGNLCQLDIDYCEPNPCQNGAQCYNRASDYFCKCPEDYEGKNCSHLKDHCRTTPCEVIDSCTVAMASNDTPEGVRYISSNVCGPHGKCKSQSGGKFTCDCNKGFTGTYCHENINDCESNPCRNGGTCIDGVNSYKCICSDGWEGAYCETNINDCSQNPCHNGGTCRDLVNDFYCDCKNGWKGKTCHSRDSQCDEATCNNGGTCYDEGDAFKCMCPGGWEGTTCNIARNSSCLPNPCHNGGTCVVNGESFTCVCKEGWEGPICAQNTNDCSPHPCYNSGTCVDGDNWYRCECAPGFAGPDCRININECQSSPCAFGATCVDEINGYRCVCPPGHSGAKCQEVSGRPCITMGSVIPDGAKWDDDCNTCQCLNGRIACSKVWCGPRPCLLHKGHSECPSGQSCIPILDDQCFVHPCTGVGECRSSSLQPVKTKCTSDSYYQDNCANITFTFNKEMMSPGLTTEHICSELRNLNILKNVSAEYSIYIACEPSPSANNEIHVAISAEDIRDDGNPIKEITDKIIDLVSKRDGNSSLIAAVAEVRVQRRPLKNRTD

SEQ ID NO: 2597 - protein, 1080 aa, synthetic construct
  REGION 1..1080: note = JAG2 (Q9Y219) SP+PP+ECD
MRAQGRGRLPRRLLLLLALWVQAARPMGYFELQLSALRNVNGELLSGACCDGDGRTTRAGGCGHDECDTYVRVCLKEYQAKVTPTGPCSYGHGATPVLGGNSFYLPPAGAAGDRARARARAGGDQDPGLVVIPFQFAWPRSFTLIVEAWDWDNDTTPNEELLIERVSHAGMINPEDRWKSLHFSGHVAHLELQIRVRCDENYYSATCNKFCRPRNDFFGHYTCDQYGNKACMDGWMGKECKEAVCKQGCNLLHGGCTVPGECRCSYGWQGRFCDECVPYPGCVHGSCVEPWQCNCETNWGGLLCDKDLNYCGSHHPCTNGGTCINAEPDQYRCTCPDGYSGRNCEKAEHACTSNPCANGGSCHEVPSGFECHCPSGWSGPTCALDIDECASNPCAAGGTCVDQVDGFECICPEQWVGATCQLDANECEGKPCLNAFSCKNLIGGYYCDCIPGWKGINCHINVNDCRGQCQHGGTCKDLVNGYQCVCPRGFGGRHCELERDECASSPCHSGGLCEDLADGFHCHCPQGFSGPLCEVDVDLCEPSPCRNGARCYNLEGDYYCACPDDFGGKNCSVPREPCPGGACRVIDGCGSDAGPGMPGTAASGVCGPHGRCVSQPGGNFSCICDSGFTGTYCHENIDDCLGQPCRNGGTCIDEVDAFRCFCPSGWEGELCDTNPNDCLPDPCHSRGRCYDLVNDFYCACDDGWKGKTCHSREFQCDAYTCSNGGTCYDSGDTFRCACPPGWKGSTCAVAKNSSCLPNPCVNGGTCVGSGASFSCICRDGWEGRTCTHNTNDCNPLPCYNGGICVDGVNWFRCECAPGFAGPDCRINIDECQSSPCAYGATCVDEINGYRCSCPPGRAGPRCQEVIGFGRSCWSRGTPFPHGSSWVEDCNSCRCLDGRRDCSKVWCGWKPCLLAGQPEALSAQCPLGQRCLEKAPGQCLRPPCEAWGECGAEEPPSTPCLPRSGHLDNNCARLTLHFNRDHVPQGTTVGAICSGIRSLPATRAVARDRLLVLLCDRASSGASAVEVAVSFSPARDLPDSSLIQGAAHAIVAAITQRGNSSLLLAVTEVKVETVVTGGSST

SEQ ID NO: 2598 - protein, 238 aa, synthetic construct
  REGION 1..238: note = JAM2 (P57087) SP+PP+ECD
MARRSRHRLLLLLLRYLVVALGYHKAYGFSAPKDQQVVTAVEYQEAILACKTPKKTVSSRLEWKKLGRSVSFVYYQQTLQGDFKNRAEMIDFNIRIKNVTRSDAGKYRCEVSAPSEQGQNLEEDTVTLEVLVAPAVPSCEVPSSALSGTVVELRCQDKEGNPAPEYTWFKDGIRLLENPRLGSQSTNSSYTMNTKTGTLQFNTVSKLDTGEYSCEARNSVGYRRCPGKRMQVDDLNIS

SEQ ID NO: 2599 - protein, 241 aa, synthetic construct
  REGION 1..241: note = JAM3 (Q9BX67) SP+PP+ECD
MALRRPPRLRLCARLPDFFLLLLFRGCLIGAVNLKSSNRTPVVQEFESVELSCIITDSQTSDPRIEWKKIQDEQTTYVFFDNKIQGDLAGRAEILGKTSLKIWNVTRRDSALYRCEVVARNDRKEIDEIVIELTVQVKPVTPVCRVPKAVPVGKMATLHCQESEGHPRPHYSWYRNDVPLPTDSRANPRFRNSSFHLNSETGTLVFTAVHKDDSGQYYCIASNDAGSARCEEQEMEVYDLN

SEQ ID NO: 2600 - protein, 196 aa, synthetic construct
  REGION 1..196: note = KCT2 (Q8NC54) SP+PP+ECD
MAAAVPKRMRGPAQAKLLPGSAIQALVGLARPLVLALLLVSAALSSVVSRTDSPSPTVLNSHISTPNVNALTHENQTKPSISQISTTLPPTTSTKKSGGASVVPHPSPTPLSQEEADNNEDPSIEEEDLLMLNSSPSTAKDTLDNGDYGEPDYDWTTGPRDDDESDDTLEENRGYMEIEQSVKSFKMPSSNIEEED

SEQ ID NO: 2601 - protein, 764 aa, synthetic construct
  REGION 1..764: note = KDR (P35968) SP+PP+ECD
MQSKVLLAVALWLCVETRAASVGLPSVSLDLPRLSIQKDILTIKANTTLQITCRGQRDLDWLWPNNQSGSEQRVEVTECSDGLFCKTLTIPKVIGNDTGAYKCFYRETDLASVIYVYVQDYRSPFIASVSDQHGVVYITENKNKTVVIPCLGSISNLNVSLCARYPEKRFVPDGNRISWDSKKGFTIPSYMISYAGMVFCEAKINDESYQSIMYIVVVVGYRIYDVVLSPSHGIELSVGEKLVLNCTARTELNVGIDFNWEYPSSKHQHKKLVNRDLKTQSGSEMKKFLSTLTIDGVTRSDQGLYTCAASSGLMTKKNSTFVRVHEKPFVAFGSGMESLVEATVGERVRIPAKYLGYPPPEIKWYKNGIPLESNHTIKAGHVLTIMEVSERDTGNYTVILTNPISKEKQSHVVSLVVYVPPQIGEKSLISPVDSYQYGTTQTLTCTVYAIPPPHHIHWYWQLEEECANEPSQAVSVTNPYPCEEWRSVEDFQGGNKIEVNKNQFALIEGKNKTVSTLVIQAANVSALYKCEAVNKVGRGERVISFHVTRGPEITLQPDMQPTEQESVSLWCTADRSTFENLTWYKLGPQPLPIHVGELPTPVCKNLDTLWKLNATMFSNSTNDILIMELKNASLQDQGDYVCLAQDRKTKKRHCVVRQLTVLERVAPTITGNLENQTTSIGESIEVSCTASGNPPPQIMWFKDNETLVEDSGIVLKDGNRNLTIRRVRKEDEGLYTCQACSVLGCAKVEAFFIIEGAQEKTNLE

SEQ ID NO: 2602 - protein, 120 aa, synthetic construct
  REGION 1..120: note = KIAA0247 (Q92537) SP+PP+ECD
MCHGRIAPKSTSVFAVASVGHGVFLPLVILCTLLGDGLASVCPLPPEPENGGYICHPRPCRDPLTAGSVIEYLCAEGYMLKGDYKYLTCKNGEWKPAMEISCRLNEDKDTHTSLGVPTLS

SEQ ID NO: 2603 - protein, 955 aa, synthetic construct
  REGION 1..955: note = KIAA0319 (Q5VV43) SP+PP+ECD
MAPPTGVLSSLLLLVTIAGCARKQCSEGRTYSNAVISPNLETTRIMRVSHTFPVVDCTAACCDLSSCDLAWWFEGRCYLVSCPHKENCEPKKMGPIRSYLTFVLRPVQRPAQLLDYGDMMLNRGSPSGIWGDSPEDIRKDLTFLGKDWGLEEMSEYSDDYRELEKDLLQPSGKQEPRGSAEYTDWGLLPGSEGAFNSSVGDSPAVPAETQQDPELHYLNESASTPAPKLPERSVLLPLPTTPSSGEVLEKEKASQLQEQSSNSSGKEVLMPSHSLPPASLELSSVTVEKSPVLTVTPGSTEHSIPTPPTSAAPSESTPSELPISPTTAPRTVKELTVSAGDNLIITLPDNEVELKAFVAPAPPVETTYNYEWNLISHPTDYQGEIKQGHKQTLNLSQLSVGLYVFKVTVSSENAFGEGFVNVTVKPARRVNLPPVAVVSPQLQELTLPLTSALIDGSQSTDDTEIVSYHWEEINGPFIEEKTSVDSPVLRLSNLDPGNYSFRLTVTDSDGATNSTTAALIVNNAVDYPPVANAGPNHTITLPQNSITLNGNQSSDDHQIVLYEWSLGPGSEGKHVVMQGVQTPYLHLSAMQEGDYTFQLKVTDSSRQQSTAVVTVIVQPENNRPPVAVAGPDKELIFPVESATLDGSSSSDDHGIVFYHWEHVRGPSAVEMENIDKAIATVTGLQVGTYHFRLTVKDQQGLSSTSTLTVAVKKENNSPPRARAGGRHVLVLPNNSITLDGSRSTDDQRIVSYLWIRDGQSPAAGDVIDGSDHSVALQLTNLVEGVYTFHLRVTDSQGASDTDTATVEVQPDPRKSGLVELTLQVGVGQLTEQRKDTLVRQLAVLLNVLDSDIKVQKIRAHSDLSTVIVFYVQSRPPFKVLKAAEVARNLHMRLSKEKADFLLFKVLRVDTAGCLLKCSGHGHCDPLTKRCICSHLWMENLIQRYIWDGESNCEWS

SEQ ID NO: 2604 - protein, 869 aa, synthetic construct
  REGION 1..869: note = KIAA0922 (A2VDJ0) SP+PP+ECD
MAGLRRPQPGCYCRTAAAVNLLLGVFQVLLPCCRPGGAQGQAIEPLPNVVELWQAEEGELLLPTQGDSEEGLEEPSQEQSFSDKLFSGKGLHFQPSVLDFGIQFLGHPVAKILHAYNPSRDSEVVVNSVFAAAGHFHVPPVPCRVIPAMGKTSFRIIFLPTEEGSIESSLFINTSSYGVLSYHVSGIGTRRISTEGSAKQLPNAYFLLPKVQSIQLSQMQAETTNTSLLQVQLECSLHNKVCQQLKGCYLESDDVLRLQMSIMVTMENFSKEFEENTQHLLDHLSIVYVATDESETSDDSAVNMYILHSGNSLIWIQDIRHFSQRDALSLQFEPVLLPTSTTNFTKIASFTCKATSCDSGIIEDVKKTTHTPTLKACLFSSVAQGYFRMDSSATQFHIETHENTSGLWSIWYRNHFDRSVVLNDVFLSKETKHMLKILNFTGPLFLPPGCWNIFSLKLAVKDIAINLFTNVFLTTNIGAIFAIPLQIYSAPTKEGSLGFEVIAHCGMHYFMGKSKAGNPNWNGSLSLDQSTWNVDSELANKLYERWKKYKNGDVCKRNVLGTTRFAHLKKSKESESFVFFLPRLIAEPGLMLNFSATALRSRMIKYFVVQNPSSWPVSLQLLPLSLYPKPEALVHLLHRWFGTDMQMINFTTGEFQLTEACPYLGTHSEESRFGILHLHLQPLEMKRVGVVFTPADYGKVTSLILIRNNLTVIDMIGVEGFGARELLKVGGRLPGAGGSLRFKVPESTLMDCRRQLKDSKQILSITKNFKVENIGPLPITVSSLKINGYNCQGYGFEVLDCHQFSLDPNTSRDISIVFTPDFTSSWVIRDLSLVTAADLEFRFTLNVTLPHHLLPLCADVVPGPSWEES

SEQ ID NO: 2605 - protein, 910 aa, synthetic construct
  REGION 1..910: note = KIAA1324 (Q6UXG2) SP+PP+ECD
MAEPGHSHHLSARVRGRTERRIPRLWRLLLWAGTAFQVTQGTGPELHACKESEYHYEYTACDSTGSRWRVAVPHTPGLCTSLPDPIKGTECSFSCNAGEFLDMKDQSCKPCAEGRYSLGTGIRFDEWDELPHGFASLSANMELDDSAAESTGNCTSSKWVPRGDYIASNTDECTATLMYAVNLKQSGTVNFEYYYPDSSIIFEFFVQNDQCQPNADDSRWMKTTEKGWEFHSVELNRGNNVLYWRTTAFSVWTKVPKPVLVRNIAITGVAYTSECFPCKPGTYADKQGSSFCKLCPANSYSNKGETSCHQCDPDKYSEKGSSSCNVRPACTDKDYFYTHTACDANGETQLMYKWAKPKICSEDLEGAVKLPASGVKTHCPPCNPGFFKTNNSTCQPCPYGSYSNGSDCTRCPAGTEPAVGFEYKWWNTLPTNMETTVLSGINFEYKGMTGWEVAGDHIYTAAGASDNDFMILTLVVPGFRPPQSVMADTENKEVARITFVFETLCSVNCELYFMVGVNSRTNTPVETWKGSKGKQSYTYIIEENTTTSFTWAFQRTTFHEASRKYTNDVAKIYSINVTNVMNGVASYCRPCALEASDVGSSCTSCPAGYYIDRDSGTCHSCPTNTILKAHQPYGVQACVPCGPGTKNNKIHSLCYNDCTFSRNTPTRTFNYNFSALANTVTLAGGPSFTSKGLKYFHHFTLSLCGNQGRKMSVCTDNVTDLRIPEGESGFSKSITAYVCQAVIIPPEVTGYKAGVSSQPVSLADRLIGVTTDMTLDGITSPAELFHLESLGIPDVIFFYRSNDVTQSCSSGRSTTIRVRCSPQKTVPGSLLLPGTCSDGTCDGCNFHFLWESAAACPLCSVADYHAIVSSCVAGIQKTTYVWREPKLCSGGISLPEQRVTICKTIDFWLK

SEQ ID NO: 2606 - protein, 929 aa, synthetic construct
  REGION 1..929: note = KIAA1324L (A8MWY0) SP+PP+ECD
MLFRARGPVRGRGWGRPAEAPRRGRSPPWSPAWICCWALAGCQAAWAGDLPSSSSRPLPPCQEKDYHFEYTECDSSGSRWRVAIPNSAVDCSGLPDPVRGKECTFSCASGEYLEMKNQVCSKCGEGTYSLGSGIKFDEWDELPAGFSNIATFMDTVVGPSDSRPDGCNNSSWIPRGNYIESNRDDCTVSLIYAVHLKKSGYVFFEYQYVDNNIFFEFFIQNDQCQEMDTTTDKWVKLTDNGEWGSHSVMLKSGTNILYWRTTGILMGSKAVKPVLVKNITIEGVAYTSECFPCKPGTFSNKPGSFNCQVCPRNTYSEKGAKECIRCKDDSQFSEEGSSECTERPPCTTKDYFQIHTPCDEEGKTQIMYKWIEPKICREDLTDAIRLPPSGEKKDCPPCNPGFYNNGSSSCHPCPPGTFSDGTKECRPCPAGTEPALGFEYKWWNVLPGNMKTSCFNVGNSKCDGMNGWEVAGDHIQSGAGGSDNDYLILNLHIPGFKPPTSMTGATGSELGRITFVFETLCSADCVLYFMVDINRKSTNVVESWGGTKEKQAYTHIIFKNATFTFTWAFQRTNQGQDNRRFINDMVKIYSITATNAVDGVASSCRACALGSEQSGSSCVPCPPGHYIEKETNQCKECPPDTYLSIHQVYGKEACIPCGPGSKNNQDHSVCYSDCFFYHEKENQSLHYDFSNLSSVGSLMNGPSFTSKGTKYFHFFNISLCGHEGKKMALCTNNITDFTVKEIVAGSDDYTNLVGAFVCQSTIIPSESKGFRAALSSQSIILADTFIGVTVETTLKNINIKEDMFPVPTSQIPDVHFFYKSSTATTSCINGRSTAVKMRCNPTKSGAGVISVPSKCPAGTCDGCTFYFLWESAEACPLCTEHDFHEIEGACKRGFQETLYVWNEPKWCIKGISLPEKKLATCETVDFWLK

SEQ ID NO: 2607 - protein, 97 aa, synthetic construct
  REGION 1..97: note = KIAA1644 (Q3SXP7) SP+PP+ECD
MTSCGQQSLNVLAVLFSLLFSAVLSAHFRVCEPYTDHKGRYHFGFHCPRLSDNKTFILCCHHNNTVFKYCCNETEFQAVMQANLTASSEGYMHNNYT

SEQ ID NO: 2608 - protein, 245 aa, synthetic construct
  REGION 1..245: note = KIR2DL1 (P43626) SP+PP+ECD
MSLLVVSMACVGFFLLQGAWPHEGVHRKPSLLAHPGPLVKSEETVILQCWSDVMFEHFLLHREGMFNDTLRLIGEHHDGVSKANFSISRMTQDLAGTYRCYGSVTHSPYQVSAPSDPLDIVIIGLYEKPSLSAQPGPTVLAGENVTLSCSSRSSYDMYHLSREGEAHERRLPAGPKVNGTFQADFPLGPATHGGTYRCFGSFHDSPYEWSKSSDPLLVSVTGNPSNSWPSPTEPSSKTGNPRHLH

SEQ ID NO: 2609 - protein, 245 aa, synthetic construct
  REGION 1..245: note = KIR2DL2 (P43627) SP+PP+ECD
MSLMVVSMACVGFFLLQGAWPHEGVHRKPSLLAHPGRLVKSEETVILQCWSDVRFEHFLLHREGKFKDTLHLIGEHHDGVSKANFSIGPMMQDLAGTYRCYGSVTHSPYQLSAPSDPLDIVITGLYEKPSLSAQPGPTVLAGESVTLSCSSRSSYDMYHLSREGEAHECRFSAGPKVNGTFQADFPLGPATHGGTYRCFGSFRDSPYEWSNSSDPLLVSVIGNPSNSWPSPTEPSSKTGNPRHLH

SEQ ID NO: 2610 - protein, 245 aa, synthetic construct
  REGION 1..245: note = KIR2DL3 (P43628) SP+PP+ECD
MSLMVVSMVCVGFFLLQGAWPHEGVHRKPSLLAHPGPLVKSEETVILQCWSDVRFQHFLLHREGKFKDTLHLIGEHHDGVSKANFSIGPMMQDLAGTYRCYGSVTHSPYQLSAPSDPLDIVITGLYEKPSLSAQPGPTVLAGESVTLSCSSRSSYDMYHLSREGEAHERRFSAGPKVNGTFQADFPLGPATHGGTYRCFGSFRDSPYEWSNSSDPLLVSVTGNPSNSWPSPTEPSSETGNPRHLH

SEQ ID NO: 2611 - protein, 242 aa, synthetic construct
  REGION 1..242: note = KIR2DL4 (Q99706) SP+PP+ECD
MSMSPTVIILACLGFFLDQSVWAHVGGQDKPFCSAWPSAVVPQGGHVTLRCHYRRGFNIFTLYKKDGVPVPELYNRIFWNSFLISPVTPAHAGTYRCRGFHPHSPTEWSAPSNPLVIMVTGLYEKPSLTARPGPTVRAGENVTLSCSSQSSFDIYHLSREGEAHELRLPAVPSINGTFQADFPLGPATHGETYRCFGSFHGSPYEWSDPSDPLPVSVTGNPSSSWPSPTEPSFKTGIARHLH

SEQ ID NO: 2612 - protein, 238 aa, synthetic construct
  REGION 1..238: note = KIR2DL5A (Q8N109) SP+PP+ECD
MSLMVISMACVGFFLLQGAWTHEGGQDKPLLSAWPSAVVPRGGHVTLLCRSRLGFTIFSLYKEDGVPVPELYNKIFWKSILMGPVTPAHAGTYRCRGSHPRSPIEWSAPSNPLVIVVTGLFGKPSLSAQPGPTVRTGENVTLSCSSRSSFDMYHLSREGRAHEPRLPAVPSVNGTFQADFPLGPATHGGTYTCFGSLHDSPYEWSDPSDPLLVSVTGNSSSSSSSPTEPSSKTGIRRH

SEQ ID NO: 2613 - protein, 238 aa, synthetic construct
  REGION 1..238: note = KIR2DL5B (Q8NHK3) SP+PP+ECD
MSLMVVSMACVGFFLLQGAWTHEGGQDKPLLSAWPSAVVPRGGHVTLLCRSRLGFTIFSLYKEDGVPVPELYNKIFWKSILMGPVTPAHAGTYRCRGSHPRSPIEWSAPSNPLVIVVTGLFGKPSLSAQPGPTVRTGENVTLSCSSRSSFDMYHLSREGRAHEPRLPAVPSVDGTFQADFPLGPATHGGTYTCFSSLHDSPYEWSDPSDPLLVSVTGNSSSSSSSPTEPSSKTGIRRH

SEQ ID NO: 2614 - protein, 245 aa, synthetic construct
  REGION 1..245: note = KIR2DS1 (Q14954) SP+PP+ECD
MSLTVVSMACVGFFLLQGAWPHEGVHRKPSLLAHPGRLVKSEETVILQCWSDVMFEHFLLHREGMFNDTLRLIGEHHDGVSKANFSISRMKQDLAGTYRCYGSVTHSPYQLSAPSDPLDIVIIGLYEKPSLSAQPGPTVLAGENVTLSCSSRSSYDMYHLSREGEAHERRLPAGTKVNGTFQANFPLGPATHGGTYRCFGSFRDSPYEWSKSSDPLLVSVTGNPSNSWPSPTEPSSETGNPRHLH

SEQ ID NO: 2615 - protein, 245 aa, synthetic construct
  REGION 1..245: note = KIR2DS2 (P43631) SP+PP+ECD
MSLMVVSMACVGFFLLQGAWPHEGVHRKPSLLAHPGPLVKSEETVILQCWSDVRFEHFLLHREGKYKDTLHLIGEHHDGVSKANFSIGPMMQDLAGTYRCYGSVTHSPYQLSAPSDPLDIVITGLYEKPSLSAQPGPTVLAGESVTLSCSSRSSYDMYHLSREGEAHERRFSAGPKVNGTFQADFPLGPATHGGTYRCFGSFRDSPYEWSNSSDPLLVSVTGNPSNSWPSPTEPSSKTGNPRHLH

SEQ ID NO: 2616 - protein, 245 aa, synthetic construct
  REGION 1..245: note = KIR2DS3 (Q14952) SP+PP+ECD
MSLMVISMACVGFFWLQGAWPHEGFRRKPSLLAHPGRLVKSEETVILQCWSDVMFEHFLLHREGTFNDTLRLIGEHIDGVSKANFSIGRMRQDLAGTYRCYGSVPHSPYQFSAPSDPLDIVITGLYEKPSLSAQPGPTVLAGESVTLSCSSWSSYDMYHLSTEGEAHERRFSAGPKVNGTFQADFPLGPATQGGTYRCFGSFHDSPYEWSKSSDPLLVSVTGNPSNSWPSPTEPSSKTGNPRHLH

SEQ ID NO: 2617 - protein, 245 aa, synthetic construct
  REGION 1..245: note = KIR2DS4 (P43632) SP+PP+ECD
MSLMVIIMACVGFFLLQGAWPQEGVHRKPSFLALPGHLVKSEETVILQCWSDVMFEHFLLHREGKFNNTLHLIGEHHDGVSKANFSIGPMMPVLAGTYRCYGSVPHSPYQLSAPSDPLDMVIIGLYEKPSLSAQPGPTVQAGENVTLSCSSRSSYDMYHLSREGEAHERRLPAVRSINGTFQADFPLGPATHGGTYRCFGSFRDAPYEWSNSSDPLLVSVTGNPSNSWPSPTEPSSKTGNPRHLH

SEQ ID NO: 2618 - protein, 245 aa, synthetic construct
  REGION 1..245: note = KIR2DS5 (Q14953) SP+PP+ECD
MSLMVISMACVAFFLLQGAWPHEGFRRKPSLLAHPGPLVKSEETVILQCWSDVMFEHFLLHREGTFNHTLRLIGEHIDGVSKGNFSIGRMTQDLAGTYRCYGSVTHSPYQLSAPSDPLDIVITGLYEKPSLSAQPGPTVLAGESVTLSCSSRSSYDMYHLSREGEAHERRLPAGPKVNRTFQADFPLDPATHGGTYRCFGSFRDSPYEWSKSSDPLLVSVTGNSSNSWPSPTEPSSETGNPRHLH

SEQ ID NO: 2619 - protein, 340 aa, synthetic construct
  REGION 1..340: note = KIR3DL1 (P43629) SP+PP+ECD
MSLMVVSMACVGLFLVQRAGPHMGGQDKPFLSAWPSAVVPRGGHVTLRCHYRHRFNNFMLYKEDRIHIPIFHGRIFQESFNMSPVTTAHAGNYTCRGSHPHSPTGWSAPSNPVVIMVTGNHRKPSLLAHPGPLVKSGERVILQCWSDIMFEHFFLHKEGISKDPSRLVGQIHDGVSKANFSIGPMMLALAGTYRCYGSVTHTPYQLSAPSDPLDIVVTGPYEKPSLSAQPGPKVQAGESVTLSCSSRSSYDMYHLSREGGAHERRLPAVRKVNRTFQADFPLGPATHGGTYRCFGSFRHSPYEWSDPSDPLLVSVTGNPSSSWPSPTEPSSKSGNPRHLH

SEQ ID NO: 2620 - protein, 340 aa, synthetic construct
  REGION 1..340: note = KIR3DL2 (P43630) SP+PP+ECD
MSLTVVSMACVGFFLLQGAWPLMGGQDKPFLSARPSTVVPRGGHVALQCHYRRGFNNFMLYKEDRSHVPIFHGRIFQESFIMGPVTPAHAGTYRCRGSRPHSLTGWSAPSNPLVIMVTGNHRKPSLLAHPGPLLKSGETVILQCWSDVMFEHFFLHREGISEDPSRLVGQIHDGVSKANFSIGPLMPVLAGTYRCYGSVPHSPYQLSAPSDPLDIVITGLYEKPSLSAQPGPTVQAGENVTLSCSSWSSYDIYHLSREGEAHERRLRAVPKVNRTFQADFPLGPATHGGTYRCFGSFRALPCVWSNSSDPLLVSVTGNPSSSWPSPTEPSSKSGICRHLH

SEQ ID NO: 2621 - protein, 322 aa, synthetic construct
  REGION 1..322: note = KIR3DL3 (Q8N743) SP+PP+ECD
MSLMVVSMACVGFFLLEGPWPHVGGQDKPFLSAWPGTVVSEGQHVTLQCRSRLGFNEFSLSKEDGMPVPELYNRIFRNSFLMGPVTPAHAGTYRCCSSHPHSPTGWSAPSNPVVIMVTGVHRKPSLLAHPGPLVKSGETVILQCWSDVRFERFLLHREGITEDPLRLVGQLHDAGSQVNYSMGPMTPALAGTYRCFGSVTHLPYELSAPSDPLDIVVVGLYGKPSLSAQPGPTVQAGENVTLSCSSRSLFDIYHLSREAEAGELRLTAVLRVNGTFQANFPLGPVTHGGNYRCFGSFRALPHAWSDPSDPLPVSVTGNSRHL

SEQ ID NO: 2622 - protein, 340 aa, synthetic construct
  REGION 1..340: note = KIR3DS1 (Q14943) SP+PP+ECD
MLLMVVSMACVGLFLVQRAGPHMGGQDKPFLSAWPSAVVPRGGHVTLRCHYRHRFNNFMLYKEDRIHVPIFHGRIFQEGFNMSPVTTAHAGNYTCRGSHPHSPTGWSAPSNPMVIMVTGNHRKPSLLAHPGPLVKSGERVILQCWSDIMFEHFFLHREWISKDPSRLVGQIHDGVSKANFSIGSMMRALAGTYRCYGSVTHTPYQLSAPSDPLDIVVTGLYEKPSLSAQPGPKVQAGESVTLSCSSRSSYDMYHLSREGGAHERRLPAVRKVNRTFQADFPLGPATHGGTYRCFGSFRHSPYEWSDPSDPLLVSVTGNPSSSWPSPTEPSSKSGNLRHLH

SEQ ID NO: 2623 - protein, 499 aa, synthetic construct
  REGION 1..499: note = KIRREL (Q96J84) SP+PP+ECD
MLSLLVWILTLSDTFSQGTQTRFSQEPADQTVVAGQRAVLPCVLLNYSGIVQWTKDGLALGMGQGLKAWPRYRVVGSADAGQYNLEITDAELSDDASYECQATEAALRSRRAKLTVLIPPEDTRIDGGPVILLQAGTPHNLTCRAFNAKPAATIIWFRDGTQQEGAVASTELLKDGKRETTVSQLLINPTDLDIGRVFTCRSMNEAIPSGKETSIELDVHHPPTVTLSIEPQTVQEGERVVFTCQATANPEILGYRWAKGGFLIEDAHESRYETNVDYSFFTEPVSCEVHNKVGSTNVSTLVNVHFAPRIVVDPKPTTTDIGSDVTLTCVWVGNPPLTLTWTKKDSNMVLSNSNQLLLKSVTQADAGTYTCRAIVPRIGVAEREVPLYVNGPPIISSEAVQYAVRGDGGKVECFIGSTPPPDRIAWAWKENFLEVGTLERYTVERTNSGSGVLSTLTINNVMEADFQTHYNCTAWNSFGPGTAIIQLEEREVLPVGIIA

SEQ ID NO: 2624 - protein, 510 aa, synthetic construct
  REGION 1..510: note = KIRREL2 (Q6UWL6) SP+PP+ECD
MLRMRVPALLVLLFCFRGRAGPSPHFLQQPEDLVVLLGEEARLPCALGAYWGLVQWTKSGLALGGQRDLPGWSRYWISGNAANGQHDLHIRPVELEDEASYECQATQAGLRSRPAQLHVLVPPEAPQVLGGPSVSLVAGVPANLTCRSRGDARPTPELLWFRDGVLLDGATFHQTLLKEGTPGSVESTLTLTPFSHDDGATFVCRARSQALPTGRDTAITLSLQYPPEVTLSASPHTVQEGEKVIFLCQATAQPPVTGYRWAKGGSPVLGARGPRLEVVADASFLTEPVSCEVSNAVGSANRSTALDVLFGPILQAKPEPVSVDVGEDASFSCAWRGNPLPRVTWTRRGGAQVLGSGATLRLPSVGPEDAGDYVCRAEAGLSGLRGGAAEARLTVNAPPVVTALHSAPAFLRGPARLQCLVFASPAPDAVVWSWDEGFLEAGSQGRFLVETFPAPESRGGLGPGLISVLHISGTQESDFSRSFNCSARNRLGEGGAQASLGRRDLLPTVR

SEQ ID NO: 2625 - protein, 535 aa, synthetic construct
  REGION 1..535: note = KIRREL3 (Q8IZU9) SP+PP+ECD
MKPFQLDLLFVCFFLFSQELGLQKRGCCLVLGYMAKDKFRRMNEGQVYSFSQQPQDQVVVSGQPVTLLCAIPEYDGFVLWIKDGLALGVGRDLSSYPQYLVVGNHLSGEHHLKILRAELQDDAVYECQAIQAAIRSRPARLTVLVPPDDPVILGGPVISLRAGDPLNLTCHADNAKPAASIIWLRKGEVINGATYSKTLLRDGKRESIVSTLFISPGDVENGQSIVCRATNKAIPGGKETSVTIDIQHPPLVNLSVEPQPVLEDNVVTFHCSAKANPAVTQYRWAKRGQIIKEASGEVYRTTVDYTYFSEPVSCEVTNALGSTNLSRTVDVYFGPRMTTEPQSLLVDLGSDAIFSCAWTGNPSLTIVWMKRGSGVVLSNEKTLTLKSVRQEDAGKYVCRAVVPRVGAGEREVTLTVNGPPIISSTQTQHALHGEKGQIKCFIRSTPPPDRIAWSWKENVLESGTSGRYTVETISTEEGVISTLTISNIVRADFQTIYNCTAWNSFGSDTEIIRLKEQGSEMKSGAGLEAESVPMA

SEQ ID NO: 2626 - protein, 524 aa, synthetic construct
  REGION 1..524: note = KIT (P10721) SP+PP+ECD
MRGARGAWDFLCVLLLLLRVQTGSSQPSVSPGEPSPPSIHPGKSDLIVRVGDEIRLLCTDPGFVKWTFEILDETNENKQNEWITEKAEATNTGKYTCTNKHGLSNSIYVFVRDPAKLFLVDRSLYGKEDNDTLVRCPLTDPEVTNYSLKGCQGKPLPKDLRFIPDPKAGIMIKSVKRAYHRLCLHCSVDQEGKSVLSEKFILKVRPAFKAVPVVSVSKASYLLREGEEFTVTCTIKDVSSSVYSTWKRENSQTKLQEKYNSWHHGDFNYERQATLTISSARVNDSGVFMCYANNTFGSANVTTTLEVVDKGFINIFPMINTTVFVNDGENVDLIVEYEAFPKPEHQQWIYMNRTFTDKWEDYPKSENESNIRYVSELHLTRLKGTEGGTYTFLVSNSDVNAAIAFNVYVNTKPEILTYDRLVNGMLQCVAAGFPEPTIDWYFCPGTEQRCSASVLPVDVQTLNSSGPPFGKLVVQSSIDSSAFKHNGTVECKAYNDVGKTSAYFNFAFKGNNKEQIHPHTLFTP

SEQ ID NO: 2627 - protein, 214 aa, synthetic construct
  REGION 1..214: note = KITLG (P21583) SP+PP+ECD
MKKTQTWILTCIYLQLLLFNPLVKTEGICRNRVTNNVKDVTKLVANLPKDYMITLKYVPGMDVLPSHCWISEMVVQLSDSLTDLLDKFSNISEGLSNYSIIDKLVNIVDDLVECVKENSSKDLKKSFKSPEPRLFTPEEFFRIFNRSIDAFKDFVVASETSDCVVSSTLSPEKDSRVSVTKPFMLPPVAASSLRNDSSSSNRKAKNPPGDSSLH

SEQ ID NO: 2628 - protein, 981 aa, synthetic construct
  REGION 1..981: note = KL (Q9UEF7) SP+PP+ECD
MPASAPPRRPRPPPPSLSLLLVLLGLGGRRLRAEPGDGAQTWARFSRPPAPEAAGLFQGTFPDGFLWAVGSAAYQTEGGWQQHGKGASIWDTFTHHPLAPPGDSRNASLPLGAPSPLQPATGDVASDSYNNVFRDTEALRELGVTHYRFSISWARVLPNGSAGVPNREGLRYYRRLLERLRELGVQPVVTLYHWDLPQRLQDAYGGWANRALADHFRDYAELCFRHFGGQVKYWITIDNPYVVAWHGYATGRLAPGIRGSPRLGYLVAHNLLLAHAKVWHLYNTSFRPTQGGQVSIALSSHWINPRRMTDHSIKECQKSLDFVLGWFAKPVFIDGDYPESMKNNLSSILPDFTESEKKFIKGTADFFALCFGPTLSFQLLDPHMKFRQLESPNLRQLLSWIDLEFNHPQIFIVENGWFVSGTTKRDDAKYMYYLKKFIMETLKAIKLDGVDVIGYTAWSLMDGFEWHRGYSIRRGLFYVDFLSQDKMLLPKSSALFYQKLIEKNGFPPLPENQPLEGTFPCDFAWGVVDNYIQVDTTLSQFTDLNVYLWDVHHSKRLIKVDGVVTKKRKSYCVDFAAIQPQIALLQEMHVTHFRFSLDWALILPLGNQSQVNHTILQYYRCMASELVRVNITPVVALWQPMAPNQGLPRLLARQGAWENPYTALAFAEYARLCFQELGHHVKLWITMNEPYTRNMTYSAGHNLLKAHALAWHVYNEKFRHAQNGKISIALQADWIEPACPFSQKDKEVAERVLEFDIGWLAEPIFGSGDYPWVMRDWLNQRNNFLLPYFTEDEKKLIQGTFDFLALSHYTTILVDSEKEDPIKYNDYLEVQEMTDITWLNSPSQVAVVPWGLRKVLNWLKFKYGDLPMYIISNGIDDGLHAEDDQLRVYYMQNYINEALKAHILDGINLCGYFAYSFNDRTAPRFGLYRYAADQFEPKASMKHYRKIIDSNGFPGPETLERFCPEEFTVCTECSFFHTRKS

SEQ ID NO: 2629 - protein, 391 aa, synthetic construct
  REGION 1..391: note = KREMEN1 (Q96MU8) SP+PP+ECD
MAPPAARLALLSAAALTLARPAPSPGLGPECFTANGADYRGTQNWTALQGGKPCLFWNETFQHPYNTLKYPNGEGGLGEHNYCRNPDGDVSPWCYVAEHEDGVYWKYCEIPACQMPGNLGCYKDHGNPPPLTGTSKTSNKLTIQTCISFCRSQRFKFAGMESGYACFCGNNPDYWKYGEAASTECNSVCFGDHTQPCGGDGRIILFDTLVGACGGNYSAMSSVVYSPDFPDTYATGRVCYWTIRVPGASHIHFSFPLFDIRDSADMVELLDGYTHRVLARFHGRSRPPLSFNVSLDFVILYFFSDRINQAQGFAVLYQAVKEELPQERPAVNQTVAEVITEQANLSVSAARSSKVLYVITTSPSHPPQTVPGSNSWAPPMGAGSHRVEGWT

SEQ ID NO: 2630 - protein, 364 aa, synthetic construct
  REGION 1..364: note = KREMEN2 (Q8NCW0) SP+PP+ECD
MGTQALQGFLFLLFLPLLQPRGASAGSLHSPGLSECFQVNGADYRGHQNRTGPRGAGRPCLFWDQTQQHSYSSASDPHGRWGLGAHNFCRNPDGDVQPWCYVAETEEGIYWRYCDIPSCHMPGYLGCFVDSGAPPALSGPSGTSTKLTVQVCLRFCRMKGYQLAGVEAGYACFCGSESDLARGRLAPATDCDQICFGHPGQLCGGDGRLGVYEVSVGSCQGNWTAPQGVIYSPDFPDEYGPDRNCSWALGPPGAALELTFRLFELADPRDRLELRDAASGSLLRAFDGARPPPSGPLRLGTAALLLTFRSDARGHAQGFALTYRGLQDAAEDPEAPEGSAQTPAAPLDGANVSCSPRPGAPPAA

SEQ ID NO: 2631 - protein, 1120 aa, synthetic construct
  REGION 1..1120: note = L1CAM (P32004) SP+PP+ECD
MVVALRYVWPLLLCSPCLLIQIPEEYEGHHVMEPPVITEQSPRRLVVFPTDDISLKCEASGKPEVQFRWTRDGVHFKPKEELGVTVYQSPHSGSFTITGNNSNFAQRFQGIYRCFASNKLGTAMSHEIRLMAEGAPKWPKETVKPVEVEEGESVVLPCNPPPSAEPLRIYWMNSKILHIKQDERVTMGQNGNLYFANVLTSDNHSDYICHAHFPGTRTIIQKEPIDLRVKATNSMIDRKPRLLFPTNSSSHLVALQGQPLVLECIAEGFPTPTIKWLRPSGPMPADRVTYQNHNKTLQLLKVGEEDDGEYRCLAENSLGSARHAYYVTVEAAPYWLHKPQSHLYGPGETARLDCQVQGRPQPEVTWRINGIPVEELAKDQKYRIQRGALILSNVQPSDTMVTQCEARNRHGLLLANAYIYVVQLPAKILTADNQTYMAVQGSTAYLLCKAFGAPVPSVQWLDEDGTTVLQDERFFPYANGTLGIRDLQANDTGRYFCLAANDQNNVTIMANLKVKDATQITQGPRSTIEKKGSRVTFTCQASFDPSLQPSITWRGDGRDLQELGDSDKYFIEDGRLVIHSLDYSDQGNYSCVASTELDVVESRAQLLVVGSPGPVPRLVLSDLHLLTQSQVRVSWSPAEDHNAPIEKYDIEFEDKEMAPEKWYSLGKVPGNQTSTTLKLSPYVHYTFRVTAINKYGPGEPSPVSETVVTPEAAPEKNPVDVKGEGNETTNMVITWKPLRWMDWNAPQVQYRVQWRPQGTRGPWQEQIVSDPFLVVSNTSTFVPYEIKVQAVNSQGKGPEPQVTIGYSGEDYPQAIPELEGIEILNSSAVLVKWRPVDLAQVKGHLRGYNVTYWREGSQRKHSKRHIHKDHVVVPANTTSVILSGLRPYSSYHLEVQAFNGRGSGPASEFTFSTPEGVPGHPEALHLECQSNTSLLLRWQPPLSHNGVLTGYVLSYHPLDEGGKGQLSFNLRDPELRTHNLTDLSPHLRYRFQLQATTKEGPGEAIVREGGTMALSGISDFGNISATAGENYSVVSWVPKEGQCNFRFHILFKALGEEKGGASLSPQYVSYNQSSYTQWDLQPDTDYEIHLFKERMFRHQMAVKTNGTGRVRLPPAGFATE

SEQ ID NO: 2632 - protein, 450 aa, synthetic construct
  REGION 1..450: note = LAG3 (P18627) SP+PP+ECD
MWEAQFLGLLFLQPLWVAPVKPLQPGAEVPVVWAQEGAPAQLPCSPTIPLQDLSLLRRAGVTWQHQPDSGPPAAAPGHPLAPGPHPAAPSSWGPRPRRYTVLSVGPGGLRSGRLPLQPRVQLDERGRQRGDFSLWLRPARRADAGEYRAAVHLRDRALSCRLRLRLGQASMTASPPGSLRASDWVILNCSFSRPDRPASVHWFRNRGQGRVPVRESPHHHLAESFLFLPQVSPMDSGPWGCILTYRDGFNVSIMYNLTVLGLEPPTPLTVYAGAGSRVGLPCRLPAGVGTRSFLTAKWTPPGGGPDLLVTGDNGDFTLRLEDVSQAQAGTYTCHIHLQEQQLNATVTLAIITVTPKSFGSPGSLGKLLCEVTPVSGQERFVWSSLDTPSQRSFSGPWLEAQEAQLLSQPWQCQLYQGERLLGAAVYFTELSSPGAQRSGRAPGALPAGHL

SEQ ID NO: 2633 - protein, 165 aa, synthetic construct
  REGION 1..165: note = LAIR1 (Q6GTX8) SP+PP+ECD
MSPHPTALLGLVLCLAQTIHTQEEDLPRPSISAEPGTVIPLGSHVTFVCRGPVGVQTFRLERESRSTYNDTEDVSQASPSESEARFRIDSVSEGNAGPYRCIYYKPPKWSEQSDYLELLVKETSGGPDSPDTEPGSSAGPTQRPSDNSHNEHAPASQGLKAEHLY

SEQ ID NO: 2634 - protein, 382 aa, synthetic construct
  REGION 1..382: note = LAMP1 (P11279) SP+PP+ECD
MAAPGSARRPLLLLLLLLLLGLMHCASAAMFMVKNGNGTACIMANFSAAFSVNYDTKSGPKNMTFDLPSDATVVLNRSSCGKENTSDPSLVIAFGRGHTLTLNFTRNATRYSVQLMSFVYNLSDTHLFPNASSKEIKTVESITDIRADIDKKYRCVSGTQVHMNNVTVTLHDATIQAYLSNSSFSRGETRCEQDRPSPTTAPPAPPSPSPSPVPKSPSVDKYNVSGTNGTCLLASMGLQLNLTYERKDNTTVTRLLNINPNKTSASGSCGAHLVTLELHSEGTTVLLFQFGMNASSSRFFLQGIQLNTILPDARDPAFKAANGSLRALQATVGNSYKCNAEEHVRVTKAFSVNIFKVWVQAFKVEGGQFGSVEECLLDENSM

SEQ ID NO: 2635 - protein, 375 aa, synthetic construct
  REGION 1..375: note = LAMP2 (P13473) SP+PP+ECD
MVCFRLFPVPGSGLVLVCLVLGAVRSYALELNLTDSENATCLYAKWQMNFTVRYETTNKTYKTVTISDHGTVTYNGSICGDDQNGPKIAVQFGPGFSWIANFTKAASTYSIDSVSFSYNTGDNTTFPDAEDKGILTVDELLAIRIPLNDLFRCNSLSTLEKNDVVQHYWDVLVQAFVQNGTVSTNEFLCDKDKTSTVAPTIHTTVPSPTTTPTPKEKPEAGTYSVNNGNDTCLLATMGLQLNITQDKVASVININPNTTHSTGSCRSHTALLRLNSSTIKYLDFVFAVKNENRFYLKEVNISMYLVNGSVFSIANNNLSYWDAPLGSSYMCNKEQTVSVSGAFQINTFDLRVQPFNVTQGKYSTAQDCSADDDNF

SEQ ID NO: 2636 - protein, 381 aa, synthetic construct
  REGION 1..381: note = LAMP3 (Q9UQV4) SP+PP+ECD
MPRQLSAAAALFASLAVILHDGSQMRAKAFPETRDYSQPTAAATVQDIKKPVQQPAKQAPHQTLAARFMDGHITFQTAATVKIPTTTPATTKNTATTSPITYTLVTTQATPNNSHTAPPVTEVTVGPSLAPYSLPPTITPPAHTTGTSSSTVSHTTGNTTQPSNQTTLPATLSIALHKSTTGQKPVQPTHAPGTTAAAHNTTRTAAPASTVPGPTLAPQPSSVKTGIYQVLNGSRLCIKAEMGIQLIVQDKESVFSPRRYFNIDPNATQASGNCGTRKSNLLLNFQGGFVNLTFTKDEESYYISEVGAYLTVSDPETIYQGIKHAVVMFQTAVGHSFKCVSEQSLQLSAHLQVKTTDVQLQAFDFEDDHFGNVDECSSDYT

SEQ ID NO: 2637 - protein, 235 aa, synthetic construct
  REGION 1..235: note = LAMP5 (Q9UJQ1) SP+PP+ECD
MDLQGRGVPSIDRLRVLLMLFHTMAQIMAEQEVENLSGLSTNPEKDIFVVRENGTTCLMAEFAAKFIVPYDVWASNYVDLITEQADIALTRGAEVKGRCGHSQSELQVFWVDRAYALKMLFVKESHNMSKGPEATWRLSKVQFVYDSSEKTHFKDAVSAGKHTANSHHLSALVTPAGKSYECQAQQTISLASSDPQKTVTMILSAVHIQPFDIISDFVFSEEHKCPVDEREQLEE

SEQ ID NO: 2638 - protein, 235 aa, synthetic construct
  REGION 1..235: note = LAYN (Q6UX15) SP+PP+ECD
MRPGTALQAVLLAVLLVGLRAATGRLLSASDLDLRGGQPVCRGGTQRPCYKVIYFHDTSRRLNFEEAKEACRRDGGQLVSIESEDEQKLIEKFIENLLPSDGDFWIGLRRREEKQSNSTACQDLYAWTDGSISQFRNWYVDEPSCGSEVCVVMYHQPSAPAGIGGPYMFQWNDDRCNMKNNFICKYSDEKPAVPSREAEGEETELTTPVLPEETQEEDAKKTFKESREAALNLAY

SEQ ID NO: 2639 - protein, 2731 aa, synthetic construct
  REGION 1..2731: note = LCT (P09848) SP+PP+ECD
MELSWHVVFIALLSFSCWGSDWESDRNFISTAGPLTNDLLHNLSGLLGDQSSNFVAGDKDMYVCHQPLPTFLPEYFSSLHASQITHYKVFLSWAQLLPAGSTQNPDEKTVQCYRRLLKALKTARLQPMVILHHQTLPASTLRRTEAFADLFADYATFAFHSFGDLVGIWFTFSDLEEVIKELPHQESRASQLQTLSDAHRKAYEIYHESYAFQGGKLSVVLRAEDIPELLLEPPISALAQDTVDFLSLDLSYECQNEASLRQKLSKLQTIEPKVKVFIFNLKLPDCPSTMKNPASLLFSLFEAINKDQVLTIGFDINEFLSCSSSSKKSMSCSLTGSLALQPDQQQDHETTDSSPASAYQRIWEAFANQSRAERDAFLQDTFPEGFLWGASTGAFNVEGGWAEGGRGVSIWDPRRPLNTTEGQATLEVASDSYHKVASDVALLCGLRAQVYKFSISWSRIFPMGHGSSPSLPGVAYYNKLIDRLQDAGIEPMATLFHWDLPQALQDHGGWQNESVVDAFLDYAAFCFSTFGDRVKLWVTFHEPWVMSYAGYGTGQHPPGISDPGVASFKVAHLVLKAHARTWHHYNSHHRPQQQGHVGIVLNSDWAEPLSPERPEDLRASERFLHFMLGWFAHPVFVDGDYPATLRTQIQQMNRQCSHPVAQLPEFTEAEKQLLKGSADFLGLSHYTSRLISNAPQNTCIPSYDTIGGFSQHVNHVWPQTSSSWIRVVPWGIRRLLQFVSLEYTRGKVPIYLAGNGMPIGESENLFDDSLRVDYFNQYINEVLKAIKEDSVDVRSYIARSLIDGFEGPSGYSQRFGLHHVNFSDSSKSRTPRKSAYFFTSIIEKNGFLTKGAKRLLPPNTVNLPSKVRSDWESDRNFISTAGPLTNDLLHNLSGLLGDQSSNFVAGDKDMYVCHQPLPTFLPEYFSSLHASQITHYKVFLSWAQLLPAGSTQNPDEKTVQCYRRLLKALKTARLQPMVILHHQTLPASTLRRTEAFADLFADYATFAFHSFGDLVGIWFTFSDLEEVIKELPHQESRASQLQTLSDAHRKAYEIYHESYAFQGGKLSVVLRAEDIPELLLEPPISALAQDTVDFLSLDLSYECQNEASLRQKLSKLQTIEPKVKVFIFNLKLPDCPSTMKNPASLLFSLFEAINKDQVLTIGFDINEFLSCSSSSKKSMSCSLTGSLALQPDQQQDHETTDSSPASAYQRIWEAFANQSRAERDAFLQDTFPEGFLWGASTGAFNVEGGWAEGGRGVSIWDPRRPLNTTEGQATLEVASDSYHKVASDVALLCGLRAQVYKFSISWSRIFPMGHGSSPSLPGVAYYNKLIDRLQDAGIEPMATLFHWDLPQALQDHGGWQNESVVDAFLDYAAFCFSTFGDRVKLWVTFHEPWVMSYAGYGTGQHPPGISDPGVASFKVAHLVLKAHARTWHHYNSHHRPQQQGHVGIVLNSDWAEPLSPERPEDLRASERFLHFMLGWFAHPVFVDGDYPATLRTQIQQMNRQCSHPVAQLPEFTEAEKQLLKGSADFLGLSHYTSRLISNAPQNTCIPSYDTIGGFSQHVNHVWPQTSSSWIRVVPWGIRRLLQFVSLEYTRGKVPIYLAGNGMPIGESENLFDDSLRVDYFNQYINEVLKAIKEDSVDVRSYIARSLIDGFEGPSGYSQRFGLHHVNFSDSSKSRTPRKSAYFFTSIIEKNGFLTKGAKRLLPPNTVNLPSKVRAFTFPSEVPSKAKVVWEKFSSQPKFERDLFYHGTFRDDFLWGVSSSAYQIEGAWDADGKGPSIWDNFTHTPGSNVKDNATGDIACDSYHQLDADLNMLRALKVKAYRFSISWSRIFPTGRNSSINSHGVDYYNRLINGLVASNIFPMVTLFHWDLPQALQDIGGWENPALIDLFDSYADFCFQTFGDRVKFWMTFNEPMYLAWLGYGSGEFPPGVKDPGWAPYRIAHAVIKAHARVYHTYDEKYRQEQKGVISLSLSTHWAEPKSPGVPRDVEAADRMLQFSLGWFAHPIFRNGDYPDTMKWKVGNRSELQHLATSRLPSFTEEEKRFIRATADVFCLNTYYSRIVQHKTPRLNPPSYEDDQEMAEEEDPSWPSTAMNRAAPWGTRRLLNWIKEEYGDIPIYITENGVGLTNPNTEDTDRIFYHKTYINEALKAYRLDGIDLRGYVAWSLMDNFEWLNGYTVKFGLYHVDFNNTNRPRTARASARYYTEVITNNGMPLAREDEFLYGRFPEGFIWSAASAAYQIEGAWRADGKGLSIWDTFSHTPLRVENDAIGDVACDSYHKIAEDLVTLQNLGVSHYRFSISWSRILPDGTTRYINEAGLNYYVRLIDTLLAASIQPQVTIYHWDLPQTLQDVGGWENETIVQRFKEYADVLFQRLGDKVKFWITLNEPFVIAYQGYGYGTAAPGVSNRPGTAPYIVGHNLIKAHAEAWHLYNDVYRASQGGVISITISSDWAEPRDPSNQEDVEAARRYVQFMGGWFAHPIFKNGDYNEVMKTRIRDRSLAAGLNKSRLPEFTESEKRRINGTYDFFGFNHYTTVLAYNLNYATAISSFDADRGVASIADRSWPDSGSFWLKMTPFGFRRILNWLKEEYNDPPIYVTENGVSQREETDLNDTARIYYLRTYINEALKAVQDKVDLRGYTVWSAMDNFEWATGFSERFGLHFVNYSDPSLPRIPKASAKFYASVVRCNGFPDPATGPHACLHQPDAGPTISPVRQEEVQFLGLMLGTTEAQT

SEQ ID NO: 2640 - protein, 788 aa, synthetic construct
  REGION 1..788: note = LDLR (P01130) SP+PP+ECD
MGPWGWKLRWTVALLLAAAGTAVGDRCERNEFQCQDGKCISYKWVCDGSAECQDGSDESQETCLSVTCKSGDFSCGGRVNRCIPQFWRCDGQVDCDNGSDEQGCPPKTCSQDEFRCHDGKCISRQFVCDSDRDCLDGSDEASCPVLTCGPASFQCNSSTCIPQLWACDNDPDCEDGSDEWPQRCRGLYVFQGDSSPCSAFEFHCLSGECIHSSWRCDGGPDCKDKSDEENCAVATCRPDEFQCSDGNCIHGSRQCDREYDCKDMSDEVGCVNVTLCEGPNKFKCHSGECITLDKVCNMARDCRDWSDEPIKECGTNECLDNNGGCSHVCNDLKIGYECLCPDGFQLVAQRRCEDIDECQDPDTCSQLCVNLEGGYKCQCEEGFQLDPHTKACKAVGSIAYLFFTNRHEVRKMTLDRSEYTSLIPNLRNVVALDTEVASNRIYWSDLSQRMICSTQLDRAHGVSSYDTVISRDIQAPDGLAVDWIHSNIYWTDSVLGTVSVADTKGVKRKTLFRENGSKPRAIVVDPVHGFMYWTDWGTPAKIKKGGLNGVDIYSLVTENIQWPNGITLDLLSGRLYWVDSKLHSISSIDVNGGNRKTILEDEKRLAHPFSLAVFEDKVFWTDIINEAIFSANRLTGSDVNLLAENLLSPEDMVLFHNLTQPRGVNWCERTTLSNGGCQYLCLPAPQINPHSPKFTCACPDGMLLARDMRSCLTEAEAAVATQETSTVRLKVSSTAVRTQHTTTRPVPDTSRLPGATPGLTTVEIVTMSHQALGDVAGRGNEKKPSSVR

SEQ ID NO: 2641 - protein, 173 aa, synthetic construct
  REGION 1..173: note = LDLRAD3 (Q86YD5) SP+PP+ECD
MWLLGPLCLLLSSAAESQLLPGNNFTNECNIPGNFMCSNGRCIPGAWQCDGLPDCFDKSDEKECPKAKSKCGPTFFPCASGIHCIIGRFRCNGFEDCPDGSDEENCTANPLLCSTARYHCKNGLCIDKSFICDGQNNCQDNSDEESCESSQEPGSGQVFVTSENQLVYYPSIT

SEQ ID NO: 2642 - protein, 839 aa, synthetic construct
  REGION 1..839: note = LEPR (P48357) SP+PP+ECD
MICQKFCVVLLHWEFIYVITAFNLSYPITPWRFKLSCMPPNSTYDYFLLPAGLSKNTSNSNGHYETAVEPKFNSSGTHFSNLSKTTFHCCFRSEQDRNCSLCADNIEGKTFVSTVNSLVFQQIDANWNIQCWLKGDLKLFICYVESLFKNLFRNYNYKVHLLYVLPEVLEDSPLVPQKGSFQMVHCNCSVHECCECLVPVPTAKLNDTLLMCLKITSGGVIFQSPLMSVQPINMVKPDPPLGLHMEITDDGNLKISWSSPPLVPFPLQYQVKYSENSTTVIREADKIVSATSLLVDSILPGSSYEVQVRGKRLDGPGIWSDWSTPRVFTTQDVIYFPPKILTSVGSNVSFHCIYKKENKIVPSKEIVWWMNLAEKIPQSQYDVVSDHVSKVTFFNLNETKPRGKFTYDAVYCCNEHECHHRYAELYVIDVNINISCETDGYLTKMTCRWSTSTIQSLAESTLQLRYHRSSLYCSDIPSIHPISEPKDCYLQSDGFYECIFQPIFLLSGYTMWIRINHSLGSLDSPPTCVLPDSVVKPLPPSSVKAEITINIGLLKISWEKPVFPENNLQFQIRYGLSGKEVQWKMYEVYDAKSKSVSLPVPDLCAVYAVQVRCKRLDGLGYWSNWSNPAYTVVMDIKVPMRGPEFWRIINGDTMKKEKNVTLLWKPLMKNDSLCSVQRYVINHHTSCNGTWSEDVGNHTKFTFLWTEQAHTVTVLAINSIGASVANFNLTFSWPMSKVNIVQSLSAYPLNSSCVIVSWILSPSDYKLMYFIIEWKNLNEDGEIKWLRISSSVKKYYIHDHFIPIEKYQFSLYPIFMEGVGKPKIINSFTQDDIEKHQSD

SEQ ID NO: 2643 - protein, 833 aa, synthetic construct
  REGION 1..833: note = LIFR (P42702) SP+PP+ECD
MMDIYVCLKRPSWMVDNKRMRTASNFQWLLSTFILLYLMNQVNSQKKGAPHDLKCVTNNLQVWNCSWKAPSGTGRGTDYEVCIENRSRSCYQLEKTSIKIPALSHGDYEITINSLHDFGSSTSKFTLNEQNVSLIPDTPEILNLSADFSTSTLYLKWNDRGSVFPHRSNVIWEIKVLRKESMELVKLVTHNTTLNGKDTLHHWSWASDMPLECAIHFVEIRCYIDNLHFSGLEEWSDWSPVKNISWIPDSQTKVFPQDKVILVGSDITFCCVSQEKVLSALIGHTNCPLIHLDGENVAIKIRNISVSASSGTNVVFTTEDNIFGTVIFAGYPPDTPQQLNCETHDLKEIICSWNPGRVTALVGPRATSYTLVESFSGKYVRLKRAEAPTNESYQLLFQMLPNQEIYNFTLNAHNPLGRSQSTILVNITEKVYPHTPTSFKVKDINSTAVKLSWHLPGNFAKINFLCEIEIKKSNSVQEQRNVTIKGVENSSYLVALDKLNPYTLYTFRIRCSTETFWKWSKWSNKKQHLTTEASPSKGPDTWREWSSDGKNLIIYWKPLPINEANGKILSYNVSCSSDEETQSLSEIPDPQHKAEIRLDKNDYIISVVAKNSVGSSPPSKIASMEIPNDDLKIEQVVGMGKGILLTWHYDPNMTCDYVIKWCNSSRSEPCLMDWRKVPSNSTETVIESDEFRPGIRYNFFLYGCRNQGYQLLRSMIGYIEELAPIVAPNFTVEDTSADSILVKWEDIPVEELRGFLRGYLFYFGKGERDTSKMRVLESGRSDIKVKNITDISQKTLRIADLQGKTSYHLVLRAYTDGGVGPEKSMYVVTKENS

SEQ ID NO: 2644 - protein, 461 aa, synthetic construct
  REGION 1..461: note = LILRA1 (O75019) SP+PP+ECD
MTPIVTVLICLRLSLGPRTHVQAGTLPKPTLWAEPGSVITQGSPVTLWCQGILETQEYRLYREKKTAPWITRIPQEIVKKGQFPIPSITWEHTGRYRCFYGSHTAGWSEPSDPLELVVTGAYIKPTLSALPSPVVTSGGNVTLHCVSQVAFGSFILCKEGEDEHPQCLNSQPRTHGWSRAIFSVGPVSPSRRWSYRCYAYDSNSPHVWSLPSDLLELLVLGVSKKPSLSVQPGPIVAPGESLTLQCVSDVSYDRFVLYKEGERDFLQLPGPQPQAGLSQANFTLGPVSRSYGGQYRCSGAYNLSSEWSAPSDPLDILIAGQFRGRPFISVHPGPTVASGENVTLLCQSWGPFHTFLLTKAGAADAPLRLRSIHEYPKYQAEFPMSPVTSAHSGTYRCYGSLSSNPYLLSHPSDSLELMVSGAAETLSPPQNKSDSKAGAANTLSPSQNKTASHPQDYTVEN

SEQ ID NO: 2645 - protein, 449 aa, synthetic construct
  REGION 1..449: note = LILRA2 (Q8N149) SP+PP+ECD
MTPILTVLICLGLSLGPRTHVQAGHLPKPTLWAEPGSVIIQGSPVTLRCQGSLQAEEYHLYRENKSASWVRRIQEPGKNGQFPIPSITWEHAGRYHCQYYSHNHSSEYSDPLELVVTGAYSKPTLSALPSPVVTLGGNVTLQCVSQVAFDGFILCKEGEDEHPQRLNSHSHARGWSWAIFSVGPVSPSRRWSYRCYAYDSNSPYVWSLPSDLLELLVPGVSKKPSLSVQPGPMVAPGESLTLQCVSDVGYDRFVLYKEGERDFLQRPGWQPQAGLSQANFTLGPVSPSHGGQYRCYSAHNLSSEWSAPSDPLDILITGQFYDRPSLSVQPVPTVAPGKNVTLLCQSRGQFHTFLLTKEGAGHPPLHLRSEHQAQQNQAEFRMGPVTSAHVGTYRCYSSLSSNPYLLSLPSDPLELVVSEAAETLSPSQNKTDSTTTSLGQHPQDYTVEN

SEQ ID NO: 2646 - protein, 446 aa, synthetic construct
  REGION 1..446: note = LILRA4 (P59901) SP+PP+ECD
MTLILTSLLFFGLSLGPRTRVQAENLPKPILWAEPGPVITWHNPVTIWCQGTLEAQGYRLDKEGNSMSRHILKTLESENKVKLSIPSMMWEHAGRYHCYYQSPAGWSEPSDPLELVVTAYSRPTLSALPSPVVTSGVNVTLRCASRLGLGRFTLIEEGDHRLSWTLNSHQHNHGKFQALFPMGPLTFSNRGTFRCYGYENNTPYVWSEPSDPLQLLVSGVSRKPSLLTLQGPVVTPGENLTLQCGSDVGYIRYTLYKEGADGLPQRPGRQPQAGLSQANFTLSPVSRSYGGQYRCYGAHNVSSEWSAPSDPLDILIAGQISDRPSLSVQPGPTVTSGEKVTLLCQSWDPMFTFLLTKEGAAHPPLRLRSMYGAHKYQAEFPMSPVTSAHAGTYRCYGSRSSNPYLLSHPSEPLELVVSGATETLNPAQKKSDSKTAPHLQDYTVEN

SEQ ID NO: 2647 - protein, 268 aa, synthetic construct
  REGION 1..268: note = LILRA5 (A6NI73) SP+PP+ECD
MAPWSHPSAQLQPVGGDAVSPALMVLLCLGLSLGPRTHVQAGNLSKATLWAEPGSVISRGNSVTIRCQGTLEAQEYRLVKEGSPEPWDTQNPLEPKNKARFSIPSMTEHHAGRYRCYYYSPAGWSEPSDPLELVVTGFYNKPTLSALPSPVVTSGENVTLQCGSRLRFDRFILTEEGDHKLSWTLDSQLTPSGQFQALFPVGPVTPSHRWMLRCYGSRRHILQVWSEPSDLLEIPVSGAADNLSPSQNKSDSGTASHLQDYAVENLIR

SEQ ID NO: 2648 - protein, 447 aa, synthetic construct
  REGION 1..447: note = LILRA6 (Q6PI73) SP+PP+ECD
MTPALTALLCLGLSLGPRTRVQAGPFPKPTLWAEPGSVISWGSPVTIWCQGSLEAQEYQLDKEGSPEPLDRNNPLEPKNKARFSIPSMTQHHAGRYRCHYYSSAGWSEPSDPLELVMTGFYNKPTLSALPSPVVASGGNMTLRCGSQKGYHHFVLMKEGEHQLPRTLDSQQLHSGGFQALFPVGPVTPSHRWRFTCYYYYTNTPRVWSHPSDPLEILPSGVSRKPSLLTLQGPVLAPGQSLTLQCGSDVGYDRFVLYKEGERDFLQRPGQQPQAGLSQANFTLGPVSPSHGGQYRCYGAHNLSSEWSAPSDPLNILMAGQIYDTVSLSAQPGPTVASGENVTLLCQSRGYFDTFLLTKEGAAHPPLRLRSMYGAHKYQAEFPMSPVTSAHAGTYRCYGSYSSNPHLLSFPSEPLELMVSGHSGGSSLPPTGPPSTPASHAKDYTVEN

SEQ ID NO: 2649 - protein, 461 aa, synthetic construct
  REGION 1..461: note = LILRB1 (Q8NHL6) SP+PP+ECD
MTPILTVLICLGLSLGPRTHVQAGHLPKPTLWAEPGSVITQGSPVTLRCQGGQETQEYRLYREKKTALWITRIPQELVKKGQFPIPSITWEHAGRYRCYYGSDTAGRSESSDPLELVVTGAYIKPTLSAQPSPVVNSGGNVILQCDSQVAFDGFSLCKEGEDEHPQCLNSQPHARGSSRAIFSVGPVSPSRRWWYRCYAYDSNSPYEWSLPSDLLELLVLGVSKKPSLSVQPGPIVAPEETLTLQCGSDAGYNRFVLYKDGERDFLQLAGAQPQAGLSQANFTLGPVSRSYGGQYRCYGAHNLSSEWSAPSDPLDILIAGQFYDRVSLSVQPGPTVASGENVTLLCQSQGWMQTFLLTKEGAADDPWRLRSTYQSQKYQAEFPMGPVTSAHAGTYRCYGSQSSKPYLLTHPSDPLELVVSGPSGGPSSPTTGPTSTSGPEDQPLTPTGSDPQSGLGRHLGV

SEQ ID NO: 2650 - protein, 461 aa, synthetic construct
  REGION 1..461: note = LILRB2 (Q8N423) SP+PP+ECD
MTPIVTVLICLGLSLGPRTHVQTGTIPKPTLWAEPDSVITQGSPVTLSCQGSLEAQEYRLYREKKSASWITRIRPELVKNGQFHIPSITWEHTGRYGCQYYSRARWSELSDPLVLVMTGAYPKPTLSAQPSPVVTSGGRVTLQCESQVAFGGFILCKEGEEEHPQCLNSQPHARGSSRAIFSVGPVSPNRRWSHRCYGYDLNSPYVWSSPSDLLELLVPGVSKKPSLSVQPGPVVAPGESLTLQCVSDVGYDRFVLYKEGERDLRQLPGRQPQAGLSQANFTLGPVSRSYGGQYRCYGAHNLSSECSAPSDPLDILITGQIRGTPFISVQPGPTVASGENVTLLCQSWRQFHTFLLTKAGAADAPLRLRSIHEYPKYQAEFPMSPVTSAHAGTYRCYGSLNSDPYLLSHPSEPLELVVSGPSMGSSPPPTGPISTPAGPEDQPLTPTGSDPQSGLGRHLGV

SEQ ID NO: 2651 - protein, 443 aa, synthetic construct
  REGION 1..443: note = LILRB3 (O75022) SP+PP+ECD
MTPALTALLCLGLSLGPRTRVQAGPFPKPTLWAEPGSVISWGSPVTIWCQGSQEAQEYRLHKEGSPEPLDRNNPLEPKNKARFSIPSMTEHHAGRYRCHYYSSAGWSEPSDPLEMVMTGAYSKPTLSALPSPVVASGGNMTLRCGSQKGYHHFVLMKEGEHQLPRTLDSQQLHSRGFQALFPVGPVTPSHRWRFTCYYYYTNTPWVWSHPSDPLEILPSGVSRKPSLLTLQGPVLAPGQSLTLQCGSDVGYNRFVLYKEGERDFLQRPGQQPQAGLSQANFTLGPVSPSNGGQYRCYGAHNLSSEWSAPSDPLNILMAGQIYDTVSLSAQPGPTVASGENVTLLCQSWWQFDTFLLTKEGAAHPPLRLRSMYGAHKYQAEFPMSPVTSAHAGTYRCYGSYSSNPHLLSHPSEPLELVVSGHSGGSSLPPTGPPSTPGLGRYLE

SEQ ID NO: 2652 - protein, 458 aa, synthetic construct
  REGION 1..458: note = LILRB5 (O75023) SP+PP+ECD
MTLTLSVLICLGLSVGPRTCVQAGTLPKPTLWAEPASVIARGKPVTLWCQGPLETEEYRLDKEGLPWARKRQNPLEPGAKAKFHIPSTVYDSAGRYRCYYETPAGWSEPSDPLELVATGFYAEPTLLALPSPVVASGGNVTLQCDTLDGLLTFVLVEEEQKLPRTLYSQKLPKGPSQALFPVGPVTPSCRWRFRCYYYYRKNPQVWSNPSDLLEILVPGVSRKPSLLIPQGSVVARGGSLTLQCRSDVGYDIFVLYKEGEHDLVQGSGQQPQAGLSQANFTLGPVSRSHGGQYRCYGAHNLSPRWSAPSDPLDILIAGLIPDIPALSVQPGPKVASGENVTLLCQSWHQIDTFFLTKEGAAHPPLCLKSKYQSYRHQAEFSMSPVTSAQGGTYRCYSAIRSYPYLLSSPSYPQELVVSGPSGDPSLSPTGSTPTPGPEDQPLTPTGLDPQSGLGRHLG

SEQ ID NO: 2653 - protein, 561 aa, synthetic construct
  REGION 1..561: note = LINGO1 (Q96FE5) SP+PP+ECD
MQVSKRMLAGGVRSMPSPLLACWQPILLLVLGSVLSGSATGCPPRCECSAQDRAVLCHRKRFVAVPEGIPTETRLLDLGKNRIKTLNQDEFASFPHLEELELNENIVSAVEPGAFNNLFNLRTLGLRSNRLKLIPLGVFTGLSNLTKLDISENKIVILLDYMFQDLYNLKSLEVGDNDLVYISHRAFSGLNSLEQLTLEKCNLTSIPTEALSHLHGLIVLRLRHLNINAIRDYSFKRLYRLKVLEISHWPYLDTMTPNCLYGLNLTSLSITHCNLTAVPYLAVRHLVYLRFLNLSYNPISTIEGSMLHELLRLQEIQLVGGQLAVVEPYAFRGLNYLRVLNVSGNQLTTLEESVFHSVGNLETLILDSNPLACDCRLLWVFRRRWRLNFNRQQPTCATPEFVQGKEFKDFPDVLLPNYFTCRRARIRDRKAQQVFVDEGHTVQFVCRADGDPPPAILWLSPRKHLVSAKSNGRLTVFPDGTLEVRYAQVQDNGTYLCIAANAGGNDSMPAHLHVRSYSPDWPHQPNKTFAFISNQPGEGEANSTRATVPFPFDIKTLIIAT

SEQ ID NO: 2654 - protein, 545 aa, synthetic construct
  REGION 1..545: note = LINGO2 (Q7L985) SP+PP+ECD
MLHTAISCWQPFLGLAVVLIFMGSTIGCPARCECSAQNKSVSCHRRRLIAIPEGIPIETKILDLSKNRLKSVNPEEFISYPLLEEIDLSDNIIANVEPGAFNNLFNLRSLRLKGNRLKLVPLGVFTGLSNLTKLDISENKIVILLDYMFQDLHNLKSLEVGDNDLVYISHRAFSGLLSLEQLTLEKCNLTAVPTEALSHLRSLISLHLKHLNINNMPVYAFKRLFHLKHLEIDYWPLLDMMPANSLYGLNLTSLSVTNTNLSTVPFLAFKHLVYLTHLNLSYNPISTIEAGMFSDLIRLQELHIVGAQLRTIEPHSFQGLRFLRVLNVSQNLLETLEENVFSSPRALEVLSINNNPLACDCRLLWILQRQPTLQFGGQQPMCAGPDTIRERSFKDFHSTALSFYFTCKKPKIREKKLQHLLVDEGQTVQLECSADGDPQPVISWVTPRRRFITTKSNGRATVLGDGTLEIRFAQDQDSGMYVCIASNAAGNDTFTASLTVKGFASDRFLYANRTPMYMTDSNDTISNGTNANTFSLDLKTILVST

SEQ ID NO: 2655 - protein, 531 aa, synthetic construct
  REGION 1..531: note = LINGO3 (P0C6S8) SP+PP+ECD
MTCWLCVLSLPLLLLPAAPPPAGGCPARCECTVQTRAVACTRRRLTAVPDGIPAETRLLELSRNRIRCLNPGDLAALPALEELDLSENAIAHVEPGAFANLPRLRVLRLRGNQLKLIPPGVFTRLDNLTLLDLSENKLVILLDYTFQDLHSLRRLEVGDNDLVFVSRRAFAGLLALEELTLERCNLTALSGESLGHLRSLGALRLRHLAIASLEDQNFRRLPGLLHLEIDNWPLLEEVAAGSLRGLNLTSLSVTHTNITAVPAAALRHQAHLTCLNLSHNPISTVPRGSFRDLVRLRELHLAGALLAVVEPQAFLGLRQIRLLNLSNNLLSTLEESTFHSVNTLETLRVDGNPLACDCRLLWIVQRRKTLNFDGRLPACATPAEVRGDALRNLPDSVLFEYFVCRKPKIRERRLQRVTATAGEDVRFLCRAEGEPAPTVAWVTPQHRPVTATSAGRARVLPGGTLEIQDARPQDSGTYTCVASNAGGNDTYFATLTVRPEPAANRTPGEAHNETLAALRAPLDLTTILVST

SEQ ID NO: 2656 - protein, 533 aa, synthetic construct
  REGION 1..533: note = LINGO4 (Q6UY18) SP+PP+ECD
MDAATAPKQAWPPWPPLLFLLLLPGGSGGSCPAVCDCTSQPQAVLCGHRQLEAVPGGLPLDTELLDLSGNRLWGLQQGMLSRLSLLQELDLSYNQLSTLEPGAFHGLQSLLTLRLQGNRLRIMGPGVFSGLSALTLLDLRLNQIVLFLDGAFGELGSLQKLEVGDNHLVFVAPGAFAGLAKLSTLTLERCNLSTVPGLALARLPALVALRLRELDIGRLPAGALRGLGQLKELEIHLWPSLEALDPGSLVGLNLSSLAITRCNLSSVPFQALYHLSFLRVLDLSQNPISAIPARRLSPLVRLQELRLSGACLTSIAAHAFHGLTAFHLLDVADNALQTLEETAFPSPDKLVTLRLSGNPLTCDCRLLWLLRLRRHLDFGMSPPACAGPHHVQGKSLKEFSDILPPGHFTCKPALIRKSGPRWVIAEEGGHAVFSCSGDGDPAPTVSWMRPHGAWLGRAGRVRVLEDGTLEIRSVQLRDRGAYVCVVSNVAGNDSLRTWLEVIQVEPPNGTLSDPNITVPGIPGPFFLDSRGVA

SEQ ID NO: 2657 - protein, 322 aa, synthetic construct
  REGION 1..322: note = LMAN2 (Q12907) SP+PP+ECD
MAAEGWIWRWGWGRRCLGRPGLLGPGPGPTTPLFLLLLLGSVTADITDGNSEHLKREHSLIKPYQGVGSSSMPLWDFQGSTMLTSQYVRLTPDERSKEGSIWNHQPCFLKDWEMHVHFKVHGTGKKNLHGDGIALWYTRDRLVPGPVFGSKDNFHGLAIFLDTYPNDETTERVFPYISVMVNNGSLSYDHSKDGRWTELAGCTADFRNRDHDTFLAVRYSRGRLTVMTDLEDKNEWKNCIDITGVRLPTGYYFGASAGTGDLSDNHDIISMKLFQLMVEHTPDEESIDWTKIEPSVNFLKSPKDNVDDPTGNFRSGPLTGWR

SEQ ID NO: 2658 - protein, 313 aa, synthetic construct
  REGION 1..313: note = LMAN2L (Q9H0V9) SP+PP+ECD
MAATLGPLGSWQQWRRCLSARDGSRMLLLLLLLGSGQGPQQVGAGQTFEYLKREHSLSKPYQGVGTGSSSLWNLMGNAMVMTQYIRLTPDMQSKQGALWNRVPCFLRDWELQVHFKIHGQGKKNLHGDGLAIWYTKDRMQPGPVFGNMDKFVGLGVFVDTYPNEEKQQERVFPYISAMVNNGSLSYDHERDGRPTELGGCTAIVRNLHYDTFLVIRYVKRHLTIMMDIDGKHEWRDCIEVPGVRLPRGYYFGTSSITGDLSDNHDVISLKLFELTVERTPEEEKLHRDVFLPSVDNMKLPEMTAPLPPLSGLA

SEQ ID NO: 2659 - protein, 536 aa, synthetic construct
  REGION 1..536: note = LRFN1 (Q9P244) SP+PP+ECD
MAPGPFSSALLSPPPAALPFLLLLWAGASRGQPCPGRCICQNVAPTLTMLCAKTGLLFVPPAIDRRVVELRLTDNFIAAVRRRDFANMTSLVHLTLSRNTIGQVAAGAFADLRALRALHLDSNRLAEVRGDQLRGLGNLRHLILGNNQIRRVESAAFDAFLSTVEDLDLSYNNLEALPWEAVGQMVNLNTLTLDHNLIDHIAEGTFVQLHKLVRLDMTSNRLHKLPPDGLFLRSQGTGPKPPTPLTVSFGGNPLHCNCELLWLRRLTREDDLETCATPEHLTDRYFWSIPEEEFLCEPPLITRQAGGRALVVEGQAVSLRCRAVGDPEPVVHWVAPDGRLLGNSSRTRVRGDGTLDVTITTLRDSGTFTCIASNAAGEATAPVEVCVVPLPLMAPPPAAPPPLTEPGSSDIATPGRPGANDSAAERRLVAAELTSNSVLIRWPAQRPVPGIRMYQVQYNSSVDDSLVYRMIPSTSQTFLVNDLAAGRAYDLCVLAVYDDGATALPATRVVGCVQFTTAGDPAPCRPLRAHFLGGTM

SEQ ID NO: 2660 - protein, 534 aa, synthetic construct
  REGION 1..534: note = LRFN2 (Q9ULH4) SP+PP+ECD
METLLGGLLAFGMAFAVVDACPKYCVCQNLSESLGTLCPSKGLLFVPPDIDRRTVELRLGGNFIIHISRQDFANMTGLVDLTLSRNTISHIQPFSFLDLESLRSLHLDSNRLPSLGEDTLRGLVNLQHLIVNNNQLGGIADEAFEDFLLTLEDLDLSYNNLHGLPWDSVRRMVNLHQLSLDHNLLDHIAEGTFADLQKLARLDLTSNRLQKLPPDPIFARSQASALTATPFAPPLSFSFGGNPLHCNCELLWLRRLERDDDLETCGSPGGLKGRYFWHVREEEFVCEPPLITQHTHKLLVLEGQAATLKCKAIGDPSPLIHWVAPDDRLVGNSSRTAVYDNGTLDIFITTSQDSGAFTCIAANAAGEATAMVEVSIVQLPHLSNSTSRTAPPKSRLSDITGSSKTSRGGGGSGGGEPPKSPPERAVLVSEVTTTSALVKWSVSKSAPRVKMYQLQYNCSDDEVLIYRMIPASNKAFVVNNLVSGTGYDLCVLAMWDDTATTLTATNIVGCAQFFTKADYPQCQSMHSQILGGTM

SEQ ID NO: 2661 - protein, 539 aa, synthetic construct
  REGION 1..539: note = LRFN3 (Q9BTN0) SP+PP+ECD
MAILPLLLCLLPLAPASSPPQSATPSPCPRRCRCQTQSLPLSVLCPGAGLLFVPPSLDRRAAELRLADNFIASVRRRDLANMTGLLHLSLSRNTIRHVAAGAFADLRALRALHLDGNRLTSLGEGQLRGLVNLRHLILSNNQLAALAAGALDDCAETLEDLDLSYNNLEQLPWEALGRLGNVNTLGLDHNLLASVPAGAFSRLHKLARLDMTSNRLTTIPPDPLFSRLPLLARPRGSPASALVLAFGGNPLHCNCELVWLRRLAREDDLEACASPPALGGRYFWAVGEEEFVCEPPVVTHRSPPLAVPAGRPAALRCRAVGDPEPRVRWVSPQGRLLGNSSRARAFPNGTLELLVTEPGDGGIFTCIAANAAGEATAAVELTVGPPPPPQLANSTSCDPPRDGDPDALTPPSAASASAKVADTGPPTDRGVQVTEHGATAALVQWPDQRPIPGIRMYQIQYNSSADDILVYRMIPAESRSFLLTDLASGRTYDLCVLAVYEDSATGLTATRPVGCARFSTEPALRPCGAPHAPFLGGTM

SEQ ID NO: 2662 - protein, 518 aa, synthetic construct
  REGION 1..518: note = LRFN4 (Q6PJG9) SP+PP+ECD
MAPPLLLLLLASGAAACPLPCVCQNLSESLSTLCAHRGLLFVPPNVDRRTVELRLADNFIQALGPPDFRNMTGLVDLTLSRNAITRIGARAFGDLESLRSLHLDGNRLVELGTGSLRGPVNLQHLILSGNQLGRIAPGAFDDFLESLEDLDLSYNNLRQVPWAGIGAMPALHTLNLDHNLIDALPPGAFAQLGQLSRLDLTSNRLATLAPDPLFSRGRDAEASPAPLVLSFSGNPLHCNCELLWLRRLARPDDLETCASPPGLAGRYFWAVPEGEFSCEPPLIARHTQRLWVLEGQRATLRCRALGDPAPTMHWVGPDDRLVGNSSRARAFPNGTLEIGVTGAGDAGGYTCIATNPAGEATARVELRVLALPHGGNSSAEGGRPGPSDIAASARTAAEGEGTLESEPAVQVTEVTATSGLVSWGPGRPADPVWMFQIQYNSSEDETLIYRIVPASSHHFLLKHLVPGADYDLCLLALSPAAGPSDLTATRLLGCAHFSTLPASPLCHALQAHVLGGTL

SEQ ID NO: 2663 - protein, 529 aa, synthetic construct
  REGION 1..529: note = LRFN5 (Q96NI6) SP+PP+ECD
MEKILFYLFLIGIAVKAQICPKRCVCQILSPNLATLCAKKGLLFVPPNIDRRTVELRLADNFVTNIKRKDFANMTSLVDLTLSRNTISFITPHAFADLRNLRALHLNSNRLTKITNDMFSGLSNLHHLILNNNQLTLISSTAFDDVFALEELDLSYNNLETIPWDAVEKMVSLHTLSLDHNMIDNIPKGTFSHLHKMTRLDVTSNKLQKLPPDPLFQRAQVLATSGIISPSTFALSFGGNPLHCNCELLWLRRLSREDDLETCASPPLLTGRYFWSIPEEEFLCEPPLITRHTHEMRVLEGQRATLRCKARGDPEPAIHWISPEGKLISNATRSLVYDNGTLDILITTVKDTGAFTCIASNPAGEATQIVDLHIIKLPHLLNSTNHIHEPDPGSSDISTSTKSGSNTSSSNGDTKLSQDKIVVAEATSSTALLKFNFQRNIPGIRMFQIQYNGTYDDTLVYRMIPPTSKTFLVNNLAAGTMYDLCVLAIYDDGITSLTATRVVGCIQFTTEQDYVRCHFMQSQFLGGTM

SEQ ID NO: 2664 - protein, 794 aa, synthetic construct
  REGION 1..794: note = LRIG1 (Q96JA1) SP+PP+ECD
MARPVRGGLGAPRRSPCLLLLWLLLLRLEPVTAAAGPRAPCAAACTCAGDSLDCGGRGLAALPGDLPSWTRSLNLSYNKLSEIDPAGFEDLPNLQEVYLNNNELTAVPSLGAASSHVVSLFLQHNKIRSVEGSQLKAYLSLEVLDLSLNNITEVRNTCFPHGPPIKELNLAGNRIGTLELGAFDGLSRSLLTLRLSKNRITQLPVRAFKLPRLTQLDLNRNRIRLIEGLTFQGLNSLEVLKLQRNNISKLTDGAFWGLSKMHVLHLEYNSLVEVNSGSLYGLTALHQLHLSNNSIARIHRKGWSFCQKLHELVLSFNNLTRLDEESLAELSSLSVLRLSHNSISHIAEGAFKGLRSLRVLDLDHNEISGTIEDTSGAFSGLDSLSKLTLFGNKIKSVAKRAFSGLEGLEHLNLGGNAIRSVQFDAFVKMKNLKELHISSDSFLCDCQLKWLPPWLIGRMLQAFVTATCAHPESLKGQSIFSVPPESFVCDDFLKPQIITQPETTMAMVGKDIRFTCSAASSSSSPMTFAWKKDNEVLTNADMENFVHVHAQDGEVMEYTTILHLRQVTFGHEGRYQCVITNHFGSTYSHKARLTVNVLPSFTKTPHDITIRTTTMARLECAATGHPNPQIAWQKDGGTDFPAARERRMHVMPDDDVFFITDVKIDDAGVYSCTAQNSAGSISANATLTVLETPSLVVPLEDRVVSVGETVALQCKATGNPPPRITWFKGDRPLSLTERHHLTPDNQLLVVQNVVAEDAGRYTCEMSNTLGTERAHSQLSVLPAAGCRKDGTTVG

SEQ ID NO: 2665 - protein, 807 aa, synthetic construct
  REGION 1..807: note = LRIG2 (O94898) SP+PP+ECD
MAPAPLGVPEEQLLGCRSRVLSRLLFIAQTALLLLPAAGAGLCPAPCSCRIPLLDCSRRKLPAPSWRALSGLLPPDTAILDFSHNRLSNWNISLESQTLQEVKMNYNELTEIPYFGEPTSNITLLSLVHNIIPEINAQALQFYPALESLDLSSNIISEIKTSSFPRMQLKYLNLSNNRITTLEAGCFDNLSSSLLVVKLNRNRMSMIPPKIFKLPHLQFLELKRNRIKIVEGLTFQGLDSLRSLKMQRNGISKLKDGAFFGLNNMEELELEHNNLTRVNKGWLYGLRMLQQLYVSQNAIERISPDAWEFCQRLSELDLSYNQLTRLDESAFVGLSLLERLNLGDNRVTHIADGVFRFLSNLQTLDLRNNEISWAIEDASEAFAGLTSLTKLILQGNQIKSITKKAFIGLESLEHLDLNNNAIMSIQENAFSQTHLKELILNTSSLLCDCHLKWLLQWLVDNNFQHSVNVSCAHPEWLAGQSILNVDLKDFVCDDFLKPQIRTHPETIIALRGMNVTLTCTAVSSSDSPMSTVWRKDSEILYDVDTENFVRYWQQAGEALEYTSILHLFNVNFTDEGKYQCIVTNHFGSNYSQKAKLTVNEMPSFLKTPMDLTIRTGAMARLECAAEGHPAPQISWQKDGGTDFPAARERRMHVMPEDDVFFIANVKIEDMGIYSCMAQNTAGGLSANASLTVLETPSFIRPLEDKTVTRGETAVLQCIAGGSPAPRLNWTKDDGPLLVTERHFFAAANQLLIIVDAGLEDAGKYTCIMSNTLGTERGHIYLNVISSPNCDSSQSSIGHEDDGWTTVG

SEQ ID NO: 2666 - protein, 809 aa, synthetic construct
  REGION 1..809: note = LRIG3 (Q6UXM1) SP+PP+ECD
MSAPSLRARAAGLGLLLCAVLGRAGRSDSGGRGELGQPSGVAAERPCPTTCRCLGDLLDCSRKRLARLPEPLPSWVARLDLSHNRLSFIKASSMSHLQSLREVKLNNNELETIPNLGPVSANITLLSLAGNRIVEILPEHLKEFQSLETLDLSSNNISELQTAFPALQLKYLYLNSNRVTSMEPGYFDNLANTLLVLKLNRNRISAIPPKMFKLPQLQHLELNRNKIKNVDGLTFQGLGALKSLKMQRNGVTKLMDGAFWGLSNMEILQLDHNNLTEITKGWLYGLLMLQELHLSQNAINRISPDAWEFCQKLSELDLTFNHLSRLDDSSFLGLSLLNTLHIGNNRVSYIADCAFRGLSSLKTLDLKNNEISWTIEDMNGAFSGLDKLRRLILQGNRIRSITKKAFTGLDALEHLDLSDNAIMSLQGNAFSQMKKLQQLHLNTSSLLCDCQLKWLPQWVAENNFQSFVNASCAHPQLLKGRSIFAVSPDGFVCDDFPKPQITVQPETQSAIKGSNLSFICSAASSSDSPMTFAWKKDNELLHDAEMENYAHLRAQGGEVMEYTTILRLREVEFASEGKYQCVISNHFGSSYSVKAKLTVNMLPSFTKTPMDLTIRAGAMARLECAAVGHPAPQIAWQKDGGTDFPAARERRMHVMPEDDVFFIVDVKIEDIGVYSCTAQNSAGSISANATLTVLETPSFLRPLLDRTVTKGETAVLQCIAGGSPPPKLNWTKDDSPLVVTERHFFAAGNQLLIIVDSDVSDAGKYTCEMSNTLGTERGNVRLSVIPTPTCDSPQMTAPSLDDDGWATVG

SEQ ID NO: 2667 - protein, 526 aa, synthetic construct
  REGION 1..526: note = LRIT1 (Q9P2V4) SP+PP+ECD
MRVALGMLWLLALAWPPQARGFCPSQCSCSLHIMGDGSKARTVVCNDPDMTLPPASIPPDTSRLRLERTAIRRVPGEAFRPLGRLEQLWLPYNALSELNALMLRGLRRLRELRLPGNRLAAFPWAALRDAPKLRLLDLQANRLSAVPAEAARFLENLTFLDLSSNQLMRLPQELIVSWAHLETGIFPPGHHPRRVLGLQDNPWACDCRLYDLVHLLDGWAPNLAFIETELRCASPRSLAGVAFSQLELRKCQGPELHPGVASIRSLLGGTALLRCGATGVPGPEMSWRRANGRPLNGTVHQEVSSDGTSWTLLGLPAVSHLDSGDYICQAKNFLGASETVISLIVTEPPTSTEHSGSPGALWARTGGGGEAAAYNNKLVARHVPQIPKPAVLATGPSVPSTKEELTLEHFQMDALGELSDGRAGPSEARMVRSVKVVGDTYHSVSLVWKAPQAKNTTAFSVLYAVFGQHSMRRVIVQPGKTRVTITGLLPKTKYVACVCVQGLVPRKEQCVIFSTNEVVDAENTQQ

SEQ ID NO: 2668 - protein, 465 aa, synthetic construct
  REGION 1..465: note = LRIT2 (A6NDA9) SP+PP+ECD
MASVFHYFLLVLVFLDTHAAQPFCLPGCTCSEESFGRTLQCTSVSLGKIPGNLSEEFKQVRIENSPLFEMPQGSFINMSTLEYLWLNFNNISVIHLGALEHLPELRELRLEGNKLCSVPWTAFRATPLLRVLDLKRNKIDALPELALQFLVSLTYLDLSSNRLTVVSKSVFLNWPAYQKCRQPDCGAEILSSLVVALHDNPWVCDCRLRGLVQFVKSITLPVILVNSYLICQGPLSKAGQLFHETELSACMKPQISTPSANITIRAGQNVTLRCLAQASPSPSIAWTYPLSMWREFDVLTSSTGEDTALSELAIPAAHLVDSGNYTCMASNSIGKSNLVISLHVQPAQALHAPDSLSIPSEGNAYIDLRVVKQTVHGILLEWLAVADTSKEEWFTLYIASDEAFRKEVVHIGPGINTYAVDDLLPGTKYEACLSLEGQPPHQGQCVAFVTGRDAGGLEAREHLLH

SEQ ID NO: 2669 - protein, 582 aa, synthetic construct
  REGION 1..582: note = LRIT3 (Q3SXY7) SP+PP+ECD
MHLFACLCIVLSFLEGVGCLCPSQCTCDYHGRNDGSGSRLVLCNDMDMNELPTNLPVDTVKLRIEKTVIRRISAEAFYYLVELQYLWVTYNSVASIDPSSFYNLKQLHELRLDGNSLAAFPWASLLDMPLLRTLDLHNNKITSVPNEALRYLKNLAYLDLSSNRLTTLPPDFLESWTHLVSTPSGVLDLSPSRIILGLQDNPWFCDCHISKMIELSKVVDPAIVLLDPLMTCSEPERLTGILFQRAELEHCLKPSVMTSATKIMSALGSNVLLRCDATGFPTPQITWTRSDSSPVNYTVIQESPEEGVRWSIMSLTGISSKDAGDYKCKAKNLAGMSEAVVTVTVLGITTTPIPPDTSERTGDHPEWDVQPGSGRSTSVSSASSYLWSSSFSPTSSFSASTLSPPSTASFSLSPFSSSTVSSTTTLSTSISASTTMANKRSFQLHQGGKRNLKVAKNGSKLPPASTSKKEELALLDQTMLTETNAAIENLRVVSETKESVTLTWNMINTTHNSAVTVLYSKYGGKDLLLLNADSSKNQVTIDGLEPGGQYMACVCPKGVPPQKDQCITFSTERVEGDDSQWS

SEQ ID NO: 2670 - protein, 4419 aa, synthetic construct
  REGION 1..4419: note = LRP1 (Q07954) SP+PP+ECD
MLTPPLLLLLPLLSALVAAAIDAPKTCSPKQFACRDQITCISKGWRCDGERDCPDGSDEAPEICPQSKAQRCQPNEHNCLGTELCVPMSRLCNGVQDCMDGSDEGPHCRELQGNCSRLGCQHHCVPTLDGPTCYCNSSFQLQADGKTCKDFDECSVYGTCSQLCTNTDGSFICGCVEGYLLQPDNRSCKAKNEPVDRPPVLLIANSQNILATYLSGAQVSTITPTSTRQTTAMDFSYANETVCWVHVGDSAAQTQLKCARMPGLKGFVDEHTINISLSLHHVEQMAIDWLTGNFYFVDDIDDRIFVCNRNGDTCVTLLDLELYNPKGIALDPAMGKVFFTDYGQIPKVERCDMDGQNRTKLVDSKIVFPHGITLDLVSRLVYWADAYLDYIEVVDYEGKGRQTIIQGILIEHLYGLTVFENYLYATNSDNANAQQKTSVIRVNRFNSTEYQVVTRVDKGGALHIYHQRRQPRVRSHACENDQYGKPGGCSDICLLANSHKARTCRCRSGFSLGSDGKSCKKPEHELFLVYGKGRPGIIRGMDMGAKVPDEHMIPIENLMNPRALDFHAETGFIYFADTTSYLIGRQKIDGTERETILKDGIHNVEGVAVDWMGDNLYWTDDGPKKTISVARLEKAAQTRKTLIEGKMTHPRAIVVDPLNGWMYWTDWEEDPKDSRRGRLERAWMDGSHRDIFVTSKTVLWPNGLSLDIPAGRLYWVDAFYDRIETILLNGTDRKIVYEGPELNHAFGLCHHGNYLFWTEYRSGSVYRLERGVGGAPPTVTLLRSERPPIFEIRMYDAQQQQVGTNKCRVNNGGCSSLCLATPGSRQCACAEDQVLDADGVTCLANPSYVPPPQCQPGEFACANSRCIQERWKCDGDNDCLDNSDEAPALCHQHTCPSDRFKCENNRCIPNRWLCDGDNDCGNSEDESNATCSARTCPPNQFSCASGRCIPISWTCDLDDDCGDRSDESASCAYPTCFPLTQFTCNNGRCININWRCDNDNDCGDNSDEAGCSHSCSSTQFKCNSGRCIPEHWTCDGDNDCGDYSDETHANCTNQATRPPGGCHTDEFQCRLDGLCIPLRWRCDGDTDCMDSSDEKSCEGVTHVCDPSVKFGCKDSARCISKAWVCDGDNDCEDNSDEENCESLACRPPSHPCANNTSVCLPPDKLCDGNDDCGDGSDEGELCDQCSLNNGGCSHNCSVAPGEGIVCSCPLGMELGPDNHTCQIQSYCAKHLKCSQKCDQNKFSVKCSCYEGWVLEPDGESCRSLDPFKPFIIFSNRHEIRRIDLHKGDYSVLVPGLRNTIALDFHLSQSALYWTDVVEDKIYRGKLLDNGALTSFEVVIQYGLATPEGLAVDWIAGNIYWVESNLDQIEVAKLDGTLRTTLLAGDIEHPRAIALDPRDGILFWTDWDASLPRIEAASMSGAGRRTVHRETGSGGWPNGLTVDYLEKRILWIDARSDAIYSARYDGSGHMEVLRGHEFLSHPFAVTLYGGEVYWTDWRTNTLAKANKWTGHNVTVVQRTNTQPFDLQVYHPSRQPMAPNPCEANGGQGPCSHLCLINYNRTVSCACPHLMKLHKDNTTCYEFKKFLLYARQMEIRGVDLDAPYYNYIISFTVPDIDNVTVLDYDAREQRVYWSDVRTQAIKRAFINGTGVETVVSADLPNAHGLAVDWVSRNLFWTSYDTNKKQINVARLDGSFKNAVVQGLEQPHGLVVHPLRGKLYWTDGDNISMANMDGSNRTLLFSGQKGPVGLAIDFPESKLYWISSGNHTINRCNLDGSGLEVIDAMRSQLGKATALAIMGDKLWWADQVSEKMGTCSKADGSGSVVLRNSTTLVMHMKVYDESIQLDHKGTNPCSVNNGDCSQLCLPTSETTRSCMCTAGYSLRSGQQACEGVGSFLLYSVHEGIRGIPLDPNDKSDALVPVSGTSLAVGIDFHAENDTIYWVDMGLSTISRAKRDQTWREDVVTNGIGRVEGIAVDWIAGNIYWTDQGFDVIEVARLNGSFRYVVISQGLDKPRAITVHPEKGYLFWTEWGQYPRIERSRLDGTERVVLVNVSISWPNGISVDYQDGKLYWCDARTDKIERIDLETGENREVVLSSNNMDMFSVSVFEDFIYWSDRTHANGSIKRGSKDNATDSVPLRTGIGVQLKDIKVFNRDRQKGTNVCAVANGGCQQLCLYRGRGQRACACAHGMLAEDGASCREYAGYLLYSERTILKSIHLSDERNLNAPVQPFEDPEHMKNVIALAFDYRAGTSPGTPNRIFFSDIHFGNIQQINDDGSRRITIVENVGSVEGLAYHRGWDTLYWTSYTTSTITRHTVDQTRPGAFERETVITMSGDDHPRAFVLDECQNLMFWTNWNEQHPSIMRAALSGANVLTLIEKDIRTPNGLAIDHRAEKLYFSDATLDKIERCEYDGSHRYVILKSEPVHPFGLAVYGEHIFWTDWVRRAVQRANKHVGSNMKLLRVDIPQQPMGIIAVANDTNSCELSPCRINNGGCQDLCLLTHQGHVNCSCRGGRILQDDLTCRAVNSSCRAQDEFECANGECINFSLTCDGVPHCKDKSDEKPSYCNSRRCKKTFRQCSNGRCVSNMLWCNGADDCGDGSDEIPCNKTACGVGEFRCRDGTCIGNSSRCNQFVDCEDASDEMNCSATDCSSYFRLGVKGVLFQPCERTSLCYAPSWVCDGANDCGDYSDERDCPGVKRPRCPLNYFACPSGRCIPMSWTCDKEDDCEHGEDETHCNKFCSEAQFECQNHRCISKQWLCDGSDDCGDGSDEAAHCEGKTCGPSSFSCPGTHVCVPERWLCDGDKDCADGADESIAAGCLYNSTCDDREFMCQNRQCIPKHFVCDHDRDCADGSDESPECEYPTCGPSEFRCANGRCLSSRQWECDGENDCHDQSDEAPKNPHCTSQEHKCNASSQFLCSSGRCVAEALLCNGQDDCGDSSDERGCHINECLSRKLSGCSQDCEDLKIGFKCRCRPGFRLKDDGRTCADVDECSTTFPCSQRCINTHGSYKCLCVEGYAPRGGDPHSCKAVTDEEPFLIFANRYYLRKLNLDGSNYTLLKQGLNNAVALDFDYREQMIYWTDVTTQGSMIRRMHLNGSNVQVLHRTGLSNPDGLAVDWVGGNLYWCDKGRDTIEVSKLNGAYRTVLVSSGLREPRALVVDVQNGYLYWTDWGDHSLIGRIGMDGSSRSVIVDTKITWPNGLTLDYVTERIYWADAREDYIEFASLDGSNRHVVLSQDIPHIFALTLFEDYVYWTDWETKSINRAHKTTGTNKTLLISTLHRPMDLHVFHALRQPDVPNHPCKVNNGGCSNLCLLSPGGGHKCACPTNFYLGSDGRTCVSNCTASQFVCKNDKCIPFWWKCDTEDDCGDHSDEPPDCPEFKCRPGQFQCSTGICTNPAFICDGDNDCQDNSDEANCDIHVCLPSQFKCTNTNRCIPGIFRCNGQDNCGDGEDERDCPEVTCAPNQFQCSITKRCIPRVWVCDRDNDCVDGSDEPANCTQMTCGVDEFRCKDSGRCIPARWKCDGEDDCGDGSDEPKEECDERTCEPYQFRCKNNRCVPGRWQCDYDNDCGDNSDEESCTPRPCSESEFSCANGRCIAGRWKCDGDHDCADGSDEKDCTPRCDMDQFQCKSGHCIPLRWRCDADADCMDGSDEEACGTGVRTCPLDEFQCNNTLCKPLAWKCDGEDDCGDNSDENPEECARFVCPPNRPFRCKNDRVCLWIGRQCDGTDNCGDGTDEEDCEPPTAHTTHCKDKKEFLCRNQRCLSSSLRCNMFDDCGDGSDEEDCSIDPKLTSCATNASICGDEARCVRTEKAAYCACRSGFHTVPGQPGCQDINECLRFGTCSQLCNNTKGGHLCSCARNFMKTHNTCKAEGSEYQVLYIADDNEIRSLFPGHPHSAYEQAFQGDESVRIDAMDVHVKAGRVYWTNWHTGTISYRSLPPAAPPTTSNRHRRQIDRGVTHLNISGLKMPRGIAIDWVAGNVYWTDSGRDVIEVAQMKGENRKTLISGMIDEPHAIVVDPLRGTMYWSDWGNHPKIETAAMDGTLRETLVQDNIQWPTGLAVDYHNERLYWADAKLSVIGSIRLNGTDPIVAADSKRGLSHPFSIDVFEDYIYGVTYINNRVFKIHKFGHSPLVNLTGGLSHASDVVLYHQHKQPEVTNPCDRKKCEWLCLLSPSGPVCTCPNGKRLDNGTCVPVPSPTPPPDAPRPGTCNLQCFNGGSCFLNARRQPKCRCQPRYTGDKCELDQCWEHCRNGGTCAASPSGMPTCRCPTGFTGPKCTQQVCAGYCANNSTCTVNQGNQPQCRCLPGFLGDRCQYRQCSGYCENFGTCQMAADGSRQCRCTAYFEGSRCEVNKCSRCLEGACVVNKQSGDVTCNCTDGRVAPSCLTCVGHCSNGGSCTMNSKMMPECQCPPHMTGPRCEEHVFSQQQPG

SEQ ID NO: 2671 - protein, 440 aa, synthetic construct
  REGION 1..440: note = LRP10 (Q7Z4F1) SP+PP+ECD
MLLATLLLLLLGGALAHPDRIIFPNHACEDPPAVLLEVQGTLQRPLVRDSRTSPANCTWLILGSKEQTVTIRFQKLHLACGSERLTLRSPLQPLISLCEAPPSPLQLPGGNVTITYSYAGARAPMGQGFLLSYSQDWLMCLQEEFQCLNHRCVSAVQRCDGVDACGDGSDEAGCSSDPFPGLTPRPVPSLPCNVTLEDFYGVFSSPGYTHLASVSHPQSCHWLLDPHDGRRLAVRFTALDLGFGDAVHVYDGPGPPESSRLLRSLTHFSNGKAVTVETLSGQAVVSYHTVAWSNGRGFNATYHVRGYCLPWDRPCGLGSGLGAGEGLGERCYSEAQRCDGSWDCADGTDEEDCPGCPPGHFPCGAAGTSGATACYLPADRCNYQTFCADGADERRCRHCQPGNFRCRDEKCVYETWVCDGQPDCADGSDEWDCSYVLPRK

SEQ ID NO: 2672 - protein, 450 aa, synthetic construct
  REGION 1..450: note = LRP11 (Q86VZ4) SP+PP+ECD
MASVAQESAGSQRRLPPRHGALRGLLLLCLWLPSGRAALPPAAPLSELHAQLSGVEQLLEEFRRQLQQERPQEELELELRAGGGPQEDCPGPGSGGYSAMPDAIIRTKDSLAAGASFLRAPAAVRGWRQCVAACCSEPRCSVAVVELPRRPAPPAAVLGCYLFNCTARGRNVCKFALHSGYSSYSLSRAPDGAALATARASPRQEKDAPPLSKAGQDVVLHLPTDGVVLDGRESTDDHAIVQYEWALLQGDPSVDMKVPQSGTLKLSHLQEGTYTFQLTVTDTAGQRSSDNVSVTVLRAAYSTGGCLHTCSRYHFFCDDGCCIDITLACDGVQQCPDGSDEDFCQNLGLDRKMVTHTAASPALPRTTGPSEDAGGDSLVEKSQKATAPNKPPALSNTEKRNHSAFWGPESQIIPVMPDSSSSGKNRKEESYIFESKGDGGGGEHPAPETG

SEQ ID NO: 2673 - protein, 492 aa, synthetic construct
  REGION 1..492: note = LRP12 (Q9Y561) SP+PP+ECD
MACRWSTKESPRWRSALLLLFLAGVYGNGALAEHSENVHISGVSTACGETPEQIRAPSGIITSPGWPSEYPAKINCSWFIRANPGEIITISFQDFDIQGSRRCNLDWLTIETYKNIESYRACGSTIPPPYISSQDHIWIRFHSDDNISRKGFRLAYFSGKSEEPNCACDQFRCGNGKCIPEAWKCNNMDECGDSSDEEICAKEANPPTAAAFQPCAYNQFQCLSRFTKVYTCLPESLKCDGNIDCLDLGDEIDCDVPTCGQWLKYFYGTFNSPNYPDFYPPGSNCTWLIDTGDHRKVILRFTDFKLDGTGYGDYVKIYDGLEENPHKLLRVLTAFDSHAPLTVVSSSGQIRVHFCADKVNAARGFNATYQVDGFCLPWEIPCGGNWGCYTEQQRCDGYWHCPNGRDETNCTMCQKEEFPCSRNGVCYPRSDRCNYQNHCPNGSDEKNCFFCQPGNFHCKNNRCVFESWVCDSQDDCGDGSDEENCPVIVPTR

SEQ ID NO: 2674 - protein, 4440 aa, synthetic construct
  REGION 1..4440: note = LRP1B (Q9NZR2) SP+PP+ECD
MSEFLLALLTLSGLLPIARVADRDQQLCDPGEFLCHDHVTCVSQSWLCDGDPDCPDDSDESLDTCPEEVEIKCPLNHIACLGTNKCVHLSQLCNGVLDCPDGYDEGVHCQELLSNCQQLNCQYKCTMVRNSTRCYCEDGFEITEDGRSCKDQDECAVYGTCSQTCRNTHGSYTCSCVEGYLMQPDNRSCKAKIEPTDRPPILLIANFETIEVFYLNGSKMATLSSVNGNEIHTLDFIYNEDMICWIESRESSNQLKCIQITKAGGLTDEWTINILQSFHNVQQMAIDWLTRNLYFVDHVGDRIFVCNSNGSVCVTLIDLELHNPKAIAVDPIAGKLFFTDYGNVAKVERCDMDGMNRTRIIDSKTEQPAALALDLVNKLVYWVDLYLDYVGVVDYQGKNRHTVIQGRQVRHLYGITVFEDYLYATNSDNYNIVRINRFNGTDIHSLIKIENAWGIRIYQKRTQPTVRSHACEVDPYGMPGGCSHICLLSSSYKTRTCRCRTGFNLGSDGRSCKRPKNELFLFYGKGRPGIVRGMDLNTKIADEYMIPIENLVNPRALDFHAETNYIYFADTTSFLIGRQKIDGTERETILKDDLDNVEGIAVDWIGNNLYWTNDGHRKTINVARLEKASQSRKTLLEGEMSHPRGIVVDPVNGWMYWTDWEEDEIDDSVGRIEKAWMDGFNRQIFVTSKMLWPNGLTLDFHTNTLYWCDAYYDHIEKVFLNGTHRKIVYSGRELNHPFGLSHHGNYVFWTDYMNGSIFQLDLITSEVTLLRHERPPLFGLQIYDPRKQQGDNMCRVNNGGCSTLCLAIPGGRVCACADNQLLDENGTTCTFNPGEALPHICKAGEFRCKNRHCIQARWKCDGDDDCLDGSDEDSVNCFNHSCPDDQFKCQNNRCIPKRWLCDGANDCGSNEDESNQTCTARTCQVDQFSCGNGRCIPRAWLCDREDDCGDQTDEMASCEFPTCEPLTQFVCKSGRCISSKWHCDSDDDCGDGSDEVGCVHSCFDNQFRCSSGRCIPGHWACDGDNDCGDFSDEAQINCTKEEIHSPAGCNGNEFQCHPDGNCVPDLWRCDGEKDCEDGSDEKGCNGTIRLCDHKTKFSCWSTGRCINKAWVCDGDIDCEDQSDEDDCDSFLCGPPKHPCANDTSVCLQPEKLCNGKKDCPDGSDEGYLCDECSLNNGGCSNHCSVVPGRGIVCSCPEGLQLNKDNKTCEIVDYCSNHLKCSQVCEQHKHTVKCSCYEGWKLDVDGESCTSVDPFEAFIIFSIRHEIRRIDLHKRDYSLLVPGLRNTIALDFHFNQSLLYWTDVVEDRIYRGKLSESGGVSAIEVVVEHGLATPEGLTVDWIAGNIYWIDSNLDQIEVAKLDGSLRTTLIAGAMEHPRAIALDPRYGILFWTDWDANFPRIESASMSGAGRKTIYKDMKTGAWPNGLTVDHFEKRIVWTDARSDAIYSALYDGTNMIEIIRGHEYLSHPFAVSLYGSEVYWTDWRTNTLSKANKWTGQNVSVIQKTSAQPFDLQIYHPSRQPQAPNPCAANDGKGPCSHMCLINHNRSAACACPHLMKLSSDKKTCYEMKKFLLYARRSEIRGVDIDNPYFNFITAFTVPDIDDVTVIDFDASEERLYWTDIKTQTIKRAFINGTGLETVISRDIQSIRGLAVDWVSRNLYWISSEFDETQINVARLDGSLKTSIIHGIDKPQCLAAHPVRGKLYWTDGNTINMANMDGSNSKILFQNQKEPVGLSIDYVENKLYWISSGNGTINRCNLDGGNLEVIESMKEELTKATALTIMDKKLWWADQNLAQLGTCSKRDGRNPTILRNKTSGVVHMKVYDKEAQQGSNSCQLNNGGCSQLCLPTSETTRTCMCTVGYYLQKNRMSCQGIESFLMYSVHEGIRGIPLEPSDKMDALMPISGTSFAVGIDFHAENDTIYWTDMGFNKISRAKRDQTWKEDIITNGLGRVEGIAVDWIAGNIYWTDHGFNLIEVARLNGSFRYVIISQGLDQPRSIAVHPEKGLLFWTEWGQMPCIGKARLDGSEKVVLVSMGIAWPNGISIDYEENKLYWCDARTDKIERIDLETGGNREMVLSGSNVDMFSVAVFGAYIYWSDRAHANGSVRRGHKNDATETITMRTGLGVNLKEVKIFNRVREKGTNVCARDNGGCKQLCLYRGNSRRTCACAHGYLAEDGVTCLRHEGYLLYSGRTILKSIHLSDETNLNSPIRPYENPRYFKNVIALAFDYNQRRKGTNRIFYSDAHFGNIQLIKDNWEDRQVIVENVGSVEGLAYHRAWDTLYWTSSTTSSITRHTVDQTRPGAFDREAVITMSEDDHPHVLALDECQNLMFWTNWNEQHPSIMRSTLTGKNAQVVVSTDILTPNGLTIDYRAEKLYFSDGSLGKIERCEYDGSQRHVIVKSGPGTFLSLAVYDNYIFWSDWGRRAILRSNKYTGGDTKILRSDIPHQPMGIIAVANDTNSCELSPCALLNGGCHDLCLLTPNGRVNCSCRGDRILLEDNRCVTKNSSCNAYSEFECGNGECIDYQLTCDGIPHCKDKSDEKLLYCENRSCRRGFKPCYNRRCIPHGKLCDGENDCGDNSDELDCKVSTCATVEFRCADGTCIPRSARCNQNIDCADASDEKNCNNTDCTHFYKLGVKTTGFIRCNSTSLCVLPTWICDGSNDCGDYSDELKCPVQNKHKCEENYFSCPSGRCILNTWICDGQKDCEDGRDEFHCDSSCSWNQFACSAQKCISKHWICDGEDDCGDGLDESDSICGAITCAADMFSCQGSRACVPRHWLCDGERDCPDGSDELSTAGCAPNNTCDENAFMCHNKVCIPKQFVCDHDDDCGDGSDESPQCGYRQCGTEEFSCADGRCLLNTQWQCDGDFDCPDHSDEAPLNPKCKSAEQSCNSSFFMCKNGRCIPSGGLCDNKDDCGDGSDERNCHINECLSKKVSGCSQDCQDLPVSYKCKCWPGFQLKDDGKTCVDIDECSSGFPCSQQCINTYGTYKCLCTDGYEIQPDNPNGCKSLSDEEPFLILADHHEIRKISTDGSNYTLLKQGLNNVIAIDFDYREEFIYWIDSSRPNGSRINRMCLNGSDIKVVHNTAVPNALAVDWIGKNLYWSDTEKRIIEVSKLNGLYPTILVSKRLKFPRDLSLDPQAGYLYWIDCCEYPHIGRVGMDGTNQSVVIETKISRPMALTIDYVNRRLYWADENHIEFSNMDGSHRHKVPNQDIPGVIALTLFEDYIYWTDGKTKSLSRAHKTSGADRLSLIYSWHAITDIQVYHSYRQPDVSKHLCMINNGGCSHLCLLAPGKTHTCACPTNFYLAADNRTCLSNCTASQFRCKTDKCIPFWWKCDTVDDCGDGSDEPDDCPEFRCQPGRFQCGTGLCALPAFICDGENDCGDNSDELNCDTHVCLSGQFKCTKNQKCIPVNLRCNGQDDCGDEEDERDCPENSCSPDYFQCKTTKHCISKLWVCDEDPDCADASDEANCDKKTCGPHEFQCKNNNCIPDHWRCDSQNDCSDNSDEENCKPQTCTLKDFLCANGDCVSSRFWCDGDFDCADGSDERNCETSCSKDQFRCSNGQCIPAKWKCDGHEDCKYGEDEKSCEPASPTCSSREYICASDGCISASLKCNGEYDCADGSDEMDCVTECKEDQFRCKNKAHCIPIRWLCDGIHDCVDGSDEENCERGGNICRADEFLCNNSLCKLHFWVCDGEDDCGDNSDEAPDMCVKFLCPSTRPHRCRNNRICLQSEQMCNGIDECGDNSDEDHCGGKLTYKARPCKKDEFACSNKKCIPMDLQCDRLDDCGDGSDEQGCRIAPTEYTCEDNVNPCGDDAYCNQIKTSVFCRCKPGFQRNMKNRQCEDLNECLVFGTCSHQCINVEGSYKCVCDQNFQERNNTCIAEGSEDQVLYIANDTDILGFIYPFNYSGDHQQISHIEHNSRITGMDVYYQRDMIIWSTQFNPGGIFYKRIHGREKRQANSGLICPEFKRPRDIAVDWVAGNIYWTDHSRMHWFSYYTTHWTSLRYSINVGQLNGPNCTRLLTNMAGEPYAIAVNPKRGMMYWTVVGDHSHIEEAAMDGTLRRILVQKNLQRPTGLAVDYFSERIYWADFELSIIGSVLYDGSNSVVSVSSKQGLLHPHRIDIFEDYIYGAGPKNGVFRVQKFGHGSVEYLALNIDKTKGVLISHRYKQLDLPNPCLDLACEFLCLLNPSGATCVCPEGKYLINGTCNDDSLLDDSCKLTCENGGRCILNEKGDLRCHCWPSYSGERCEVNHCSNYCQNGGTCVPSVLGRPTCSCALGFTGPNCGKTVCEDFCQNGGTCIVTAGNQPYCHCQPEYTGDRCQYYVCHHYCVNSESCTIGDDGSVECVCPTRYEGPKCEVDKCVRCHGGHCIINKDSEDIFCNCTNGKIASSCQLCDGYCYNGGTCQLDPETNVPVCLCSTNWSGTQCERPAPKSSKSDHISTRSI

SEQ ID NO: 2675 - protein, 4423 aa, synthetic construct
  REGION 1..4423: note = LRP2 (P98164) SP+PP+ECD
MDRGPAAVACTLLLALVACLAPASGQECDSAHFRCGSGHCIPADWRCDGTKDCSDDADEIGCAVVTCQQGYFKCQSEGQCIPNSWVCDQDQDCDDGSDERQDCSQSTCSSHQITCSNGQCIPSEYRCDHVRDCPDGADENDCQYPTCEQLTCDNGACYNTSQKCDWKVDCRDSSDEINCTEICLHNEFSCGNGECIPRAYVCDHDNDCQDGSDEHACNYPTCGGYQFTCPSGRCIYQNWVCDGEDDCKDNGDEDGCESGPHDVHKCSPREWSCPESGRCISIYKVCDGILDCPGREDENNTSTGKYCSMTLCSALNCQYQCHETPYGGACFCPPGYIINHNDSRTCVEFDDCQIWGICDQKCESRPGRHLCHCEEGYILERGQYCKANDSFGEASIIFSNGRDLLIGDIHGRSFRILVESQNRGVAVGVAFHYHLQRVFWTDTVQNKVFSVDINGLNIQEVLNVSVETPENLAVDWVNNKIYLVETKVNRIDMVNLDGSYRVTLITENLGHPRGIAVDPTVGYLFFSDWESLSGEPKLERAFMDGSNRKDLVKTKLGWPAGVTLDMISKRVYWVDSRFDYIETVTYDGIQRKTVVHGGSLIPHPFGVSLFEGQVFFTDWTKMAVLKANKFTETNPQVYYQASLRPYGVTVYHSLRQPYATNPCKDNNGGCEQVCVLSHRTDNDGLGFRCKCTFGFQLDTDERHCIAVQNFLIFSSQVAIRGIPFTLSTQEDVMVPVSGNPSFFVGIDFDAQDSTIFFSDMSKHMIFKQKIDGTGREILAANRVENVESLAFDWISKNLYWTDSHYKSISVMRLADKTRRTVVQYLNNPRSVVVHPFAGYLFFTDWFRPAKIMRAWSDGSHLLPVINTTLGWPNGLAIDWAASRLYWVDAYFDKIEHSTFDGLDRRRLGHIEQMTHPFGLAIFGEHLFFTDWRLGAIIRVRKADGGEMTVIRSGIAYILHLKSYDVNIQTGSNACNQPTHPNGDCSHFCFPVPNFQRVCGCPYGMRLASNHLTCEGDPTNEPPTEQCGLFSFPCKNGRCVPNYYLCDGVDDCHDNSDEQLCGTLNNTCSSSAFTCGHGECIPAHWRCDKRNDCVDGSDEHNCPTHAPASCLDTQYTCDNHQCISKNWVCDTDNDCGDGSDEKNCNSTETCQPSQFNCPNHRCIDLSFVCDGDKDCVDGSDEVGCVLNCTASQFKCASGDKCIGVTNRCDGVFDCSDNSDEAGCPTRPPGMCHSDEFQCQEDGICIPNFWECDGHPDCLYGSDEHNACVPKTCPSSYFHCDNGNCIHRAWLCDRDNDCGDMSDEKDCPTQPFRCPSWQWQCLGHNICVNLSVVCDGIFDCPNGTDESPLCNGNSCSDFNGGCTHECVQEPFGAKCLCPLGFLLANDSKTCEDIDECDILGSCSQHCYNMRGSFRCSCDTGYMLESDGRTCKVTASESLLLLVASQNKIIADSVTSQVHNIYSLVENGSYIVAVDFDSISGRIFWSDATQGKTWSAFQNGTDRRVVFDSSIILTETIAIDWVGRNLYWTDYALETIEVSKIDGSHRTVLISKNLTNPRGLALDPRMNEHLLFWSDWGHHPRIERASMDGSMRTVIVQDKIFWPCGLTIDYPNRLLYFMDSYLDYMDFCDYNGHHRRQVIASDLIIRHPYALTLFEDSVYWTDRATRRVMRANKWHGGNQSVVMYNIQWPLGIVAVHPSKQPNSVNPCAFSRCSHLCLLSSQGPHFYSCVCPSGWSLSPDLLNCLRDDQPFLITVRQHIIFGISLNPEVKSNDAMVPIAGIQNGLDVEFDDAEQYIYWVENPGEIHRVKTDGTNRTVFASISMVGPSMNLALDWISRNLYSTNPRTQSIEVLTLHGDIRYRKTLIANDGTALGVGFPIGITVDPARGKLYWSDQGTDSGVPAKIASANMDGTSVKTLFTGNLEHLECVTLDIEEQKLYWAVTGRGVIERGNVDGTDRMILVHQLSHPWGIAVHDSFLYYTDEQYEVIERVDKATGANKIVLRDNVPNLRGLQVYHRRNAAESSNGCSNNMNACQQICLPVPGGLFSCACATGFKLNPDNRSCSPYNSFIVVSMLSAIRGFSLELSDHSETMVPVAGQGRNALHVDVDVSSGFIYWCDFSSSVASDNAIRRIKPDGSSLMNIVTHGIGENGVRGIAVDWVAGNLYFTNAFVSETLIEVLRINTTYRRVLLKVTVDMPRHIVVDPKNRYLFWADYGQRPKIERSFLDCTNRTVLVSEGIVTPRGLAVDRSDGYVYWVDDSLDIIARIRINGENSEVIRYGSRYPTPYGITVFENSIIWVDRNLKKIFQASKEPENTEPPTVIRDNINWLRDVTIFDKQVQPRSPAEVNNNPCLENNGGCSHLCFALPGLHTPKCDCAFGTLQSDGKNCAISTENFLIFALSNSLRSLHLDPENHSPPFQTINVERTVMSLDYDSVSDRIYFTQNLASGVGQISYATLSSGIHTPTVIASGIGTADGIAFDWITRRIYYSDYLNQMINSMAEDGSNRTVIARVPKPRAIVLDPCQGYLYWADWDTHAKIERATLGGNFRVPIVNSSLVMPSGLTLDYEEDLLYWVDASLQRIERSTLTGVDREVIVNAAVHAFGLTLYGQYIYWTDLYTQRIYRANKYDGSGQIAMTTNLLSQPRGINTVVKNQKQQCNNPCEQFNGGCSHICAPGPNGAECQCPHEGNWYLANNRKHCIVDNGERCGASSFTCSNGRCISEEWKCDNDNDCGDGSDEMESVCALHTCSPTAFTCANGRCVQYSYRCDYYNDCGDGSDEAGCLFRDCNATTEFMCNNRRCIPREFICNGVDNCHDNNTSDEKNCPDRTCQSGYTKCHNSNICIPRVYLCDGDNDCGDNSDENPTYCTTHTCSSSEFQCASGRCIPQHWYCDQETDCFDASDEPASCGHSERTCLADEFKCDGGRCIPSEWICDGDNDCGDMSDEDKRHQCQNQNCSDSEFLCVNDRPPDRRCIPQSWVCDGDVDCTDGYDENQNCTRRTCSENEFTCGYGLCIPKIFRCDRHNDCGDYSDERGCLYQTCQQNQFTCQNGRCISKTFVCDEDNDCGDGSDELMHLCHTPEPTCPPHEFKCDNGRCIEMMKLCNHLDDCLDNSDEKGCGINECHDPSISGCDHNCTDTLTSFYCSCRPGYKLMSDKRTCVDIDECTEMPFVCSQKCENVIGSYICKCAPGYLREPDGKTCRQNSNIEPYLIFSNRYYLRNLTIDGYFYSLILEGLDNVVALDFDRVEKRLYWIDTQRQVIERMFLNKTNKETIINHRLPAAESLAVDWVSRKLYWLDARLDGLFVSDLNGGHRRMLAQHCVDANNTFCFDNPRGLALHPQYGYLYWADWGHRAYIGRVGMDGTNKSVIISTKLEWPNGITIDYTNDLLYWADAHLGYIEYSDLEGHHRHTVYDGALPHPFAITIFEDTIYWTDWNTRTVEKGNKYDGSNRQTLVNTTHRPFDIHVYHPYRQPIVSNPCGTNNGGCSHLCLIKPGGKGFTCECPDDFRTLQLSGSTYCMPMCSSTQFLCANNEKCIPIWWKCDGQKDCSDGSDELALCPQRFCRLGQFQCSDGNCTSPQTLCNAHQNCPDGSDEDRLLCENHHCDSNEWQCANKRCIPESWQCDTFNDCEDNSDEDSSHCASRTCRPGQFRCANGRCIPQAWKCDVDNDCGDHSDEPIEECMSSAHLCDNFTEFSCKTNYRCIPKWAVCNGVDDCRDNSDEQGCEERTCHPVGDFRCKNHHCIPLRWQCDGQNDCGDNSDEENCAPRECTESEFRCVNQQCIPSRWICDHYNDCGDNSDERDCEMRTCHPEYFQCTSGHCVHSELKCDGSADCLDASDEADCPTRFPDGAYCQATMFECKNHVCIPPYWKCDGDDDCGDGSDEELHLCLDVPCNSPNRFRCDNNRCIYSHEVCNGVDDCGDGTDETEEHCRKPTPKPCTEYEYKCGNGHCIPHDNVCDDADDCGDWSDELGCNKGKERTCAENICEQNCTQLNEGGFICSCTAGFETNVFDRTSCLDINECEQFGTCPQHCRNTKGSYECVCADGFTSMSDRPGKRCAAEGSSPLLLLPDNVRIRKYNLSSERFSEYLQDEEYIQAVDYDWDPKDIGLSVVYYTVRGEGSRFGAIKRAYIPNFESGRNNLVQEVDLKLKYVMQPDGIAVDWVGRHIYWSDVKNKRIEVAKLDGRYRKWLISTDLDQPAAIAVNPKLGLMFWTDWGKEPKIESAWMNGEDRNILVFEDLGWPTGLSIDYLNNDRIYWSDFKEDVIETIKYDGTDRRVIAKEAMNPYSLDIFEDQLYWISKEKGEVWKQNKFGQGKKEKTLVVNPWLTQVRIFHQLRYNKSVPNLCKQICSHLCLLRPGGYSCACPQGSSFIEGSTTECDAAIELPINLPPPCRCMHGGNCYFDETDLPKCKCPSGYTGKYCEMAFSKGISPGTT

SEQ ID NO: 2676 - protein, 496 aa, synthetic construct
  REGION 1..496: note = LRP3 (O75074) SP+PP+ECD
MEKRAAAGLEGAPGARAQLAVVCLVNIFLTGRLSSAVPALAACSGKLEQHTERRGVIYSPAWPLNYPPGTNCSWYIQGDRGDMITISFRNFDVEESHQCSLDWLLLGPAAPPRQEAFRLCGSAIPPAFISARDHVWIFFHSDASSSGQAQGFRLSYIRGKLGQASCQADEFRCDNGKCLPGPWQCNTVDECGDGSDEGNCSAPASEPPGSLCPGGTFPCSGARSTRCLPVERRCDGLQDCGDGSDEAGCPDLACGRRLGSFYGSFASPDLFGAARGPSDLHCTWLVDTQDSRRVLLQLELRLGYDDYVQVYEGLGERGDRLLQTLSYRSNHRPVSLEAAQGRLTVAYHARARSAGHGFNATYQVKGYCLPWEQPCGSSSDSDGGSLGDQGCFSEPQRCDGWWHCASGRDEQGCPACPPDQYPCEGGSGLCYTPADRCNNQKSCPDGADEKNCFSCQPGTFHCGTNLCIFETWRCDGQEDCQDGSDEHGCLAAVPRK

SEQ ID NO: 2677 - protein, 1725 aa, synthetic construct
  REGION 1..1725: note = LRP4 (O75096) SP+PP+ECD
MRRQWGALLLGALLCAHGLASSPECACGRSHFTCAVSALGECTCIPAQWQCDGDNDCGDHSDEDGCILPTCSPLDFHCDNGKCIRRSWVCDGDNDCEDDSDEQDCPPRECEEDEFPCQNGYCIRSLWHCDGDNDCGDNSDEQCDMRKCSDKEFRCSDGSCIAEHWYCDGDTDCKDGSDEENCPSAVPAPPCNLEEFQCAYGRCILDIYHCDGDDDCGDWSDESDCSSHQPCRSGEFMCDSGLCINAGWRCDGDADCDDQSDERNCTTSMCTAEQFRCHSGRCVRLSWRCDGEDDCADNSDEENCENTGSPQCALDQFLCWNGRCIGQRKLCNGVNDCGDNSDESPQQNCRPRTGEENCNVNNGGCAQKCQMVRGAVQCTCHTGYRLTEDGHTCQDVNECAEEGYCSQGCTNSEGAFQCWCETGYELRPDRRSCKALGPEPVLLFANRIDIRQVLPHRSEYTLLLNNLENAIALDFHHRRELVFWSDVTLDRILRANLNGSNVEEVVSTGLESPGGLAVDWVHDKLYWTDSGTSRIEVANLDGAHRKVLLWQNLEKPRAIALHPMEGTIYWTDWGNTPRIEASSMDGSGRRIIADTHLFWPNGLTIDYAGRRMYWVDAKHHVIERANLDGSHRKAVISQGLPHPFAITVFEDSLYWTDWHTKSINSANKFTGKNQEIIRNKLHFPMDIHTLHPQRQPAGKNRCGDNNGGCTHLCLPSGQNYTCACPTGFRKISSHACAQSLDKFLLFARRMDIRRISFDTEDLSDDVIPLADVRSAVALDWDSRDDHVYWTDVSTDTISRAKWDGTGQEVVVDTSLESPAGLAIDWVTNKLYWTDAGTDRIEVANTDGSMRTVLIWENLDRPRDIVVEPMGGYMYWTDWGASPKIERAGMDASGRQVIISSNLTWPNGLAIDYGSQRLYWADAGMKTIEFAGLDGSKRKVLIGSQLPHPFGLTLYGERIYWTDWQTKSIQSADRLTGLDRETLQENLENLMDIHVFHRRRPPVSTPCAMENGGCSHLCLRSPNPSGFSCTCPTGINLLSDGKTCSPGMNSFLIFARRIDIRMVSLDIPYFADVVVPINITMKNTIAIGVDPQEGKVYWSDSTLHRISRANLDGSQHEDIITTGLQTTDGLAVDAIGRKVYWTDTGTNRIEVGNLDGSMRKVLVWQNLDSPRAIVLYHEMGFMYWTDWGENAKLERSGMDGSDRAVLINNNLGWPNGLTVDKASSQLLWADAHTERIEAADLNGANRHTLVSPVQHPYGLTLLDSYIYWTDWQTRSIHRADKGTGSNVILVRSNLPGLMDMQAVDRAQPLGFNKCGSRNGGCSHLCLPRPSGFSCACPTGIQLKGDGKTCDPSPETYLLFSSRGSIRRISLDTSDHTDVHVPVPELNNVISLDYDSVDGKVYYTDVFLDVIRRADLNGSNMETVIGRGLKTTDGLAVDWVARNLYWTDTGRNTIEASRLDGSCRKVLINNSLDEPRAIAVFPRKGYLFWTDWGHIAKIERANLDGSERKVLINTDLGWPNGLTLDYDTRRIYWVDAHLDRIESADLNGKLRQVLVSHVSHPFALTQQDRWIYWTDWQTKSIQRVDKYSGRNKETVLANVEGLMDIIVVSPQRQTGTNACGVNNGGCTHLCFARASDFVCACPDEPDSRPCSLVPGLVPPAPRATGMSEKSPVLPNTPPTTLYSSTTRTRTSLEEVEGRCSERDARLGLCARSNDAVPAAPGEGLHIS

SEQ ID NO: 2678 - protein, 1384 aa, synthetic construct
  REGION 1..1384: note = LRP5 (O75197) SP+PP+ECD
MEAAPPGPPWPLLLLLLLLLALCGCPAPAAASPLLLFANRRDVRLVDAGGVKLESTIVVSGLEDAAAVDFQFSKGAVYWTDVSEEAIKQTYLNQTGAAVQNVVISGLVSPDGLACDWVGKKLYWTDSETNRIEVANLNGTSRKVLFWQDLDQPRAIALDPAHGYMYWTDWGETPRIERAGMDGSTRKIIVDSDIYWPNGLTIDLEEQKLYWADAKLSFIHRANLDGSFRQKVVEGSLTHPFALTLSGDTLYWTDWQTRSIHACNKRTGGKRKEILSALYSPMDIQVLSQERQPFFHTRCEEDNGGCSHLCLLSPSEPFYTCACPTGVQLQDNGRTCKAGAEEVLLLARRTDLRRISLDTPDFTDIVLQVDDIRHAIAIDYDPLEGYVYWTDDEVRAIRRAYLDGSGAQTLVNTEINDPDGIAVDWVARNLYWTDTGTDRIEVTRLNGTSRKILVSEDLDEPRAIALHPVMGLMYWTDWGENPKIECANLDGQERRVLVNASLGWPNGLALDLQEGKLYWGDAKTDKIEVINVDGTKRRTLLEDKLPHIFGFTLLGDFIYWTDWQRRSIERVHKVKASRDVIIDQLPDLMGLKAVNVAKVVGTNPCADRNGGCSHLCFFTPHATRCGCPIGLELLSDMKTCIVPEAFLVFTSRAAIHRISLETNNNDVAIPLTGVKEASALDFDVSNNHIYWTDVSLKTISRAFMNGSSVEHVVEFGLDYPEGMAVDWMGKNLYWADTGTNRIEVARLDGQFRQVLVWRDLDNPRSLALDPTKGYIYWTEWGGKPRIVRAFMDGTNCMTLVDKVGRANDLTIDYADQRLYWTDLDTNMIESSNMLGQERVVIADDLPHPFGLTQYSDYIYWTDWNLHSIERADKTSGRNRTLIQGHLDFVMDILVFHSSRQDGLNDCMHNNGQCGQLCLAIPGGHRCGCASHYTLDPSSRNCSPPTTFLLFSQKSAISRMIPDDQHSPDLILPLHGLRNVKAIDYDPLDKFIYWVDGRQNIKRAKDDGTQPFVLTSLSQGQNPDRQPHDLSIDIYSRTLFWTCEATNTINVHRLSGEAMGVVLRGDRDKPRAIVVNAERGYLYFTNMQDRAAKIERAALDGTEREVLFTTGLIRPVALVVDNTLGKLFWVDADLKRIESCDLSGANRLTLEDANIVQPLGLTILGKHLYWIDRQQQMIERVEKTTGDKRTRIQGRVAHLTGIHAVEEVSLEEFSAHPCARDNGGCSHICIAKGDGTPRCSCPVHLVLLQNLLTCGEPPTCSPDQFACATGEIDCIPGAWRCDGFPECDDQSDEEGCPVCSAAQFPCARGQCVDLRLRCDGEADCQDRSDEADCDAICLPNQFRCASGQCVLIKQQCDSFPDCIDGSDELMCEITKPPSDDSPAHS

SEQ ID NO: 2679 - protein, 1370 aa, synthetic construct
  REGION 1..1370: note = LRP6 (O75581) SP+PP+ECD
MGAVLRSLLACSFCVLLRAAPLLLYANRRDLRLVDATNGKENATIVVGGLEDAAAVDFVFSHGLIYWSDVSEEAIKRTEFNKTESVQNVVVSGLLSPDGLACDWLGEKLYWTDSETNRIEVSNLDGSLRKVLFWQELDQPRAIALDPSSGFMYWTDWGEVPKIERAGMDGSSRFIIINSEIYWPNGLTLDYEEQKLYWADAKLNFIHKSNLDGTNRQAVVKGSLPHPFALTLFEDILYWTDWSTHSILACNKYTGEGLREIHSDIFSPMDIHAFSQQRQPNATNPCGIDNGGCSHLCLMSPVKPFYQCACPTGVKLLENGKTCKDGATELLLLARRTDLRRISLDTPDFTDIVLQLEDIRHAIAIDYDPVEGYIYWTDDEVRAIRRSFIDGSGSQFVVTAQIAHPDGIAVDWVARNLYWTDTGTDRIEVTRLNGTMRKILISEDLEEPRAIVLDPMVGYMYWTDWGEIPKIERAALDGSDRVVLVNTSLGWPNGLALDYDEGKIYWGDAKTDKIEVMNTDGTGRRVLVEDKIPHIFGFTLLGDYVYWTDWQRRSIERVHKRSAEREVIIDQLPDLMGLKATNVHRVIGSNPCAEENGGCSHLCLYRPQGLRCACPIGFELISDMKTCIVPEAFLLFSRRADIRRISLETNNNNVAIPLTGVKEASALDFDVTDNRIYWTDISLKTISRAFMNGSALEHVVEFGLDYPEGMAVDWLGKNLYWADTGTNRIEVSKLDGQHRQVLVWKDLDSPRALALDPAEGFMYWTEWGGKPKIDRAAMDGSERTTLVPNVGRANGLTIDYAKRRLYWTDLDTNLIESSNMLGLNREVIADDLPHPFGLTQYQDYIYWTDWSRRSIERANKTSGQNRTIIQGHLDYVMDILVFHSSRQSGWNECASSNGHCSHLCLAVPVGGFVCGCPAHYSLNADNRTCSAPTTFLLFSQKSAINRMVIDEQQSPDIILPIHSLRNVRAIDYDPLDKQLYWIDSRQNMIRKAQEDGSQGFTVVVSSVPSQNLEIQPYDLSIDIYSRYIYWTCEATNVINVTRLDGRSVGVVLKGEQDRPRAVVVNPEKGYMYFTNLQERSPKIERAALDGTEREVLFFSGLSKPIALALDSRLGKLFWADSDLRRIESSDLSGANRIVLEDSNILQPVGLTVFENWLYWIDKQQQMIEKIDMTGREGRTKVQARIAQLSDIHAVKELNLQEYRQHPCAQDNGGCSHICLVKGDGTTRCSCPMHLVLLQDELSCGEPPTCSPQQFTCFTGEIDCIPVAWRCDGFTECEDHSDELNCPVCSESQFQCASGQCIDGALRCNGDANCQDKSDEKNCEVLCLIDQFRCANGQCIGKHKKCDHNVDCSDKSDELDCYPTEEPAPQA

SEQ ID NO: 2680 - protein, 817 aa, synthetic construct
  REGION 1..817: note = LRP8 (Q14114) SP+PP+ECD
MGLPEPGPLRLLALLLLLLLLLLLQLQHLAAAGPAKDCEKDQFQCRNERCIPSVWRCDEDDDCLDHSDEDDCPKKTCADSDFTCDNGHCIHERWKCDGEEECPDGSDESEATCTKQVCPAEKLSCGPTSHKCVPASWRCDGEKDCEGGADEAGCATLCAPHEFQCGNRSCLAAVFVCDGDDDCGDGSDERGCADPACGPREFRCGGDGGGACIPERWVCDRQFDCEDRSDEAAELCGRPGPGATSAPAACATASQFACRSGECVHLGWRCDGDRDCKDKSDEADCPLGTCRGDEFQCGDGTCVLAIKHCNQEQDCPDGSDEAGCLQGLNECLHNNGGCSHICTDLKIGFECTCPAGFQLLDQKTCGDIDECKDPDACSQICVNYKGYFKCECYPGYEMDLLTKNCKAAAGKSPSLIFTNRHEVRRIDLVKRNYSRLIPMLKNVVALDVEVATNRIYWCDLSYRKIYSAYMDKASDPKEQEVLIDEQLHSPEGLAVDWVHKHIYWTDSGNKTISVATVDGGRRRTLFSRNLSEPRAIAVDPLRGFMYWSDWGDQAKIEKSGLNGVDRQTLVSDNIEWPNGITLDLLSQRLYWVDSKLHQLSSIDFSGGNRKTLISSTDFLSHPFGIAVFEDKVFWTDLENEAIFSANRLNGLEISILAENLNNPHDIVIFHELKQPRAPDACELSVQPNGGCEYLCLPAPQISSHSPKYTCACPDTMWLGPDMKRCYRAPQSTSTTTLASTMTRTVPATTRAPGTTVHRSTYQNHSTETPSLTAAVPSSVSVPRAPSISPSTLSPATSNHSQHYANEDSKMGSTVTAA

SEQ ID NO: 2681 - protein, 538 aa, synthetic construct
  REGION 1..538: note = LRRC15 (Q8TF66) SP+PP+ECD
MPLKHYLLLLVGCQAWGAGLAYHGCPSECTCSRASQVECTGARIVAVPTPLPWNAMSLQILNTHITELNESPFLNISALIALRIEKNELSRITPGAFRNLGSLRYLSLANNKLQVLPIGLFQGLDSLESLLLSSNQLLQIQPAHFSQCSNLKELQLHGNHLEYIPDGAFDHLVGLTKLNLGKNSLTHISPRVFQHLGNLQVLRLYENRLTDIPMGTFDGLVNLQELALQQNQIGLLSPGLFHNNHNLQRLYLSNNHISQLPPSVFMQLPQLNRLTLFGNSLKELSPGIFGPMPNLRELWLYDNHISSLPDNVFSNLRQLQVLILSRNQISFISPGAFNGLTELRELSLHTNALQDLDGNVFRMLANLQNISLQNNRLRQLPGNIFANVNGLMAIQLQNNQLENLPLGIFDHLGKLCELRLYDNPWRCDSDILPLRNWLLLNQPRLGTDTVPVCFSPANVRGQSLIIINVNVAVPSVHVPEVPSYPETPWYPDTPSYPDTTSVSSTTELTSPVEDYTDLTTIQVTDDRSVWGMTQAQSG

SEQ ID NO: 2682 - protein, 270 aa, synthetic construct
  REGION 1..270: note = LRRC19 (Q9H756) SP+PP+ECD
MKVTGITILFWPLSMILLSDKIQSSKREVQCNFTEKNYTLIPADIKKDVTILDLSYNQITLNGTDTRVLQTYFLLTELYLIENKVTILHNNGFGNLSSLEILNICRNSIYVIQQGAFLGLNKLKQLYLCQNKIEQLNADVFVPLRSLKLLNLQGNLISYLDVPPLFHLELITLYGNLWNCSCSLFNLQNWLNTSNVTLENENITMCSYPNSLQSYNIKTVPHKAECHSKFPSSVTEDLYIHFQPISNSIFNSSSNNLTRNSEHEPLGKSW

SEQ ID NO: 2683 - protein, 405 aa, synthetic construct
  REGION 1..405: note = LRRC24 (Q50LG9) SP+PP+ECD
MALRAPALLPLLLLLLPLRAAGCPAACRCYSATVECGALRLRVVPLGIPPGTQTLFLQDNNIARLEPGALAPLAALRRLYLHNNSLRALEAGAFRAQPRLLELALTSNRLRGLRSGAFVGLAQLRVLYLAGNQLARLLDFTFLHLPRLQELHLQENSIELLEDQALAGLSSLALLDLSRNQLGTISREALQPLASLQVLRLTENPWRCDCALHWLGAWIKEGGQRLLTSRDRKIMCAEPPRLALQSLLDVSHSSLICIPPSVHVQPLELTANLGEDLRVACQASGYPQPLVTWRKVPQPREGRPRAQAQLEGGLLGLGGHSASDTGSGMLFLSNITLAHAGKYECEASNAGGAARVPFRLLVNASRQQPQQPAQPPPPAARPAGSEPRPEAGSMAFRALGVATQT

SEQ ID NO: 2684 - protein, 165 aa, synthetic construct
  REGION 1..165: note = LRRC25 (Q8N386) SP+PP+ECD
MGGTLAWTLLLPLLLRESDSLEPSCTVSSADVDWNAEFSATCLNFSGLSLSLPHNQSLRASNVILLDLSGNGLRELPVTFFAHLQKLEVLNVLRNPLSRVDGALAARCDLDLQADCNCALESWHDIRRDNCSGQKPLLCWDTTSSQHNLSAFLEVSCAPGLASAT

SEQ ID NO: 2685 - protein, 627 aa, synthetic construct
  REGION 1..627: note = LRRC32 (Q14392) SP+PP+ECD
MRPQILLLLALLTLGLAAQHQDKVPCKMVDKKVSCQVLGLLQVPSVLPPDTETLDLSGNQLRSILASPLGFYTALRHLDLSTNEISFLQPGAFQALTHLEHLSLAHNRLAMATALSAGGLGPLPRVTSLDLSGNSLYSGLLERLLGEAPSLHTLSLAENSLTRLTRHTFRDMPALEQLDLHSNVLMDIEDGAFEGLPRLTHLNLSRNSLTCISDFSLQQLRVLDLSCNSIEAFQTASQPQAEFQLTWLDLRENKLLHFPDLAALPRLIYLNLSNNLIRLPTGPPQDSKGIHAPSEGWSALPLSAPSGNASGRPLSQLLNLDLSYNEIELIPDSFLEHLTSLCFLNLSRNCLRTFEARRLGSLPCLMLLDLSHNALETLELGARALGSLRTLLLQGNALRDLPPYTFANLASLQRLNLQGNRVSPCGGPDEPGPSGCVAFSGITSLRSLSLVDNEIELLRAGAFLHTPLTELDLSSNPGLEVATGALGGLEASLEVLALQGNGLMVLQVDLPCFICLKRLNLAENRLSHLPAWTQAVSLEVLDLRNNSFSLLPGSAMGGLETSLRRLYLQGNPLSCCGNGWLAAQLHQGRVDVDATQDLICRFSSQEEVSLSHVRPEDCEKGGLKNIN

SEQ ID NO: 2686 - protein, 1582 aa, synthetic construct
  REGION 1..1582: note = LRRC37A (A6NMS7) SP+PP+ECD
MSSAQCPALVCVMSRLRFWGPWPLLMWQLLWLLVKEAQPLEWVKDPLQLTSNPLGPPESWSSHSSHFPRESPHAPTLPADPWDFDHLGPSASSEMPAPPQESTENLVPFLDTWDSAGEQPLEPEQFLASQQDLKDKLSPQERLPVSPKKLKKDPAQRWSLAEIIGITRQLSTPQSQKQTLQNEYSSTDTPYPGSLPPELRVKSDEPPGPSEQVGPSQFHLEPETQNPETLEDIQSSSLQQEAPAQLPQLLEEEPSSMQQEAPALPPESSMESLTLPNHEVSVQPPGEDQAYYHLPNITVKPADVEVTITSEPTNETESSQAQQETPIQFPEEVEPSATQQEAPIEPPVPPMEHELSISEQQQPVQPSESPREVESSPTQQETPGQPPEHHEVTVSPPGHHQTHHLASPSVSVKPPDVQLTIAAEPSAEVGTSLVHQEATTRLSGSGNDVEPPAIQHGGPPLLPESSEEAGPLAVQQETSFQSPEPINNENPSPTQQEAAAEHPQTAEEGESSLTHQEAPAQTPEFPNVVVAQPPEHSHLTQATVQPLDLGFTITPESKTEVELSPTMKETPTQPPKKVVPQLRVYQGVTNPTPGQDQAQHPVSPSVTVQLLDLGLTITPEPTTEVGHSTPPKRTIVSPKHPEVTLPHPDQVQTQHSHLTRATVQPLDLGFTITPKSMTEVEPSTALMTTAPPPGHPEVTLPPSDKGQAQHSHLTQATVQPLDLELTITTKPTTEVKPSPTTEETSTQPPDLGLAIIPEPTTETGHSTALEKTTAPRPDRVQTLHRSLTEVTGPPTELEPAQDSLVQSESYTQNKALTAPEEHKASTSTNICELCTCGDEMLSCIDLNPEQRLRQVPVPEPNTHNGTFTILNFQGNYISYIDGNVWKAYSWTEKLILRENNLTELHKDSFEGLLSLQYLDLSCNKIQSIERHTFEPLPFLKFINLSCNVITELSFGTFQAWHGMQFLHKLILNHNPLTTVEDPYLFKLPALKYLDMGTTLVPLTTLKNILMMTVELEKLILPSHMACCLCQFKNSIEAVCKTVKLHCNSACLTNTTHCPEEASVGNPEGAFMKVLQARKNYTSTELIVEPEEPSDSSGINLSGFGSEQLDTNDESDFISTLSYILPYFSAVNLDVKSLLLPFIKLPTTGNSLAKIQTVGQNRQRVKRVLMGPRSIQKRHFKEVGRQSIRREQGAQASVENAAEEKRLTSPAPREVEQPHTQQGPEKLAGNAVYTKPSFTQEHKAAVSVLKPFSKGTPSTSSPAKALPQVRDRSKDLTHAISILESAKARVTNTKTSKPIVHARKKYRFHKTRSHVTHRTTKVKKSPKVRKKSYLSRLMLANRLPFSAAKSLINSPSQGAFSSLGDLSPQENPFLEVSALSEHFIEKNNTKHTTARNAFEENDFMENTNMPEGTISENTNYNHPPEADSAGTAFNLGPTVKQTETKWEYNNVGTDLSPEPKSFNYPLLSSPGDQFEIQLTQQLQSLIPNNNVRRLIAHVIRTLKMDCSGAHVQVTCAKLISRTGHLMKLLSGQQEVKASKIEWDTDQWKIENYINESTEAQSEQKEKSLELKKEVPGYGYTDKL

SEQ ID NO: 2687 - protein, 1582 aa, synthetic construct
  REGION 1..1582: note = LRRC37A2 (A6NM11) SP+PP+ECD
MSSAQCPALVCVMSRLRFWGPWPLLMWQLLWLLVKEAQPLEWVKDPLQLTSNPLGPPDSWSSHSSHFPRESPHAPTLPADPWDFDHLGPSASSEMPAPPQESTENLVPFLDTWDSAGEQPLEPEQFLASQQDLKDKLSPQERLPVSPKKLKKDPAQRWSLAEIIGITRQLSTPQSQKQTLQNEYSSTDTPYPGSLPPELRVKSDEPPGPSEQVGPSQFHLEPETQNPETLEDIQSSSLQQEAPAQLPQLLEEEPSSMQQEAPALPPESSMESLTLPNHEVSVQPPGEDQAYYHLPNITVKPADVEVTITSEPTNETESSQAQQETPIQFPEEVEPSATQQEAPIEPPVPPMEHELSISEQQQPVQPSESPREVESSPTQQETPGQPPEHHEVTVSPPGHHQTHHLASPSVSVKPPDVQLTIAAEPSAEVGTSLVHQEATTRLSGSGNDVEPPAIQHGGPPLLPESSEEAGPLAVQQETSFQSPEPINNENPSPTQQEAAAEHPQTAEEGESSLTHQEAPAQTPEFPNVVVAQPPEHSHLTQATVQPLDLGFTITPESKTEVELSPTMKETPTQPPKKVVPQLRVYQGVTNPTPGQDQAQHPVSPSVTVQLLDLGLTITPEPTTEVGHSTPPKRTIVSPKHPEVTLPHPDQVQTQHSHLTRATVQPLDLGFTITPKSMTEVEPSTALMTTAPPPGHPEVTLPPSDKGQAQHSHLTQATVQPLDLELTITTKPTTEVKPSPTTEETSTQPPDLGLAIIPEPTTETRHSTALEKTTAPRPDRVQTLHRSLTEVTGPPTELEPAQDSLVQSESYTQNKALTAPEEHKASTSTNICELCTCGDEMLSCIDLNPEQRLRQVPVPEPNTHNGTFTILNFQGNYISYIDGNVWKAYSWTEKLILRENNLTELHKDSFEGLLSLQYLDLSCNKIQSIERHTFEPLPFLKFINLSCNVITELSFGTFQAWHGMQFLHKLILNHNPLTTVEDPYLFKLPALKYLDMGTTLVPLTTLKNILMMTVELEKLILPSHMACCLCQFKNSIEAVCKTVKLHCNSACLTNTTHCPEEASVGNPEGAFMKVLQARKNYTSTELIVEPEEPSDSSGINLSGFGSEQLDTNDESDFISTLSYILPYFSAVNLDVKSLLLPFIKLPTTGNSLAKIQTVGQNRQRVKRVLMGPRSIQKRHFKEVGRQSIRREQGAQASVENAAEEKRLGSPAPREVEQPHTQQGPEKLAGNAVYTKPSFTQEHKAAVSVLKPFSKGAPSTSSPAKALPQVRDRWKDLTHAISILESAKARVTNTKTSKPIVHARKKYRFHKTRSHVTHRTPKVKKSPKVRKKSYLSRLMLANRLPFSAAKSLINSPSQGAFSSLGDLSPQENPFLEVSAPSEHFIENNNTKHTTARNAFEENDFMENTNMPEGTISENTNYNHPHEADSAGTAFNLGPTVKQTETKWEYNNVGTDLSPEPKSFNYPLLSSPGDQFEIQLTQQLQSLIPNNNVRRLIAHVIRTLKMDCSGAHVQVTCAKLISRTGHLMKLLSGQQEVKASKIEWDTDQWKIENYINESTEAQSEQKEKSLELKKEVPGYGYTDKL

SEQ ID NO: 2688 - protein, 1581 aa, synthetic construct
  REGION 1..1581: note = LRRC37A3 (O60309) SP+PP+ECD
MTSAQCPALACVMSPLRFWGPWPLLMWQLLWLLVKEAQPLEWVKDPLQLTSNPLGPPEPWSSHSSHFPRESPHAPTLPADPWDFDHLGPSASSEMPAPPQESTENLVPFLDTWDSAGELPLEPEQFLASQQDLKDKLSPQERLPVSPKKLKKDPAQRWSLAEIIGIIHQLSTPQSQKQTLQNEYSSTDTPYPGSLPPELRVKSDEPPGPSEQVGPSQFHLEPETQNPETLEDIQSSSLQQEAPAQLPQLLEEEPSSMQQEAPALPPESSMESLTLPNHEVSVQPPGEDQAYYHLPNITVKPADVEVTITSEPTNETESSQAQQETPIQFPEEVEPSATQQEAPIEPPVPPMEHELSISEQQQPVQPSESSREVESSPTQQETPGQPPEHHEVTVSPPGHHQTHHLASPSVSVKPPDVQLTIAAEPSAEVGTSLVHQEATTRLSGSGNDVEPPAIQHGGPPLLPESSEEAGPLAVQQETSFQSPEPINNENPSPTQQEAAAEHPQTAEEGESSLTHQEAPAQTPEFPNVVVAQPPEHSHLTQATVQPLDLGFTITPESMTEVELSPTMKETPTQPPKKVVPQLRVYQGVTNPTPGQDQAQHPVSPSVTVQLLDLGLTITPEPTTEVGHSTPPKRTIVSPKHPEVTLPHPDQVQTQHSHLTRATVQPLDLGFTITPKSMTEVEPSTALMTTAPPPGHPEVTLPPSDKGQAQHSHLTQATVQPLDLELTITTKPTTEVKPSPTTEETSTQLPDLGLAIIPEPTTETGHSTALEKTTAPRPDRVQTLHRSLTEVTGPPTELEPAQDSLVQSESYTQNKALTAPEEHKASTSTNICELCTCGDEMLSCIDLNPEQRLRQVPVPEPNTHNGTFTILNFQGNYISYIDGNVWKAYSWTEKLILRENNLTELHKDSFEGLLSLQYLDLSCNKIQSIERHTFEPLPFLKFINLSCNVITELSFGTFQAWHGMQFLHKLILNHNPLTTVEDPYLFKLPALKYLDMGTTLVPLTTLKNILMMTVELEKLIVPSHMACCLCQFKNSIEAVCKTVKLHCNSACLTNTTHCPEEASVGNPEGAFMKVLQARKNYTSTELIIEPEEPSDSSGINLSGFGSEQLDTNDESDVTSTLSYILPYFSAVNLDVKSLLLPFIKLPTTGNSLAKIQTVGKNRQRLNRVLMGPRSIQKRHFKEVGRQSIRREQGAQASVENTAEEKRLGSPAPRELKQPHTQQGPEKLAGNAVYTKPSFTQEHKAAVSVLKPFSKGAPSTSSPAKALPQVRDRWKDLTHAISILESAKARVTNMKTSKPIVHSRKKYRFHKTRSRMTHRTPKVKKSPKVRKKSYLSRLMLSNRLPFSAAKSLINSPSQGAFSSLRDLSPQENPFLEVSAPSEHFIENNNTKDTTARNAFEENVFMENTNMPEGTISENTNYNHPPEADSAGTAFNLGPTVKQTETKWEYNNVGTDLSPEPKSFNYPLLSSPGDQFEIQLTQQLQSVIPNNNVRRLIAHVIRTLKMDCSGAHVQVTCAKLVSRTGHLMKLLSGQQEVKASKIEWDTDQWKTENYINESTEAQSEQKEKSLEFTKELPGYGYTKK

SEQ ID NO: 2689 - protein, 905 aa, synthetic construct
  REGION 1..905: note = LRRC37B (Q96QE4) SP+PP+ECD
MSWLRFWGPWPLLTWQLLSLLVKEAQPLVWVKDPLQLTSNPLGPPEPWSSRSSHLPWESPHAPAPPAAPGDFDYLGPSASSQMSALPQEPTENLAPFLKELDSAGELPLGPEPFLAAHQDLNDKRTPEERLPEVVPLLNRDQNQALVQLPRLKWVQTTDLDRAAGHQADEILVPLDSKVSRPTKFVVSPKNLKKDLAERWSLPEIVGIPHQLSKPQRQKQTLPDDYLSMDTLYPGSLPPELRVNADEPPGPPEQVGLSQFHLEPKSQNPETLEDIQSSSLQEEAPAQLLQLPQEVEPSTQQEAPALPPESSMESLAQTPLNHEVTVQPPGEDQAHYNLPKFTVKPADVEVTMTSEPKNETESTQAQQEAPIQPPEEAEPSSTALRTTDPPPEHPEVTLPPSDKGQAQHSHLTEATVQPLDLELSITTEPTTEVKPSPTTEETSAQPPDPGLAITPEPTTEIGHSTALEKTRAPHPDQVQTLHRSLTEVTGPPTKLESSQDSLVQSETAPEEQKASTSTNICELCTCGDETLSCVGLSPKQRLRQVPVPEPDTYNGIFTTLNFQGNYISYLDGNVWKAYSWTEKLILSENYLTELPKDSFEGLLYLQYLDLSCNKIRYIERQTFESLPFLQYINLGCNLITKLSLGTFQAWHGMQFLHNLILNRNPLTTVEDPYLFELPALKYLDMGTTHITLTTLKNILTMTVELEKLILPSHMACCLCQFKNSIEAVCKTVKLHCNTACLTNSIHCPEEASVGNPEGAFMKMLQARKQHMSTQLTIESEAPSDSSGINLSGFGGDQLEIQLTEQLRSLIPNEDVRKFMSHVIRTLKMECSETHVQGSCAKLMLRTGLLMKLLSEQQEAKALNVEWDTDQQKTNYINENMEQNEQKEQKSSELMKEVPGDDYKNK

SEQ ID NO: 2690 - protein, 249 aa, synthetic construct
  REGION 1..249: note = LRRC38 (Q5VT99) SP+PP+ECD
MRPRAPACAAAALGLCSLLLLLAPGHACPAGCACTDPHTVDCRDRGLPSVPDPFPLDVRKLLVAGNRIQRIPEDFFIFYGDLVYLDFRNNSLRSLEEGTFSGSAKLVFLDLSYNNLTQLGAGAFRSAGRLVKLSLANNNLVGVHEDAFETLESLQVLELNDNNLRSLSVAALAALPALRSLRLDGNPWLCDCDFAHLFSWIQENASKLPKGLDEIQCSLPMESRRISLRELSEASFSECRFSLSLTDLC

SEQ ID NO: 2691 - protein, 204 aa, synthetic construct
  REGION 1..204: note = LRRC3B (Q96PB8) SP+PP+ECD
MNLVDLWLTRSLSMCLLLQSFVLMILCFHSASMCPKGCLCSSSGGLNVTCSNANLKEIPRDLPPETVLLYLDSNQITSIPNEIFKDLHQLRVLNLSKNGIEFIDEHAFKGVAETLQTLDLSDNRIQSVHKNAFNNLKARARIANNPWHCDCTLQQVLRSMASNHETAHNVICKTSVLDEHAGRPFLNAANDADLCNLPKKTTDY

SEQ ID NO: 2692 - protein, 527 aa, synthetic construct
  REGION 1..527: note = LRRC4 (Q9HBW1) SP+PP+ECD
MKLLWQVTVHHHTWNAILLPFVYLTAQVWILCAAIAAAASAGPQNCPSVCSCSNQFSKVVCTRRGLSEVPQGIPSNTRYLNLMENNIQMIQADTFRHLHHLEVLQLGRNSIRQIEVGAFNGLASLNTLELFDNWLTVIPSGAFEYLSKLRELWLRNNPIESIPSYAFNRVPSLMRLDLGELKKLEYISEGAFEGLFNLKYLNLGMCNIKDMPNLTPLVGLEELEMSGNHFPEIRPGSFHGLSSLKKLWVMNSQVSLIERNAFDGLASLVELNLAHNNLSSLPHDLFTPLRYLVELHLHHNPWNCDCDILWLAWWLREYIPTNSTCCGRCHAPMHMRGRYLVEVDQASFQCSAPFIMDAPRDLNISEGRMAELKCRTPPMSSVKWLLPNGTVLSHASRHPRISVLNDGTLNFSHVLLSDTGVYTCMVTNVAGNSNASAYLNVSTAELNTSNYSFFTTVTVETTEISPEDTTRKYKPVPTTSTGYQPAYTTSTTVLIQTTRVPKQVAVPATDTTDKMQTSLDEVMKTTK

SEQ ID NO: 2693 - protein, 576 aa, synthetic construct
  REGION 1..576: note = LRRC4B (Q9NT99) SP+PP+ECD
MARARGSPCPPLPPGRMSWPHGALLFLWLFSPPLGAGGGGVAVTSAAGGGSPPATSCPVACSCSNQASRVICTRRDLAEVPASIPVNTRYLNLQENGIQVIRTDTFKHLRHLEILQLSKNLVRKIEVGAFNGLPSLNTLELFDNRLTTVPTQAFEYLSKLRELWLRNNPIESIPSYAFNRVPSLRRLDLGELKRLEYISEAAFEGLVNLRYLNLGMCNLKDIPNLTALVRLEELELSGNRLDLIRPGSFQGLTSLRKLWLMHAQVATIERNAFDDLKSLEELNLSHNNLMSLPHDLFTPLHRLERVHLNHNPWHCNCDVLWLSWWLKETVPSNTTCCARCHAPAGLKGRYIGELDQSHFTCYAPVIVEPPTDLNVTEGMAAELKCRTGTSMTSVNWLTPNGTLMTHGSYRVRISVLHDGTLNFTNVTVQDTGQYTCMVTNSAGNTTASATLNVSAVDPVAAGGTGSGGGGPGGSGGVGGGSGGYTYFTTVTVETLETQPGEEALQPRGTEKEPPGPTTDGVWGGGRPGDAAGPASSSTTAPAPRSSRPTEKAFTVPITDVTENALKDLDDVMKTTK

SEQ ID NO: 2694 - protein, 527 aa, synthetic construct
  REGION 1..527: note = LRRC4C (Q9HCJ2) SP+PP+ECD
MLNKMTLHPQQIMIGPRFNRALFDPLLVVLLALQLLVVAGLVRAQTCPSVCSCSNQFSKVICVRKNLREVPDGISTNTRLLNLHENQIQIIKVNSFKHLRHLEILQLSRNHIRTIEIGAFNGLANLNTLELFDNRLTTIPNGAFVYLSKLKELWLRNNPIESIPSYAFNRIPSLRRLDLGELKRLSYISEGAFEGLSNLRYLNLAMCNLREIPNLTPLIKLDELDLSGNHLSAIRPGSFQGLMHLQKLWMIQSQIQVIERNAFDNLQSLVEINLAHNNLTLLPHDLFTPLHHLERIHLHHNPWNCNCDILWLSWWIKDMAPSNTACCARCNTPPNLKGRYIGELDQNYFTCYAPVIVEPPADLNVTEGMAAELKCRASTSLTSVSWITPNGTVMTHGAYKVRIAVLSDGTLNFTNVTVQDTGMYTCMVSNSVGNTTASATLNVTAATTTPFSYFSTVTVETMEPSQDEARTTDNNVGPTPVVDWETTNVTTSLTPQSTRSTEKTFTIPVTDINSGIPGIDEVMKTTK

SEQ ID NO: 2695 - protein, 244 aa, synthetic construct
  REGION 1..244: note = LRRC52 (Q8N7C0) SP+PP+ECD
MSLASGPGPGWLLFSFGMGLVSGSKCPNNCLCQAQEVICTGKQLTEYPLDIPLNTRRLFLNENRITSLPAMHLGLLSDLVYLDCQNNRIREVMDYTFIGVFKLIYLDLSSNNLTSISPFTFSVLSNLVQLNIANNPHLLSLHKFTFANTTSLRYLDLRNTGLQTLDSAALYHLTTLETLFLSGNPWKCNCSFLDFAIFLIVFHMDPSDDLNATCVEPTELTGWPITRVGNPLRYMCITHLDHKD

SEQ ID NO: 2696 - protein, 631 aa, synthetic construct
  REGION 1..631: note = LRRN1 (Q6UXK5) SP+PP+ECD
MARMSFVIAACQLVLGLLMTSLTESSIQNSECPQLCVCEIRPWFTPQSTYREATTVDCNDLRLTRIPSNLSSDTQVLLLQSNNIAKTVDELQQLFNLTELDFSQNNFTNIKEVGLANLTQLTTLHLEENQITEMTDYCLQDLSNLQELYINHNQISTISAHAFAGLKNLLRLHLNSNKLKVIDSRWFDSTPNLEILMIGENPVIGILDMNFKPLANLRSLVLAGMYLTDIPGNALVGLDSLESLSFYDNKLVKVPQLALQKVPNLKFLDLNKNPIHKIQEGDFKNMLRLKELGINNMGELVSVDRYALDNLPELTKLEATNNPKLSYIHRLAFRSVPALESLMLNNNALNAIYQKTVESLPNLREISIHSNPLRCDCVIHWINSNKTNIRFMEPLSMFCAMPPEYKGHQVKEVLIQDSSEQCLPMISHDSFPNRLNVDIGTTVFLDCRAMAEPEPEIYWVTPIGNKITVETLSDKYKLSSEGTLEISNIQIEDSGRYTCVAQNVQGADTRVATIKVNGTLLDGTQVLKIYVKQTESHSILVSWKVNSNVMTSNLKWSSATMKIDNPHITYTARVPVDVHEYNLTHLQPSTDYEVCLTVSNIHQQTQKSCVNVTTKNAAFAVDISDQETSTA

SEQ ID NO: 2697 - protein, 630 aa, synthetic construct
  REGION 1..630: note = LRRN2 (O75325) SP+PP+ECD
MRLLVAPLLLAWVAGATAAVPVVPWHVPCPPQCACQIRPWYTPRSSYREATTVDCNDLFLTAVPPALPAGTQTLLLQSNSIVRVDQSELGYLANLTELDLSQNSFSDARDCDFHALPQLLSLHLEENQLTRLEDHSFAGLASLQELYLNHNQLYRIAPRAFSGLSNLLRLHLNSNLLRAIDSRWFEMLPNLEILMIGGNKVDAILDMNFRPLANLRSLVLAGMNLREISDYALEGLQSLESLSFYDNQLARVPRRALEQVPGLKFLDLNKNPLQRVGPGDFANMLHLKELGLNNMEELVSIDKFALVNLPELTKLDITNNPRLSFIHPRAFHHLPQMETLMLNNNALSALHQQTVESLPNLQEVGLHGNPIRCDCVIRWANATGTRVRFIEPQSTLCAEPPDLQRLPVREVPFREMTDHCLPLISPRSFPPSLQVASGESMVLHCRALAEPEPEIYWVTPAGLRLTPAHAGRRYRVYPEGTLELRRVTAEEAGLYTCVAQNLVGADTKTVSVVVGRALLQPGRDEGQGLELRVQETHPYHILLSWVTPPNTVSTNLTWSSASSLRGQGATALARLPRGTHSYNITRLLQATEYWACLQVAFADAHTQLACVWARTKEATSCHRALGDRPG

SEQ ID NO: 2698 - protein, 628 aa, synthetic construct
  REGION 1..628: note = LRRN3 (Q9H3W5) SP+PP+ECD
MKDMPLRIHVLLGLAITTLVQAVDKKVDCPRLCTCEIRPWFTPRSIYMEASTVDCNDLGLLTFPARLPANTQILLLQTNNIAKIEYSTDFPVNLTGLDLSQNNLSSVTNINVKKMPQLLSVYLEENKLTELPEKCLSELSNLQELYINHNLLSTISPGAFIGLHNLLRLHLNSNRLQMINSKWFDALPNLEILMIGENPIIRIKDMNFKPLINLRSLVIAGINLTEIPDNALVGLENLESISFYDNRLIKVPHVALQKVVNLKFLDLNKNPINRIRRGDFSNMLHLKELGINNMPELISIDSLAVDNLPDLRKIEATNNPRLSYIHPNAFFRLPKLESLMLNSNALSALYHGTIESLPNLKEISIHSNPIRCDCVIRWMNMNKTNIRFMEPDSLFCVDPPEFQGQNVRQVHFRDMMEICLPLIAPESFPSNLNVEAGSYVSFHCRATAEPQPEIYWITPSGQKLLPNTLTDKFYVHSEGTLDINGVTPKEGGLYTCIATNLVGADLKSVMIKVDGSFPQDNNGSLNIKIRDIQANSVLVSWKASSKILKSSVKWTAFVKTENSHAAQSARIPSDVKVYNLTHLNPSTEYKICIDIPTIYQKNRKKCVNVTTKGLHPDQKEYEKNNTTT

SEQ ID NO: 2699 - protein, 679 aa, synthetic construct
  REGION 1..679: note = LRRN4 (Q8WUT4) SP+PP+ECD
MRQTLPLLLLTVLRPSWADPPQEKVPLFRVTQQGPWGSSGSNATDSPCEGLPAADATALTLANRNLERLPGCLPRTLRSLDASHNLLRALSTSELGHLEQLQVLTLRHNRIAALRWGPGGPAGLHTLDLSYNQLAALPPCTGPALSSLRALALAGNPLRALQPRAFACFPALQLLNLSCTALGRGAQGGIAEAAFAGEDGAPLVTLEVLDLSGTFLERVESGWIRDLPKLTSLYLRKMPRLTTLEGDIFKMTPNLQQLDCQDSPALASVATHIFQDTPHLQVLLFQNCNLSSFPPWTLDSSQVLSINLFGNPLTCSCDLSWLLTDAKRTVLSRAADTMCAPAAGSSGPFSASLSLSQLPGVCQSDQSTTLGASHPPCFNRSTYAQGTTVAPSAAPATRPAGDQQSVSKAPNVGSRTIAAWPHSDAREGTAPSTTNSVAGHSNSSVFPRAASTTRTQHRGEHAPELVLEPDISAASTPLASKLLGPFPTSWDRSISSPQPGQRTHATPQAPNPSLSEGEIPVLLLDDYSEEEEGRKEEVGTPHQDVPCDYHPCKHLQTPCAELQRRWRCRCPGLSGEDTIPDPPRLQGVTETTDTSALVHWCAPNSVVHGYQIRYSAEGWAGNQSVVGVIYATARQHPLYGLSPGTTYRVCVLAANRAGLSQPRSSGWRSPCAAFTTKPS

SEQ ID NO: 2700 - protein, 194 aa, synthetic construct
  REGION 1..194: note = LRRN4CL (Q8ND94) SP+PP+ECD
MLGSPCLLWLLAVTFLVPRAQPLAPQDFEEEEADETETAWPPLPAVPCDYDHCRHLQVPCKELQRVGPAACLCPGLSSPAQPPDPPRMGEVRIAAEEGRAVVHWCAPFSPVLHYWLLLWDGSEAAQKGPPLNATVRRAELKGLKPGGIYVVCVVAANEAGASRVPQAGGEGLEGADIPAFGPCSRLAVPPNPRT

SEQ ID NO: 2701 - protein, 422 aa, synthetic construct
  REGION 1..422: note = LRRTM2 (O43300) SP+PP+ECD
MGLHFKWPLGAPMLAAIYAMSMVLKMLPALGMACPPKCRCEKLLFYCDSQGFHSVPNATDKGSLGLSLRHNHITELERDQFASFSQLTWLHLDHNQISTVKEDAFQGLYKLKELILSSNKIFYLPNTTFTQLINLQNLDLSFNQLSSLHPELFYGLRKLQTLHLRSNSLRTIPVRLFWDCRSLEFLDLSTNRLRSLARNGFAGLIKLRELHLEHNQLTKINFAHFLRLSSLHTLFLQWNKISNLTCGMEWTWGTLEKLDLTGNEIKAIDLTVFETMPNLKILLMDNNKLNSLDSKILNSLRSLTTVGLSGNLWECSARICALASWLGSFQGRWEHSILCHSPDHTQGEDILDAVHGFQLCWNLSTTVTVMATTYRDPTTEYTKRISSSSYHVGDKEIPTTAGIAVTTEEHFPEPDNAIFTQR

SEQ ID NO: 2702 - protein, 419 aa, synthetic construct
  REGION 1..419: note = LRRTM3 (Q86VH5) SP+PP+ECD
MGFNVIRLLSGSAVALVIAPTVLLTMLSSAERGCPKGCRCEGKMVYCESQKLQEIPSSISAGCLGLSLRYNSLQKLKYNQFKGLNQLTWLYLDHNHISNIDENAFNGIRRLKELILSSNRISYFLNNTFRPVTNLRNLDLSYNQLHSLGSEQFRGLRKLLSLHLRSNSLRTIPVRIFQDCRNLELLDLGYNRIRSLARNVFAGMIRLKELHLEHNQFSKLNLALFPRLVSLQNLYLQWNKISVIGQTMSWTWSSLQRLDLSGNEIEAFSGPSVFQCVPNLQRLNLDSNKLTFIGQEILDSWISLNDISLAGNIWECSRNICSLVNWLKSFKGLRENTIICASPKELQGVNVIDAVKNYSICGKSTTERFDLARALPKPTFKPKLPRPKHESKPPLPPTVGATEPGPETDADAEHISFHK

SEQ ID NO: 2703 - protein, 424 aa, synthetic construct
  REGION 1..424: note = LRRTM4 (Q86VH4) SP+PP+ECD
MGFHLITQLKGMSVVLVLLPTLLLVMLTGAQRACPKNCRCDGKIVYCESHAFADIPENISGGSQGLSLRFNSIQKLKSNQFAGLNQLIWLYLDHNYISSVDEDAFQGIRRLKELILSSNKITYLHNKTFHPVPNLRNLDLSYNKLQTLQSEQFKGLRKLIILHLRSNSLKTVPIRVFQDCRNLDFLDLGYNRLRSLSRNAFAGLLKLKELHLEHNQFSKINFAHFPRLFNLRSIYLQWNRIRSISQGLTWTWSSLHNLDLSGNDIQGIEPGTFKCLPNLQKLNLDSNKLTNISQETVNAWISLISITLSGNMWECSRSICPLFYWLKNFKGNKESTMICAGPKHIQGEKVSDAVETYNICSEVQVVNTERSHLVPQTPQKPLIIPRPTIFKPDVTQSTFETPSPSPGFQIPGAEQEYEHVSFHK

SEQ ID NO: 2704 - protein, 288 aa, synthetic construct
  REGION 1..288: note = LRTM1 (Q9HBL6) SP+PP+ECD
MKGELLLFSSVIVLLQVVCSCPDKCYCQSSTNFVDCSQQGLAEIPSHLPPQTRTLHLQDNQIHHLPAFAFRSVPWLMTLNLSNNSLSNLAPGAFHGLQHLQVLNLTQNSLLSLESRLFHSLPQLRELDLSSNNISHLPTSLGETWENLTILAVQQNQLQQLDRALLESMPSVRLLLLKDNLWKCNCHLLGLKLWLEKFVYKGGLTDGIICESPDTWKGKDLLRIPHELYQPCPLPAPDPVSSQAQWPGSAHGVVLRPPENHNAGERELLECELKPKPRPANLRHAIAT

SEQ ID NO: 2705 - protein, 310 aa, synthetic construct
  REGION 1..310: note = LRTM2 (Q8N967) SP+PP+ECD
MLAPGSSPGQRGRLALQWRQVSWITCWIALYAVEALPTCPFSCKCDSRSLEVDCSGLGLTTVPPDVPAATRTLLLLNNKLSALPSWAFANLSSLQRLDLSNNFLDRLPRSIFGDLTNLTELQLRNNSIRTLDRDLLRHSPLLRHLDLSINGLAQLPPGLFDGLLALRSLSLRSNRLQNLDRLTFEPLANLQLLQVGDNPWECDCNLREFKHWMEWFSYRGGRLDQLACTLPKELRGKDMRMVPMEMFNYCSQLEDENSSAGLDIPGPPCTKASPEPAKPKPGAEPEPEPSTACPQKQRHRPASVRRAMGT

SEQ ID NO: 2706 - protein, 227 aa, synthetic construct
  REGION 1..227: note = LTBR (P36941) SP+PP+ECD
MLLPWATSAPGLAWGPLVLGLFGLLAASQPQAVPPYASENQTCRDQEKEYYEPQHRICCSRCPPGTYVSAKCSRIRDTVCATCAENSYNEHWNYLTICQLCRPCDPVMGLEEIAPCTSKRKTQCRCQPGMFCAAWALECTHCELLSDCPPGTEAELKDEVGKGNNHCVPCKAGHFQNTSSPSARCQPHTRCENQGLVEAAPGTAQSDTTCKNPLEPLPPEMSGTMLM

SEQ ID NO: 2707 - protein, 424 aa, synthetic construct
  REGION 1..424: note = LTK (P29376) SP+PP+ECD
MGCWGQLLVWFGAAGAILCSSPGSQETFLRSSPLPLASPSPRDPKVSAPPSILEPASPLNSPGTEGSWLFSTCGASGRHGPTQTQCDGAYAGTSVVVTVGAAGQLRGVQLWRVPGPGQYLISAYGAAGGKGAKNHLSRAHGVFVSAIFSLGLGESLYILVGQQGEDACPGGSPESQLVCLGESRAVEEHAAMDGSEGVPGSRRWAGGGGGGGGATYVFRVRAGELEPLLVAAGGGGRAYLRPRDRGRTQASPEKLENRSEAPGSGGRGGAAGGGGGWTSRAPSPQAGRSLQEGAEGGQGCSEAWATLGWAAAGGFGGGGGACTAGGGGGGYRGGDASETDNLWADGEDGVSFIHPSSELFLQPLAVTENHGEVEIRRHLNCSHCPLRDCQWQAELQLAECLCPEGMELAVDNVTCMDLHKPPGP

SEQ ID NO: 2708 - protein, 235 aa, synthetic construct
  REGION 1..235: note = LY6G6F (Q5SQ64) SP+PP+ECD
MAVLFLLLFLCGTPQAADNMQAIYVALGEAVELPCPSPPTLHGDEHLSWFCSPAAGSFTTLVAQVQVGRPAPDPGKPGRESRLRLLGNYSLWLEGSKEEDAGRYWCAVLGQHHNYQNWRVYDVLVLKGSQLSARAADGSPCNVLLCSVVPSRRMDSVTWQEGKGPVRGRVQSFWGSEAALLLVCPGEGLSEPRSRRPRIIRCLMTHNKGVSFSLAASIDASPALCAPSTGWDMPW

SEQ ID NO: 2709 - protein, 1666 aa, synthetic construct
  REGION 1..1666: note = LY75 (O60449) SP+PP+ECD
MRTGWATPRRPAGLLMLLFWFFDLAEPSGRAANDPFTIVHGNTGKCIKPVYGWIVADDCDETEDKLWKWVSQHRLFHLHSQKCLGLDITKSVNELRMFSCDSSAMLWWKCEHHSLYGAARYRLALKDGHGTAISNASDVWKKGGSEESLCDQPYHEIYTRDGNSYGRPCEFPFLIDGTWHHDCILDEDHSGPWCATTLNYEYDRKWGICLKPENGCEDNWEKNEQFGSCYQFNTQTALSWKEAYVSCQNQGADLLSINSAAELTYLKEKEGIAKIFWIGLNQLYSARGWEWSDHKPLNFLNWDPDRPSAPTIGGSSCARMDAESGLWQSFSCEAQLPYVCRKPLNNTVELTDVWTYSDTRCDAGWLPNNGFCYLLVNESNSWDKAHAKCKAFSSDLISIHSLADVEVVVTKLHNEDIKEEVWIGLKNINIPTLFQWSDGTEVTLTYWDENEPNVPYNKTPNCVSYLGELGQWKVQSCEEKLKYVCKRKGEKLNDASSDKMCPPDEGWKRHGETCYKIYEDEVPFGTNCNLTITSRFEQEYLNDLMKKYDKSLRKYFWTGLRDVDSCGEYNWATVGGRRRAVTFSNWNFLEPASPGGCVAMSTGKSVGKWEVKDCRSFKALSICKKMSGPLGPEEASPKPDDPCPEGWQSFPASLSCYKVFHAERIVRKRNWEEAERFCQALGAHLSSFSHVDEIKEFLHFLTDQFSGQHWLWIGLNKRSPDLQGSWQWSDRTPVSTIIMPNEFQQDYDIRDCAAVKVFHRPWRRGWHFYDDREFIYLRPFACDTKLEWVCQIPKGRTPKTPDWYNPDRAGIHGPPLIIEGSEYWFVADLHLNYEEAVLYCASNHSFLATITSFVGLKAIKNKIANISGDGQKWWIRISEWPIDDHFTYSRYPWHRFPVTFGEECLYMSAKTWLIDLGKPTDCSTKLPFICEKYNVSSLEKYSPDSAAKVQCSEQWIPFQNKCFLKIKPVSLTFSQASDTCHSYGGTLPSVLSQIEQDFITSLLPDMEATLWIGLRWTAYEKINKWTDNRELTYSNFHPLLVSGRLRIPENFFEEESRYHCALILNLQKSPFTGTWNFTSCSERHFVSLCQKYSEVKSRQTLQNASETVKYLNNLYKIIPKTLTWHSAKRECLKSNMQLVSITDPYQQAFLSVQALLHNSSLWIGLFSQDDELNFGWSDGKRLHFSRWAETNGQLEDCVVLDTDGFWKTVDCNDNQPGAICYYSGNETEKEVKPVDSVKCPSPVLNTPWIPFQNCCYNFIITKNRHMATTQDEVHTKCQKLNPKSHILSIRDEKENNFVLEQLLYFNYMASWVMLGITYRNKSLMWFDKTPLSYTHWRAGRPTIKNEKFLAGLSTDGFWDIQTFKVIEEAVYFHQHSILACKIEMVDYKEEYNTTLPQFMPYEDGIYSVIQKKVTWYEALNMCSQSGGHLASVHNQNGQLFLEDIVKRDGFPLWVGLSSHDGSESSFEWSDGSTFDYIPWKGQTSPGNCVLLDPKGTWKHEKCNSVKDGAICYKPTKSKKLSRLTYSSRCPAAKENGSRWIQYKGHCYKSDQALHSFSEAKKLCSKHDHSATIVSIKDEDENKFVSRLMRENNNITMRVWLGLSQHSVDQSWSWLDGSEVTFVKWENKSKSGVGRCSMLIASNETWKKVECEHGFGRVVCKVPLGPD

SEQ ID NO: 2710 - protein, 454 aa, synthetic construct
  REGION 1..454: note = LY9 (Q9HBG7) SP+PP+ECD
MVAPKSHTDDWAPGPFSSKPQRSQLQIFSSVLQTSLLFLLMGLRASGKDSAPTVVSGILGGSVTLPLNISVDTEIENVIWIGPKNALAFARPKENVTIMVKSYLGRLDITKWSYSLCISNLTLNDAGSYKAQINQRNFEVTTEEEFTLFVYEQLQEPQVTMKSVKVSENFSCNITLMCSVKGAEKSVLYSWTPREPHASESNGGSILTVSRTPCDPDLPYICTAQNPVSQRSSLPVHVGQFCTDPGASRGGTTGETVVGVLGEPVTLPLALPACRDTEKVVWLFNTSIISKEREEAATADPLIKSRDPYKNRVWVSSQDCSLKISQLKIEDAGPYHAYVCSEASSVTSMTHVTLLIYRRLRKPKITWSLRHSEDGICRISLTCSVEDGGNTVMYTWTPLQKEAVVSQGESHLNVSWRSSENHPNLTCTASNPVSRSSHQFLSENICSGPERNTK

SEQ ID NO: 2711 - protein, 238 aa, synthetic construct
  REGION 1..238: note = LYVE1 (Q9Y5Y7) SP+PP+ECD
MARCFSLVLLLTSIWTTRLLVQGSLRAEELSIQVSCRIMGITLVSKKANQQLNFTEAKEACRLLGLSLAGKDQVETALKASFETCSYGWVGDGFVVISRISPNPKCGKNGVGVLIWKVPVSRQFAAYCYNSSDTWTNSCIPEIITTKDPIFNTQTATQTTEFIVSDSTYSVASPYSTIPAPTTTPPAPASTSIPRRKKLICVTEVFMETSTMSTETEPFVENKAAFKNEAAGFGGVPT

SEQ ID NO: 2712 - protein, 185 aa, synthetic construct
  REGION 1..185: note = M6PR (P20645) SP+PP+ECD
MFPFYSCWRTGLLLLLLAVAVRESWQTEEKTCDLVGEKGKESEKELALVKRLKPLFNKSFESTVGQGSDTYIYIFRVCREAGNHTSGAGLVQINKSNGKETVVGRLNETHIFNGSNWIMLIYKGGDEYDNHCGKEQRRAVVMISCNRHTLADNFNPVSEERGKVQDCFYLFEMDSSLACSPEISH

SEQ ID NO: 2713 - protein, 516 aa, synthetic construct
  REGION 1..516: note = MAG (P20916) SP+PP+ECD
MIFLTALPLFWIMISASRGGHWGAWMPSSISAFEGTCVSIPCRFDFPDELRPAVVHGVWYFNSPYPKNYPPVVFKSRTQVVHESFQGRSRLLGDLGLRNCTLLLSNVSPELGGKYYFRGDLGGYNQYTFSEHSVLDIVNTPNIVVPPEVVAGTEVEVSCMVPDNCPELRPELSWLGHEGLGEPAVLGRLREDEGTWVQVSLLHFVPTREANGHRLGCQASFPNTTLQFEGYASMDVKYPPVIVEMNSSVEAIEGSHVSLLCGADSNPPPLLTWMRDGTVLREAVAESLLLELEEVTPAEDGVYACLAENAYGQDNRTVGLSVMYAPWKPTVNGTMVAVEGETVSILCSTQSNPDPILTIFKEKQILSTVIYESELQLELPAVSPEDDGEYWCVAENQYGQRATAFNLSVEFAPVLLLESHCAAARDTVQCLCVVKSNPEPSVAFELPSRNVTVNESEREFVYSERSGLVLTSILTLRGQAQAPPRVICTARNLYGAKSLELPFQGAHRLMWAKIGP

SEQ ID NO: 2714 - protein, 1151 aa, synthetic construct
  REGION 1..1151: note = MAMDC4 (Q6UXC1) SP+PP+ECD
MPLSSHLLPALVLFLAGSSGWAWVPNHCRSPGQAVCNFVCDCRDCSDEAQCGYHGASPTLGAPFACDFEQDPCGWRDISTSGYSWLRDRAGAALEGPGPHSDHTLGTDLGWYMAVGTHRGKEASTAALRSPTLREAASSCKLRLWYHAASGDVAELRVELTHGAETLTLWQSTGPWGPGWQELAVTTGRIRGDFRVTFSATRNATHRGAVALDDLEFWDCGLPTPQANCPPGHHHCQNKVCVEPQQLCDGEDNCGDLSDENPLTCGRHIATDFETGLGPWNRSEGWSRNHRAGGPERPSWPRRDHSRNSAQGSFLVSVAEPGTPAILSSPEFQASGTSNCSLVFYQYLSGSEAGCLQLFLQTLGPGAPRAPVLLRRRRGELGTAWVRDRVDIQSAYPFQILLAGQTGPGGVVGLDDLILSDHCRPVSEVSTLQPLPPGPRAPAPQPLPPSSRLQDSCKQGHLACGDLCVPPEQLCDFEEQCAGGEDEQACGTTDFESPEAGGWEDASVGRLQWRRVSAQESQGSSAAAAGHFLSLQRAWGQLGAEARVLTPLLGPSGPSCELHLAYYLQSQPRGFLALVVVDNGSRELAWQALSSSAGIWKVDKVLLGARRRPFRLEFVGLVDLDGPDQQGAGVDNVTLRDCSPTVTTERDREVSCNFERDTCSWYPGHLSDTHWRWVESRGPDHDHTTGQGHFVLLDPTDPLAWGHSAHLLSRPQVPAAPTECLSFWYHLHGPQIGTLRLAMRREGEETHLWSRSGTQGNRWHEAWATLSHQPGSHAQYQLLFEGLRDGYHGTMALDDVAVRPGPCWAPNYCSFEDSDCGFSPGGQGLWRRQANASGHAAWGPPTDHTTETAQGHYMVVDTSPDALPRGQTASLTSKEHRPLAQPACLTFWYHGSLRSPGTLRVYLEERGRHQVLSLSAHGGLAWRLGSMDVQAERAWRVVFEAVAAGVAHSYVALDDLLLQDGPCPQPGSCDFESGLCGWSHLAWPGLGGYSWDWGGGATPSRYPQPPVDHTLGTEAGHFAFFETGVLGPGGRAAWLRSEPLPATPASCLRFWYHMGFPEHFYKGELKVLLHSAQGQLAVWGAGGHRRHQWLEAQVEVASAKEFQIVFEATLGGQPALGPIALDDVEYLAGQHCQQPAPSPGNTAAPGS

SEQ ID NO: 2715 - protein, 385 aa, synthetic construct
  REGION 1..385: note = MANSC1 (Q9H8J5) SP+PP+ECD
MFFGGEGSLTYTLVIICFLTLRLSASQNCLKKSLEDVVIDIQSSLSKGIRGNEPVYTSTQEDCINSCCSTKNISGDKACNLMIFDTRKTARQPNCYLFFCPNEEACPLKPAKGLMSYRIITDFPSLTRNLPSQELPQEDSLLHGQFSQAVTPLAHHHTDYSKPTDISWRDTLSQKFGSSDHLEKLFKMDEASAQLLAYKEKGHSQSSQFSSDQEIAHLLPENVSALPATVAVASPHTTSATPKPATLLPTNASVTPSGTSQPQLATTAPPVTTVTSQPPTTLISTVFTRAAATLQAMATTAVLTTTFQAPTDSKGSLETIPFTEISNLTLNTGNVYNPTALSMSNVESSTMNKTASWEGREASPGSSSQGSVPENQYGLPFEKWL

SEQ ID NO: 2716 - protein, 284 aa, synthetic construct
  REGION 1..284: note = MANSC4 (A6NHS7) SP+PP+ECD
MHVAEVAVNVILLLSMGWTSDSLCSPTIFYRDCWIRRFPGLLINLEESQKLGAQFLKYYSESTGQKCSRSCCLRKDVSCNLAVFYHSPIHDNINCLHVHCPTLESCILEPGTSAILYNITDGIDPDLLVFEQSPTYLNTRSSSNRWDRLRILKAMNLDKQTTTINGMLPSTEAPSSTTHQDLVVNTNSTSYSKELTTDFWARFTSLNESITTKINKVSPSTDFISNPDNKTISPFFEPIDTKLSHMPVPPGLNSSKQLLNKTKGYNSRNHTSANEDEVSVTSKT

SEQ ID NO: 2717 - protein, 559 aa, synthetic construct
  REGION 1..559: note = MCAM (P43121) SP+PP+ECD
MGLPRLVCAFLLAACCCCPRVAGVPGEAEQPAPELVEVEVGSTALLKCGLSQSQGNLSHVDWFSVHKEKRTLIFRVRQGQGQSEPGEYEQRLSLQDRGATLALTQVTPQDERIFLCQGKRPRSQEYRIQLRVYKAPEEPNIQVNPLGIPVNSKEPEEVATCVGRNGYPIPQVIWYKNGRPLKEEKNRVHIQSSQTVESSGLYTLQSILKAQLVKEDKDAQFYCELNYRLPSGNHMKESREVTVPVFYPTEKVWLEVEPVGMLKEGDRVEIRCLADGNPPPHFSISKQNPSTREAEEETTNDNGVLVLEPARKEHSGRYECQGLDLDTMISLLSEPQELLVNYVSDVRVSPAAPERQEGSSLTLTCEAESSQDLEFQWLREETGQVLERGPVLQLHDLKREAGGGYRCVASVPSIPGLNRTQLVNVAIFGPPWMAFKERKVWVKENMVLNLSCEASGHPRPTISWNVNGTASEQDQDPQRVLSTLNVLVTPELLETGVECTASNDLGKNTSILFLELVNLTTLTPDSNTTTGLSTSTASPHTRANSTSTERKLPEPESRG

SEQ ID NO: 2718 - protein, 857 aa, synthetic construct
  REGION 1..857: note = MEGF10 (Q96KG7) SP+PP+ECD
MVISLNSCLSFICLLLCHWIGTASPLNLEDPNVCSHWESYSVTVQESYPHPFDQIYYTSCTDILNWFKCTRHRVSYRTAYRHGEKTMYRRKSQCCPGFYESGEMCVPHCADKCVHGRCIAPNTCQCEPGWGGTNCSSACDGDHWGPHCTSRCQCKNGALCNPITGACHCAAGFRGWRCEDRCEQGTYGNDCHQRCQCQNGATCDHVTGECRCPPGYTGAFCEDLCPPGKHGPQCEQRCPCQNGGVCHHVTGECSCPSGWMGTVCGQPCPEGRFGKNCSQECQCHNGGTCDAATGQCHCSPGYTGERCQDECPVGTYGVLCAETCQCVNGGKCYHVSGACLCEAGFAGERCEARLCPEGLYGIKCDKRCPCHLENTHSCHPMSGECACKPGWSGLYCNETCSPGFYGEACQQICSCQNGADCDSVTGKCTCAPGFKGIDCSTPCPLGTYGINCSSRCGCKNDAVCSPVDGSCTCKAGWHGVDCSIRCPSGTWGFGCNLTCQCLNGGACNTLDGTCTCAPGWRGEKCELPCQDGTYGLNCAERCDCSHADGCHPTTGHCRCLPGWSGVHCDSVCAEGRWGPNCSLPCYCKNGASCSPDDGICECAPGFRGTTCQRICSPGFYGHRCSQTCPQCVHSSGPCHHITGLCDCLPGFTGALCNEVCPSGRFGKNCAGICTCTNNGTCNPIDRSCQCYPGWIGSDCSQPCPPAHWGPNCIHTCNCHNGAFCSAYDGECKCTPGWTGLYCTQRCPLGFYGKDCALICQCQNGADCDHISGQCTCRTGFMGRHCEQKCPSGTYGYGCRQICDCLNNSTCDHITGTCYCSPGWKGARCDQAGVIIVGNLNSLSRTSTALPADSYQIG

SEQ ID NO: 2719 - protein, 848 aa, synthetic construct
  REGION 1..848: note = MEGF11 (A6BM72) SP+PP+ECD
MVLSLTGLIAFSFLQATLALNPEDPNVCSHWESYAVTVQESYAHPFDQIYYTRCTDILNWFKCTRHRISYKTAYRRGLRTMYRRRSQCCPGYYESGDFCIPLCTEECVHGRCVSPDTCHCEPGWGGPDCSSGCDSDHWGPHCSNRCQCQNGALCNPITGACVCAAGFRGWRCEELCAPGTHGKGCQLPCQCRHGASCDPRAGECLCAPGYTGVYCEELCPPGSHGAHCELRCPCQNGGTCHHITGECACPPGWTGAVCAQPCPPGTFGQNCSQDCPCHHGGQCDHVTGQCHCTAGYMGDRCQEECPFGSFGFQCSQHCDCHNGGQCSPTTGACECEPGYKGPRCQERLCPEGLHGPGCTLPCPCDADNTISCHPVTGACTCQPGWSGHHCNESCPVGYYGDGCQLPCTCQNGADCHSITGGCTCAPGFMGEVCAVSCAAGTYGPNCSSICSCNNGGTCSPVDGSCTCKEGWQGLDCTLPCPSGTWGLNCNESCTCANGAACSPIDGSCSCTPGWLGDTCELPCPDGTFGLNCSEHCDCSHADGCDPVTGHCCCLAGWTGIRCDSTCPPGRWGPNCSVSCSCENGGSCSPEDGSCECAPGFRGPLCQRICPPGFYGHGCAQPCPLCVHSSRPCHHISGICECLPGFSGALCNQVCAGGYFGQDCAQLCSCANNGTCSPIDGSCQCFPGWIGKDCSQACPPGFWGPACFHACSCHNGASCSAEDGACHCTPGWTGLFCTQRCPAAFFGKDCGRVCQCQNGASCDHISGKCTCRTGFTGQHCEQRCAPGTFGYGCQQLCECMNNSTCDHVTGTCYCSPGFKGIRCDQAALMMEELNPYTKISPALGAERHS

SEQ ID NO: 2720 - protein, 2845 aa, synthetic construct
  REGION 1..2845: note = MEGF8 (Q7Z7M0) SP+PP+ECD
MALGKVLAMALVLALAVLGSLSPGARAGDCKGQRQVLREAPGFVTDGAGNYSVNGNCEWLIEAPSPQHRILLDFLFLDTECTYDYLFVYDGDSPRGPLLASLSGSTRPPPIEASSGKMLLHLFSDANYNLLGFNASFRFSLCPGGCQSHGQCQPPGVCACEPGWGGPDCGLQECSAYCGSHGTCASPLGPCRCEPGFLGRACDLHLWENQGAGWWHNVSARDPAFSARIGAAGAFLSPPGLLAVFGGQDLNNALGDLVLYNFSANTWESWDLSPAPAARHSHVAVAWAGSLVLMGGELADGSLTNDVWAFSPLGRGHWELLAPPASSSSGPPGLAGHAAALVDDVWLYVSGGRTPHDLFSSGLFRFRLDSTSGGYWEQVIPAGGRPPAATGHSMVFHAPSRALLVHGGHRPSTARFSVRVNSTELFHVDRHVWTTLKGRDGLQGPRERAFHTASVLGNYMVVYGGNVHTHYQEEKCYEDGIFFYHLGCHQWVSGAELAPPGTPEGRAAPPSGRYSHVAAVLGGSVLLVAGGYSGRPRGDLMAYKVPPFVFQAPAPDYHLDYCSMYTDHSVCSRDPECSWCQGACQAAPPPGTPLGACPAASCLGLGRLLGDCQACLAFSSPTAPPRGPGTLGWCVHNESCLPRPEQARCRGEQISGTVGWWGPAPVFVTSLEACVTQSFLPGLHLLTFQQPPNTSQPDKVSIVRSTTITLTPSAETDVSLVYRGFIYPMLPGGPGGPGAEDVAVWTRAQRLHVLARMARGPDTENMEEVGRWVAHQEKETRRLQRPGSARLFPLPGRDHKYAVEIQGQLNGSAGPGHSELTLLWDRTGVPGGSEISFFFLEPYRSSSCTSYSSCLGCLADQGCGWCLTSATCHLRQGGAHCGDDGAGGSLLVLVPTLCPLCEEHRDCHACTQDPFCEWHQSTSRKGDAACSRRGRGRGALKSPEECPPLCSQRLTCEDCLANSSQCAWCQSTHTCFLFAAYLARYPHGGCRGWDDSVHSEPRCRSCDGFLTCHECLQSHECGWCGNEDNPTLGRCLQGDFSGPLGGGNCSLWVGEGLGLPVALPARWAYARCPDVDECRLGLARCHPRATCLNTPLSYECHCQRGYQGDGISHCNRTCLEDCGHGVCSGPPDFTCVCDLGWTSDLPPPTPAPGPPAPRCSRDCGCSFHSHCRKRGPGFCDECQDWTWGEHCERCRPGSFGNATGSRGCRPCQCNGHGDPRRGHCDNLSGLCFCQDHTEGAHCQLCSPGYYGDPRAGGSCFRECGGRALLTNVSSVALGSRRVGGLLPPGGGAARAGPGLSYCVWVVSATEELQPCAPGTLCPPLTLTFSPDSSTPCTLSYVLAFDGFPRFLDTGVVQSDRSLIAAFCGQRRDRPLTVQALSGLLVLHWEANGSSSWGFNASVGSARCGSGGPGSCPVPQECVPQDGAAGAGLCRCPQGWAGPHCRMALCPENCNAHTGAGTCNQSLGVCICAEGFGGPDCATKLDGGQLVWETLMDSRLSADTASRFLHRLGHTMVDGPDATLWMFGGLGLPQGLLGNLYRYSVSERRWTQMLAGAEDGGPGPSPRSFHAAAYVPAGRGAMYLLGGLTAGGVTRDFWVLNLTTLQWRQEKAPQTVELPAVAGHTLTARRGLSLLLVGGYSPENGFNQQLLEYQLATGTWVSGAQSGTPPTGLYGHSAVYHEATDSLYVFGGFRFHVELAAPSPELYSLHCPDRTWSLLAPSQGAKRDRMRNVRGSSRGLGQVPGEQPGSWGFREVRKKMALWAALAGTGGFLEEISPHLKEPRPRLFHASALLGDTMVVLGGRSDPDEFSSDVLLYQVNCNAWLLPDLTRSASVGPPMEESVAHAVAAVGSRLYISGGFGGVALGRLLALTLPPDPCRLLSSPEACNQSGACTWCHGACLSGDQAHRLGCGGSPCSPMPRSPEECRRLRTCSECLARHPRTLQPGDGEASTPRCKWCTNCPEGACIGRNGSCTSENDCRINQREVFWAGNCSEAACGAADCEQCTREGKCMWTRQFKRTGETRRILSVQPTYDWTCFSHSLLNVSPMPVESSPPLPCPTPCHLLPNCTSCLDSKGADGGWQHCVWSSSLQQCLSPSYLPLRCMAGGCGRLLRGPESCSLGCAQATQCALCLRRPHCGWCAWGGQDGGGRCMEGGLSGPRDGLTCGRPGASWAFLSCPPEDECANGHHDCNETQNCHDQPHGYECSCKTGYTMDNMTGLCRPVCAQGCVNGSCVEPDHCRCHFGFVGRNCSTECRCNRHSECAGVGARDHCLLCRNHTKGSHCEQCLPLFVGSAVGGGTCRPCHAFCRGNSHICISRKELQMSKGEPKKYSLDPEEIENWVTEGPSEDEAVCVNCQNNSYGEKCESCLQGYFLLDGKCTKCQCNGHADTCNEQDGTGCPCQNNTETGTCQGSSPSDRRDCYKYQCAKCRESFHGSPLGGQQCYRLISVEQECCLDPTSQTNCFHEPKRRALGPGRTVLFGVQPKFTNVDIRLTLDVTFGAVDLYVSTSYDTFVVRVAPDTGVHTVHIQPPPAPPPPPPPADGGPRGAGDPGGAGASSGPGAPAEPRVREVWPRGLITYVTVTEPSAVLVVRGVRDRLVITYPHEHHALKSSRFYLLLLGVGDPSGPGANGSADSQGLLFFRQDQAHIDLFVFFSVFFSCFFLFLSLCVLLWKAKQALDQRQEQRRHLQEMTKMASRPFAKVTVCFPPDPTAPASAWKPAGLPPPAFRRSEPFLAPLLLTGAGGPWGPMGGGCCPPAIPATTAGLRAGPITLEPTEDGMAGVATLLLQLPGGPHAPNGACLGSALVTLRHRLHEYCGGGGGAGGSGHGTGAGRKGLLSQDNLTSMSL

SEQ ID NO: 2721 - protein, 514 aa, synthetic construct
  REGION 1..514: note = MEGF9 (Q9H1U4) SP+PP+ECD
MNGGAERAMRSLPSLGGLALLCCAAAAAAAAVASAASAGNVTGGGGAAGQVDASPGPGLRGEPSHPFPRATAPTAQAPRTGPPRATVHRPLAATSPAQSPETTPLWATAGPSSTTFQAPLGPSPTTPPAAERTSTTSQAPTRPAPTTLSTTTGPAPTTPVATTVPAPTTPRTPTPDLPSSSNSSVLPTPPATEAPSSPPPEYVCNCSVVGSLNVNRCNQTTGQCECRPGYQGLHCETCKEGFYLNYTSGLCQPCDCSPHGALSIPCNSSGKCQCKVGVIGSICDRCQDGYYGFSKNGCLPCQCNNRSASCDALTGACLNCQENSKGNHCEECKEGFYQSPDATKECLRCPCSAVTSTGSCSIKSSELEPECDQCKDGYIGPNCNKCENGYYNFDSICRKCQCHGHVDPVKTPKICKPESGECINCLHNTTGFWCENCLEGYVHDLEGNCIKKEVILPTPEGSTILVSNASLTTSVPTPVINSTFTPTTLQTIFSVSTSENSTSALADVSWTQFN

SEQ ID NO: 2722 - protein, 712 aa, synthetic construct
  REGION 1..712: note = MEP1A (Q16819) SP+PP+ECD
MAWIRSTCILFFTLLFAHIAAVPIKYLPEENVHDADFGEQKDISEINLAAGLDLFQGDILLQKSRNGLRDPNTRWTFPIPYILADNLGLNAKGAILYAFEMFRLKSCVDFKPYEGESSYIIFQQFDGCWSEVGDQHVGQNISIGQGCAYKAIIEHEILHALGFYHEQSRTDRDDYVNIWWDQILSGYQHNFDTYDDSLITDLNTPYDYESLMHYQPFSFNKNASVPTITAKIPEFNSIIGQRLDFSAIDLERLNRMYNCTTTHTLLDHCTFEKANICGMIQGTRDDTDWAHQDSAQAGEVDHTLLGQCTGAGYFMQFSTSSGSAEEAALLESRILYPKRKQQCLQFFYKMTGSPSDRLVVWVRRDDSTGNVRKLVKVQTFQGDDDHNWKIAHVVLKEEQKFRYLFQGTKGDPQNSTGGIYLDDITLTETPCPTGVWTVRNFSQVLENTSKGDKLQSPRFYNSEGYGFGVTLYPNSRESSGYLRLAFHVCSGENDAILEWPVENRQVIITILDQEPDVRNRMSSSMVFTTSKSHTSPAINDTVIWDRPSRVGTYHTDCNCFRSIDLGWSGFISHQMLKRRSFLKNDDLIIFVDFEDITHLSQTEVPTKGKRLSPQGLILQGQEQQVSEEGSGKAMLEEALPVSLSQGQPSRQKRSVENTGPLEDHNWPQYFRDPCDPNPCQNDGICVNVKGMASCRCISGHAFFYTGERCQAV

SEQ ID NO: 2723 - protein, 691 aa, synthetic construct
  REGION 1..691: note = MEP1B (Q16820) SP+PP+ECD
MDLWNLSWFLFLDALLVISGLATPENFDVDGGMDQDIFDINEGLGLDLFEGDIRLDRAQIRTPENFDVDGGMDQDIFDINEGLGLDLFEGDIRLDRAQIRNSIIGEKYRWPHTIPYVLEDSLEMNAKGVILNAFERYRLKTCIDFKPWAGETNYISVFKGSGCWSSVGNRRVGKQELSIGANCDRIATVQHEFLHALGFWHEQSRSDRDDYVRIMWDRILSGREHNFNTYSDDISDSLNVPYDYTSVMHYSKTAFQNGTEPTIVTRISDFEDVIGQRMDFSDSDLLKLNQLYNCSSSLSFMDSCSFELENVCGMIQSSGDNADWQRVSQVPRGPESDHSNMGQCQGSGFFMHFDSSSVNVGATAVLESRTLYPKRGFQCLQFYLYNSGSESDQLNIYIREYSADNVDGNLTLVEEIKEIPTGSWQLYHVTLKVTKKFRVVFEGRKGSGASLGGLSIDDINLSETRCPHHIWHIRNFTQFIGSPNGTLYSPPFYSSKGYAFQIYLNLAHVTNAGIYFHLISGANDDQLQWPCPWQQATMTLLDQNPDIRQRMSNQRSITTDPFMTTDNGNYFWDRPSKVGTVALFSNGTQFRRGGGYGTSAFITHERLKSRDFIKGDDVYILLTVEDISHLNSTQIQLTPAPSVQDLCSKTTCKNDGVCTVRDGKAECRCQSGEDWWYMGERCEKRGSTRDT

SEQ ID NO: 2724 - protein, 505 aa, synthetic construct
  REGION 1..505: note = MERTK (Q12866) SP+PP+ECD
MGPAPLPLLLGLFLPALWRRAITEAREEAKPYPLFPGPFPGSLQTDHTPLLSLPHASGYQPALMFSPTQPGRPHTGNVAIPQVTSVESKPLPPLAFKHTVGHIILSEHKGVKFNCSISVPNIYQDTTISWWKDGKELLGAHHAITQFYPDDEVTAIIASFSITSVQRSDNGSYICKMKINNEEIVSDPIYIEVQGLPHFTKQPESMNVTRNTAFNLTCQAVGPPEPVNIFWVQNSSRVNEQPEKSPSVLTVPGLTEMAVFSCEAHNDKGLTVSKGVQINIKAIPSPPTEVSIRNSTAHSILISWVPGFDGYSPFRNCSIQVKEADPLSNGSVMIFNTSALPHLYQIKQLQALANYSIGVSCMNEIGWSAVSPWILASTTEGAPSVAPLNVTVFLNESSDNVDIRWMKPPTKQQDGELVGYRISHVWQSAGISKELLEEVGQNGSRARISVQVHNATCTVRIAAVTRGGVGPFSDPVKIFIPAHGWVDYAPSSTPAPGNADPVLII

SEQ ID NO: 2725 - protein, 932 aa, synthetic construct
  REGION 1..932: note = MET (P08581) SP+PP+ECD
MKAPAVLAPGILVLLFTLVQRSNGECKEALAKSEMNVNMKYQLPNFTAETPIQNVILHEHHIFLGATNYIYVLNEEDLQKVAEYKTGPVLEHPDCFPCQDCSSKANLSGGVWKDNINMALVVDTYYDDQLISCGSVNRGTCQRHVFPHNHTADIQSEVHCIFSPQIEEPSQCPDCVVSALGAKVLSSVKDRFINFFVGNTINSSYFPDHPLHSISVRRLKETKDGFMFLTDQSYIDVLPEFRDSYPIKYVHAFESNNFIYFLTVQRETLDAQTFHTRIIRFCSINSGLHSYMEMPLECILTEKRKKRSTKKEVFNILQAAYVSKPGAQLARQIGASLNDDILFGVFAQSKPDSAEPMDRSAMCAFPIKYVNDFFNKIVNKNNVRCLQHFYGPNHEHCFNRTLLRNSSGCEARRDEYRTEFTTALQRVDLFMGQFSEVLLTSISTFIKGDLTIANLGTSEGRFMQVVVSRSGPSTPHVNFLLDSHPVSPEVIVEHTLNQNGYTLVITGKKITKIPLNGLGCRHFQSCSQCLSAPPFVQCGWCHDKCVRSEECLSGTWTQQICLPAIYKVFPNSAPLEGGTRLTICGWDFGFRRNNKFDLKKTRVLLGNESCTLTLSESTMNTLKCTVGPAMNKHFNMSIIISNGHGTTQYSTFSYVDPVITSISPKYGPMAGGTLLTLTGNYLNSGNSRHISIGGKTCTLKSVSNSILECYTPAQTISTEFAVKLKIDLANRETSIFSYREDPIVYEIHPTKSFISGGSTITGVGKNLNSVSVPRMVINVHEAGRNFTVACQHRSNSEIICCTTPSLQQLNLQLPLKTKAFFMLDGILSKYFDLIYVHNPVFKPFEKPVMISMGNENVLEIKGNDIDPEAVKGEVLKVGNKSCENIHLHSEAVLCTVPNDLLKLNSELNIEWKQAISSTVLGKVIVQPDQNFT

SEQ ID NO: 2726 - protein, 147 aa, synthetic construct
  REGION 1..147: note = MFAP3 (P55082) SP+PP+ECD
MKLHCCLFTLVASIIVPAAFVLEDVDFDQMVSLEANRSSYNASFPSSFELSASSHSDDDVIIAKEGTSVSIECLLTASHYEDVHWHNSKGQQLDGRSRGGKWLVSDNFLNITNVAFDDRGLYTCFVTSPIRASYSVTLRVIFTSGDM

SEQ ID NO: 2727 - protein, 149 aa, synthetic construct
  REGION 1..149: note = MFAP3L (O75121) SP+PP+ECD
MDRLKSHLTVCFLPSVPFLILVSTLATAKSVTNSTLNGTNVVLGSVPVIIARTDHIIVKEGNSALINCSVYGIPDPQFKWYNSIGKLLKEEEDEKERGGGKWQMHDSGLLNITKVSFSDRGKYTCVASNIYGTVNNTVTLRVIFTSGDM

SEQ ID NO: 2728 - protein, 307 aa, synthetic construct
  REGION 1..307: note = MICA (Q29983) SP+PP+ECD
MGLGPVFLLLAGIFPFAPPGAAAEPHSLRYNLTVLSWDGSVQSGFLTEVHLDGQPFLRCDRQKCRAKPQGQWAEDVLGNKTWDRETRDLTGNGKDLRMTLAHIKDQKEGLHSLQEIRVCEIHEDNSTRSSQHFYYDGELFLSQNLETKEWTMPQSSRAQTLAMNVRNFLKEDAMKTKTHYHAMHADCLQELRRYLKSGVVLRRTVPPMVNVTRSEASEGNITVTCRASGFYPWNITLSWRQDGVSLSHDTQQWGDVLPDGNGTYQTWVATRICQGEEQRFTCYMEHSGNHSTHPVPSGKVLVLQSHW

SEQ ID NO: 2729 - protein, 309 aa, synthetic construct
  REGION 1..309: note = MICB (Q29980) SP+PP+ECD
MGLGRVLLFLAVAFPFAPPAAAAEPHSLRYNLMVLSQDESVQSGFLAEGHLDGQPFLRYDRQKRRAKPQGQWAEDVLGAKTWDTETEDLTENGQDLRRTLTHIKDQKGGLHSLQEIRVCEIHEDSSTRGSRHFYYDGELFLSQNLETQESTVPQSSRAQTLAMNVTNFWKEDAMKTKTHYRAMQADCLQKLQRYLKSGVAIRRTVPPMVNVTCSEVSEGNITVTCRASSFYPRNITLTWRQDGVSLSHNTQQWGDVLPDGNGTYQTWVATRIRQGEEQRFTCYMEHSGNHGTHPVPSGKVLVLQSQRTD

SEQ ID NO: 2730 - protein, 227 aa, synthetic construct
  REGION 1..227: note = MILR1 (Q7Z6M3) SP+PP+ECD
MWSHLNRLLFWSIFSSVTCRKAVLDCEAMKTNEFPSPCLDSKTKVVMKGQNVSMFCSHKNKSLQITYSLFRRKTHLGTQDGKGEPAIFNLSITEAHESGPYKCKAQVTSCSKYSRDFSFTIVDPVTSPVLNIMVIQTETDRHITLHCLSVNGSLPINYTFFENHVAISPAISKYDREPAEFNLTKKNPGEEEEYRCEAKNRLPNYATYSHPVTMPSTGGDSCPFCLK

SEQ ID NO: 2731 - protein, 541 aa, synthetic construct
  REGION 1..541: note = MMP14 (P50281) SP+PP+ECD
MSPAPRPPRCLLLPLLTLGTALASLGSAQSSSFSPEAWLQQYGYLPPGDLRTHTQRSPQSLSAAIAAMQKFYGLQVTGKADADTMKAMRRPRCGVPDKFGAEIKANVRRKRYAIQGLKWQHNEITFCIQNYTPKVGEYATYEAIRKAFRVWESATPLRFREVPYAYIREGHEKQADIMIFFAEGFHGDSTPFDGEGGFLAHAYFPGPNIGGDTHFDSAEPWTVRNEDLNGNDIFLVAVHELGHALGLEHSSDPSAIMAPFYQWMDTENFVLPDDDRRGIQQLYGGESGFPTKMPPQPRTTSRPSVPDKPKNPTYGPNICDGNFDTVAMLRGEMFVFKERWFWRVRNNQVMDGYPMPIGQFWRGLPASINTAYERKDGKFVFFKGDKHWVFDEASLEPGYPKHIKELGRGLPTDKIDAALFWMPNGKTYFFRGNKYYRFNEELRAVDSEYPKNIKVWEGIPESPRGSFMGSDEVFTYFYKGNKYWKFNNQKLKVEPGYPKSALRDWMGCPSGGRPDEGTEEETEVIIIEVDEEGGGAVSAAA

SEQ ID NO: 2732 - protein, 564 aa, synthetic construct
  REGION 1..564: note = MMP16 (P51512) SP+PP+ECD
MILLTFSTGRRLDFVHHSGVFFLQTLLWILCATVCGTEQYFNVEVWLQKYGYLPPTDPRMSVLRSAETMQSALAAMQQFYGINMTGKVDRNTIDWMKKPRCGVPDQTRGSSKFHIRRKRYALTGQKWQHKHITYSIKNVTPKVGDPETRKAIRRAFDVWQNVTPLTFEEVPYSELENGKRDVDITIIFASGFHGDSSPFDGEGGFLAHAYFPGPGIGGDTHFDSDEPWTLGNPNHDGNDLFLVAVHELGHALGLEHSNDPTAIMAPFYQYMETDNFKLPNDDLQGIQKIYGPPDKIPPPTRPLPTVPPHRSIPPADPRKNDRPKPPRPPTGRPSYPGAKPNICDGNFNTLAILRREMFVFKDQWFWRVRNNRVMDGYPMQITYFWRGLPPSIDAVYENSDGNFVFFKGNKYWVFKDTTLQPGYPHDLITLGSGIPPHGIDSAIWWEDVGKTYFFKGDRYWRYSEEMKTMDPGYPKPITVWKGIPESPQGAFVHKENGFTYFYKGKEYWKFNNQILKVEPGYPRSILKDFMGCDGPTDRVKEGHSPPDDVDIVIKLDNTASTVKA

SEQ ID NO: 2733 - protein, 655 aa, synthetic construct
  REGION 1..655: note = MPEG1 (Q2M385) SP+PP+ECD
MNNFRATILFWAAAAWAKSGKPSGEMDEVGVQKCKNALKLPVLEVLPGGGWDNLRNVDMGRVMELTYSNCRTTEDGQYIIPDEIFTIPQKQSNLEMNSEILESWANYQSSTSYSINTELSLFSKVNGKFSTEFQRMKTLQVKDQAITTRVQVRNLVYTVKINPTLELSSGFRKELLDISDRLENNQTRMATYLAELLVLNYGTHVTTSVDAGAALIQEDHLRASFLQDSQSSRSAVTASAGLAFQNTVNFKFEENYTSQNVLTKSYLSNRTNSRVQSIGGVPFYPGITLQAWQQGITNHLVAIDRSGLPLHFFINPNMLPDLPGPLVKKVSKTVETAVKRYYTFNTYPGCTDLNSPNFNFQANTDDGSCEGKMTNFSFGGVYQECTQLSGNRDVLLCQKLEQKNPLTGDFSCPSGYSPVHLLSQIHEEGYNHLECHRKCTLLVFCKTVCEDVFQVAKAEFRAFWCVASSQVPENSGLLFGGLFSSKSINPMTNAQSCPAGYFPLRLFENLKVCVSQDYELGSRFAVPFGGFFSCTVGNPLVDPAISRDLGAPSLKKCPGGFSQHPALISDGCQVSYCVKSGLFTGGSLPPARLPPFTRPPLMSQAATNTVIVTNSENARSWIKDSQTHQWRLGEPIELRRAMNVIHGDGGGLSGG

SEQ ID NO: 2734 - protein, 491 aa, synthetic construct
  REGION 1..491: note = MPL (P40238) SP+PP+ECD
MPSWALFMVTSCLLLAPQNLAQVSSQDVSLLASDSEPLKCFSRTFEDLTCFWDEEEAAPSGTYQLLYAYPREKPRACPLSSQSMPHFGTRYVCQFPDQEEVRLFFPLHLWVKNVFLNQTRTQRVLFVDSVGLPAPPSIIKAMGGSQPGELQISWEEPAPEISDFLRYELRYGPRDPKNSTGPTVIQLIATETCCPALQRPHSASALDQSPCAQPTMPWQDGPKQTSPSREASALTAEGGSCLISGLQPGNSYWLQLRSEPDGISLGGSWGSWSLPVTVDLPGDAVALGLQCFTLDLKNVTCQWQQQDHASSQGFFYHSRARCCPRDRYPIWENCEEEEKTNPGLQTPQFSRCHFKSRNDSIIHILVEVTTAPGTVHSYLGSPFWIHQAVRLPTPNLHWREISSGHLELEWQHPSSWAAQETCYQLRYTGEGHQDWKVLEPPLGARGGTLELRPRSRYRLQLRARLNGPTYQGPWSSWSDPTRVETATETAW

SEQ ID NO: 2735 - protein, 153 aa, synthetic construct
  REGION 1..153: note = MPZ (P25189) SP+PP+ECD
MAPGAPSSSPSPILAVLLFSSLVLSPAQAIVVYTDREVHGAVGSRVTLHCSFWSSEWVSDDISFTWRYQPEGGRDAISIFHYAKGQPYIDEVGTFKERIQWVGDPRWKDGSIVIHNLDYSDNGTFTCDVKNPPDIVGKTSQVTLYVFEKVPTR

SEQ ID NO: 2736 - protein, 162 aa, synthetic construct
  REGION 1..162: note = MPZL1 (O95297) SP+PP+ECD
MAASAGAGAVIAAPDSRRWLWSVLAAALGLLTAGVSALEVYTPKEIFVANGTQGKLTCKFKSTSTTGGLTSVSWSFQPEGADTTVSFFHYSQGQVYLGNYPPFKDRISWAGDLDKKDASINIENMQFIHNGTYICDVKNPPDIVVQPGHIRLYVVEKENLPV

SEQ ID NO: 2737 - protein, 154 aa, synthetic construct
  REGION 1..154: note = MPZL2 (O60487) SP+PP+ECD
MYGKSSTRAVLLLLGIQLTALWPIAAVEIYTSRVLEAVNGTDARLKCTFSSFAPVGDALTVTWNFRPLDGGPEQFVFYYHIDPFQPMSGRFKDRVSWDGNPERYDASILLWKLQFDDNGTYTCQVKNPPDVDGVIGEIRLSVVHTVRFSEIHFL

SEQ ID NO: 2738 - protein, 158 aa, synthetic construct
  REGION 1..158: note = MPZL3 (Q6UWV2) SP+PP+ECD
MQQRGAAGSRGCALFPLLGVLFFQGVYIVFSLEIRADAHVRGYVGEKIKLKCTFKSTSDVTDKLTIDWTYRPPSSSHTVSIFHYQSFQYPTTAGTFRDRISWVGNVYKGDASISISNPTIKDNGTFSCAVKNPPDVHHNIPMTELTVTERGFGTMLSS

SEQ ID NO: 2739 - protein, 302 aa, synthetic construct
  REGION 1..302: note = MR1 (Q95460) SP+PP+ECD
MGELMAFLLPLIIVLMVKHSDSRTHSLRYFRLGVSDPIHGVPEFISVGYVDSHPITTYDSVTRQKEPRAPWMAENLAPDHWERYTQLLRGWQQMFKVELKRLQRHYNHSGSHTYQRMIGCELLEDGSTTGFLQYAYDGQDFLIFNKDTLSWLAVDNVAHTIKQAWEANQHELLYQKNWLEEECIAWLKRFLEYGKDTLQRTEPPLVRVNRKETFPGVTALFCKAHGFYPPEIYMTWMKNGEEIVQEIDYGDILPSGDGTYQAWASIELDPQSSNLYSCHVEHCGVHMVLQVPQESETIPLVM

SEQ ID NO: 2740 - protein, 1389 aa, synthetic construct
  REGION 1..1389: note = MRC1 (P22897) SP+PP+ECD
MRLPLLLVFASVIPGAVLLLDTRQFLIYNEDHKRCVDAVSPSAVQTAACNQDAESQKFRWVSESQIMSVAFKLCLGVPSKTDWVAITLYACDSKSEFQKWECKNDTLLGIKGEDLFFNYGNRQEKNIMLYKGSGLWSRWKIYGTTDNLCSRGYEAMYTLLGNANGATCAFPFKFENKWYADCTSAGRSDGWLWCGTTTDYDTDKLFGYCPLKFEGSESLWNKDPLTSVSYQINSKSALTWHQARKSCQQQNAELLSITEIHEQTYLTGLTSSLTSGLWIGLNSLSFNSGWQWSDRSPFRYLNWLPGSPSAEPGKSCVSLNPGKNAKWENLECVQKLGYICKKGNTTLNSFVIPSESDVPTHCPSQWWPYAGHCYKIHRDEKKIQRDALTTCRKEGGDLTSIHTIEELDFIISQLGYEPNDELWIGLNDIKIQMYFEWSDGTPVTFTKWLRGEPSHENNRQEDCVVMKGKDGYWADRGCEWPLGYICKMKSRSQGPEIVEVEKGCRKGWKKHHFYCYMIGHTLSTFAEANQTCNNENAYLTTIEDRYEQAFLTSFVGLRPEKYFWTGLSDIQTKGTFQWTIEEEVRFTHWNSDMPGRKPGCVAMRTGIAGGLWDVLKCDEKAKFVCKHWAEGVTHPPKPTTTPEPKCPEDWGASSRTSLCFKLYAKGKHEKKTWFESRDFCRALGGDLASINNKEEQQTIWRLITASGSYHKLFWLGLTYGSPSEGFTWSDGSPVSYENWAYGEPNNYQNVEYCGELKGDPTMSWNDINCEHLNNWICQIQKGQTPKPEPTPAPQDNPPVTEDGWVIYKDYQYYFSKEKETMDNARAFCKRNFGDLVSIQSESEKKFLWKYVNRNDAQSAYFIGLLISLDKKFAWMDGSKVDYVSWATGEPNFANEDENCVTMYSNSGFWNDINCGYPNAFICQRHNSSINATTVMPTMPSVPSGCKEGWNFYSNKCFKIFGFMEEERKNWQEARKACIGFGGNLVSIQNEKEQAFLTYHMKDSTFSAWTGLNDVNSEHTFLWTDGRGVHYTNWGKGYPGGRRSSLSYEDADCVVIIGGASNEAGKWMDDTCDSKRGYICQTRSDPSLTNPPATIQTDGFVKYGKSSYSLMRQKFQWHEAETYCKLHNSLIASILDPYSNAFAWLQMETSNERVWIALNSNLTDNQYTWTDKWRVRYTNWAADEPKLKSACVYLDLDGYWKTAHCNESFYFLCKRSDEIPATEPPQLPGRCPESDHTAWIPFHGHCYYIESSYTRNWGQASLECLRMGSSLVSIESAAESSFLSYRVEPLKSKTNFWIGLFRNVEGTWLWINNSPVSFVNWNTGDPSGERNDCVALHASSGFWSNIHCSSYKGYICKRPKIIDAKPTHELLTTKADTRKMDPSKPSSNVA

SEQ ID NO: 2741 - protein, 1414 aa, synthetic construct
  REGION 1..1414: note = MRC2 (Q9UBG0) SP+PP+ECD
MGPGRPAPAPWPRHLLRCVLLLGCLHLGRPGAPGDAALPEPNVFLIFSHGLQGCLEAQGGQVRVTPACNTSLPAQRWKWVSRNRLFNLGTMQCLGTGWPGTNTTASLGMYECDREALNLRWHCRTLGDQLSLLLGARTSNISKPGTLERGDQTRSGQWRIYGSEEDLCALPYHEVYTIQGNSHGKPCTIPFKYDNQWFHGCTSTGREDGHLWCATTQDYGKDERWGFCPIKSNDCETFWDKDQLTDSCYQFNFQSTLSWREAWASCEQQGADLLSITEIHEQTYINGLLTGYSSTLWIGLNDLDTSGGWQWSDNSPLKYLNWESDQPDNPSEENCGVIRTESSGGWQNRDCSIALPYVCKKKPNATAEPTPPDRWANVKVECEPSWQPFQGHCYRLQAEKRSWQESKKACLRGGGDLVSIHSMAELEFITKQIKQEVEELWIGLNDLKLQMNFEWSDGSLVSFTHWHPFEPNNFRDSLEDCVTIWGPEGRWNDSPCNQSLPSICKKAGQLSQGAAEEDHGCRKGWTWHSPSCYWLGEDQVTYSEARRLCTDHGSQLVTITNRFEQAFVSSLIYNWEGEYFWTALQDLNSTGSFFWLSGDEVMYTHWNRDQPGYSRGGCVALATGSAMGLWEVKNCTSFRARYICRQSLGTPVTPELPGPDPTPSLTGSCPQGWASDTKLRYCYKVFSSERLQDKKSWVQAQGACQELGAQLLSLASYEEEHFVANMLNKIFGESEPEIHEQHWFWIGLNRRDPRGGQSWRWSDGVGFSYHNFDRSRHDDDDIRGCAVLDLASLQWVAMQCDTQLDWICKIPRGTDVREPDDSPQGRREWLRFQEAEYKFFEHHSTWAQAQRICTWFQAELTSVHSQAELDFLSHNLQKFSRAQEQHWWIGLHTSESDGRFRWTDGSIINFISWAPGKPRPVGKDKKCVYMTASREDWGDQRCLTALPYICKRSNVTKETQPPDLPTTALGGCPSDWIQFLNKCFQVQGQEPQSRVKWSEAQFSCEQQEAQLVTITNPLEQAFITASLPNVTFDLWIGLHASQRDFQWVEQEPLMYANWAPGEPSGPSPAPSGNKPTSCAVVLHSPSAHFTGRWDDRSCTEETHGFICQKGTDPSLSPSPAALPPAPGTELSYLNGTFRLLQKPLRWHDALLLCESRNASLAYVPDPYTQAFLTQAARGLRTPLWIGLAGEEGSRRYSWVSEEPLNYVGWQDGEPQQPGGCTYVDVDGAWRTTSCDTKLQGAVCGVSSGPPPPRRISYHGSCPQGLADSAWIPFREHCYSFHMELLLGHKEARQRCQRAGGAVLSILDEMENVFVWEHLQSYEGQSRGAWLGMNFNPKGGTLVWQDNTAVNYSNWGPPGLGPSMLSHNSCYWIQSNSGLWRPGACTNITMGVVCKLPRAEQSSFSPSALPENPAA

SEQ ID NO: 2742 - protein, 843 aa, synthetic construct; identical to SEQ ID NO: 1638
  REGION 1..843: note = MRVI1 (Q9Y6F6) SP+PP+ECD

SEQ ID NO: 2743 - protein, 638 aa, synthetic construct
  REGION 1..638: note = MSLNL (Q96KJ4) SP+PP+ECD
MAAAVTIPGPRIGALQSSGLTLLLSLAAHCSGPQAKVLSPGGLDASGANLWASANCSLLQGFWCQPASQLPRDQLSALIQRLALLQVPLQAWQLSCLANLASRCGLQDDFTLHPPNLLLFYNLSQVREADCRAFIRRAAQGDVELLSHLPDQRVALWRAAVACLVGAGLRLSASDQQLLGALVCDMDASSIGAADPHMLENLRRCPRLTAAQRIALNSLLAGGKTSLGPPGSWTLEGLQALGPLATYISPHLWAQVQEAVGLGFFRSVVASCQVGRLGQREARCFVTSFLESKTKPVSSRPRLSTGNITAATLRDDLFLVHYDCAELESCLDGCILRTNLDTLLQHLLPTECQHVVKAKLAQIYPQGLPEDQLRLITSLVYLYSRTEIGQWSITSQDTVMALLASDVALENQTEAVLQKFLEHNGTVSGALLLAIGGTRLCWMSPHQIQTIHPQELRLAGALDLSSCPQSRKDVLYTKAHETFGSSGTLAAYYRLMRPYLGGSPGGAQPPSPVPPGGAPVEELRHLAHANISMDIDTFTSLNPLELQSLDVGNVTALLGHNVGDLQKARSHPTVRAWLRSLNSSTLGQLGLDASPTSPTGPAHGTRGPPSTTHQVLHLVHTSGLPTNDAQASTSGSLW

SEQ ID NO: 2744 - protein, 957 aa, synthetic construct
  REGION 1..957: note = MST1R (Q04912) SP+PP+ECD
MELLPPLPQSFLLLLLLPAKPAAGEDWQCPRTPYAASRDFDVKYVVPSFSAGGLVQAMVTYEGDRNESAVFVAIRNRLHVLGPDLKSVQSLATGPAGDPGCQTCAACGPGPHGPPGDTDTKVLVLDPALPALVSCGSSLQGRCFLHDLEPQGTAVHLAAPACLFSAHHNRPDDCPDCVASPLGTRVTVVEQGQASYFYVASSLDAAVAASFSPRSVSIRRLKADASGFAPGFVALSVLPKHLVSYSIEYVHSFHTGAFVYFLTVQPASVTDDPSALHTRLARLSATEPELGDYRELVLDCRFAPKRRRRGAPEGGQPYPVLRVAHSAPVGAQLATELSIAEGQEVLFGVFVTGKDGGPGVGPNSVVCAFPIDLLDTLIDEGVERCCESPVHPGLRRGLDFFQSPSFCPNPPGLEALSPNTSCRHFPLLVSSSFSRVDLFNGLLGPVQVTALYVTRLDNVTVAHMGTMDGRILQVELVRSLNYLLYVSNFSLGDSGQPVQRDVSRLGDHLLFASGDQVFQVPIQGPGCRHFLTCGRCLRAWHFMGCGWCGNMCGQQKECPGSWQQDHCPPKLTEFHPHSGPLRGSTRLTLCGSNFYLHPSGLVPEGTHQVTVGQSPCRPLPKDSSKLRPVPRKDFVEEFECELEPLGTQAVGPTNVSLTVTNMPPGKHFRVDGTSVLRGFSFMEPVLIAVQPLFGPRAGGTCLTLEGQSLSVGTSRAVLVNGTECLLARVSEGQLLCATPPGATVASVPLSLQVGGAQVPGSWTFQYREDPVVLSISPNCGYINSHITICGQHLTSAWHLVLSFHDGLRAVESRCERQLPEQQLCRLPEYVVRDPQGWVAGNLSARGDGAAGFTLPGFRFLPPPHPPSANLVPLKPEEHAIKFEYIGLGAVADCVGINVTVGGESCQHEFRGDMVVCPLPPSLQLGQDGAPLQVCVDGECHILGRVVRPGPDGVPQST

SEQ ID NO: 2745 - protein, 1158 aa, synthetic construct
  REGION 1..1158: note = MUC1 (P15941) SP+PP+ECD
MTPGTQSPFFLLLLLTVLTVVTGSGHASSTPGGEKETSATQRSSVPSSTEKNAVSMTSSVLSSHSPGSGSSTTQGQDVTLAPATEPASGSAATWGQDVTSVPVTRPALGSTTPPAHDVTSAPDNKPAPGSTAPPAHGVTSAPDTRPAPGSTAPPAHGVTSAPDTRPAPGSTAPPAHGVTSAPDTRPAPGSTAPPAHGVTSAPDTRPAPGSTAPPAHGVTSAPDTRPAPGSTAPPAHGVTSAPDTRPAPGSTAPPAHGVTSAPDTRPAPGSTAPPAHGVTSAPDTRPAPGSTAPPAHGVTSAPDTRPAPGSTAPPAHGVTSAPDTRPAPGSTAPPAHGVTSAPDTRPAPGSTAPPAHGVTSAPDTRPAPGSTAPPAHGVTSAPDTRPAPGSTAPPAHGVTSAPDTRPAPGSTAPPAHGVTSAPDTRPAPGSTAPPAHGVTSAPDTRPAPGSTAPPAHGVTSAPDTRPAPGSTAPPAHGVTSAPDTRPAPGSTAPPAHGVTSAPDTRPAPGSTAPPAHGVTSAPDTRPAPGSTAPPAHGVTSAPDTRPAPGSTAPPAHGVTSAPDTRPAPGSTAPPAHGVTSAPDTRPAPGSTAPPAHGVTSAPDTRPAPGSTAPPAHGVTSAPDTRPAPGSTAPPAHGVTSAPDTRPAPGSTAPPAHGVTSAPDTRPAPGSTAPPAHGVTSAPDTRPAPGSTAPPAHGVTSAPDTRPAPGSTAPPAHGVTSAPDTRPAPGSTAPPAHGVTSAPDTRPAPGSTAPPAHGVTSAPDTRPAPGSTAPPAHGVTSAPDTRPAPGSTAPPAHGVTSAPDTRPAPGSTAPPAHGVTSAPDTRPAPGSTAPPAHGVTSAPDTRPAPGSTAPPAHGVTSAPDTRPAPGSTAPPAHGVTSAPDTRPAPGSTAPPAHGVTSAPDTRPAPGSTAPPAHGVTSAPDTRPAPGSTAPPAHGVTSAPDNRPALGSTAPPVHNVTSASGSASGSASTLVHNGTSARATTTPASKSTPFSIPSHHSDTPTTLASHSTKTDASSTHHSSVPPLTSSNHSTSPQLSTGVSFFFLSFHISNLQFNSSLEDPSTDYYQELQRDISEMFLQIYKQGGFLGLSNIKFRPGSVVVQLTLAFREGTINVHDVETQFNQYKTEAASRYNLTISDVSVSDVPFPFSAQSGAGVPG

SEQ ID NO: 2746 - protein, 5380 aa, synthetic construct
  REGION 1..5380: note = MUC12 (Q9UKN1) SP+PP+ECD
MLVIWILTLALRLCASVTTVTPEGSAVHKAISQQGTLWTGEVLEKQTVEQGKSTLRRQKNHFHRSAGELRCRNALKDEGASAGWSVMFAGESVVVLVHLWMTGARVKNLGLVEFASPGDDGDGRAEGFSLGLPLSEQARAAGAREKERQETVINHSTFSGFSQITGSTVNTSIGGNTTSASTPSSSDPFTTFSDYGVSVTFITGSTATKHFLDSSTNSGHSEESTVSHSGPGATGTTLFPSHSATSVFVGEPKTSPITSASMETTALPGSTTTAGLSEKSTTFYSSPRSPDRTLSPARTTSSGVSEKSTTSHSRPGPTHTIAFPDSTTMPGVSQESTASHSIPGSTDTTLSPGTTTPSSLGPESTTFHSSPGYTKTTRLPDNTTTSGLLEASTPVHSSTGSPHTTLSPSSSTTHEGEPTTFQSWPSSKDTSPAPSGTTSAFVKLSTTYHSSPSSTPTTHFSASSTTLGHSEESTPVHSSPVATATTPPPARSATSGHVEESTAYHRSPGSTQTMHFPESSTTSGHSEESATFHGSTTHTKSSTPSTTAALAHTSYHSSLGSTETTHFRDSSTISGRSEESKASHSSPDAMATTVLPAGSTPSVLVGDSTPSPISSGSMETTALPGSTTKPGLSEKSTTFYSSPRSPDTTHLPASMTSSGVSEESTTSHSRPGSTHTTAFPGSTTMPGLSQESTASHSSPGPTDTTLSPGSTTASSLGPEYTTFHSRPGSTETTLLPDNTTASGLLEASMPVHSSTRSPHTTLSPAGSTTRQGESTTFHSWPSSKDTRPAPPTTTSAFVEPSTTSHGSPSSIPTTHISARSTTSGLVEESTTYHSSPGSTQTMHFPESDTTSGRGEESTTSHSSTTHTISSAPSTTSALVEEPTSYHSSPGSTATTHFPDSSTTSGRSEESTASHSSQDATGTIVLPARSTTSVLLGESTTSPISSGSMETTALPGSTTTPGLSERSTTFHSSPRSPATTLSPASTTSSGVSEESTTSRSRPGSTHTTAFPDSTTTPGLSRHSTTSHSSPGSTDTTLLPASTTTSGPSQESTTSHSSSGSTDTALSPGSTTALSFGQESTTFHSNPGSTHTTLFPDSTTSSGIVEASTRVHSSTGSPRTTLSPASSTSPGLQGESTAFQTHPASTHTTPSPPSTATAPVEESTTYHRSPGSTPTTHFPASSTTSGHSEKSTIFHSSPDASGTTPSSAHSTTSGRGESTTSRISPGSTEITTLPGSTTTPGLSEASTTFYSSPRSPTTTLSPASMTSLGVGEESTTSRSQPGSTHSTVSPASTTTPGLSEESTTVYSSSRGSTETTVFPHSTTTSVHGEEPTTFHSRPASTHTTLFTEDSTTSGLTEESTAFPGSPASTQTGLPATLTTADLGEESTTFPSSSGSTGTKLSPARSTTSGLVGESTPSRLSPSSTETTTLPGSPTTPSLSEKSTTFYTSPRSPDATLSPATTTSSGVSEESSTSHSQPGSTHTTAFPDSTTTSDLSQEPTTSHSSQGSTEATLSPGSTTASSLGQQSTTFHSSPGDTETTLLPDDTITSGLVEASTPTHSSTGSLHTTLTPASSTSAGLQEESTTFQSWPSSSDTTPSPPGTTAAPVEVSTTYHSRPSSTPTTHFSASSTTLGRSEESTTVHSSPGATGTALFPTRSATSVLVGEPTTSPISSGSTETTALPGSTTTAGLSEKSTTFYSSPRSPDTTLSPASTTSSGVSEESTTSHSRPGSTHTTAFPGSTTMPGVSQESTASHSSPGSTDTTLSPGSTTASSLGPESTTFHSSPGSTETTLLPDNTTASGLLEASTPVHSSTGSPHTTLSPAGSTTRQGESTTFQSWPSSKDTMPAPPTTTSAFVELSTTSHGSPSSTPTTHFSASSTTLGRSEESTTVHSSPVATATTPSPARSTTSGLVEESTAYHSSPGSTQTMHFPESSTASGRSEESRTSHSSTTHTISSPPSTTSALVEEPTSYHSSPGSTATTHFPDSSTTSGRSEESTASHSSQDATGTIVLPARSTTSVLLGESTTSPISSGSMETTALPGSTTTPGLSEKSTTFHSSPRSPATTLSPASTTSSGVSEESTTSHSRPGSTHTTAFPDSTTTPGLSRHSTTSHSSPGSTDTTLLPASTTTSGPSQESTTSHSSPGSTDTALSPGSTTALSFGQESTTFHSSPGSTHTTLFPDSTTSSGIVEASTRVHSSTGSPRTTLSPASSTSPGLQGESTAFQTHPASTHTTPSPPSTATAPVEESTTYHRSPGSTPTTHFPASSTTSGHSEKSTIFHSSPDASGTTPSSAHSTTSGRGESTTSRISPGSTEITTLPGSTTTPGLSEASTTFYSSPRSPTTTLSPASMTSLGVGEESTTSRSQPGSTHSTVSPASTTTPGLSEESTTVYSSSPGSTETTVFPRTPTTSVRGEEPTTFHSRPASTHTTLFTEDSTTSGLTEESTAFPGSPASTQTGLPATLTTADLGEESTTFPSSSGSTGTTLSPARSTTSGLVGESTPSRLSPSSTETTTLPGSPTTPSLSEKSTTFYTSPRSPDATLSPATTTSSGVSEESSTSHSQPGSTHTTAFPDSTTTPGLSRHSTTSHSSPGSTDTTLLPASTTTSGPSQESTTSHSSPGSTDTALSPGSTTALSFGQESTTFHSSPGSTHTTLFPDSTTSSGIVEASTRVHSSTGSPRTTLSPASSTSPGLQGESTTFQTHPASTHTTPSPPSTATAPVEESTTYHRSPGSTPTTHFPASSTTSGHSEKSTIFHSSPDASGTTPSSAHSTTSGRGESTTSRISPGSTEITTLPGSTTTPGLSEASTTFYSSPRSPTTTLSPASMTSLGVGEESTTSRSQPGSTHSTVSPASTTTPGLSEESTTVYSSSPGSTETTVFPRSTTTSVRGEEPTTFHSRPASTHTTLFTEDSTTSGLTEESTAFPGSPASTQTGLPATLTTADLGEESTTFPSSSGSTGTTLSPARSTTSGLVGESTPSRLSPSSTETTTLPGSPTTPSLSEKSTTFYTSPRSPDATLSPATTTSSGVSEESSTSHSQPGSTHTTAFPDSTTTSGLSQEPTASHSSQGSTEATLSPGSTTASSLGQQSTTFHSSPGDTETTLLPDDTITSGLVEASTPTHSSTGSLHTTLTPASSTSAGLQEESTTFQSWPSSSDTTPSPPGTTAAPVEVSTTYHSRPSSTPTTHFSASSTTLGRSEESTTVHSSPGATGTALFPTRSATSVLVGEPTTSPISSGSTETTALPGSTTTAGLSEKSTTFYSSPRSPDTTLSPASTTSSGVSEESTTSHSRPGSTHTTAFPGSTTMPGVSQESTASHSSPGSTDTTLSPGSTTASSLGPESTTFHSGPGSTETTLLPDNTTASGLLEASTPVHSSTGSPHTTLSPAGSTTRQGESTTFQSWPNSKDTTPAPPTTTSAFVELSTTSHGSPSSTPTTHFSASSTTLGRSEESTTVHSSPVATATTPSPARSTTSGLVEESTTYHSSPGSTQTMHFPESDTTSGRGEESTTSHSSTTHTISSAPSTTSALVEEPTSYHSSPGSTATTHFPDSSTTSGRSEESTASHSSQDATGTIVLPARSTTSVLLGESTTSPISSGSMETTALPGSTTTPGLSEKSTTFHSSPRSPATTLSPASTTSSGVSEESTTSHSRPGSTHTTAFPDSTTTPGLSRHSTTSHSSPGSTDTTLLPASTTTSGSSQESTTSHSSSGSTDTALSPGSTTALSFGQESTTFHSSPGSTHTTLFPDSTTSSGIVEASTRVHSSTGSPRTTLSPASSTSPGLQGESTAFQTHPASTHTTPSPPSTATAPVEESTTYHRSPGSTPTTHFPASSTTSGHSEKSTIFHSSPDASGTTPSSAHSTTSGRGESTTSRISPGSTEITTLPGSTTTPGLSEASTTFYSSPRSPTTTLSPASMTSLGVGEESTTSRSQPGSTHSTVSPASTTTPGLSEESTTVYSSSPGSTETTVFPRSTTTSVRREEPTTFHSRPASTHTTLFTEDSTTSGLTEESTAFPGSPASTQTGLPATLTTADLGEESTTFPSSSGSTGTKLSPARSTTSGLVGESTPSRLSPSSTETTTLPGSPTTPSLSEKSTTFYTSPRSPDATLSPATTTSSGVSEESSTSHSQPGSTHTTAFPDSTTTSGLSQEPTTSHSSQGSTEATLSPGSTTASSLGQQSTTFHSSPGDTETTLLPDDTITSGLVEASTPTHSSTGSLHTTLTPASSTSTGLQEESTTFQSWPSSSDTTPSPPSTTAVPVEVSTTYHSRPSSTPTTHFSASSTTLGRSEESTTVHSSPGATGTALFPTRSATSVLVGEPTTSPISSGSTETTALPGSTTTAGLSEKSTTFYSSPRSPDTTLSPASTTSSGVSEESTTSHSRPGSMHTTAFPSSTTMPGVSQESTASHSSPGSTDTTLSPGSTTASSLGPESTTFHSSPGSTETTLLPDNTTASGLLEASTPVHSSTGSPHTTLSPAGSTTRQGESTTFQSWPNSKDTTPAPPTTTSAFVELSTTSHGSPSSTPTTHFSASSTTLGRSEESTTVHSSPVATATTPSPARSTTSGLVEESTTYHSSPGSTQTMHFPESNTTSGRGEESTTSHSSTTHTISSAPSTTSALVEEPTSYHSSPGSTATTHFPDSSTTSGRSEESTASHSSQDATGTIVLPARSTTSVLLGESTTSPISSGSMETTALPGSTTTPGLSEKSTTFHSSPSSTPTTHFSASSTTLGRSEESTTVHSSPVATATTPSPARSTTSGLVEESTAYHSSPGSTQTMHFPESSTASGRSEESRTSHSSTTHTISSPPSTTSALVEEPTSYHSSPGSIATTHFPESSTTSGRSEESTASHSSPDTNGITPLPAHFTTSGRIAESTTFYISPGSMETTLASTATTPGLSAKSTILYSSSRSPDQTLSPASMTSSSISGEPTSLYSQAESTHTTAFPASTTTSGLSQESTTFHSKPGSTETTLSPGSITTSSFAQEFTTPHSQPGSALSTVSPASTTVPGLSEESTTFYSSPGSTETTAFSHSNTMSIHSQQSTPFPDSPGFTHTVLPATLTTTDIGQESTAFHSSSDATGTTPLPARSTASDLVGEPTTFYISPSPTYTTLFPASSSTSGLTEESTTFHTSPSFTSTIVSTESLETLAPGLCQEGQIWNGKQCVCPQGYVGYQCLSPLESFPVETPEKLNATLGMTVKVTYRNFTEKMNDASSQEYQNFSTLFKNRMDVVLKGDNLPQYRGVNIRRLLNGSIVVKNDVILEADYTLEYEELFENLAEIVKAKIMNETRTTLLDPDSCRKAILCYSEEDTFVDSSVTPGFDFQEQCTQKAAEGYTQFYYVDVLDGKLACVNKCTKGTKSQMNCNLGTCQLQRSGPRCLCPNTNTHWYWGETCEFNIAKSLVY

SEQ ID NO: 2747 - protein, 421 aa, synthetic construct
  REGION 1..421: note = MUC13 (Q9H3R2) SP+PP+ECD
MKAIIHLTLLALLSVNTATNQGNSADAVTTTETATSGPTVAAADTTETNFPETASTTANTPSFPTATSPAPPIISTHSSSTIPTPAPPIISTHSSSTIPIPTAADSESTTNVNSLATSDIITASSPNDGLITMVPSETQSNNEMSPTTEDNQSSGPPTGTALLETSTLNSTGPSNPCQDDPCADNSLCVKLHNTSFCLCLEGYYYNSSTCKKGKVFPGKISVTVSETFDPEEKHSMAYQDLHSEITSLFKDVFGTSVYGQTVILTVSTSLSPRSEMRADDKFVNVTIVTILAETTSDNEKTVTEKINKAIRSSSSNFLNYDLTLRCDYYGCNQTADDCLNGLACDCKSDLQRPNPQSPFCVASSLKCPDACNAQHKQCLIKKSGGAPECACVPGYQEDANGNCQKCAFGYSGLDCKDKFQL

SEQ ID NO: 2748 - protein, 236 aa, synthetic construct
  REGION 1..236: note = MUC15 (Q8N387) SP+PP+ECD
MLALAKILLISTLFYSLLSGSHGKENQDINTTQNIAEVFKTMENKPISLESEANLNSDKENITTSNLKASHSPPLNLPNNSHGITDFSSNSSAEHSLGSLKPTSTISTSPPLIHSFVSKVPWNAPIADEDLLPISAHPNATPALSSENFTWSLVNDTVKTPDNSSITVSILSSEPTSPSVTPLIVEPSGWLTTNSDSFTGFTPYQEKTTLQPTLKFTNNSKLFPNTSDPQKENRNT

SEQ ID NO: 2749 - protein, 4393 aa, synthetic construct
  REGION 1..4393: note = MUC17 (Q685J3) SP+PP+ECD
MPRPGTMALCLLTLVLSLLPPQAAAEQDLSVNRAVWDGGGCISQGDVLNRQCQQLSQHVRTGSAANTATGTTSTNVVEPRMYLSCSTNPEMTSIESSVTSDTPGVSSTRMTPTESRTTSESTSDSTTLFPSSTEDTSSPTTPEGTDVPMSTPSEESISSTMAFVSTAPLPSFEAYTSLTYKVDMSTPLTTSTQASSSPTTPESTTIPKSTNSEGSTPLTSMPASTMKVASSEAITLLTTPVEISTPVTISAQASSSPTTAEGPSLSNSAPSGGSTPLTRMPLSVMLVVSSEASTLSTTPAATNIPVITSTEASSSPTTAEGTSIPTSTYTEGSTPLTSTPASTMPVATSEMSTLSITPVDTSTLVTTSTEPSSLPTTAEATSMLTSTLSEGSTPLTNMPVSTILVASSEASTTSTIPVDSKTFVTTASEASSSPTTAEDTSIATSTPSEGSTPLTSMPVSTTPVASSEASNLSTTPVDSKTQVTTSTEASSSPPTAEVNSMPTSTPSEGSTPLTSMSVSTMPVASSEASTLSTTPVDTSTPVTTSSEASSSSTTPEGTSIPTSTPSEGSTPLTNMPVSTRLVVSSEASTTSTTPADSNTFVTTSSEASSSSTTAEGTSMPTSTYSERGTTITSMSVSTTLVASSEASTLSTTPVDSNTPVTTSTEATSSSTTAEGTSMPTSTYTEGSTPLTSMPVNTTLVASSEASTLSTTPVDTSTPVTTSTEASSSPTTADGASMPTSTPSEGSTPLTSMPVSKTLLTSSEASTLSTTPLDTSTHITTSTEASCSPTTTEGTSMPISTPSEGSPLLTSIPVSITPVTSPEASTLSTTPVDSNSPVTTSTEVSSSPTPAEGTSMPTSTYSEGRTPLTSMPVSTTLVATSAISTLSTTPVDTSTPVTNSTEARSSPTTSEGTSMPTSTPGEGSTPLTSMPDSTTPVVSSEARTLSATPVDTSTPVTTSTEATSSPTTAEGTSIPTSTPSEGTTPLTSTPVSHTLVANSEASTLSTTPVDSNTPLTTSTEASSPPPTAEGTSMPTSTPSEGSTPLTRMPVSTTMVASSETSTLSTTPADTSTPVTTYSQASSSSTTADGTSMPTSTYSEGSTPLTSVPVSTRLVVSSEASTLSTTPVDTSIPVTTSTEASSSPTTAEGTSIPTSPPSEGTTPLASMPVSTTLVVSSEANTLSTTPVDSKTQVATSTEASSPPPTAEVTSMPTSTPGERSTPLTSMPVRHTPVASSEASTLSTSPVDTSTPVTTSAETSSSPTTAEGTSLPTSTTSEGSTLLTSIPVSTTLVTSPEASTLLTTPVDTKGPVVTSNEVSSSPTPAEGTSMPTSTYSEGRTPLTSIPVNTTLVASSAISILSTTPVDNSTPVTTSTEACSSPTTSEGTSMPNSNPSEGTTPLTSIPVSTTPVVSSEASTLSATPVDTSTPGTTSAEATSSPTTAEGISIPTSTPSEGKTPLKSIPVSNTPVANSEASTLSTTPVDSNSPVVTSTAVSSSPTPAEGTSIAISTPSEGSTALTSIPVSTTTVASSEINSLSTTPAVTSTPVTTYSQASSSPTTADGTSMQTSTYSEGSTPLTSLPVSTMLVVSSEANTLSTTPIDSKTQVTASTEASSSTTAEGSSMTISTPSEGSPLLTSIPVSTTPVASPEASTLSTTPVDSNSPVITSTEVSSSPTPAEGTSMPTSTYTEGRTPLTSITVRTTPVASSAISTLSTTPVDNSTPVTTSTEARSSPTTSEGTSMPNSTPSEGTTPLTSIPVSTTPVLSSEASTLSATPIDTSTPVTTSTEATSSPTTAEGTSIPTSTLSEGMTPLTSTPVSHTLVANSEASTLSTTPVDSNSPVVTSTAVSSSPTPAEGTSIATSTPSEGSTALTSIPVSTTTVASSETNTLSTTPAVTSTPVTTYAQVSSSPTTADGSSMPTSTPREGRPPLTSIPVSTTTVASSEINTLSTTLADTRTPVTTYSQASSSPTTADGTSMPTPAYSEGSTPLTSMPLSTTLVVSSEASTLSTTPVDTSTPATTSTEGSSSPTTAGGTSIQTSTPSERTTPLAGMPVSTTLVVSSEGNTLSTTPVDSKTQVTNSTEASSSATAEGSSMTISAPSEGSPLLTSIPLSTTPVASPEASTLSTTPVDSNSPVITSTEVSSSPIPTEGTSMQTSTYSDRRTPLTSMPVSTTVVASSAISTLSTTPVDTSTPVTNSTEARSSPTTSEGTSMPTSTPSEGSTPFTSMPVSTMPVVTSEASTLSATPVDTSTPVTTSTEATSSPTTAEGTSIPTSTLSEGTTPLTSIPVSHTLVANSEVSTLSTTPVDSNTPFTTSTEASSPPPTAEGTSMPTSTSSEGNTPLTRMPVSTTMVASFETSTLSTTPADTSTPVTTYSQAGSSPTTADDTSMPTSTYSEGSTPLTSVPVSTMPVVSSEASTHSTTPVDTSTPVTTSTEASSSPTTAEGTSIPTSPPSEGTTPLASMPVSTTPVVSSEAGTLSTTPVDTSTPMTTSTEASSSPTTAEDIVVPISTASEGSTLLTSIPVSTTPVASPEASTLSTTPVDSNSPVVTSTEISSSATSAEGTSMPTSTYSEGSTPLRSMPVSTKPLASSEASTLSTTPVDTSIPVTTSTETSSSPTTAKDTSMPISTPSEVSTSLTSILVSTMPVASSEASTLSTTPVDTRTLVTTSTGTSSSPTTAEGSSMPTSTPGERSTPLTNILVSTTLLANSEASTLSTTPVDTSTPVTTSAEASSSPTTAEGTSMRISTPSDGSTPLTSILVSTLPVASSEASTVSTTAVDTSIPVTTSTEASSSPTTAEVTSMPTSTPSETSTPLTSMPVNHTPVASSEAGTLSTTPVDTSTPVTTSTKASSSPTTAEGIVVPISTASEGSTLLTSIPVSTTPVASSEASTLSTTPVDTSIPVTTSTEGSSSPTTAEGTSMPISTPSEVSTPLTSILVSTVPVAGSEASTLSTTPVDTRTPVTTSAEASSSPTTAEGTSMPISTPGERRTPLTSMSVSTMPVASSEASTLSRTPADTSTPVTTSTEASSSPTTAEGTGIPISTPSEGSTPLTSIPVSTTPVAIPEASTLSTTPVDSNSPVVTSTEVSSSPTPAEGTSMPISTYSEGSTPLTGVPVSTTPVTSSAISTLSTTPVDTSTPVTTSTEAHSSPTTSEGTSMPTSTPSEGSTPLTYMPVSTMLVVSSEDSTLSATPVDTSTPVTTSTEATSSTTAEGTSIPTSTPSEGMTPLTSVPVSNTPVASSEASILSTTPVDSNTPLTTSTEASSSPPTAEGTSMPTSTPSEGSTPLTSMPVSTTTVASSETSTLSTTPADTSTPVTTYSQASSSPPIADGTSMPTSTYSEGSTPLTNMSFSTTPVVSSEASTLSTTPVDTSTPVTTSTEASLSPTTAEGTSIPTSSPSEGTTPLASMPVSTTPVVSSEVNTLSTTPVDSNTLVTTSTEASSSPTIAEGTSLPTSTTSEGSTPLSIMPLSTTPVASSEASTLSTTPVDTSTPVTTSSPTNSSPTTAEVTSMPTSTAGEGSTPLTNMPVSTTPVASSEASTLSTTPVDSNTFVTSSSQASSSPATLQVTTMRMSTPSEGSSSLTTMLLSSTYVTSSEASTPSTPSVDRSTPVTTSTQSNSTPTPPEVITLPMSTPSEVSTPLTIMPVSTTSVTISEAGTASTLPVDTSTPVITSTQVSSSPVTPEGTTMPIWTPSEGSTPLTTMPVSTTRVTSSEGSTLSTPSVVTSTPVTTSTEAISSSATLDSTTMSVSMPMEISTLGTTILVSTTPVTRFPESSTPSIPSVYTSMSMTTASEGSSSPTTLEGTTTMPMSTTSERSTLLTTVLISPISVMSPSEASTLSTPPGDTSTPLLTSTKAGSFSIPAEVTTIRISITSERSTPLTTLLVSTTLPTSFPGASIASTPPLDTSTTFTPSTDTASTPTIPVATTISVSVITEGSTPGTTIFIPSTPVTSSTADVFPATTGAVSTPVITSTELNTPSTSSSSTTTSFSTTKEFTTPAMTTAAPLTYVTMSTAPSTPRTTSRGCTTSASTLSATSTPHTSTSVTTRPVTPSSESSRPSTITSHTIPPTFPPAHSSTPPTTSASSTTVNPEAVTTMTTRTKPSTRTTSFPTVTTTAVPTNTTIKSNPTSTPTVPRTTTCFGDGCQNTASRCKNGGTWDGLKCQCPNLYYGELCEEVVSSIDIGPPETISAQMELTVTVTSVKFTEELKNHSSQEFQEFKQTFTEQMNIVYSGIPEYVGVNITKLRLGSVVVEHDVLLRTKYTPEYKTVLDNATEVVKEKITKVTTQQIMINDICSDMMCFNTTGTQVQNITVTQYDPEEDCRKMAKEYGDYFVVEYRDQKPYCISPCEPGFSVSKNCNLGKCQMSLSGPQCLCVTTETHWYSGETCNQGTQKSLVYG

SEQ ID NO: 2750 - protein, 479 aa, synthetic construct
  REGION 1..479: note = MUC21 (Q5SSG8) SP+PP+ECD
MKMQKGNVLLMFGLLLHLEAATNSNETSTSANTGSSVISSGASTATNSGSSVTSSGVSTATISGSSVTSNGVSIVTNSEFHTTSSGISTATNSEFSTVSSGISIATNSESSTTSSGASTATNSESSTPSSGASTATNSDSSTTSSGASTATNSDSSTTSSEASTATNSESSTTSSGASTATNSESSTVSSRASTATNSESSTTSSGASTATNSESRTTSNGAGTATNSESSTTSSGASTATNSESSTPSSGAGTATNSESSTTSSGAGTATNSESSTVSSGISTVTNSESSTPSSGANTATNSESSTTSSGANTATNSDSSTTSSGASTATNSESSTTSSGASTATNSESSTTSSGASTATNSGSSTTSSGTSTATNSESSTVSSGASTATTSESSTTSSGASTATNSESSTVSSGASTATNSESSTTSSGANTATNSGSSVTSAGSGTAALTGMHTTSHSASTAVSEAKPGGSLVPWE

SEQ ID NO: 2751 - protein, 1660 aa, synthetic construct
  REGION 1..1660: note = MUC22 (E2RYF6) SP+PP+ECD
MRRGNISPAFWFLWLLLFGLLGPSSENTTAFTKGSDTTTASITGSETTMASTMASTSALTTGSKITTDSTTGSETTSASTMASTAAFTTGSETNTASTTDSGTTIASTRTFTTGSDTTTGSTAGSETIVASTTVSGTTTTFTIASTTVPETTMASSTTSTAGSEKTMASSIISETTMASTTGSETATVSTTGSETTTTSTASSEATKVSTTGSETTTASTAGSETTTTSTSMAGSEATTTSTADSKVITASSMSSETTVAPAAGSNTTTASTTGSETTTILIKASETTTASTAGSETTTPSPTGSQTTIVSISGSEITTTSTAGSENTTVSSAGSGTTTASMAGSETTVSTAGSETTTVSITGTETTMVSAMGSETTTNSTTSSETTVTSTAGSETTTVSTVGSETTTAYTADSETTAASTTGSEMTTVFTAGSETITPSTAGSETTTVSTAGSETTTVSTTGSETTTASTAHSETTAASTMGSETTKVSTAGSETTVSTAGSETTAASTEDSETNTAFTEDSKTTTASTTGFETTAASTTGSEPTMASTMGSETTMASTIGPETTKVSTASSEVTTVFAAGSETIRASTVGSETTTVSTTGSETTTASIMGSETSTDSTTGSETTTASTEGSETTTASTEGSEATTVSTTGSETTTVSITDSETTTTCTEGSEMTAVSTTVFETTTASTEGSEITIASTSDSETTTASTEGSETTTVTTAGSETKTAYTTGSETTTASNTGLETTTVFTIGSDTTTASTEGSETTAVSATGSEMTTVSTEGSENTTVSTTGSETTTVSTTGLETTTTSTEGSEMTTVSTTGAETTTDSTEGSGTTAASTAGSETTTVSTADSENTTASTADSETTSASTTGSETTTASTTSSETTTASTEGSETTTVSTTDSETTMVSTTGSERTITSTEGSETTTVSATGSETTVSTEGSGTTTVSITGSETTKVSTTGSETTTTSTEGSEITTASITGSETTTASTEGSETTTASTEGSETTSASTTGSETTTASTTSSETTMASIMGSETTMASTIGSETTKVSTASSKMTTVFTENSETTIASTTASETTTVSTAGSETIPASTAGSETTTTTSTEGSETTTASTEGSETTTASTESSETTTATTIGSETTTASTEGSETTTTSTEGSETTTASTEGSEITTVSTTGSETTTASTEGSETTTASTEGSELTTVSTTGSETITVSAEGSETTTVTTMGSETTTASTAGSETTTVSTAGSETTTASIEGSETTTVSSTGSETTTVSTTGTETTITSTEGSETTTVTTAGSETTAVYTTGSETTTTSTEGSETTTVSTTGSETTTASTADLETTTVSTSGSGTTTASTAGSETTTVYITGSKTTTASTEGSEATTVSTTSSETTTASTTGSEMTTVFTTVSETTTVSTIGSEATTSSAAGSEATTTSTEGSETTTASTAGSETTTASTAGSETTTASTSGSETNTACTTGSETSTPSSAGSETNTAFIIGSESTIASTASLEPTATSLTGSETTTVSITASGATAASTTVSSTTFVLTKATDVSIQPITNTPMSGTRTTGTRLTASSSVTMAPGMDFTASAASHTVPGIVLNTSGLGTSTMGASSTTSAHGVRTTTGSTREPTSSTFQETGPVSMGTNTVSMSHTPTNVIKPSGYLQP

SEQ ID NO: 2752 - protein, 3226 aa, synthetic construct
  REGION 1..3226: note = MUC3A (Q02505) SP+PP+ECD
MQLLGLLGLLWMLKASPWATGTLSTATSISQVPFPRAEAASAVLSNSPHSRDLAGWPLGVPQLASPAPGHRENAPMTLTTSPHDTLISETLLNSPVSSNTSTTPTSKFAFKVETTPPTVLVYSATTECVYPTSFIITISHPTSICVTTTQVAFTSSYTSTPVTQKPVTTVTSTYSMTTTEKGTSAMTSSPSTTTARETPIVTVTPSSVSATDTTFHTTISSTTRTTERTPLPTGSIHTTTSPTPVFTTLKTAVTSTSPITSSITSTNTVTSMTTTASQPTATNTLSSPTRTILSSTPVLSTETITSGITNTTPLSTLVTTLPTTISRSTPTSETTYTTSPTSTVTDSTTKIAYSTSMTGTLSTETSLPPTSSSLPTTETATTPMTNLVTTTTEISSHSTPSFSSSTIYSTVSTSTTAISSLPPTSGTMVTSTTMTPSSLSTDIPFTTPTTITHHSVGSTGFLTTATDLTSTFTVSSSSAMSTSVIPSSPSIQNTETSSLVSMTSATTPNVRPTFVSTLSTPTSSLLTTFPATYSFSSSMSASSAGTTHTESISSPPASTSTLHTTAESTLAPTTTTSFTTSTTMEPPSTTAATTGTGQTTFTSSTATFPETTTPTPTTDMSTESLTTAMTSPPITSSVTSTNTVTSMTTTTSPPTTTNSFTSLTSMPLSSTPVPSTEVVTSGTINTIPPSILVTTLPTPNASSMTTSETTYPNSPTGPGTNSTTEITYPTTMTETSSTATSLPPTSPLVSTAKTAKTPTTNLVTTTTKTTSHSTTSFTSSTVYSTASTYTTAITSVPTTLGTMVTSTSMISSTVSTGIPTSQPTTITPSSVGISGSLPMMTDLTSVYTVSNMSARPTTVIPSSPTVQNTEISISVSMTSATTPSGGPTFTSTENTPTRSLLTSFPMTHSFSSSMSESSAGTTHTESISSPRGTTSTLHTTVESTPSPTTTTSFTTSTMMEPPSSTVSTTGRGQTTFPSSTATFPETTTLTPTTDISTVSLTTAMTSPPPVSSSITPTNTMTSMRTTTYWPTATNTLSPLTSSILSSTPVPSTEMITSHTTNTTPLSTLVTTLLTTITRSTPTSETTYPTSPTSIVSDSTTEITYSTSITGTLSTATTLPPTSSSLPTTETATMTPTTTLITTTPNTTSLSTPSFTSSTIYSTVSTSTTAISSASPTSGTMVTSTTMTPSSLSTDTPSTTPTTITYPSVGSTGFLTTATDLTSTFTVSSSSAMSTSVIPSSPSIQNTETSSLVSMTSATTPSLRPTITSTDSTLTSSLLTTFPSTYSFSSSMSASSAGTTHTETISSLPASTNTIHTTAESALAPTTTTSFTTSPTMEPPSTTVATTGTGQTTFPSSTATFLETTTLTPTTDFSTESLTTAMTSTPPITSSITPTDTMTSMRTTTSWPTATNTLSPLTSSILSSTPVPSTEVTTSHTTNTNPVSTLVTTLPITITRSTLTSETAYPSSPTSTVTESTTEITYPTTMTETSSTATSLPPTSSLVSTAETAKTPTTNLVTTTTKTTSHSTTSFTSSTIYSTASTPTTAITSVPTTLGTMVTSTSMIPSTVSTGIPTSQPTTITPSSVGISGSLPMMTDLTSVYTVSSMSARPTSVIPSSPTVQNTETSIFVSMMSATTPSGGPTFTSTENTPTRSLLTSFPVTHSFSSSMSASSVGTTHTQSISSPPAITSTLHTTAESTPSPTTTMSFTTFTKMETPSSTVATTGTGQTTFTSSTATSPKTTTLTPTSDISTGSFKTAVSSTPPITSSITSTYTVTSMTTTTPLGPTATNTLPSFTSSVSSSTPVPSTEAITSGTTNTTPLSTLVTTFSNSDTSSTPTSETTYPTSLTSALTDSTTRTTYSTNMTGTLSTVTSLRPTSSSLLTTVTATVPTTNLVTTTTKITSHSTPSFTSSIATTETPSHSTPRFTSSITTTETPSHSTPRFTSSITNTKTTSHSSPSFTSSITTTETTSHNTPSLTSSITTTKTTSHSTPSYTSLITTTTTTSHSTPSFTSSITTTETTSHNTPSLTSSITTTETTSHSTPSFTSSITTETTSHSTPSFTSLITITEITSHSTLSYTTSITTTETPSHSTLSFTSSITTTETTSHSTPSFTSSITTSEMPSHSTPSFTSSITTTENATHSTPNFTSSITTTETTSHSTPSFTSLITTTETTSHRWGTTETTSYSTPSFTSSNTITETTSHSTPSYITSITTTETPSSSTPSFSSSITTTETTSHSTPGFTSSITTTETTSHSTPSFTSSITTTETTSHDTPSFTSSITTSETPSHSTPSSTSLITTTKTTSHSTPSFTSSITTTETTSHSAHSFTSSITTTETTSHNTRSFTSSITTTETNSHSTTSFTSSITTTETTSHSTPSFSSSITTTETPLHSTPGLTSWVTTTKTTSHITPGLTSSITTTETTSHSTPGFTSSITTTETTSESTPSLSSSTIYSTVSTSTTAITSHFTTSETAVTPTPVTPSSLSTDIPTTSLRTLTPSSVGTSTSLTTTTDFPSIPTDISTLPTRTHIISSSPSIQSTETSSLVGTTSPTMSTVRMTLRITENTPISSFSTSIVVIPETPTQTPPVLTSATGTQTSPAPTTVTFGSTDSSTSTLHTLTPSTALSTIVSTSQVPIPSTHSSTLQTTPSTPSLQTSLTSTSEFTTESFTRGSTSTNAILTSFSTIIWSSTPTIIMSSSPSSASITPVFSTTIHSVPSSPYIFSTENVGSASITGFPSLSSSATTSTSSTSSSLTTALTEITPFSYISLPSTTPCPGTITITIVPASPTDPCVEMDPSTEATSPPTTPLTVFPFTTEMVTCPTSISIQTTLTTYMDTSSMMPESESSISPNASSSTGTGTVPTNTVFTSTRLPTSETWLSNSSVIPLPLPGVSTIPLTMKPSSSLPTILRTSSKSTHPSPPTTRTSETPVATTQTPTTLTSRRTTRITSQMTTQSTLTTTAGTCDNGGTWEQGQCACLPGFSGDRCQLQTRCQNGGQWDGLKCQCPSTFYGSSCEFAVEQVDLDVVETEVGMEVSVDQQFSPDLNDNTSQAYRDFNKTFWNQMQKIFADMQGFTFKGVEILSLRNGSIVVDYLVLLEMPFSPQLESEYEQVKTTLKEGLQNASQDVNSCQDSQTLCFKPDSIKVNNNSKTELTPAAICRRAAPTGYEEFYFPLVEATRLRCVTKCTSGVDNAIDCHQGQCVLETSGPTCRCYSTDTHWFSGPRCEVAVHWRA

SEQ ID NO: 2753 - protein, 1140 aa, synthetic construct
  REGION 1..1140: note = MUC3B (Q9H195) SP+PP+ECD
MQLLGLLSILWMLKSSPGATGTLSTATSTSHVTFPRAEATRTALSNSPHSRYLAEWPQGVPQLASPAPGHRENAPMTLTTSPHDTLISETLLSSLVSSNTSTTPTSKFAFKVETTPPTVLVYSATTECVYPTSFIITISHSTSICVTTTQVTFTSSYTPTPVTQKPVTTVTRTYPMTTTEKGTSAMISSPSTTTARETPIVTVTPSSSVSATDTTFHTTISSTTRTTERTPLPTGSIHTTMSPTPVFTTLKTAVTSTSPITSTITSTNTVTSMTTTTSRPTATNTLSSLTSSILSSTPAPNTEVITSHTTTTTPPSTLVTTLPTAIARSTPTSETTPSFMSSIITTETTSHSTPSFSSSTIHSTVSSSTTAITSPFTTAETGVTSTPSSPSSLSTDIPTTSLRTLTPLSLSTSTSLTTTTDLPSIPTDISSLPTPIHIISSSPSIQSTETSSLVGTTSPTMSTVRATLRSTENTPISSFSTSIVVTPETPTTQAPPVLMSATGTQTSPVPTTVTFGSMDSSTSTLHTLTPSTALSKIMSTSQFPIPSTHSSTLQTTPSIPSLQTSLTSTSEFTTESFTRGSTSTNAILTSFSTIIWSSTPTIIMSSSPSSASITPVFATTIHSVPSSPYIFSTENVGSASITAFPSLSSSSTTSTSPTSSSLTTALTEITPFSYISLPSTTPCPGTITITIVPASPTDPCVEMDPSTEATSPPTTPLTVFPFTTEMVTCPSSISMQTTLATHMDTSSMTPESESSIIPNASSSTGTGTVPTNTVFTSTRLPTSETWLSNNSVIPTPLPGVSTIPLTMKPSSSLPTILRTSSKSTHPSPPTARTSQTSVATTQTPTTLTTCRTTPITSWMTTQSTLTTTAGTCDNGGTWEQGQCACLPGFSGDRCQLQTRCQNGGQWDGLKCQCPSTFYGSSCEFAVEQVDLDVVETEVGMEVSVDQQFSPDLNDNTSQAYRDFNKTFWNQMQKIFADMQGFTFKGVEILSLRNGSIVVDYLVLLEMPFSPQLESEYEQVKTTLKEGLQNASQDANSCQDSQALCFKPDSIKVNNNSKTELTPEAICRRAAPTGYEEFYFPLVEATRLRCVTKCTSGLDNAIDCHQGQCVLETSGPACRCYSTDTHWFSGPRCEVTVHWRA

SEQ ID NO: 2754 - protein, 2125 aa, synthetic construct
  REGION 1..2125: note = MUC4 (Q99102) SP+PP+ECD
MKGARWRRVPWVSLSCLCLCLLPHVVPGTTEDTLITGSKTAAPVTSTGSTTATLEGQSTAASSRTSNQDISASSQNHQTKSTETTSKAQTDTLTQMMTSTLFSSPSVHNVMETVTQETAPPDEMTTSFPSSVTNTLMMTSKTITMTTSTDSTLGNTEETSTAGTESSTPVTSAVSITAGQEGQSRTTSWRTSIQDTSASSQNHWTRSTQTTRESQTSTLTHRTTSTPSFSPSVHNVTGTVSQKTSPSGETATSSLCSVTNTSMMTSEKITVTTSTGSTLGNPGETSSVPVTGSLMPVTSAALVTVDPEGQSPATFSRTSTQDTTAFSKNHQTQSVETTRVSQINTLNTLTPVTTSTVLSSPSGFNPSGTVSQETFPSGETTISSPSSVSNTFLVTSKVFRMPISRDSTLGNTEETSLSVSGTISAITSKVSTIWWSDTLSTALSPSSLPPKISTAFHTQQSEGAETTGRPHERSSFSPGVSQEIFTLHETTTWPSSFSSKGHTTWSQTELPSTSTGAATRLVTGNPSTRAAGTIPRVPSKVSAIGEPGEPTTYSSHSTTLPKTTGAGAQTQWTQETGTTGEALLSSPSYSVIQMIKTATSPSSSPMLDRHTSQQITTAPSTNHSTIHSTSTSPQESPAVSQRGHTRAPQTTQESQTTRSVSPMTDTKTVTTPGSSFTASGHSPSEIVPQDAPTISAATTFAPAPTGNGHTTQAPTTALQAAPSSHDATLGPSGGTSLSKTGALTLANSVVSTPGGPEGQWTSASASTSPDTAAAMTHTHQAESTEASGQTQTSEPASSGSRTTSAGTATPSSSGASGTTPSGSEGISTSGETTRFSSNPSRDSHTTQSTTELLSASASHGAIPVSTGMASSIVPGTFHPTLSEASTAGRPTGQSSPTSPSASPQETAAISRMAQTQRTGTSRGSDTISLASQATDTFSTVPPTPPSITSSGLTSPQTQTHTLSPSGSGKTFTTALISNATPLPVTSTSSASTGHATPLAVSSATSASTVSSDSPLKMETSGMTTPSLKTDGGRRTATSPPPTTSQTIISTIPSTAMHTRSTAAPIPILPERGVSLFPYGAGAGDLEFVRRTVDFTSPLFKPATGFPLGSSLRDSLYFTDNGQIIFPESDYQIFSYPNPLPTGFTGRDPVALVAPFWDDADFSTGRGTTFYQEYETFYGEHSLLVQQAESWIRKMTNNGGYKARWALKVTWVNAHAYPAQWTLGSNTYQAILSTDGSRSYALFLYQSGGMQWDVAQRSGNPVLMGFSSGDGYFENSPLMSQPVWERYRPDRFLNSNSGLQGLQFYRLHREERPNYRLECLQWLKSQPRWPSWGWNQVSCPCSWQQGRRDLRFQPVSIGRWGLGSRQLCSFTSWRGGVCCSYGPWGEFREGWHVQRPWQLAQELEPQSWCCRWNDKPYLCALYQQRRPHVGCATYRPPQPAWMFGDPHITTLDGVSYTFNGLGDFLLVGAQDGNSSFLLQGRTAQTGSAQATNFIAFAAQYRSSSLGPVTVQWLLEPHDAIRVLLDNQTVTFQPDHEDGGGQETFNATGVLLSRNGSEVSASFDGWATVSVIALSNILHASASLPPEYQNRTEGLLGVWNNNPEDDFRMPNGSTIPPGSPEEMLFHFGMTWQINGTGLLGKRNDQLPSNFTPVFYSQLQKNSSWAEHLISNCDGDSSCIYDTLALRNASIGLHTREVSKNYEQANATLNQYPPSINGGRVIEAYKGQTTLIQYTSNAEDANFTLRDSCTDLELFENGTLLWTPKSLEPFTLEILARSAKIGLASALQPRTVVCHCNAESQCLYNQTSRVGNSSLEVAGCKCDGGTFGRYCEGSEDACEEPCFPSVHCVPGKGCEACPPNLTGDGRHCAALGSSFLCQNQSCPVNYCYNQGHCYISQTLGCQPMCTCPPAFTDSRCFLAGNNFSPTVNLELPLRVIQLLLSEEENASMAEVNASVAYRLGTLDMRAFLRNSQVERIDSAAPASGSPIQHWMVISEFQYRPRGPVIDFLNNQLLAAVVEAFLYHVPRRSEEPRNDVVFQPISGEDVRDVTALNVSTLKAYFRCDGYKGYDLVYSPQSGFTCVSPCSRGYCDHGGQCQHLPSGPRCSCVSFSIYTAWGEHCEHLSMKLDA

SEQ ID NO: 2755 - protein, 495 aa, synthetic construct
  REGION 1..495: note = MUSK (O15146) SP+PP+ECD
MRELVNIPLVHILTLVAFSGTEKLPKAPVITTPLETVDALVEEVATFMCAVESYPQPEISWTRNKILIKLFDTRYSIRENGQLLTILSVEDSDDGIYCCTANNGVGGAVESCGALQVKMKPKITRPPINVKIIEGLKAVLPCTTMGNPKPSVSWIKGDSPLRENSRIAVLESGSLRIHNVQKEDAGQYRCVAKNSLGTAYSKVVKLEVEVFARILRAPESHNVTFGSFVTLHCTATGIPVPTITWIENGNAVSSGSIQESVKDRVIDSRLQLFITKPGLYTCIATNKHGEKFSTAKAAATISIAEWSKPQKDNKGYCAQYRGEVCNAVLAKDALVFLNTSYADPEEAQELLVHTAWNELKVVSPVCRPAAEALLCNHIFQECSPGVVPTPIPICREYCLAVKELFCAKEWLVMEEKTHRGLYRSEMHLLSVPECSKLPSMHWDPTACARLPHLDYNKENLKTFPPMTSSKPSVDIPNLPSSSSSSFSVSPTYSMT

SEQ ID NO: 2756 - protein, 341 aa, synthetic construct
  REGION 1..341: note = MXRA8 (Q9BRK3) SP+PP+ECD
MALPSRILLWKLVLLQSSAVLLHSGSSVPAAAGSSVVSESAVSWEAGARAVLRCQSPRMVWTQDRLHDRQRVLHWDLRGPGGGPARRLLDLYSAGEQRVYEARDRGRLELSASAFDDGNFSLLIRAVEETDAGLYTCNLHHHYCHLYESLAVRLEVTDGPPATPAYWDGEKEVLAVARGAPALLTCVNRGHVWTDRHVEEAQQVVHWDRQPPGVPHDRADRLLDLYASGERRAYGPLFLRDRVAVGADAFERGDFSLRIEPLEVADEGTYSCHLHHHYCGLHERRVFHLTVAEPHAEPPPRGSPGNGSSHSGAPGPDPTLARGHNVINVIVPESRAHFFQQ

SEQ ID NO: 2757 - protein, 448 aa, synthetic construct
  REGION 1..448: note = NAGPA (Q9UK23) SP+PP+ECD
MATSTGRWLLLRLALFGFLWEASGGLDSGASRDDDLLLPYPRARARLPRDCTRVRAGNREHESWPPPPATPGAGGLAVRTFVSHFRDRAVAGHLTRAVEPLRTFSVLEPGGPGGCAARRRATVEETARAADCRVAQNGGFFRMNSGECLGNVVSDERRVSSSGGLQNAQFGIRRDGTLVTGYLSEEEVLDTENPFVQLLSGVVWLIRNGSIYINESQATECDETQETGSFSKFVNVISARTAIGHDRKGQLVLFHADGQTEQRGINLWEMAEFLLKQDVVNAINLDGGGSATFVLNGTLASYPSDHCQDNMWRCPRQVSTVVCVHEPRCQPPDCHGHGTCVDGHCQCTGHFWRGPGCDELDCGPSNCSQHGLCTETGCRCDAGWTGSNCSEECPLGWHGPGCQRPCKCEHHCPCDPKTGNCSVSRVKQCLQPPEATLRAGELSFFTRT

SEQ ID NO: 2758 - protein, 718 aa, synthetic construct
  REGION 1..718: note = NCAM1 (P13591) SP+PP+ECD
MLQTKDLIWTLFFLGTAVSLQVDIVPSQGEISVGESKFFLCQVAGDAKDKDISWFSPNGEKLTPNQQRISVVWNDDSSSTLTIYNANIDDAGIYKCVVTGEDGSESEATVNVKIFQKLMFKNAPTPQEFREGEDAVIVCDVVSSLPPTIIWKHKGRDVILKKDVRFIVLSNNYLQIRGIKKTDEGTYRCEGRILARGEINFKDIQVIVNVPPTIQARQNIVNATANLGQSVTLVCDAEGFPEPTMSWTKDGEQIEQEEDDEKYIFSDDSSQLTIKKVDKNDEAEYICIAENKAGEQDATIHLKVFAKPKITYVENQTAMELEEQVTLTCEASGDPIPSITWRTSTRNISSEEKASWTRPEKQETLDGHMVVRSHARVSSLTLKSIQYTDAGEYICTASNTIGQDSQSMYLEVQYAPKLQGPVAVYTWEGNQVNITCEVFAYPSATISWFRDGQLLPSSNYSNIKIYNTPSASYLEVTPDSENDFGNYNCTAVNRIGQESLEFILVQADTPSSPSIDQVEPYSSTAQVQFDEPEATGGVPILKYKAEWRAVGEEVWHSKWYDAKEASMEGIVTIVGLKPETTYAVRLAALNGKGLGEISAASEFKTQPVQGEPSAPKLEGQMGEDGNSIKVNLIKQDDGGSPIRHYLVRYRALSSEWKPEIRLPSGSDHVMLKSLDWNAEYEVYVVAENQQGKSKAAHFVFRTSAQPTAIPANGSPTSG

SEQ ID NO: 2759 - protein, 697 aa, synthetic construct
  REGION 1..697: note = NCAM2 (O15394) SP+PP+ECD
MSLLLSFYLLGLLVSSGQALLQVTISLSKVELSVGESKFFTCTAIGEPESIDWYNPQGEKIISTQRVVVQKEGVRSRLTIYNANIEDAGIYRCQATDAKGQTQEATVVLEIYQKLTFREVVSPQEFKQGEDAEVVCRVSSSPAPAVSWLYHNEEVTTISDNRFAMLANNNLQILNINKSDEGIYRCEGRVEARGEIDFRDIIVIVNVPPAISMPQKSFNATAERGEEMTFSCRASGSPEPAISWFRNGKLIEENEKYILKGSNTELTVRNIINSDGGPYVCRATNKAGEDEKQAFLQVFVQPHIIQLKNETTYENGQVTLVCDAEGEPIPEITWKRAVDGFTFTEGDKSLDGRIEVKGQHGSSSLHIKDVKLSDSGRYDCEAASRIGGHQKSMYLDIEYAPKFISNQTIYYSWEGNPINISCDVKSNPPASIHWRRDKLVLPAKNTTNLKTYSTGRKMILEIAPTSDNDFGRYNCTATNHIGTRFQEYILALADVPSSPYGVKIIELSQTTAKVSFNKPDSHGGVPIHHYQVDVKEVASEIWKIVRSHGVQTMVVLNNLEPNTTYEIRVAAVNGKGQGDYSKIEIFQTLPVREPSPPSIHGQPSSGKSFKLSITKQDDGGAPILEYIVKYRSKDKEDQWLEKKVQGNKDHIILEHLQWTMGYEVQITAANRLGYSEPTVYEFSMPPKPNIIKDTLFN

SEQ ID NO: 2760 - protein, 258 aa, synthetic construct
  REGION 1..258: note = NCR1 (O76036) SP+PP+ECD
MSSTLPALLCVGLCLSQRISAQQQTLPKPFIWAEPHFMVPKEKQVTICCQGNYGAVEYQLHFEGSLFAVDRPKPPERINKVKFYIPDMNSRMAGQYSCIYRVGELWSEPSNLLDLVVTEMYDTPTLSVHPGPEVISGEKVTFYCRLDTATSMFLLLKEGRSSHVQRGYGKVQAEFPLGPVTTAHRGTYRCFGSYNNHAWSFPSEPVKLLVTGDIENTSLAPEDPTFPADTWGTYLLTTETGLQKDHALWDHTAQNLLR

SEQ ID NO: 2761 - protein, 192 aa, synthetic construct
  REGION 1..192: note = NCR2 (O95944) SP+PP+ECD
MAWRALHPLLLLLLLFPGSQAQSKAQVLQSVAGQTLTVRCQYPPTGSLYEKKGWCKEASALVCIRLVTSSKPRTMAWTSRFTIWDDPDAGFFTVTMTDLREEDSGHYWCRIYRPSDNSVSKSVRFYLVVSPASASTQTSWTPRDLVSSQTQTQSCVPPTAGARQAPESPSTIPVPSQPQNSTLRPGPAAPIA

SEQ ID NO: 2762 - protein, 135 aa, synthetic construct
  REGION 1..135: note = NCR3 (O14931) SP+PP+ECD
MAWMLLLILIMVHPGSCALWVSQPPEIRTLEGSSAFLPCSFNASQGRLAIGSVTWFRDEVVPGKEVRNGTPEFRGRLAPLASSRFLHDHQAELHIRDVRGHDASIYVCRVEVLGLGVGTGNGTRLVVEKEHPQLG

SEQ ID NO: 2763 - protein, 262 aa, synthetic construct
  REGION 1..262: note = NCR3LG1 (Q68D85) SP+PP+ECD
MTWRAAASTCAALLILLWALTTEGDLKVEMMAGGTQITPLNDNVTIFCNIFYSQPLNITSMGITWFWKSLTFDKEVKVFEFFGDHQEAFRPGAIVSPWRLKSGDASLRLPGIQLEEAGEYRCEVVVTPLKAQGTVQLEVVASPASRLLLDQVGMKENEDKYMCESSGFYPEAINITWEKQTQKFPHPIEISEDVITGPTIKNMDGTFNVTSCLKLNSSQEDPGTVYQCVVRHASLHTPLRSNFTLTAARHSLSETEKTDNFS

SEQ ID NO: 2764 - protein, 669 aa, synthetic construct
  REGION 1..669: note = NCSTN (Q92542) SP+PP+ECD
MATAGGGSGADPGSRGLLRLLSFCVLLAGLCRGNSVERKIYIPLNKTAPCVRLLNATHQIGCQSSISGDTGVIHVVEKEEDLQWVLTDGPNPPYMVLLESKHFTRDLMEKLKGRTSRIAGLAVSLTKPSPASGFSPSVQCPNDGFGVYSNSYGPEFAHCREIQWNSLGNGLAYEDFSFPIFLLEDENETKVIKQCYQDHNLSQNGSAPTFPLCAMQLFSHMHAVISTATCMRRSSIQSTFSINPEIVCDPLSDYNVWSMLKPINTTGTLKPDDRVVVAATRLDSRSFFWNVAPGAESAVASFVTQLAAAEALQKAPDVTTLPRNVMFVFFQGETFDYIGSSRMVYDMEKGKFPVQLENVDSFVELGQVALRTSLELWMHTDPVSQKNESVRNQVEDLLATLEKSGAGVPAVILRRPNQSQPLPPSSLQRFLRARNISGVVLADHSGAFHNKYYQSIYDTAENINVSYPEWLSPEEDLNFVTDTAKALADVATVLGRALYELAGGTNFSDTVQADPQTVTRLLYGFLIKANNSWFQSILRQDLRSYLGDGPLQHYIAVSSPTNTTYVVQYALANLTGTVVNLTREQCQDPSKVPSENKDLYEYSWVQGPLHSNETDRLPRCVRSTARLARALSPAFELSQWSSTEYSTWTESRWKDIRARIFLIASKELE

SEQ ID NO: 2765 - protein, 1105 aa, synthetic construct
  REGION 1..1105: note = NEO1 (Q92859) SP+PP+ECD
MAAERGARRLLSTPSFWLYCLLLLGRRAPGAAAARSGSAPQSPGASIRTFTPFYFLVEPVDTLSVRGSSVILNCSAYSEPSPKIEWKKDGTFLNLVSDDRRQLLPDGSLFISNVVHSKHNKPDEGYYQCVATVESLGTIISRTAKLIVAGLPRFTSQPEPSSVYAGNNAILNCEVNADLVPFVRWEQNRQPLLLDDRVIKLPSGMLVISNATEGDGGLYRCVVESGGPPKYSDEVELKVLPDPEVISDLVFLKQPSPLVRVIGQDVVLPCVASGLPTPTIKWMKNEEALDTESSERLVLLAGGSLEISDVTEDDAGTYFCIADNGNETIEAQAELTVQAQPEFLKQPTNIYAHESMDIVFECEVTGKPTPTVKWVKNGDMVIPSDYFKIVKEHNLQVLGLVKSDEGFYQCIAENDVGNAQAGAQLIILEHAPATTGPLPSAPRDVVASLVSTRFIKLTWRTPASDPHGDNLTYSVFYTKEGIARERVENTSHPGEMQVTIQNLMPATVYIFRVMAQNKHGSGESSAPLRVETQPEVQLPGPAPNLRAYAASPTSITVTWETPVSGNGEIQNYKLYYMEKGTDKEQDVDVSSHSYTINGLKKYTEYSFRVVAYNKHGPGVSTPDVAVRTLSDVPSAAPQNLSLEVRNSKSIMIHWQPPAPATQNGQITGYKIRYRKASRKSDVTETLVSGTQLSQLIEGLDRGTEYNFRVAALTINGTGPATDWLSAETFESDLDETRVPEVPSSLHVRPLVTSIVVSWTPPENQNIVVRGYAIGYGIGSPHAQTIKVDYKQRYYTIENLDPSSHYVITLKAFNNVGEGIPLYESAVTRPHTDTSEVDLFVINAPYTPVPDPTPMMPPVGVQASILSHDTIRITWADNSLPKHQKITDSRYYTVRWKTNIPANTKYKNANATTLSYLVTGLKPNTLYEFSVMVTKGRRSSTWSMTAHGTTFELVPTSPPKDVTVVSKEGKPKTIIVNWQPPSEANGKITGYIIYYSTDVNAEIHDWVIEPVVGNRLTHQIQELTLDTPYYFKIQARNSKGMGPMSEAVQFRTPKADSSDKMPNDQASGSGGKGSRLPDLGSDYKPPMSGSNSPHGSPTSPLDSNML

SEQ ID NO: 2766 - protein, 344 aa, synthetic construct
  REGION 1..344: note = NETO1 (Q8TDF5) SP+PP+ECD
MIHGRSVLHIVASLIILHLSGATKKGTEKQTTSETQKSVQCGTWTKHAEGGIFTSPNYPSKYPPDRECIYIIEAAPRQCIELYFDEKYSIEPSWECKFDHIEVRDGPFGFSPIIGRFCGQQNPPVIKSSGRFLWIKFFADGELESMGFSARYNFTPDPDFKDLGALKPLPACEFEMGGSEGIVESIQIMKEGKATASEAVDCKWYIRAPPRSKIYLRFLDYEMQNSNECKRNFVAVYDGSSSVEDLKAKFCSTVANDVMLRTGLGVIRMWADEGSRNSRFQMLFTSFQEPPCEGNTFFCHSNMCINNTLVCNGLQNCVYPWDENHCKEKRKTSLLDQLTNTSGT

SEQ ID NO: 2767 - protein, 347 aa, synthetic construct
  REGION 1..347: note = NETO2 (Q8NC67) SP+PP+ECD
MALERLCSVLKVLLITVLVVEGIAVAQKTQDGQNIGIKHIPATQCGIWVRTSNGGHFASPNYPDSYPPNKECIYILEAAPRQRIELTFDEHYYIEPSFECRFDHLEVRDGPFGFSPLIDRYCGVKSPPLIRSTGRFMWIKFSSDEELEGLGFRAKYSFIPDPDFTYLGGILNPIPDCQFELSGADGIVRSSQVEQEEKTKPGQAVDCIWTIKATPKAKIYLRFLDYQMEHSNECKRNFVAVYDGSSSIENLKAKFCSTVANDVMLKTGIGVIRMWADEGSRLSRFRMLFTSFVEPPCTSSTFFCHSNMCINNSLVCNGVQNCAYPWDENHCKEKKKAGVFEQITKTH

SEQ ID NO: 2768 - protein, 163 aa, synthetic construct
  REGION 1..163: note = NFAM1 (Q8NET5) SP+PP+ECD
MENQPVRWRALPGLPRPPGLPAAPWLLLGVLLLPGTLRLAGGQSVTHTGLPIMASLANTAISFSCRITYPYTPQFKVFTVSYFHEDLQGQRSPKKPTNCHPGLGTENQSHTLDCQVTLVLPGASATGTYYCSVHWPHSTVRGSGTFILVRDAGYREPPQSPQK

SEQ ID NO: 2769 - protein, 1217 aa, synthetic construct
  REGION 1..1217: note = NFASC (O94856) SP+PP+ECD
MARQPPPPWVHAAFLLCLLSLGGAIEIPMDPSIQNELTQPPTITKQSAKDHIVDPRDNILIECEAKGNPAPSFHWTRNSRFFNIAKDPRVSMRRRSGTLVIDFRSGGRPEEYEGEYQCFARNKFGTALSNRIRLQVSKSPLWPKENLDPVVVQEGAPLTLQCNPPPGLPSPVIFWMSSSMEPITQDKRVSQGHNGDLYFSNVMLQDMQTDYSCNARFHFTHTIQQKNPFTLKVLTTRGVAERTPSFMYPQGTASSQMVLRGMDLLLECIASGVPTPDIAWYKKGGDLPSDKAKFENFNKALRITNVSEEDSGEYFCLASNKMGSIRHTISVRVKAAPYWLDEPKNLILAPGEDGRLVCRANGNPKPTVQWMVNGEPLQSAPPNPNREVAGDTIIFRDTQISSRAVYQCNTSNEHGYLLANAFVSVLDVPPRMLSPRNQLIRVILYNRTRLDCPFFGSPIPTLRWFKNGQGSNLDGGNYHVYENGSLEIKMIRKEDQGIYTCVATNILGKAENQVRLEVKDPTRIYRMPEDQVARRGTTVQLECRVKHDPSLKLTVSWLKDDEPLYIGNRMKKEDDSLTIFGVAERDQGSYTCVASTELDQDLAKAYLTVLADQATPTNRLAALPKGRPDRPRDLELTDLAERSVRLTWIPGDANNSPITDYVVQFEEDQFQPGVWHDHSKYPGSVNSAVLRLSPYVNYQFRVIAINEVGSSHPSLPSERYRTSGAPPESNPGDVKGEGTRKNNMEITWTPMNATSAFGPNLRYIVKWRRRETREAWNNVTVWGSRYVVGQTPVYVPYEIRVQAENDFGKGPEPESVIGYSGEDYPRAAPTEVKVRVMNSTAISLQWNRVYSDTVQGQLREYRAYYWRESSLLKNLWVSQKRQQASFPGDRLRGVVSRLFPYSNYKLEMVVVNGRGDGPRSETKEFTTPEGVPSAPRRFRVRQPNLETINLEWDHPEHPNGIMIGYTLKYVAFNGTKVGKQIVENFSPNQTKFTVQRTDPVSRYRFTLSARTQVGSGEAVTEESPAPPNEATPTAAPPTLPPTTVGATGAVSSTDATAIAATTEATTVPIIPTVAPTTIATTTTVATTTTTTAAATTTTESPPTTTSGTKIHESAPDEQSIWNVTVLPNSKWANITWKHNFGPGTDFVVEYIDSNHTKKTVPVKAQAQPIQLTDLYPGMTYTLRVYSRDNEGISSTVITFMTSTAYTNNQADIATQGW

SEQ ID NO: 2770 - protein, 250 aa, synthetic construct
  REGION 1..250: note = NGFR (P08138) SP+PP+ECD
MGAGATGRAMDGPRLLLLLLLGVSLGGAKEACPTGLYTHSGECCKACNLGEGVAQPCGANQTVCEPCLDSVTFSDVVSATEPCKPCTECVGLQSMSAPCVEADDAVCRCAYGYYQDETTGRCEACRVCEAGSGLVFSCQDKQNTVCEECPDGTYSDEANHVDPCLPCTVCEDTERQLRECTRWADAECEEIPGRWITRSTPPEGSDSTAPSTQEPEAPPEQDLIASTVAGVVTTVMGSSQPVVTRGTTDN

SEQ ID NO: 2771 - protein, 717 aa, synthetic construct
  REGION 1..717: note = NLGN1 (Q8N2Q7) SP+PP+ECD
MALPRCTWPNYVWRAVMACLVHRGLGAPLTLCMLGCLLQAGHVLSQKLDDVDPLVATNFGKIRGIKKELNNEILGPVIQFLGVPYAAPPTGERRFQPPEPPSPWSDIRNATQFAPVCPQNIIDGRLPEVMLPVWFTNNLDVVSSYVQDQSEDCLYLNIYVPTEDVKRISKECARKPGKKICRKGGPLTKKQTDDLGDNDGAEDEDIRDSGGPKPVMVYIHGGSYMEGTGNLYDGSVLASYGNVIVITVNYRLGVLGFLSTGDQAAKGNYGLLDLIQALRWTSENIGFFGGDPLRITVFGSGAGGSCVNLLTLSHYSEGNRWSNSTKGLFQRAIAQSGTALSSWAVSFQPAKYARMLATKVGCNVSDTVELVECLQKKPYKELVDQDIQPARYHIAFGPVIDGDVIPDDPQILMEQGEFLNYDIMLGVNQGEGLKFVENIVDSDDGISASDFDFAVSNFVDNLYGYPEGKDVLRETIKFMYTDWADRHNPETRRKTLLALFTDHQWVAPAVATADLHSNFGSPTYFYAFYHHCQTDQVPAWADAAHGDEVPYVLGIPMIGPTELFPCNFSKNDVMLSAVVMTYWTNFAKTGDPNQPVPQDTKFIHTKPNRFEEVAWTRYSQKDQLYLHIGLKPRVKEHYRANKVNLWLELVPHLHNLNDISQYTSTTTKVPSTDITFRPTRKNSVPVTSAFPTAKQDDPKQQPSPFSVDQRDYSTELS

SEQ ID NO: 2772 - protein, 677 aa, synthetic construct
  REGION 1..677: note = NLGN2 (Q8NFZ4) SP+PP+ECD
MWLLALCLVGLAGAQRGGGGPGGGAPGGPGLGLGSLGEERFPVVNTAYGRVRGVRRELNNEILGPVVQFLGVPYATPPLGARRFQPPEAPASWPGVRNATTLPPACPQNLHGALPAIMLPVWFTDNLEAAATYVQNQSEDCLYLNLYVPTEDGPLTKKRDEATLNPPDTDIRDPGKKPVMLFLHGGSYMEGTGNMFDGSVLAAYGNVIVATLNYRLGVLGFLSTGDQAAKGNYGLLDQIQALRWLSENIAHFGGDPERITIFGSGAGASCVNLLILSHHSEGLFQKAIAQSGTAISSWSVNYQPLKYTRLLAAKVGCDREDSAEAVECLRRKPSRELVDQDVQPARYHIAFGPVVDGDVVPDDPEILMQQGEFLNYDMLIGVNQGEGLKFVEDSAESEDGVSASAFDFTVSNFVDNLYGYPEGKDVLRETIKFMYTDWADRDNGEMRRKTLLALFTDHQWVAPAVATAKLHADYQSPVYFYTFYHHCQAEGRPEWADAAHGDELPYVFGVPMVGATDLFPCNFSKNDVMLSAVVMTYWTNFAKTGDPNQPVPQDTKFIHTKPNRFEEVVWSKFNSKEKQYLHIGLKPRVRDNYRANKVAFWLELVPHLHNLHTELFTTTTRLPPYATRWPPRPPAGAPGTRRPPPPATLPPEPEPEPGPRAYDRFPGDSRDYSTELS

(The sequence listing continues in the following parts.)
